United States Patent Application Publication US 2015/0376612 A1 - sequence listing, part 39

SEQ ID NO: 93428 - DNA, 1027 bp, Homo sapiens
ctgaggaatttgtgtgtaattcagcaagaaatagagagccaggagacttctgcaaaggggtgaggtaccatgatccgagctgtggcctaagactctccattagacaaacagaattcggaatattagagtgatcaggaatggagaattaaatatcgactacaattgtccataccttttctgaggcttagtttttcttccgggttcttgatggtggtgatgatgttactgactgatgaggtggtgagcggaggctgaaaccccaccagtgctccactcacccagctgctcttctggccaagtcttgtgtctttccttcggcacattcctctatccagaggaaggggcatctgtttgtcgcctatcttccaggggtgacatcttttataaattgcacaaagattctttatatgcctgcagcagccttgattaaatggcagcactaggatttgaccccagtcctacctaactacgaacgctgtgtgattttgccagtgtttactactcttacaacattatttgccactactcttacaagtccttgccagtgtttagtaccattacaacaactactccccctactattgctgctgctattatgaaggaggagagggaaagaatagcatctgacattctttgagtgctggctgtgtgccaagcacagtattcagttatttacatgcattatttcatttaatcatcacagtctccctgtgaggtaggtactgttactatgttgccaagtgacagaataggaattgaagccagtcgttcagactccaagtctgaggacttaaccactacactagtatcttccctgaatacttaaggatgaaatatcttagaaaacaaaactgctgctctattagaagtcacataaaactacaaaaattatttaaagcaacaaacttgaggccaggtgcagtggctcacacctgtaatcccagcactttgggaggccaaggtgggagaattgcttgagctcaggagttcaagaccagcctgggcaacatagcaagacctcgtctct

SEQ ID NO: 93429 - DNA, 1064 bp, Homo sapiens
gtagccccactcatgttttactctcctgtttctgagccaaaaggaccatgatcttgactaagctctctcagagacacctgaatccaaagtaatgctaattttgaaatcaatgacattaacctctaaaagctttgatggtgcccagaattatttaatagaatcttcactaaattttccacttctctcttaattttcttctaattaaactttattttcttcaaataacagcatcatgataagttaaaagctttgacttaatttttgtttaattgccatattttaaaagaacttatttctattattttctcagtgcaaatgtacagtatttctgccactttatgaatttttaagaagttttcatgtgttgtcctaagaacctagcctcctttacaatattatttctagaggaaaatgcattctgtaaactcctaacaaataagccaactctagtgactccttttgttggtaaattgggtacttcttgtactaaatgttccaactggtagaggattgcaatttttgcaggtattttagagaaccaaaccagcctgtaattgcagtatttagttcatcttccttggaatgaaaaccatctaattagagttgccatgacaactctgttttcatgcagtataacagacctattgatctgaagttcaggttgatggagcatgtgtacgtgttagtgacagaagccaacatccaatatcgtacagagtgttggctccatttccctcctagcttattttctaccttatgcactcacaagtatttattaagcacctactgtgtagagagctcagagaagcccatgaaatattcaccataagaagaaagaaacagttataaaaccctatcgtggatgtagaataaaaccccagtaacttaccctctccttcataatctggccttttcctggacatttgactctttcttctcccacctccccgatacccaccactttggccacactggcccctttctgtgtttcaaacacttcagcctcatttccacctcagggcttttgtacttcacattcgctctgccagaaggtcatttctcca

SEQ ID NO: 93430 - DNA, 1044 bp, Homo sapiens
ctttattttttaaatccggaacagtttcttaatctttatctttcttgaccttgacatttttgaagagtacatatcagtcatcttgttccttaatttgggttcatttgatgcttcctcataatcggatttatatgtgtgacatgatgtgtctgtcctgagtataacatatcaaaagtcacatgatgtcagtttgtcccgggattggtgatgttgactttgatcacctggttaagtggtgtctctgtggtttctgcactctaatgttactagttttctctttaataagaactccgtggagtgatgtgttgagactatgtaaatgtcttcctcagactttcacccactagttttgacagccattgatgattcttcagctgcatctttcttactacgtttattagttggctttctactgtaaagaagagctttcctcatttatttatttatccattaacatatgtgtttcagaggggatttattgattctgttttattcaatgggacacacaccattactgtcattattttgctgcataaacaaagcctcatttcatcatgtttccatcaaaaaacagttgtattttgaatgctatattagatttctactgttgctgtaacaaattaccacaaatttagcagcttaaacccatgccaattgattatcttacacttctgtagaacagaagtccagtgcagagctcctgcggctacagtcaaggtgccagtgggccgcattcctttctggagactctagtggagaatctgtttccttactctttcaggttgttcagagagttcagtcccttgcagtcacagaactgagatctggtcctttgcggaggtcagttgagcttctagaggctgctgtccttatttggctcatagcccccttcctccttcaagccagcaatggcaagtccagtccctctcatgcttcaagtttttcctgcctcttcttctgtcatcatatttctctgactcactcctctgttttcctcttctacttttaaggactcgtgtgtctagatggattgagagcccaacc

SEQ ID NO: 93431 - DNA, 1182 bp, Homo sapiens
ggactttggtgagaaaaatcagggccggtgagaaaaaatgatactggatgagttgtggctcagtgctgctgtttcctgaattttgtccctcacttgtctcagcacctgggcctgtttctgacgacgtgctttcactagctagtcactatttcttcttcattttgtaccaaacaagtttgtgtggtaagattggatcttttgatgttatacacaccagcaaaacgaactgattgtcgaagcccagctggtctgtggtgggaggcagtgtgtagcgcagcagcggaatgtgtgggttcagaaatcggatggcctggttcagtcctgtgtccgtcatttactggatgagttcttttgagtcagttacttaacctcccaagccttactgctatttgtacaatatatcaaccttacagggcttttgtaagggttaaataaagataaataaaagaagctcttaatataatgcctggctcatggaaaatgttcattatgtgttagctgctattgatgttcttctaaatagtagtagattttagatcaataacatagagttccatagtctttgggaattaaaaaagctcaacttcacaatcaaactgtgttcttatataccttagtgcctctctctctctctctccatctctatgtctgtctctatctctgtctctcgtattacaaaagtaatatgtgtcagttatagctttccaataccaaccaaaaaaaaaataaataaaacaaggatacaactgggtgtggtgggtcacacctgtaatcacagtactttgggaggccaaggcaggcagtctgcttaatcccaggagtttgagaccagcctgggcaacataggaagaccttgcttcaacaaaaaatacaaaaattagccaggtgtgatgcttgtagtcccagctacttaggacgctgaggtaggaggatcacttgagccccagaggtcaaggctgcagtgagctgtgatggtgccactgcactctggtctgggtgacagaggaagaccctgtcaaaaaaaagaacaactatacaaaatgcaacgtgatcatgtgtcttactgtaatactcccttcctctgcaagatgatctcgtcgattcccaagtgggaagtgaagtaaaaaactcctcacttggatttccctcagttaacctaggtgtctctcctttcaccaccgc

SEQ ID NO: 93432 - DNA, 1044 bp, Homo sapiens
gaaactactgggttaaataaagggtgaaatgacgtcctttaaaaaataaactctcagttaaaactatctttcgtagtgcctaaagtgctttgcacctgttgaggctcaccccagacagccaaccaagtcattcagaatcagacctgccagagtgtctggtccatcacatttgagatcaaatgaatctgattgtttggtggttggggtgggagagtactgaggtatgaacaaaattaagaggagttcctgcttgctgctgtgtgggaaattgtaaacggagatgagccgtacatcacagtgtctactttggtgacggtctgaagcctctaggagcccctcatcatttgggatgctggcctggctccctgatagccagacctactgtttcttcccatccctgtagtcttccatgattaaaatccccctcctctcagggaggtaacatatttcagcagaaacagcctgaactccggtgacaggcaaacctgtgttcagatcttggttttacctatgtctagttgtgtgaacctaggcagtattttctgttctctgagcctcgtttttttcacatgtaaaattacagcgatacttcccacctctttgaactatggagagcatttaattagataatgtgataaagcacctagcaacatgtgttagttcttggtagtgaccgaagcagggtgcggaaacatgggcctggcagcagaacacctggcctttggatctcttcacacctctgcttttctccatcattacaggtaatttttgtctaacggctgtatttcggaatgacacaatccaagcagagagagggagagggtttcaagtttaaaggattactcagactgttttccttccatgtatataatttaatgactgattaaagacttctcttgtaatattttatataagtcaaagcctattactgtcaactccagggaagcatccagcttattttctttttcagaattttattatgccaaggattgtttctctaagtgagcgatgagtagcttggatcttgccattctgtatgttata

SEQ ID NO: 93433 - DNA, 1076 bp, Homo sapiens
atgtacgccttaaagttctgaacaatttcttttaataattgtgtgctggttcatttaaactgaaaaaaagaatttctttttttttttctttttttcttttttcttttttttttgagaccgagtctcactgtatcgcccgtgctggagtgcagtggtgtgatcttggctcactgcaatctccgcctcccaggttcaagcaattctcatgcctcagcctcctgagtagctgggattacaggtgcccaccaccacacacccagctaatctttgtatttttagtagagacagggtttcatcatgttagccaggctggtctcaaactcctgacctcaagtgatcctcctgccttggcctcccaaagtgctgggattacaggcgtgagccaccatgcctggcctgaaagaaggaatttctgaaagttgtggaaattatttcagaatcaacattgtgtcttagtgcttggatcagtgattattgactgcagcttcttgtataccttttgaaatacaagataatggccgataagctgtagaactagagtgttgcagcaattcattttagttcagtttcaatgtttaatgaataacttatctgtgcccagcaaagaattgggcataatgaagagtataaaaatatgtttcagtaatacttacagcccattaatgttggtaagacatttacccatgccaatcaaaattttctaatttgtactgttgtgtgttatcaatgatgtataatgcaaacatgctaatttatttaaatgaattaaaatacagaaatgtaatcataaagtgaagcccatatacccatcatcattaacctaggcagttggtggccagactttgatgagagaagccaagtctgcttgggggtgtcacttcttaagttgcttgagccctaagagaagtgtccattgtactcttgtcctttcagtgcacttggaggctcctcagctcttcatatcccagcttttccaggaggaggatgtctcattgattacgttcctcaagtatgccacctgctcaccaacaaggtaaaagcaagtccccaactcatccctcttatgagatttcttc

SEQ ID NO: 93434 - DNA, 1101 bp, Homo sapiens
aggggacgtttggcaatgcctggagacatttttgattgttatgactgagggggtggggatttgctactggcatctaatgggtagaggtcagtgatgcagctaaacatcctacaatgcacatgacagcccctcacacacacacacaaaaaattattgaatgcaaaatctcagtattgccaagctagagaaaccttaccctaaacagattctgtttctaattatctttccagtatcaggcctcaagacttttggtattattggaaacatacctgctgtgatcatttggttatcatccttattcaatgaaaagtctacaactttgataaaatgtaatacataacttaaagatggggtaatgttttaatgtatccccaacatcatttcttcatgttcttctgcgtagtaggcatacctaatggtggttgtcacatattaatccatcagtctgtaaacatcgacccagctttctcttgatagataatttagagtctttttatttcctgattatgtaagaaccagtgacccatggagtcaggttcaagttgcaagtcaactgagaccttcattctgcagtaatttggtacgtacaatgttcagtcttcaggccaaggcaaaggagccaactttcccagcttgagttagagaaaagcagtgggtttgaattgacttcactcaaacccatggcttttagaacttaccctatgccttaataaactactgcaggaggaataactttggctgtatttagccaaggcatcagacagtgtaaagatactgactttaagggatttttcttctgcagcagatttaccttcttcgttatgatttgctttggttaaaatagttcttaagttcatttttctatctgattacacaccaatagatagtaagggcagaaaccaaaaaaacatccatagtggcagaaagaagaaaacgtctaagtaaaaccttatcatggtaaaattcatatagagatgatcgagcgcaggccacagttttaaggagatgggcctctctgccttgaggtgttgcccaacaatcaccacttttcaaggtgtcaggcaccttgtcaccatcataacctacagtgtggggccaggt

SEQ ID NO: 93435 - DNA, 1048 bp, Homo sapiens
tcccaggttcaagcaattctcctgcctcagcctctcgagtagctgggattacaggcatgcgccaccatgcctggctaattttgtaattttagtagaaacggagtttctccgtgttggtcaggctggtctcaaactcccgacctcaggtgatccacctgcctcagcttcccaaagtgctgggattacaggcgtgagccaccgcgcctggtccactagtagcttttcagaatgcagcgtggcaagagaaccagatagcaaggcgaagtaacagaacaaaaaaaatcctctggggaaaagctacatgctttttttgtgggtcccagtcaactgcactgtaagtagacacacaaggaggcagctgtctacaggagcagagttgctgcttagaaggggagacaattgagtattgagatttgtgactgtatgacaagctgtctttttccattacctataaatctttggtaaatgaccctttgagtcattcagcctggactgtaggccttttctccctggtaaaattcctgttagaccaaatctgaccacttttttctcttgttttcctctacctccaacttaactgagttctgagtttactaagaacctactgcatgctcagtactatgcgaggtattaggggatataagtatataactcagagttgaccttaagatacttacagtaacatagcacagaaattagaaaactacagcctgtgggccaaatcccgtgtcagcctgtttttatagggcccttgagctaagtatagctttttgtttgtttgtttgcttgtttttttttttttttttggaaacagcgtctcactctgttgcccaggctggaatgcggtagtgtgatcttggctcactgcagcctccgccaccttgagttcaagcgtttcttctgcctcagcctcccgagtagctgggactacaggcatgtgccaccatgcccggctaatttttgtatttttagtagagaccgggtttcaccacgttacccaggctgatcttgaactcctggcctcaagcaatctacccgcctaggcctc

SEQ ID NO: 93436 - DNA, 1057 bp, Homo sapiens
tcactattttgactcaaattgaaacttctgtttcatctttagagtttacttccagaaagcctgttttgtaatttctgacactagtttgagaacttactggattaatcttcactgggaatattgtcttcattataataccttagaattacatgacccctttttagtgaccttaaaggatttcttttaaggaagaaggttgtaaatcacttgcacaatcatgcaatgaatttttcccctgtaccctcttatatatgttgtatgaatcttttcagttgtaattattggattaagtaattgccaaagcaagtgtttctgatcaaagaaaggtcttgaaaaattagcaattttgacttctcagtgatttttgacatgctgtcaaattaacaactgtaactcaagaagtcatcttacccagtgaaagaaaggaagctgtttacagagtaactcttatgttattgatgtagttcagtataaccttttcttagaattaatattaaagtactgttgacattggtgaagcatgggcattattatgttttggtgcagagcttctgctgttgttgaaaataatagcaataacagttcacaggtatggagtgaaggctgagtgcggtggctcatgcccgtaatcctagcactttgggtggccaaagcggatggatcacctgaggtcaggagttcaagacttggccaacatggtgaaaccctgcctctactaaaaaaaaaagaaaattagccaggtgtggtggcatgcgcctgtaatcccagctactcaggaggttgaggcatgagaattgcttgaacccaggaagtggaggttgcagtgagccaagatggcaccactgtactcaggcctgtgtgacagagcaagactttgtctcaaaaaaaaaaaaaaagtatggagtgtataccatgctctagacactgttctcagtactttgcatatgttatgttatttaatctgcagaacatctttctgaggttaattaccagaataacccattttacaaataacaaaactggcacagcaagattaaatgacagagctagtgtttaa

SEQ ID NO: 93437 - DNA, 1023 bp, Homo sapiens
gaccagggacctaaaaagacagtccaggcaaaagattagacctgaactagaggagtcatagtagggatagaggggaagaaaaatgtttaagaaacatattggaagtagaactggaaaaactgtgattgatcccaagtagaagatgagggacagagaagaaataggatgattcccaggtttcttttttaggcatctaggtagctgatgatgccatcatcttaggcaaggtttactttaggaggaacagagttggagatgttgagctccgttagggatataatgagttttaggagcctgtggacatccagttaaagaataaatgagagaacattcacatagaacaaaggtgtggtggaggctctcaccagcttaacctagagtccattccaacctgcaaactgctggttgtccccagtccagatgatgctgaactctttggcctggctgaactcttttgtccagtcacatgtcacactggacaggaagtggcttggaactcgaaaccttgttgatacacttttcctcccaaagaggtgatccaaattcctgagatggcccgacctaggatgtactgaaagaggctttgggcagtaacttctaaactgagaatgacttgtggctaaacttgaacccttgccttccagtagatgaaaggtgaagcaatttatctctcgaaagaaaaaatatggtatgattccacttatttgaggtaacagcaagacactgtctcaaaaaaaaaaaaaaaagaagaaaagaaaggaaggagaggaggagaggggaggggattattattattaataataataccattgttatgcataaataatataatttattgagtattcactatatgcaaagtactgtgctaaatactttacaataattccatataattctctcaacagccctgtgaggttgggctacttattatccccattttacaaaaagcacctccagatagtgtaacttgccagaagtcccatagctagtagctgaaggacagagcatttgaaccaagaccat

SEQ ID NO: 93438 - DNA, 1040 bp, Homo sapiens
gctcaagcttggtaattaccctcagctcatgacatttataccaatcagtaatgtttaattatcccagatgattactccgtcagttctaggcacatggtggaatgtagaggtggttcctaccttcaagagcattaactttcagttggcatgtgtggagagatgtggtagatacaaatacattttggaaggggaggggaaggagagttatgttggctggtagagaattgggagaattcttttgggaaagcatccaagaggaggtggttttaagattccactttggaggctgggaatgatgaagaggagacaaaagattccttctgggatttagaccagcttactgttcaaaaagcaacaatgaaggtctgtgaccataatatgttcagaacttcaattcaaaggacaaatagaaatcaaacacttatccatgaaaaagttgtaaaaactaaattaaatatcaagttttttgttttaggtttagaaatgtggttgctgggtgtaataatttggacatgtcatgggaaaatgatcctttaggcaaaatcctttaaaacttgtagctttgaggaggaaagtggagtagtgatggaaccccacataacaaaagggacagcctgttgcttaggcaaaggctgcaagataagaggaacgcgaactggctcaactcaaggattcagaccttggtgtaattcagaacagtcaaatgaaggtgacttcagacttctgtgaagctcacttttgctccaaagagtggtgggagcatagcagaaagtcaagaattggacagaactttttcagtttgactgaagactcagcggggctccacgtaaaccaacagttattgagcctgtcccatcccagaggtacaggataatgcaagatggtccctgctgtcaagctgctcattgcctggcagggaagtttctgagaccaagaaagcccacagtgggatagggacttccgagggttctgtgggaatcagaagggagcacctccctctgcgtgagggagctggggaaggcttgacagagaggccattg

SEQ ID NO: 93439 - DNA, 1050 bp, Homo sapiens
taatttcacagatcaggattttaaagcaaatagaattattgatatatatctcttccaacagccaataaacatcccgcagagaggacagcttacgcatgggctcacacaaagaaaattgcagagtctttgcttaagctacagcctgaaatattaaaattctgattttcatgcgctgttagaaatagttttcaaagaattccttcctccagccccatcacaacccctgcccatgtgagaggttaggagtaaatcatatgttttttaaaacatttgctgaaacctcctcccttttccaagtctaccaaatttttatctcaaaaaaaaaaaaaagaaagaaagaaaaaaatgggactaatatgacaacaagatttttaccttcacagtaaatagtacaatttagctgagtaacttgtggaagcttgttaggttgaagtgactcacttgcgtagatgaagttatttttagagatgtaatttgtactgtttagaaaagaataaagagatggtaaaaggctagatcgctcattatagtttacagagctcatgaacccagcatccatgcaaaagatgactaagcaaggggtcggttggtactttctctcagaattttacagatgtgagtcatccactttagtctgcagacacagcaccgagatacctgtgactcagctctcatttagaaaaagccctagaattcaattctgatacacttttatagttaagtagtgaggaaattacatactgaagcaaaatatgcctttgtaacgcgcagccgtgggatgtttttagcaaagactgatttatcttcatctctggcctttgaaagaatcgacctgtgatccacgctgggtaacgtgcccattgagcctgctggtacacatcacagtgcccaccttcttcgtgtttggctcacaacccaagtactaaattgtcctcaatagaaatctcagcctcaccctttctacacttggatgccccagcactaaggcccacttcctttaaccaaatacatgtacatatatgtgttcgtatatatgaaaatcttctgcct

SEQ ID NO: 93440 - DNA, 1129 bp, Homo sapiens
ttcaaaaacaaaccccagttatctggaaagcacagctgtcagaaatggtttactgactgtgaatatgcatgcttttcttcggattaacaatgattcaatacctttgattgaaaagtatcttattcctttaaatttggatgtacaagtcaggcaactcactcaagtcaagggcttgcctcaacatgatcaccttatgtttgcacagtttattctctttgagttagttaaatttcagaataatatgacaatttaaaaacagtattttaggcagcaatcatacctttatctcaaatgaaatttctaatcagaattgctatcaaagaggaacattaatttccattcccctgctgcctgtcccacccatgctcatagaagaagtaatgaccaaggagctagtcagaaaacagtagcaagaaaacaaaacaaaaagctggacaattcacaggccaaagaggtaatcctaaatatacaaagattgattatattgtgggtctttaaaaaaaaaaaaacactcacaaataaattggttagcaaaaaaagaaagagcctttatcttaaagaaagcacctatgagaatggagagaatattgcatgatcaaagcacaaaggaaaaactgtctgaccgaggtttcatcaggcttcctctctgttcagatctttttctgatctgtggtccggtttggctgcaggaccccatttgaccgtagattctctagagctatgattttttatttgctggaagaagattgtagaattaaaaatgaagagttccaaaggactctgaatttacctcaaataaatagatggacaaaactaagttgaaagcttagttttcaacttgttttgaaagttgttttgaaagcttggtttgtattttctcagctggaaatcaggctaggaaaagaaattatatagactcaggtttgtttgtctgttttaattgcttctaagagaaaagtgagtaataataggtatcatttatgaagacctgctatgtgccaagtattctgcacatatattcattataccatgtaaaccatccaggagccttgcaaggtaggtattatcccattttaaagatgagaaaacctagacttagagagtatagtcagttgcctgaggtcaggta

SEQ ID NO: 93441 - DNA, 1052 bp, Homo sapiens
ggcttcaattacactttgttagacaaatctccatggagaaataataatgtaatcaatgctttttggggactgtggtagatatcaacattaccttgctgctgttttttaaaaatcagaacaactcacttgcccaggtagatacatttccttcatattttgaattatttctgatgctaactgggcatttagggagtcaaagaagatggttccaaaataggtgggaaaaaatcattttttagcatattaaaatattaataccagcaactcattttctacaaaacaaaataataagaacgaaaatagaaggcattccaaaacccgaaaaagccagtagcttgaaaatcacatagcctgtggtattatctgcattgctttggatactgagtgatgactgtatttgctttaaatttataaattattgcaattgagttctactgtttaaaattgttgctttcttgtagggaagctctcatggtacttttctgctggtaatgattgctttggaggttactctcaaccttgttttatatttgcaaaagtgtacatagtataaaacaactgaagtcaaagtatatgtgaataggcttttttttttgagacggagtttttctcttgttgctcaagccggagtccagtggcgctgtctcggctcactgcaacatctctctccagagttcaagagattctcctgtctcagccttctgagtagctgggattacaggtacgcaccactatgcccagctaattttttgtatttttagtagagacggggtttcaccatgttggccgggctggtctcgaactcctcacctcaggtaatctgcctgcctcagcctcccaaagtactgggattacaggagtgagccaccgcgcccagccacgaataggcctttttaaaaaattaatcagaagaggcgcggtggttcacgcctgtaatcccagcactttgggaggccaaggtgggtggatcatctgaggtcaggagttcaagaccagcctgaccaacatggtgaaatttgatctctactaaaaatataaaaaattagccgaac

SEQ ID NO: 93442 - DNA, 1051 bp, Homo sapiens
ctaaagtttggagtttagaggtacaactattgctcatgaacctctcagtgtggaaggcctcacttcagtcatacagaataggtaaatatagaaatatgctgagtgttttttatatttaagactttggtgtctggaacatcagtcttcataaaccatgacctcctagattgaagaagcagtggatcaaaatcatagtttccaaaaataaatcgaagagtgcatgtggttataactttatcgcttggaacagtcatatgcttcacacctgtgatcccagctgaaggatgatcagatccaaagtatcacacaaatatagactatctattaggcctcctcttcatttgctcatccagtatttattaagcatctaccatgttccaagcattgtgctcaatgctaggaatataatgataaacgaattagaaattgtccctgtcttcatggaatttatagcccagcaaagaagataaagcctttatcatatgaaacttctgacaatttcaaagtacctactaacaaaacctggacctccagatctggaatgttcttgattagccatgactaatcaagaacttagtaggacttcctgttcttgcctccccctcccagagagaccccattcccttccatggggcctcctgacctcacctatatttttctgtagtacaagactttcacttatagcaggcttgataactttttattttattttattttattttattttgcgacagaatcttgctctgttgcctaggctggagtacagtggtgcaatctcggctcactgcaacctccacctcccaggatcaagcaattctcctgcctcagccttctgagtagctgggactatcggcatgtgccaccacgccggactaatttgtgtattttgagtagagatggggttttgctatgttggccaggctggtctcggactcctgacctcaggtgatccgcccacctcagcctcccaaagtgctaggattacaggtgtgagccactgcgcccagcctgagattcttaaataatgtcagggtgtcttcttctagaaacc

SEQ ID NO: 93443 - DNA, 1451 bp, Homo sapiens
gggctttccttgtgtatacataggatctgccctaagaagatgggcattatttgtggtacgtgctgaaccagatgtgtctttgtggtttccatggcaaagctatcttggtgtgtatgtgtgtgtgtgtgtttcctaagtagacattttagcaagtatgaattgagtctttaagaagttgcagaccacaagcccgtgatttcagtataggaatatcgtaagtgaagcctgtttatcttaacagattggttcagagtttcaagagacatttgctttatgttaacaccagtctaaagaaaacatctgaagtaatgtttaaaaaatctgctttctactgtagcgaagatggatccattttaaatgtaataaaagagaaagccagcagctcgtgctagcaagaagaaatagtttaagtttccattcttcagctgaactgagtaaccaccctgtgctgtgtcagaaagccagataaacaccgtgaaagaactgtcctgcagtatagtcttgagattggtggagaaggttgaagacaaaggatggaaagagaggagggtcaactgtagcattccttccacaccctgtttctttgtcctgtgaaaatactgtacgtacacagtgcgtaaaaggctataattcacttggggagctctgcccatgacataaacactctcatggtttatgaacagcagtggagccttttgagtggaatcagctgtttattccctcctgtagagcaaaattctaaacaatgtaacctcagaaaggacacttcctggcactgaccagggcttttcctaccacatgtgcttctttctttctcatggctgtctagcagattctgtccctcgcaagtgaagcagcatttacaaggtgagcacaggctttggggtcatgtgtgccccagttgctattgcaaagtctaatcctgcaagctctgtggtcttgggcagagctcttaacctctctgaacctcattcctaaaacaggactgtactcctccctattggatggacttgctatgagaggccagcaagttaacacttggaagaccatgggttttagcttctgctgtgtacctcagtgcctttgctcacgcctttcctcccaccctctttctgccccctcaaacagacacatccttcaaccttctcccatatgggttttcccatccactctactttgccagcagctctctcccctcccagtctcctttgactctaatcacatactgctttggaatctctttggtattttcttttagttcttcacatcttcatatatattttgtttccttaaccaaaccatgagtactttgaaggaaatggctttgcatatatatctttttttaaaattacagtataatttatatacaatggagtggacaggttttaagtatatcttttgacaagttttgacgaagttaccttatagcctctttccaaatagtctcttta

SEQ ID NO: 93444 - DNA, 1034 bp, Homo sapiens
ctgtggactggtcgtcccctcagcatttcaaataagcattcagcagtgacagcagccagtagtgggcagtgtggtctgggaatgtcatcctcctgcccctgccagcccctgggggcccacagacccagaaaacgaatgagaccctgcccatcagcgaagcacacagtctaactcagaagttttgccacacacattagctcacacagctttacagcagacctgggctgtgagcaactgaatagggttgcttttgttccacagatgaggaaacagaagatgagagaagttaagtgagttacccacgatcaccggccggtcagggccggagccaagaccaaatccaggctcttggctcccctccagcaacaattctcacgtgtgtcgatactctcgtgaacaaactgaagcttatttttttatttcccagtgaaggatgatggacgttatataggtttgtgaagatggaaatttatgattatttttaaaagactttcagcttccttgccacaggggaggatttgggctggttttcttagaggggattcagcacaaggtgacagtcaccactgtatgtttccagaaccagggactcaaacaccagggtttgcgtgattttatctttaccccgcaacagcaacagaagccggtggcgcctgtaaacgagtgaaggtcacctgtatatttgtaaatacttcctgccggttcagcctgtcatcgagcatcgtacctgcacacagagggcagcccaagactaattagtaaatggctataaaatgctttgaagatgaaaagaaccatatgtgacagcatattattaatacttagtaaatcctgtctccggcttactcagcccttgtaatttcagttgaatctctcttgcttagcactgatgaggaaaaggactcacacgtgtttaccagcaatacttggatatgatcaagcatctgtgaggccccgagaaggaggggcaagggaccctggttagccaatgctcagcttcttccagcagcccggcttcctgaggacccatcgcc

SEQ ID NO: 93445 - DNA, 1035 bp, Homo sapiens
tgaagaatggttaaattccttatggaaggctttggggaacatcccaggttcagtaaaaatacagagtatttgcgttaaactggacctcagtggggatgtgatgggaggtatgagacagattgtgcccttatccttttctcttcttgggagccaatcttctaggatgttggaattgtcccttttccatcctgggaatctaaagaaagggttcttaaagggaaagaacccagtcccttcctagatacactcaatcatacctgcttgcctggcaaggcagtttacagagtccacagggcttcatggcttgaatgcttgataacccagacaaaaatctatctgatggagaatcgcctggccaaggggctgggccaagaaccccaaccctgacttccatctcacataccagttctgcccactcacgagtctctgggataagccctcggccccatccggtcctgtaggggcccaaaccctagttccaatacctgtcagcaaaaagccatgggttcatagctgaagccaaggctccagtatagagtctcaggaggcagttttcccaaatcagcaactgttgtggggggaacttctctgacctgctgaggtttggtggccctagagggtccgtgttttcggccgtctttctcattggcagtggaaggagcacacgcatccttcccaagcagcccggtggcaccctagcaacagggtacagcagggtgatgggagtttccatgcccaaagaccacaaggcttgtaagggtttgaacgtcggctcagggtctggaggttcaagctgataagtgagagcccgtctcctcggctacctgggttggaggaacatctcagttctgactttttgctttcttatttcctctgtattcgtttccctccaacctgagcatgggagatgagaatgaacctctgggacaggggttggcaaactatgtcctgagtatttttctaaataaaatacagtggcacagtcctgcctatttgtttacatgttatctagggctgctttcgcactgcagtggc

SEQ ID NO: 93446 - DNA, 1015 bp, Homo sapiens
tcctgaccccgctgcttattagcaatgtggccttgaataagttacttaatctcactaagcctaaatttctgtccctaaaatggagctaatggtcgttcttcactcagagagagaattagtgagataatctaggtaagccatggtgtctgacatttagtaagtgcccaggaagtgttgttagctattgtcttcatctcacccagtttttaagtggggaagaaactacttggagaagctttatgtggacacaggagtcatctgaagatgaaggttcacctgggttccattagggggacttgcctctgaaaagctggaagtagggggctcttctctccttcccgcttcttgcagtttccagtagctgccttggagaaaggtcaggaccagctgctaaggagcacagcccattttagtttctatactctgtcatcatcttatattttaaatagaatgcttcctgcagcatgttccagagagctctgcaacgtggtctgggcataaattaagaagcggggagaaaactgcactagcagcaccagagtttcccacagaaacatctgtgaacatagatcaatgcctatgtagctgggtagagagacacactcagccagtctgccccaagcaagatgctgatgatgggaagggaggagggacaaggacagcaagggatgtctggctgcaaatgccgctacttgttagtctcctgggttagaggacatcttttcacggacctggctgtgccctgatggagtcatagctctgtcctgaacctctttggaaagtgacaaaggcagacacagtatgctcccttggtgatctttgttggtccaaggctactggtgtgcaaatcccttcaaggtgtcctgagctggtaccctgagaaacagttggcaggcgactcagaggcttaaaaacccaggtgccacatcctgcagatgtgtatcctggagagctgccaagagggcctgccgagtgtgagtgctggggaccacgtctatcttggaagtcatttgga

SEQ ID NO: 93447 - DNA, 2084 bp, Homo sapiens
tgctgccccagcacccgctcagcctgtcctggctgctcacctccccgcagggcaccgggcctttcctgccctctgtggtcatctgccacctgctggatcaagtgctttctcttttacactcccctgtccccaccccagtgcactcttctggcccaggcagcaagcaagctgtgaacagctggcctgagctgtcgctgtggcttgtggctcatgcgccattcctggttgtctgttgaatctttctggctgctggaattggagataggatgttttgcttcccactgcaggagagctgccccctttcacggggttggggaagggtccccctggcctccagcaggagcacagctcagcagggtccctgctgcccacccctctgagccttttctccccagggtatggctcctgctgagtttcttgtccagcagggccttgacaggaatccagggagtagctcctggccagaaccagcctctgcggggcttgtgctctgcaaagactctgctgctggggattcagctctagaggtcacagtatcctcgtttgaaagataattaagatcccccgtggagaaagcagtgacacattcacacagctgttccctcgcatgttatttcatgaacatgacctgttttcgtgcactagacacacagagtggaacagccgtatgcttaaagtacatgggccagtgggactggaagtgacctgtacaagtgatgcagaaaggagggtttcaaagaaaaaggattttgtttaaaatactttaaaaatgttatttcctgcatcccttggctgtgatgcccctctcccgatttcccaggggctctgggagggacccttctaagaagattgggcagttgggtttctggcttgagatgaatccaagcagcagaatgagccaggagtagcaggagatgggcaaagaaaactggggtgcactcagctctcacaggggtaatcatctcaagtggtatttgtagccaagtgggagctattttcttttttgtgcatatagatatttcttaaatgaagctgctttcttgtcttttatttctaaaagcccccttataccccactttgtgcagcaaagatccccgtgcaggtcacagcctgatttgtggccaggctggacaaattcctgaggcacaacttggcttcagttcagatttcaagctgtgttggtgttgggaccagcagaaggcaaacgtccagccaacacacaggactgtaagaggactctgagctacgtgccctgtgaagacccccaggctttgtcataggaggtcgttcagcttccccaaagtcagaggtgatttgatttggggaagactgaatattcacacctaagtcgtgagcatatcctgagttttacttccttatggcttgccctccaagttctctctctcatacacacacacacccttgctccagaatcaccagacacctccatggctccagctatgggaacagctgcattggggctgcctttctgtttggcttaggaacttctgtgcttcttgtggctccactcgcgaggcagctcggaggtgtggactccgattgggctgcaggcagctctgggacggcacagggcgggcgctctgatcagctcgtgtaaaacacaccgtcttcttggcctcctggccagtctttctgcgaatagtcctctccctggccagttgaatgggggaagctgctggcacaggaaggagaggcgatcccggctgaggcttaggaaattgctggagccggctccaagcagataattcactggggaggttttcagagtcaaacatcattctgcctgtgttgggggccaggtgtgtcacacaagcatctcaaagtcaaaagccatctggggctgctgcttctgtttctcaggctctggggaaaggaatctccctctcctctcacttgattccaagtgtggttgaattgtctggagcactgggactttttttctcttttccttgatggaccaacagtgcaaatgcaatctcgccatttaactttcaggtcgatttcctttcctgatcagacatctttgtgccccctttaggaaggaaaagaatacacctacgatg

SEQ ID NO: 93448 - DNA, 1017 bp, Homo sapiens
aagggctttgtcagaggaaagggtttcggggccaaagcctggacagagctctcttggaggtgtcacagaaatctgtgagcctaccctaacacccacccccagaaactagtcacaatggactctgatgccaggcatatgctctgagcagattactttgcctgtctgtaaatctcacttaagacataggttataagcaggctcactctgcgtcccagttgtcactgctatgtcactgctgtttcagagtcctgctctccctcccttcctcagctgtgccttttgggctttaaactctgcatccttccagtgtcctgggaagagtaccagccctgggaggggaggccctgagtacgagcccggtttcctccctggcctctctaagcctcagactctacgaggtggggctggttaggaacctctcccacagggcagtcatgaagctcaaatgccatattggatacgaaagttctggtgagctgtaaatagtgtacacgtgacacacgttggtcaaaatggtggtcctggcagtaatgcagcaaggtggcaggcccacctcgggggaaacatcagtgagcacggccatcactgtcatggtccctgggcacggccaggccggtccccaagagtgggcaggtcagctttcctaggtcccatcccttcactgcattccaagattccagggccttgagtgctgcttgaggtttgctgcctgggcagagagcaagtgaatgccatacctaatcaaggaaaaataaaactggatgatcctttctttcttatactatttgtatttatttttaatttttatttcaacactttttggggtacaggtagtttttggttacatgagtaagttgtttagtggtgatttctgagattttggtgtacctgtcacctgagcagtgtacactgtactcaatatgtaatctttaatccctcaccccccccacccttcctctctgagtccccaaagtccattatatcattcttttttttttttttttgagacagggtctt

SEQ ID NO: 93449 - DNA, 1513 bp, Homo sapiens
ggagggtgagtgcgcgcctggccgcgggacagagggaggtcgggcaccgccgccgacccctgcgtccccgtctgccgccggaacgcgaggggacccctttcccgccccgagacgagtctctgggagcgcggcgcggcggacgaaccgaggagggggcgaggaggctctgggcgcgggggagcggcctctgggagcgcggtcaggggagatcgggggagagggggccgttcccgcggaccctcgggggccaggcccgccggccgaaggctgtgcggagcgggtctgcgggagacagcctttcggaaaggccgccgggctccgcgcgccgtggtgctcgcctccggtgacccgaggatggggagaggatgcctgccactgggctttgtgcgtccgtggaatcactgttcttctctgttctctttgtgcattgcccttggctgcctccgattgtcgttccgggagtgaattttacgtatatatatataaacctgtccttaacaggactgcttcgtctgctctgcatttttacacaatgctatatagaatggattcttcttaaagagaggataaaattagcgggaattaatctaccgtttgttacttggcctaaaaaaattgtaagacaagatatttgatcaggttgaagatgcacctaagaaatgtgatgtatgtagatgggtttgctgaagggattggcttttgcatttgatttgagcagagcttaatttctgcacaaacttagtgaaaatctatttttaaagcctgtcttgtattcgaaaggtatttgtaggtctacgcagcatttgaactttccgggctcaagtgttcttattgaatagttttatgttggtgggaaggcaaggggggaaaacgaagaggtggactagccgggagttaaatgtattgattcattgcaggatattattcaaagttaaatgcagtcttctgccaaacagtccctctaccctaaagttttcgtcatcaataattgttttgtgagtgtgtagaaaagcctttaatcctttttaaacaatttagaggcctctttgttagccgccgtccagcgattgcatatgtactgtttgctttcaaattaccttaagataattgctagagtgaagcagtatgtacttatatttggaaaatcatcaaagaatattgtaatgggggaggggtaattcctttttctcaaagtatgtgtcggtatctcaaacccaagttctgtgagtacctgttctgtaactaaatactgtgtatttgctccagatgtgaaagccatccagcagtcttaagactgaataggaagcaaaagttttaccaggaactcttatttaccttttcctttactatcaagttattcctgggaggccccctggtgcctgcagtcagtgttcactacctaagactttgtttcagatgtgaacatcttgctgggtctttgagaaatttgctttgaaaataattgtattttgtaactgttttatgagggaaatacagttaatttaaaaatgtg

SEQ ID NO: 93450 - DNA, 1055 bp, Homo sapiens
tgccaccacgccccggctaattttgtatttttagtagtttcaccatgttggcctggctggtctcgaactttccatcctcaagtgatccacccgcctcggcctcccaaagtgctgggattacaggcatgtgccaccgcgcctgaccttgatatgatattttcaaagagtcctttaggtcattttaatacaaacatgccatttaatgtaaaacagaaatattgattttattatttggacggtgcatattctttcggtatgttttcttggattaacttttgcttagaactaaaaaccaaagacttctactttatcccctgtagtgaccctgttggccacattcttgtggcttaccatagtgttttgatcatttaaattgaagctagtttgtatgagtattctggaaaatccggtaaaagcttcttacttagatgagtggttctcaaagaggggtgggaaatgggagtatagcagaatcatctggggaacttcattcaaactataagtgctaagtttattttggaggaagtgaagtggaatgagtagaatctaatgcatttgggaggaggttagtatggaaaactgctgctgggtgaataagagtgccagctctgttcccaaccacagtcttgatccaggtatttaaaaactgggatgtgccagttgatatagtatgtctattatgtgtcatatatgtgataatatgaaactgtttagaatttgctttttcctgattatgaaagggcagcattctttcaagaagtcccctgtaattccacaatccagagataaccgttgttgaaattttgatatatttttgtttaaagatacttaacatactttgtaaaattcacatgctttacatcattagaatattctttacatagctttatgagttaatttttcatgtagtattacatcatgaacattttcccttgtcattgaaatgtcttcaaaaataccgaaaagcgatttgctgtgtgatagaaaagtttttcttaaagtattttttaacatattaccacgaagctgaacttgactattacaatatgagttgt

SEQ ID NO: 93451 - DNA, 2946 bp, Homo sapiens
gtatctcccttttctttcttgtgaaacaggtatagtactcttaagatttagttaggctgacagactacacttttaacttttcctattcaagacaggctggaatgcagtggcttgatcatggctcactgcagcctcgacttcctggtctcaatcgatccttctgcctcaacctccctagtggatgggaccacaggcacatgacaccttggctggctaattttttttattttggtagagacggggtctccctatgttggttgcccagtctggtcttgaacccttgtgctcaagcaatcctccagccttggcttcccaaagtgttgggattacaggtgcgaggtgctgcgcccagcctgtagtgtccttttgaaggttaaaaaaaatgaatggatttgaaaaatgaaatcgattaatgaaagcatattaaagccctccattttaaaatgacagctttatccagatataattcacataccatacagtttgcctatttagaggatatgatttttagtatactatagagttgtgcagccatcaccacagtgaactgtataatattttcaaacacatataccccccaaaaaaccctgttcccggtagcagacaccccatttctctccattccctcccggcccccactaatctacttttttttgtctcttagatttgcctattctggacgtttcatgcaagtgaaatcatacaatatgttgtcttttgtgactggtttcttttaatgtttttaacattcatctttgttgtagtatgtatcagtactttattccttttatggctgaataatattccattgtatgtatacaccacatttttaattcattcatcagttgatggacattttgttttctttcggctattgtgaatacttgtagtgctgctatcaacatttgtgtagaagtttttttttgtgggcatatactttcaattccgttgggtatatagctgggagtgagatttctaggtcatatggtagccctatgtttaactttttgatgagctgccaggttgtttaaggcctctttactgattaaattgtttaattctgacccagcaacctaaaggttaggtggttggaaagaagtgtcagttgttgccgacaacctccacttctgtagggaaggtgttttgtgtggatgtgcagctagacttgttagaaaaaagagcatgttggggagtgggggagatcacccgaggaatattttatctccttgattcttctggatgagatactagaggagacataaggtcgtggcatattttttaactgattcagagattaggtgtttgttttctctgaattaagttcagcaagtaagggaaactgacagtttgaagaagtagcccagaggtgtttttattttgctatctgaatgcagacctggagcttttctggtaaatatctaaatccaagatgaagattcgttgggatttaatacattatttaaattgagtctagagacaaagccacattaagagtcaggattagtggggaagatagttgcatctagtaggtctttttcttccttattctccacgtttattacttttaaaagagtatacattccaatgccatgcatttttaattttttttaattaattttttttttttttggaggcagggtctggctctgtcacccggttggagtgcagtggcatgaacatggctcacctgcagcctcaaccttctgggctcaagtgatccttctacctcagcctcacaagtagctgggaccacaggcatgcaccactaattaaaaaaaattggtagacacagaatcttactttgttgcccaggccagtctcagagttctgggattacaggcacccagccccattttcaaacatttctaacaggtaaagtaatacaggtatgaaggaatgttaagattcttagaaatactgacttaaattctgttatgtatttctgaaaggttattctcgaatgttggtggcatatagggaggcaaggggaagaaatagtttgtaaatgtcagtaggtttagcagtggtgtggtagatggggattcccagtggagtcttctaggatttgtgattggatacagattgatacccttaggcagcagccactgcttctagcagctttaaatagccatttcaaggcttattcaagtataaataaccagtagccagttttttcctgatttgatagaggaagtcagtccttggtctagatgggtacttgtcatacagtaggaaaaagggcgggggcagttgtcctttattctgcctctgcactattcacatgtggagcacagtgatttgtgagagtatgtataaccttcgtgaacatcactggcctcagaaccctcccttgccaaatttacctgcatctgtgcaaagacaagtggagatattgatgatatgtgcatatcccagagggaatagcgtttgctttttgatgcatgcccacccttgcataattgggaggttttaacatagcatatttcaccataaaggaattttattctaagaatgttaatcagaatatccctaagtaacagaagttcccatctggtcagttgcaaggtgaccaaaacactttcttggtttgagtatagtcatatgttctgtcaaatgatgttttggtcaacagtggacttcatgtaaggtagttagtggtcctgtaagattagaatggaactgagaaattcctgtcacttagtgacatcataggcataatgtcatagtgcaatgcattactcttgtttgtggtagtgctggtgtaaacctattgcactgccagttgtgtaaaagtacaacaggccacgcgtggtggctcatgcctgtagtcccagcactttgggaggccaaggcaggtggaccacttgaggtcaggagttcgagaccagcctggccaacatggtgaaaccccatctctactaaaaatacaaaaattagctgggcttg

SEQ ID NO: 93452 - DNA, 1014 bp, Homo sapiens
cattaaaatccattgatctttcttgtactttaaatggatcttacacatgactttataatacgcgttgttcatttggataatattgattcagctgagttatgcagatgtccagatgttgaaacagcttattatctaatacagtatccagaaatgacatttgttaatgttacaagatctcatcagaagagtccttaattatggagaagctgtcagattcatggtgctgattacaaggtttctagaattttagtttgtaacttgaaagcttgaattttatcattggcaacaagtactgtcagttgttttccttgaaatgacagggtcactttgttcatgttcacgtgtatctgttgaatatctaagtctgaataaccatagtttgtcagttaatactttccagtaaaagtgtttagtgaaaaaaagtgtctaggtctgcttggaactaaaacagtcacaggagtgctttcctttgcgacaaccattgtactttgggatggagcaggagtgctttgtgggcatttccattttatcatgtagattattaaagagatgtattcaaagattgaagtttaataaaattgatcatttgtactgctttaccaaagggcatacatgaagctgccttttttgtgtttcactgcatgtgtgttgcaatgaacaacacagtgactgactaccagtggggtttggtgccactgacttggtgtgtactgagacacttaacagttttacccatccttgcttttgtattatcaaagcagatgtcagtgcagtggaaaaaaaaaaagtcctttattcctgaaatgtctagccctcacctatatctgtcacttttcttcttcactcttttctcattatacttgctatttgtttaccaatgtacctgaaatgactttttacttatgctttgtgaattcatgaaagccatgggccttctcagaaaaatatttttacatatacacaatattacagacaatttgtggtactatacagagccactaaaggccattttgg

SEQ ID NO: 93453 - DNA, 1525 bp, Homo sapiens
tgttgcttaaaagcaggcttttgtgctaaatatggagaaaatgctaggaaaaaattaggatgtctagatttaactgccattaattagtatgtaatcttgggggtgggggttgagtaagagttagaataccagtggtcagtgaagattactaagattttatgaggccaaggcgagtggatcacttgaggtcaggagttcgagcctgggcacatggcgaaaccccgtctctactaaaaatacaaaaaattagctgggcatggtggcacacacctgtaatcccacctacccagtagattgaggtaggagattcacctgaagccaggaggtggaggtttcagtgagccaagatcatgccattatactccagcctgggtgacagagagaccctgtctcaaaaaaaaaaaatttatgagacaccgtgcataggtgttggaattagtgcttttttcttgccatcttttctgttttagagaggtaatgataagtaagaacttgctggggaaagtagcataaggttagtgaaaagtaaaatttagtatacacacaacacacagacacatatatatcacatacccttggatatgtgcgttggaaagacaaacctgcaatggaaaagtttttacactgatataaaatgtgaaatataatggttgagtaaaggacagaattcttttgggagaggatacacattttgcttaattgagattcaaagttaatgttctctgtcatcaaaactgattgcaagtggtcatctcttgatgctgatctgtagtgagattctatgtatttcatcttagaagatgtctttttacacagggacatactgcatattcatcacttggaaagcatttatagaattctcctgatacttgcctttcagcatgtcattacattgcagattaatcacttccagtagagggttaggtggaagctcctcggctgcacagttaaatggattttgatatatggaaattttttttgcgcttgagtcaaggtttgaagaatgctagtttgagtttgaaaaaatgtatctgctgcaaaattgtgtgggaatgaagatctcacttgtcttaacttggcagcacgggttatgtataaagcagtttgctgactgggtatggtggctcgcgcctttaatcccagcactttgggaggcggaggcaggaggatcacttgagttcagcagtttgagacctgcctgggcaacatagtgagaccttgtctttatagaaaattaaattagccaggtgtggtggcatgtgcctatagtcccagctacttgggaggctgaggcaggagaatgtcttgagccagtaggctgtagtgagcctcattacaccactgcactctggcctgggcaataaagcaagaccacatctcaaaaagtaaaaaattaaaaaataaagcaacttgctttaattcagacagtattagttgtcagaatgacttaccacaatggaagtttctcatatatttttttgccttataattttaggctgaatttattagaaaacatttaggggag

SEQ ID NO: 93454 - DNA, 1248 bp, Homo sapiens
tgtaatagccccaaactggaaataatccaaatagagtagtaaagatattgtcatatgttcatagaatggaatacaggttgaatattttttatccaaaatgcttgggaccccaagtgtttggaatttggatttttttcagatttttgagtatttgtattatacttaccagttaagcatccgtaatctgataatctgaaatctgaaatgctccaatgagcattttctttgagcatcatattagcactaaaaaaggtttcggttttggagcattttggatttcagattagggatactcagcctgtatttcaaatgactgttaaacacaattatatggatgtatctcacagatgcaataatgagcaaaagagcattcttatgtttctttttatctaaaagtctaattcacaaatacatcaaatcaatatatactgatagcaataaggatagtaacctcaggcattactgtcattagttagggtacaagggaatcttcagggttgcaggaagcattctgtaccttgatctggatgatggttactcaggtatatagatagtttaaaattcgttgagttacacccataaagttagtatactatatgtatgtaatatgttaaaatattttctaaacagtagtaagtatggtagatatttgctatcatgggattttatctggtctgaaattactacatgctgaaaatttctaggaaatttttgatccaaaaattttatgtggtgaagtggaaaaagtactggcctttaagttagaagactaagtctgaatccctctctgctgcttctcactcctatcagtcttataaaacctgggcactgtgatcttatgcgagttattgaatctctgtcattgtacagtggaaagaatagcttctcttttcagttcctggggtgtgaaaaggattaaatgaaatgattgatgtgaaggtgctttgcacctaatgaagtatgctgatttataatatttttataatccagcagcgttcagatatccaaacactggaatccctcatggatgctgtgatagcagtctagttgccctgtgtaacaggttgcccggatgatttcttcctttttttcagaagtcttgagagtacataaaggagcaggacttttgaattggaagacagctgggattgccctgggacatctgccttattctgtccaacctttggctaatttatttctaatttctaaaactcttgtcagagttttaaacattgggaaaacctttag

SEQ ID NO: 93455 - DNA, 1833 bp, Homo sapiens
cagggccttgctttgctgcccaggctggtctcgaactcctggcttcaagcagtcctcccgctttgaccccctaaagtgctgggattacaggggcaagctactgctcccagcctattttcttttcttaaatgctctttcacttaagattaaatgagagctcagctgtaaatttaaggttaaagggagtcaggggagatggtgatgagaggaaatgattacaagttgagttcagtggggcaaataaggaactcttctgtctctccatgcaacattctgttccccttcatcccacaagttactggaaaccatattatcttatggctcagtaatgcaaagatgcctcactccatctaaatagcctttagaggttttaatataatgatctattgggaatgtaacgataagttaatttttaatacatagctgatatcttttttgtatttcttttgatcagaaagtagagataggagttgctaaaattttggggactgctggtaacattccaagaaagtgtgtgaagctaaatcacctactgacaattactatttaatctccctttcttcatagcacattgttcttaatgaggctgttttgacatcctactagatgcgagataagcaggccagaccttaaagggtgcgggctctgaaatgtttttttgtgtgtgttttttttgttgttgttttttttctgtttgtttgttttttttttatttgagacggagtctcgctcttgttgcccaggctggagtgcaatggggcgatctcagctcactgcaacctctgcccccgggttcaagcgattctcctaactcagcctcccaattagctgggattacaggcatgcgccaccacacctggctaattttgtatttttggagagatggggtttctccatgttgatcaagctggttttgaactcccgacctcaggtgatccacccacctcaacctcccaaggtgctgggattacaggcatgagccaccgtgcccggccctgaaatcttttaagtctctttggctactaggccccaggttggtcacaggacagcaaaaaacaggactgcatttcatcaacagcagacttgaggagcatcatcaggaaccagtaacaatgaaaatagaagtcagagatcatagaataacattattttaaaccatgggaccaaatagggtaatttgctgcctgtgtgacttttctgatttttaaagtatgggcatgactctttttgaaagattattatgagtaaattttagaaaactgactgttttatttatcgtttgtcagtacgaggatgtcgtccaggaaagattgtgcagatgactgaagcagaagttcgaggcttatgtatcaagtctcgggagatctttctcagccagcctattcttttggaattggaagcaccgctgaaaatttgtggtatgtaaatgggtaaagttggaaacaactcttttgaatcatgtttttcctcccatgtttaagatctagagaaaacattttttgaaatttttgtataaaacagatcagtaggctttactaaataaaagtgtataaaaattgaaacttataaaaatgacaagttacagacaagatgaaaatacttgctatatatcaacagataaaaggagttctatttataatatataaagagttcttataaataagagaaaggcgatacagtataaaaataacataggaagaggaaggtcttagaagaaattcaaatggccagtaaacataaggacgtcagcttctttttttagtaatcagtgatgtgcaatttaaagcaagtctccaactctagtcagattataaaaaaataccaaagattgat

SEQ ID NO: 93456 - DNA, 1102 bp, Homo sapiens
ttaatttaccatctcacaatttctgtgggtcaggaattcaggaacagcttagtgggtcctctggctctgggtctctcacaaggctccaattaaggcgtgatctcgggctgcagtcatctgaaggttgaactgtgaaaggattcagttccttatagactgatggactaagagcctcagttccaaatgagctgttggtcagaggcctccctcagttctttgctacgtgggatgcttcattagacagctggtttcatcagcgagcatggaagaaggtgagagagtgcaagcaagatgaaagtcacagtcttttgtaacttaatcttggaagtgacagcccatctcactttcgcttattagaagtaagtcaccaaatatagcccatactcaagggtaggggaggattacacaggatgtgaacattgggaatcatttcatagaagctgcttataacagtaaccaatttttctaaaactgactctttctctttttaggagatattcatggacaatatacagatttactgagattatttgaatatggaggtttcccaccagaagccaactatcttttcttaggagattatgtggacagaggaaagcagtctttggaaaccatttgtttgctattggcttataaaatcaaatatccagagaacttctttctcttaagaggaaaccatgagtgtgctagcatcaatcgcatttatggattctatgatgaatgtaagtgaaaataaagacttagaaaagtaattcatggaaacattgcctaataattttctggttcagaagagttgctttgattcagagttttttcaaaataagatctgtcaggcataggccaggaagaggaacctgaaactgggaaacatgttactaattaaattggttccttgagatctccttggtcatatttcagattgactgcagcttacttggctgaagaggctcttttaaaattagtttatctagtaaactatccaggtgaaacagaagtcactgtaggcagtggcccttggttttctagtgtccattaaggttttaactctcggcattcttgtggtatgacagcttttattagtcctgtgtcacaagaattattg

SEQ ID NO: 93457 - DNA, 1049 bp, Homo sapiens
ttttttttttttttgagacggagtctcgctcttcttgcccaggctggagtgcaatggcacgatctcagctcactgcaacctccgcctcccgggttcaagcgattctcctgcctcagcctcccgattagctgggattacaggcatgtaccacgttccctggctaattttgtatatttagtagtagagatggggtttctctgtgttgatcaggctggtcttgaactcccaacctcaggtgatccacccgcctcggcctcccagagtgctgggattacaggtgtgagccacggcgcccagccatgagcttacattctaatagaaatgattctgtatttgattttgtattgtatttttatttctgagatgtagtgtgtggtttgaattatttaaatcagactagcagagagaaagtgggttggagtacatcaaactacaacattcttcctaaagctacatcagaaatggaggtatatttttaaaggataaaagataggcaagaatgtctttggggatagaaatgacatcaaatgaaataatgtatgggagagcaacttgtaaacagtgctttgagttatgtacttactcattaaggggcaggttgtggcataaaagcacaggaagttagtacttgtgtctttcatcccttccctagcttagtagttgtaccttattaccaaattcaggaaaatcgagtaactctaaaaaggtgaacatacacttgaggttgtctttgtcgtagctttttatgctaggctacaggaaaattatagcctttgtgcctctatttatacttgctatagtgccaagttgtaattcacacaaaagaatactagttaaacacttggaaattttccttccttggcaataagtttatactgtgttaatcaatgcattagtgttaaaatggacagtttccagaggcaccttttcacttctgcttgcttatttggctaggtatttaactagtccacacactgaacggaaaaaaatgaactaagagcctattagactgtttaaaaattgctatattatactgatcttaaaagaca

SEQ ID NO: 93458 - DNA, 1017 bp, Homo sapiens
tgtatatgtctaacacctagctagtagatagtgtatgatctgaccatcttgaagagttaaaaacctgttgctaagatacatttatgaaacagataattgagtaataaaaggtatttaatatgtcagaacttattaagacactatgagaagtcaggaggaggaaagactgggtacatgtgtgtatggaggcatgggttttagaggataaataggctttggagaagttaaaaggacttgagacactctttgttgtctagtttagggaatgtgtaagaactggcctgactagaaggtcaagtacatgctgggaaatgatggaatcagattatggagatttgactattgagcaacggagtttgttgagtgatttaataaccgtattgggtttttgtacagggaagtaatttaatggaaatagtgtaagaaaattagtttttcatcaatatacgggaagaattaaagtggaaaaacgctgaaaagatagatgcacttgcctaggcccgaggtaataaatggtttattctctggcagaacataattcactatattaattgaaatatgttttccagtagacattaaacacgtaatgaattgtagttcttgtacattagtgtagctaaggatagaagtgtagcagtatggatacgaatgtttagcttcattccttgtgatgatacttggattgcctatcagagagaaataatagcttatataccacttcaaagattgcagagtatttttatgagcttttcctgttaatccttctgatcaatagtttatgacttcatgaagataatgaacatgttggagtgggatgtgaaaagaaggtcttagggaaccaagtgaggcactttcacttagaagttaaaatgtttaagattagtggtaagaactggcaaaagtggtaggaagggttgcagttgattatgtttctatgaaggccagggaatgattggaaaaaagaatggtagttttttttttccttgggaagtcttttgaaatataaaggaatttcat

SEQ ID NO: 93459 - DNA, 1034 bp, Homo sapiens
ctcagcactttgggaggccaaggtggttggatcatgaggtcaagagatcgagaccagcctggccaacatggtgaaaccccgtctctactaaaaatacaaaaaattagctggatgtggtggcgcgcgtctgtagtcccagctactcgggagactgaggcaggagaatcgctcgaacccgggaggtggaggttgcagtgagctgagatcacgctactgcactgcagcctgggtgacagagtaagattctgtctcgaaaaaaaaaaaagacgttaaaaggaacacttttcagtatctttaatttcacatagtgaatctattttgattaaatgctttttattcggtgactgttaaaatattaaaatttttagctgttagtactatgtctcatctttttatttataggattgtcaccagacctgcaatctatggagcagattcggagaattatgagacctactgatgtccctgatacaggtaagtgtagagagaagtttaattgttttgtgtaaagtgttttcatatttgaacttgattacatttagtggaagtaggattggcttatgtaataaataaaagagcttttttcatagtcaataagccagctacagattactttatttgcagtaatacacaatttttcactttgcactgatcctcaaaatgcggaacctttttatttatagtcataatgtagttatttgatcacaaaaaagattttgctgttgagtccttatacctatttttctaaattccctcattcatactagcattggttatgttcttcaaaaatttgttaaattagacaaaagttttttaattaaaataatctattctttgcttcttaggcaaggatacaactaccttcttttcaaatgtctagtagttttttgttattttctatgtcctctatttgaaatttttagagctttttttcaagggggtgtgggagggatttcaatctgttgcccaggctggccttgaattcctaggctcaagcaatcctcctgcctcttctgagtagctaggggactcca

SEQ ID NO: 93460 - DNA, 1029 bp, Homo sapiens
gaaacagtggaaccgtaaggaaaggatgaactgttgaggaaataccactgggttgtttggttattcatatggagaaactacccaaaagatgaacagccttttccatgtattgttgtgctgtaagtgccatgcacatatttcctatatgtggaaagggttggaaagtactaccttaagaggccatggaagattatatttgtatggtttgtatggttgctttaacaaaagtataagttacataggctggaatacttaggcaagtgatggtcattgtttagtaaaaggtaagagggcaagaaaggaactgaaatttgatgtagatgtgctatattctataaatctgtaaattttgttcttaattgctgtatttctgtcctttaaaggtttgctctgtgatttgctatggtctgatccagataaggatgtgcaaggctggggagaaaatgatcgtggtgtttcctttacttttggagctgatgtagtcagtaaatttctgaatcgtcatgatttagatttgatttgtcgagctcatcaggtatgaaatataaaactcttaagctttttcttttttctttcttttttttgggggcagacggaggggcagacagattcttgttctgtcacccaggctggagtgcaatggcgcaatctctgctcactgcaacctgtgcctcccgggttcaggcagttcttgtgcctcagcctcccaagtagctgggacgatagccgtgtgccaccacacctggactcttaaacatttattatttgttaacttcacataagccctctcattttgttttgaggaaacatatccaagaaagctaaatgagttgtacaaggaaagcagtaggagaggtggcagagccagttcctggatctcacacttaacaatctagtgatttgttaaccttttatcaccctaaaagaggaaatgtttagaaatattttggggctgggcatggtggctcacatctataatcccagcactttggcaagctgagatgggtggattgcttaagtacaggagtt

SEQ ID NO: 93461 - DNA, 1050 bp, Homo sapiens
aagaagtaagctcttcgcaaagtcgttcattgtctggttgttgctcatttaattaaggattctgtagttggattataatgccctcatcaaagtaataattgatgtccctctgaaaaacacgtagattaattaaaataaaattaaatttaaaacttaaaaacaaaaaaagtacttagtgtcccagctccctgtagtcatgatgcctattagtatgttttgtttcatggggagccttgcaaatggcatgatttttaagctttcaggagtggtgaatttattattccaattaagctaaattgtttccattatagaaaaggcacaccagttttaatgttctaagcaaagtttaagaataaaaatcacaacttccaaaacaaaacagggtggtttgggggtgaggtggggcacagtctttgccaccttaaccttaattagtatagatggttcagaattacccaccaataaatgttttttcttctgacatttcctttgacaggtggtggaagatggatatgaattttttgctaaacgacagttggtaaccttattttcagccccaaattactgtggcgagtttgataatgctggtggaatgatgagtgtggatgaaactttgatgtgttcatttcaggtatgatgtaaacataaatatataagaactagaaatctaataaaaactattatcagaattcgttttagatttgtgaagtttccttgagcaagtgttgaaagtctgtttaattcagaagtgattaccactcaaactcattagatatttctattttcagtcacaaagtttccagcatttgtggtatatatcaaatatgaccgttttagggaacctaagttacgtcagtcattcttgattcagatgttttaattgttaaaattcctctatgaccttttgaatagtggcttactaaaagaatgtgaatgtaatgaatagtttaggcttttgttttcttttgcaaagtaaatgggtggaacagacactgggaaaagaattacaaactcagatgaaaataaagtaaaatagttccctggctgggc

SEQ ID NO: 93462 - DNA, 3541 bp, Homo sapiens
tactttgtacatatttctatactgttttagttttggaaaatcatgacttttttatgtataatgtaggttaaagctctatttacatccaccagaatgagtgtagtaaaaaagccagactgtatcaagttttggcaaggatttggaggcattagaatcttcatacattaatggtgggaatagagttctcatatgatgcagcagttttacctctaggtatatacccaagatatatgaaaacatgttcacacaaaaactgttacataaatgtgcattattccttatagccgaaaaagtcacacaattcagatgtccatcagctactgaatagataaactgtggtacatccatacaatggactgtacaatgtacaactcagcaataaaaaggaatgaaggactgatacttcaaaactggttttgaaaacctgagtgaaagaagccagtcacaaaagaccacatattatatgatgccagttatatgaaatgttcagaataggcaattctatagagacacatagtagattagtagttggttagagttagaggatgtggagagcaggaatggggagtgactgctgatgggaacaagctttctttttggggtgacaaatgttctaaaattagatttatatcaataaagctgttttttaagtaaaaagatctatttatacataaataaataaggtctgaagggtttgtgacttgtaggttagttaccctcctaagttactgtatcagaattatgatgacaacatagatcttctgactcttaaaccagtgttcttttcctcacaacagagatacactaagttcaaaaagttttttacttaaatctaaggattggatagttgatagagttagtgtacttttgttattaaaatatgagtggaatgacaaagttcagacatttgcacactttaagaaatgtttatggaactttgctattctacatttttattgcatttttgcagtttatgccatttattgaaaatcacaattgtaacaattttcttaacttctgtacatgaaaaaataacattatttgttaataatttactttaagatattgaaaccatctgaaaagaaagctaaataccagtatggtggactgaattctggacgtcctgtcactccacctcgaacagctaatccgccgaagaaaaggtgaagaaaggaattctgtaaagaaaccatcagatttgttaaggacatacttcataatatataagtgtgcactgtaaaaccatccagccatttgacaccctttatgatgtcacacctttaacttaaggagacgggtaaaggatcttaaatttttttctaatagaaagatgtgctacactgtattgtaataagtatactctgttatagtcaacaaagttaaatccaaattcaaaattatccattaaagttacatcttcatgtatcacaatttttaaagttgaaaagcatcccagttaaactagatgtgatagttaaaccagatgaaagcatgatgatccatctgtgtaatgtggttttagtgttgcttggttgtttaattattttgagcttgttttgtttttgtttgttttcactagaataatggcaaatacttctaatttttttccctaaacatttttaaaagtgaaatatgggaagagctttacagacattcaccaactattattttcccttgtttatctacttagatatctgtttaatcttactaagaaaactttcgcctcattacattaaaaaggaattttagagattgattgttttaaaaaaaaatacgcacattgtccaatccagtgattttaatcatacagtttgactgggcaaactttacagctgatagtgaatattttgctttatacaggaattgacactgatttggatttgtgcactctaatttttaacttattgatgctctattgtgcagtagcatttcatttaagataaggctcatatagtattacccaactagttggtaatgtgattatgtggtaccttggctttaggttttcattcgcacggaacaccttttggcatgcttaacttcctggtaacaccttcacctgcattggttttctttttcttttttctttctttttttttttttttttttttttgagttgttgtttgtttttagatccacagtacatgagaatccttttttgacaagccttggaaagctgacactgtctctttttcctccctctatacgaaggatgtatttaaatgaatgctggtcagtgggacattttgtcaactatgggtattgggtgcttaactgtctaatattgccatgtgaatgttgtatacgattgtaaggcttatgtcactaaagatttttattctgattttttcataatcaaaggtcatatgatactgtatagacaagctttgtagtgaagtatagtagcaataatttctgtacctgatcaagtttattgcagcctttcttttcctatttcttttttttaagggttagtattaacaaatggcaatgagtagaaaagttaacatgaagattttagaaggagagaacttacaggacacagatttgtgattctttgactgtgacactattggatgtgattctaaaagcttttattgagcattgtcaaatttgtaagcttcatagggatggacatcatatctataatgcccttctatatgtgctaccatagatgtgacatttttgaccttaatatcgtctttgaaaatgttaaattgagaaacctgttaacttacattttatgaattggcacattgtattacttactgcaagagatatttcattttcagcacagtgcaaaagttctttaaaatgcatatgtctttttttctaattccgttttgttttaaagcacattttaaatgtagttttctcatttagtaaaagttgtctaattgatatgaagcctgactgattttttttttccttacagtgagacatttaagcacacattttattcacatagatactatgtccttgacatattgaaatgattcttttctgaaagtattcatgatctgcatatgatgtattaggttaggtcacaaaggttttatctgaggtgatttaaataacttcctgattggagtgtgtaagctgagcgatttctaataaaattttagttgtacacttttagtagtcatagtgaagcaggtctagaaaataagcctttggcagggaaaaagggcaatgttgattaatctcagtattaaaccacattaatctgtatcccattgtctggcttttgtaaattcatccaggtcaagactaagtatgttggttaataggaatccttttttttttttttaaagactaaatgtgaaaaaataatcactacttaagctaattaatattggtcattaaatttaaaggatggaaatttatcatgtttaaaaattattcaagcactcttaaaaccacttaaacagcctccagtcataaaaatgtgttctttacaaatatttgcttggcaacacgacttgaaataaataaaactttgtttcttaggagaaaatgattctgtaattccagtgtcact

SEQ ID NO: 93463 - DNA, 1426 bp, Homo sapiens
cttgtgtatttttagtagagacaggctttcaaccatgttggccaggctggtatcgaactcctgacctcagatgatccacccgcctcggcctcccaaagtgttgggattacaggcgtgagccaccgtgcctggccagaaacatattcttaaataatgcaaattccaaatgtattctgacctatagattggaaaaccatttcacagatcacaatgaatataaactaaagtcagtggaagaactggaaaacaactgtattcctttgtcacagctcagtgtgtttagtaaaagagccagtgaataccaatggtatcaaatacgaataatgactatgttatagatataggtccacaaagactatgtttagagcattttccacaagttgttcaatgtaaaagggcaatgatgatggtgatttttactatatattaattgaaaatttcagagaatattctggttttaaaaaatatctaagtcacaaagaggagaatttgggataatttatatggaagcattctgaaaaatgtaaaacatgcaatacaaattgaagaggaatactccaagaaatcttggccaggcgcagtggctcacacctgtaatcccagcaccttggaaggccgaggcgggcagatcacgaggtcaggagatcaagaccatcctggccaacatggtgaaaccccgtctctactaaaaatacaaaaattagctgagcgtggtggcacgtggctgtaatctcagctacttgggaggctgaggcaggataatcacttgaaccagggagtcagaggttgcagtgagtcaggattgtgccactgcactccagcctggcaacacagcgagattccttctcaaaaataaataaataaataaaaaaggaaatcttaggcatatagcatgataagtgaaaaaaacataaaaatatcctattaaagtaaaaaacatacagcatttatacaggaaggcctattcaaagatatacataaggttttaaatagcctctgttttaaataaggtgtaatgtatataatagataacacaacaatcacttagtagaaagtatacttacagagcaataaagaaatttatcctggtatgctcacttatagtaaatttagccctcttgaaataaacaaaggtcatagccaaaagatactataaggaaaaaagttaaaaattaatattaatgttttgctttcataaataaaactgctttaaaatagttaactttaaaattttctgatgaataagctaaaacaataaagtgttacttattatagaattgtgtacttaatttttggattcctgtaatccaccatgtgaacagtgaaaagtaattcttgactatttattatatcattataaactagaatggactcctaaattttattattgccaatagtttgagctaaaatcccacttttatctaat

SEQ ID NO: 93464 - DNA, 1884 bp, Homo sapiens
ggttcaagtgattctcctgcctcagcctcctgagtagctgggattacaggtatgcgccaccacacccggctaatttttgtattttagtggagacagggtttcaccatgttggccaggctggtctggaactcctgacctcaagtgatctgcccccctcagcctcccaaagtgctgggattacaggcgtgacccacgcccaaccctatattactgtttaaatcattttttacataaatagtaatataagatgcatattttcttctgacaatctggaagaaatgttttaaaagtataatgtgaacagtaatgttaaattatggtctctgtgtttgtttacttagaattttgtgaaggtactttttatgcctcctaacttgcatatttaaaccctctcctgccttaatttaactatggtatttaaatgtgggcaagaggtatagggaacttaaataaatataatgttattattttagtagaaatgtaaatttttcacttttctgaaagcatcacacaggttattgaacttttagatggaattcgcacctgtgaacttgctctttcatgtgaaaagataagcgaggtcattgtcagagattggttggtttgccttgcaaaacagaaaaatggaattttagctcaaaaagtagaatctaaaatcaacacagatgtacaactagattctcaagagaaaattggagttaaaggtgagctgtttcaagaggatgaccatggtgagcttcagttttactttatgcatgcagtaatgaatggagaatgagttcctgagtatactgaccaatagattataaaaatattcctcagcaattttctatagaaaagtgtgatatttattctgttaagatgtataaggcacagaataatgacttttcctgccttttacttaaaactctgatacctttgaagaattgagctttttataatattcatattttacttgtcacaaggagcttggtttgtgaaataatttaaatgtattaaggatgttttatatttagatcactgattattaatgggacctgataggcaaatagctaatattccaaaaagcaacttctaagatgctgctggaattcttgaaagaactgagtttaggtctttgtcatatatacacattatttaggccatgaacaagttttcaagtatcagttgatttatgatataggcttatccatttggttataaaatcatatgtttattacataatcattgacaaatagtttctgtataataactggcagagtagctctaaaacatatgcaaggaaataaataaagaaaaaacttacaataaagagagtaactcatattttaacagttttgtgaaaaaaatagaaaatattttatgtagcttatagtacatatatttttttacaacagaagaatcgcattctgattttccatatggatcatttccctatgttgctagaccagtacactggcaacctggtcatacaggtgagtaatgttttcagaacatattaaatggtgttttttcttttaattaatataatgactttatgtttttcttctcttaaattagcttttcttgtcaagttgaggaaggtcaaaccacaacttaactgagtactccagatgacagtaactgacttgaagatggaaaaatatcaaaatagaactttatattgaaaatcactgcttccatagattggcatttttagctattactatgacttatataacttatacatataattttgaaaataacaactaaaagatgtataacatagcaaaactgcttaaacatcccattttgacacttgtcttgcagttagtttgacattttgtagttaatgattccaaattggtttagttgggccatctcattcttcacttcctgtaaacc

SEQ ID NO: 93465 - DNA, 1052 bp, Homo sapiens
aagtcccctggtccccctggggcggcttccttctgccgggccttggctcatcagagttctggtttttgacagagccccatcttgggactatctaactttcctctgtctgtgatccggctcatcagttttgcactgggcagttggtatggactagtctgtacttgcttccggaccttccccctcctgccccccctttgggtgccggctcaccacgtgttctcgtccccgtccaggttgtgggactctcaactcttaacttttgcctttcccaggcacctctacattctcagctttttgaactcactgctttttgattttaacatctgctcgcccctcccgccccgctttcaagccgatcacactgctccccacccaccccaatctgaagtctgtattaggatgtggaggttaagtgaagtagtagcttgatttagtgaatgttttatgagtgcagatgaaattacccttagatggaaaactgccgagttaggcagagcttttcattgttagggacccgtgtcaggtaaatgcctttcactgttgagtcactcagctacatctctctaactcagcatgcacgtggttattgcgtttacagagtagccaaaccgaatcactgcaaagtgatttggaaacatcaggtatcctgaggtgtgtgatgtgagctgtttcaatgtggagaactgtaaaagctatttaggatcttactctctctgacgacctgggaagcctgctaaatttttgggttgggaaaagggatacatataagttgctatactttgggcatgtttagatatttttcaaattttaagctacattttcatagtttatcctgttgattcataaaataaacctatcagggcttataagtcaaacataaaactaaaaaaaaaatcagtttttattgttaaaattacagcgctctgcttatcttttattttcaaagttttctgtggttgtattttaacagtcctgtaaagtgatagtaatactaatgctgagagaaatacggagcagtggttaggtaggtgcgtggacccaagctggctata

SEQ ID NO: 93466 - DNA, 1775 bp, Homo sapiens
tgtcatattgagcaagttgttttaattttgaggacctcattgacaaacgagagttgagctacattaaacaaaatttttttctaggtttcagcatcgttttatctgcactgtctccttttaaccacatgactatggaatcccctgaaattaattgcattttaaaaaaactgattgaaaatcagagctaagaaaggtaaatgacttgactcaagccttaataaccaataaaggagtgtggcctctagagtcatggtgccccgaactcctggtcaagtgccccgattttgttactctcaatcttgagtcacagaactgagagagctggaaggaatgtagagacattccctactttgagggtgtgtcctcttggagcatcagtttgacttataaactaaggagagacagttttcttgtattaaaacaaacttgcacatatattatggtataaaattaaaaagtcatatgtactgtaacaagatatcttagaaaaaaaaggcacatgttaaggtgctctcatcttattaaacccttccttttattttacatctttgaggcttagtgtatgaggcatgaaaaggatgttgctctgaacccactttccagcattttgttaaggtcctgctatatgatgacatatagtactctcaaatttgaaatagaggtatcatcacccaccttttaggatcctcaggatcaaattaggcaatgtatgtgactggtgtagtatggcctagtatgtaataagtggcttaataaatgttattattgagtgaatctggactcgttttaccatttaatttggcatttaatatggtaaatcaatttgtaagaaaagtattctatgtttggtttagtaattggcagtttgctacgcaaggacaaagtgtggtgatgataactcatcaatggagaaagattagttagtgctgggtttcttgggtaacgggttaagtttgtggttcacaggtgtttagaaaaattagattgtcacctcttgttggtcacagaatgattacaatactttgcattcgtgccacaatagtttttagagggtttttgtacgttatgtagctgagcattccatttggtctttggagcctgggggaagaggacctttaatgaggacaagaagataggaaagtgcaaaaatacaaatggagggactctatctagatggatgctgtttttaagagttcctcaagtttatgtgtgtaaactgaggcagaaatgttaattatattctctaccaaagccacatagtaaagtgactgagccacctaggaactgatgctgctatttgattgtcttcaaacttttgaaagtcttccgacttttctgcttttccttctctaacagaccttgtctgctattggctatcacagtaaatgtgtttatactgctttgctgtcactgcaattaagatgaccctatacagcttagtacttgttgaatgaagcacatggcatttcagacattggacagggtgtctgagttgggtatctgcattaccatcccttagagatgtagggcagttcacatgtgctgtgcagtggtctgtcttgaggtcttgctaacagttaaacttcctaagaagtaaaggttgcagatagatctgattggcagaaatagaagtttctgtgtattaggacttaattgatttgttataaatactgtatgtgattttttgtaaaatgaatacattttgttcactgttatctgtgaaacacacatgcagtggcagtgagatagatgaagaaatggattaggagactaat

SEQ ID NO: 93467 - DNA, 3022 bp, Homo sapiens
cttttcctgctgagatggtactaggttaatgtacttcccccaactctccttgcctgaaataggtgtttgtatttataaccttatacagaaattatttttgcccctggaatcattcaaaggtagctttagaaattcatgtaactgaaacggggacctagaacactcctaaaattgaggtttcaatgtttcaacaagttaaatgagaccatcagactttgtactttggcttttaattgtaacttctcttttgtgtttattagtacatttctaaggacttgcaagatatatttctaaggacttgcaagatgtgtattatttttttctgtaagtaggttacctttttttgttagactgcatttcatctgtgtccaatgaatcaaattctttaaatgtaaaatccccctaggataactaaaagaaaaaaatggaaagtgctttttaagtctactccctgacactctttatgcactggtaacgttgtggttgtcattggtttttcttgaattaagacagatttttaggtgtcttgggctgtgtgcatgcccatgcgtgctgtagagctaagatcctgcactattaagaagatattctcttttctatggtattggcttgttttacagtgaaagaatggatttctcagaactttatgctaaaaacatataggctggtgagccgtaatttaaaaaaacacggaagagaagttctgaaatcataataaatactcagcattataaactgatgtagtgcttttaagttagggtcattgtctttttgttgggaagacatgagctgttaacatcacttttgaaatgaaagaagtcttgtggcatttgccacttgagtgagacttttgtctctgaagtcactgaatcactgagccagcccttgaccagtcagtggggcaacttctctcttgtgtgctctgagctgctctactagttaaagctatttgttgactcaaattgaagttaatgcacgtttataaaggtaaaaacttttgaggctcttttcttgacaactaagctagaatttgtggaaaaattaggagagataaaggagagttggctgcttagatatggacttacggattcatagatttttgggtatgaatctctttggttggggagtgaaggcttcgcttaggttggacctgtcaggaggggcggcctgtttctgagaagtggaaacagcattgaggcttcttggacctgttaggagagtaccaagaacatactaggttttcctatttgctgccttttttccataggggtgggagacgggggacatagaattacgagtttctcttcccattggagggatttctttttgaagtagtgagaagtaaatcacccaatagcttctctcttccccccttttaaaatgtcttttgtgggctggtgggcatttgtatttgttcattaacgatgttttagtatttgcaatactaaataaaaacattgtttttctttttttccaggaaagtccccagaggaaaaaaaggaaatcagaagctgtaggaatgagtaaccagactgacttattggctcttggcacagcagttggtagcattttattatacagcacagtaaaaggagagttacacagtaaattaatagtaagtgtgtgtatattttatttaaaagtgatgtgacagggaagctgattattagagattattaaaaaaaaaacacttcaaggtatgtgatgggatctgtgcagtagggacagttttcagtctcatctacgtttaaataactgaatagtaatatttgataaaagctataatagttaacagcagtccttattatgggtcagagtatgaagacttattgactaggtttaaaataaggaagggttacaggaactctaaggaatcatagatagcagctgtggaaagcagctccccacctcttgacctaggggaataaaggaggcagttgaaattactgctaacactgagatcttttaggggcaagtgttgtgctgctgttgctgtctcttgaagagtggccccatgggcatgggatcgagacttcaaactgagaaggaggctccagctgcctggtgctagtgtctctgatggagatgatgagattggttctcctagggttggataaattggatattgggttcagctgctgctgttgggcattaccactgttggggtgatgcaaataaagagacaggaaggaacaagtcccttctctctccatccttgtctccctctagcagttgctattggtagaacctatggatcgagctgggaaatcagaaatcaggttgctgagtcccagcatcacagcagaatataaaggatggtttggcattggaagacagtaaccgaactggtctagtaggttcagacaatatctattgcagtgtgtttttgttcgctggacttctgtatataggagtgttttaagttttttgttttaaataacatttgtctataggaaatttgtaactacataaagttgaaaaggaaaaaaatttatacctaagtctgtcgccgagaggtcctcttaataatttgtatatttctttgctttatacatacattaaaaaaatatagttggctttctgttcatctagtttgtatcctgatttttttcattagattacaacataactatcttatatttgtcaataactggttatagagatttttagtgactgcttaaaatcccaacaagtgggatagtccattatgttacttaacttgttgaccatttaggggtttccagatttttaaattgttgtaaaacaatttctttttcttacatggattcacagaattactaacctaaaattagtgagccaaagggttgctatatatgtagtataaaaatactttctggaataatttttactaatttatgcttaatatcagtgataggagataagtactttatctcagcagtatcattaccactactgaatagcccaacaaaacagcaacaacgacaacaaagaaacagctaatttggtagaggaatattttaatctgattttaagtttgcat

SEQ ID NO: 93468 - DNA, 1035 bp, Homo sapiens
agcgaggaaggaggatcatttgagcccaggagtttgagaccagccttaaattttttttttttttttaatctacagagtggtggacatgacaacagagtcaactgcatacagtggcatcaagacagtggctgtttatatagttgttcagatgataaacatattgtggaatggaacgtacagacatgcaaagtaaagtggtgagtaacattcatggtatcaggaaatgcaatagacgtggataaatgctggacttgtggggaatgcagacattaataaggttataggttccatttacaaagaacttttaatcaaatcgagcatgcaagattttaatacataaaatactaaaacacataaaatacataaaagctaaaaatggtacaaaaataaagcaactgtatgagagatgtcacaaggtagcatgtgactatttgtcagccgagtacagtagtgttgggaaggcctggaggaggagaagggatttcagttggaccttctaggacaggtaagatttggatagaggagggtgggagaatgctttcaagggtggagaaaagaagttggggagatggcaagaacaaatggagggagacaggaatgtaaaagattgacttggcacagagcaaactaattcagaggagggacatactaggggataatggatggcagatgatatgggtcaaaggatcctaagagcctggccttgtgtcatagataaagattatagaccattgattatagttcaaccacctgatcctgaggttggccgtataggagatgcttagtaaatgtgggctgttgaatatagttccacctactgtgtagttgaggaccctcatgaggaaaatgatgcccatggtcctgcagctgccagagaagggattctaatgctgctctttttagttctggtacagttgggattttagattctgtctggtatgcaagagagagccattggccaagtgcagtggctcatgcctgtaatcccagcactttgggaggccaaggtgggaggattgcttgagaccagactga

SEQ ID NO: 93469 - DNA, 1056 bp, Homo sapiens
gagctagttaaaggcagagaaggcagatagattgttactgtaatctggttgtaggatggtaagtgtgggaagttaaaatgggaatgatcgcaatcattgagttgggatattgagtttagttttcagctttgctaactaggcaagtaaaccaatttagagggaggaggtactagggggataatgcatggtagaggatagaaattatggtcagaagagatacatggttttggggtttttagacaagttggctttgaaataacattatgtgaaagataagacccagcagacagggtggtgctagaggcttagatttaagtaggggtttggggttggagatgcaggtaagtaaaccatctccctgatggctcagtgagtatttgtgctccatttacttgtagcagacacagtagtttctatgttagtaacctgttagaaatgcctgcagaggttctgatccagtaggtctggggtagggcctgtgttactgtattctggatgagaggtcacaaagataggtccttcacatagggactagtaatgttcaaagagccattcaacacgtgtgcgttttattgtatgtaatcataagcctgtgaggtgaactttagccccactttgctgttttgaagtagattaaacaagagcctgacctctcatacactaaactgtgttgtctcataatttcattatgtttccagcttcatcgttagcattcttacgctgccgttacttggattttgttttctgttccagacgctatgtattgattttctgttgtggaagatgaggatttagctcttaccttcttttcccccttccagttctctcaatattgttgtatcacagtgtttgataagcagaatttgtttacattatgactagttaattattgttacagctgagccttagactttcctatgtttaatatttttttttgtacaaaattttgcttttcttggggtttataattgcttggttttcatttcattagttactaggtcattctctattagtggtataaatcttctcagttgtttctggacacatcagtcagtc

SEQ ID NO: 93470 - DNA, 1430 bp, Homo sapiens
tgatttggcctcttttatgtttaaggcatccttcaaatcactggagatcctgagctgcctgttgctatttggaaacaaagcattaaaaagctgattggtggctgggcgtggtggcttatgcctaaaatctcagcactttggaaggctgaggtggaaggattgcttgagcttaggagttcgagactgtcctgggaaacatagtgagaaccccctctctacaaaaatgaaaaaaattagccagatgtggtggtgtgtacctgtagtcccagccacctgagaggctggggcaggagggtcacttgagctcaggagatcgaggctgcagcaagctgttaccttgccactgcactctgcctgggcaacacagtgagaccctgtttgggggaaaaagtattgattggaaggcttggttgtgagtgtgtgacttttcaattgttgtgcttcatttatagagtgattgggaagccgtcaaatgccaatatgtgtatatcattccactggaaccagttacatttcccagagaggaattttttcatctagtgcttcttaaggcttaaatgtacatacatcttaacttgtgcatacagatctgatttagtaggtgtaactaggttagagcttgagagtgcataattctcacaagttcccagatcatgctgatttatgctttgagttacaaagctcctgagggattagggtgtggggaggatagaaggtattattagcctaactagcattttcaatactgagtggggaagtagatgaaggaagcttatcagcctcgtctaggcaggatggcgattgtgtcttttatatatgtatcaacgtagtaagtatatgttgaatattgaatgtaaatgagaattgaagctgtgggaatcgataaattggcaaaaatttcagaagctggtaagggtaaaggaaaagttctctcgtacattatagctgcatttctttgattatcagtgaggttgaatttcgtgtttatcaacaatttgtatttttcctatgaattgcctgtttagttgtttatatcctttgtctgtttttattttgagctctttttcttattgatatgaaggagctatttgtgtattgtgagtattaatcctttgtaatatatatttttgatacttttttctagctttttacatatatatacagataacgtgcgtgtgtgtgtgtaaatatatatatatatataattattatttttattttttttgagatagggtctcactccgtcacccaggtggagtgcagcagtggtgtctcagctcactgtaaactctgcctccggggttcaagcaatcctcctgtctcagcctcccgagtacctgggattgcaagtgtttgccaccagccctggctaatttttgtatttttagtagagacaaggtttcaccatgttgttcaggctggtcttgaac

SEQ ID NO: 93471 - DNA, 3301 bp, Homo sapiens
acaggcatgagccaccgcgcccagcctcttaataacctcttttgttattcaggttcctactgttacttgccttttttttttggagacagagtcttgctctgtcacccaggctggagtgcagtggtgcgatcttggctcattgcagtctctgcctcctgggctcaagcgatcctaccatctcagcctccagagtagctgggactactacaccatgcctggctaatttttgtagtttttgtagagtcagggtctcgctgtattgcccagactggtctcgaactcctggactcaggcgatctgcccacctcaatctcccaaagtgctgggattagaggcatgagccaccatgccctgcccctgctgttacttcttataagtgaatagccaagttccctattgcctatgacagcattaatatgagtaacaaacagcaaagactccagcttctaatcatatttgaggtagtgaaaaggagtcatttgtacctaattaatttttacctgtcagattggggtacattcatgtggatttagggtagaaataacctttttgggttgcaactttagagaaatcgtttgtgttattaagggaattaattaaaggccagccttccagagaaagcgagaattgaggtagggttaggatgggcttggggaggtctagccagtatggaactttcctggacattcgcaaagttcatctcctgggtcacaggatgtacaactacccattttacattcttatcactctcactcactcattttctgatacttgttgagaatctttatcccatgcctgccaaagggagattgtgctgtgttaaggaatgcaatcaatgaagcttttatcacagtagtatgtccagggttagttacctgacacaagcttttagggaatgtaattgtcacaggacctgaggcgatatttttaatgattgttcagtttgtttttttgttattttctgctctgagtaaagttttctctcatgtattgagatgcttttttttctcttcacaatatagcaaatggaaaggcgacaatagcagtgtcagttccctatgtatcagcccagatggaaagatgttgctttcagctggtcgaacaatcaaactatgggttttggagaccaaagaagtctacagggtgagcgaatcaaattatttgtaagcataaaaattatagagtaaacacagagaaaggcagaagtttgaaccataagatattattttaagaatacaaattcttcattgtcaggtacatcaaatagtttagtggataaaagttagcctcctaatctgatttgttgatgttaaagagactagacatgtctacttcaaacgtattggaaaaatgaacagaaccaatattcaagaaacaagatttttttttttttttttttttttgagatggagtctcactctgtcacccaggctggagtgcagtggcgtgatctcggctcactgcaagctccgcctcccaggttcaccgccattctcctgcctcagcctcccgagtagctgggactacaggcgcccgccaccacgcgtggctaattttttgtattttttagtagagacagggtttcaccgtgttagctatgatggtctcgatctcctggcctcgtgatctgcctgcctcggcctcccaaagtgttgggattacaggcgtgagccaccgcgcccagccgaaacaaggtttttttaaaatttaaattttattatatacaccaactatgtatccacaaaaaagaaagttaccttttaaaaaacaaaacagattttgacacagggtctctctctgtcgcccaggctggactgcagtgacgccatcatagctcattgcagccttgacctcccaggctcaagcgatgtctcacctcagcctcctgagtagctgggagtataggcgcttgccaccaggcctagctcaaaaaagattttcttaataaaaaagtttttactatgtgatgattatggtaattttgatttctagcctacatccagcatttagtccacttactgtatttgactgtggagatttagtattatatttttggaggaggaaaaagctttcactcagggcttacggaatatttggtgctgtgatgatgccttaatattgtggtttcgactcactgagagtaaaatgaggacctacaattccttggctgtgtctgagcacccaaagtatgccttttaaaatggatagaattaagtgaatctttaattcaagaatgtaagaaacaaaggtgcggagtggtagggtcatgggagttagaaggaacatctaaattttcagtattttcagatggatttttttaaaaagtgggagaattatagcacaaataaccttatttgcttagaattgaattgaacagttacttcatcgtggagctctcctttccgatatgtatcacatatggcttgttttgataatatatactattaatttttgtccctgctttgaatctgctctcctaactgagatttaactttctctagcatttcacaggacatgcaacgccagtttcgtcactgatgttcactaccatcagacctcctaatgagagccagccctttgatggaattacaggtctttatttcttatctggagcagtacatgaccggttacttaatgtctggtatgtagttcttttggatttgggaggtagcattgaaagaatctgtcagagcttatgtagttaatgtaaattatgaatatgggactttatttgttgtatctaatgttggatttacattgagtcataataaaaaattgagcctgcctacaaaacagatctttctgagaaaaaattaagtgcattatgtattaaagcctcctgtggttgtttagtgatacagtggactgaacatttctgtggttgggcaatttagaatatcttttaaaaaatttagaaagacctttgattttgaaatatatggcaccactgggttaatgcagtagtgtctgtttatggagggcataaaattgcttggctgtctcagaatttccagtaactcctttttgcagtagctgctattaactagttccctttgaaacctcttttaaaagtaaaaatcaggccgggtgccgtggctcatgcctgtcatcccagcactttgggaggccgaggcgggcggatcacgaggtgaagagatcgagatcatcctggccaacatggtgaaaccctgtctctactaaaaatacaaaaattagccgggcatggtggcgcacgcctgtagtcccagctactcgggaggctgaggcaggagaattgcttggactcaggaggcggaggttg

SEQ ID NO: 93472 - DNA, 2934 bp, Homo sapiens
gggatggaggaagagaggcgatgaggtcttacaacaccccttcctagccatacaggcaaaatggctttttctgtattcccggcaagaggggcatgtcagctccatgttgccagcctttgcacttggtagtaactttgttcatctaacttggagggctcattctccttgactgttctcttcttggcttaaacatttatctagaatcttgacaacaccaccactaatggttattttgacagaggtaattatttttaaatggattcttgctgtgtttttttttttttttttctggttgtgtaatggggtgggaaggacagctgagttttcataaggtagattggggactggagtatgttatccattataatacgttggttacatttttcttttagcctgtcaagttggctgttgtttgcagagatggtcaagtccatctttttgaacacatattaaatgggtaagtaagaaattttccaagtaagaaatttgtttctttccctgacttgttacttggtcatactcccacctggttattctttgcatcatattactattcagccagattattttgaaagcatttttctttatccacatgactatatacattgccagttaaaactgggtgtcaaatttatatatttgtgattaggagattggctttttatgatgtatccttagtacatgttggataattctaatgatacatttcagaagaaagtggctaagctggagagattcacttgtgaaccttgatgatgttttatttatctttgagcgtgctttacttccccttgccagtgctgttgttttgatagacaggggagtattgttgtcaggttgtgtagcagtcatagaccaggagtcagcaaaccggcttgcaggccacattcagtggagaccatttgtggtctggagaacctgaaatttttattattttgcccttttcagaaaacttgccaaaccttgtcattatactgtaaacatggtctgagactcagttttgcgcacaaattttgttaagctttaaaatggttttaacctcttgttgtcagttggcacccttcttttaagataccagtataggaatttatttaaatataaacagattatgaaaaaagtgtatactcatttcaaaacacccaggatgcccaaacacttgattttaaaacctgagtctccctccattgagttctgctcctataggtaactgttaacattttagtgtgtaactcttgaagcttttatttatagaaggatgtgtgtacctggaatgtataattgagactcagaagaagtgggacccaaaggtagctggccacagtgaggactacctgggcagtggcaaaccattgaaggatttcaagcagaggattcgatgagctttggcctgagttttaagacagtcgttcattgagaatagactatagagggtgaaaggctaaagtagagaccccaaatcctgggtttagagatagttgtggagtcaggatgataggaggagtaagttggaaagatagggatcatgagatgcttacacctgggatattatgcaggatgtacacttgtggagaataagtggtaataagatgcgtagggtgtgaggagtttgtggctgaaatacagtgaggggcatgttcatttgagaaaggagttgacagatcagagtgtcaggagtgtccatcaacctggacactgggtgtggaaaccactaagaaaggaattcatttagagtaatgttagaagtaatgacctcaagccactgaaatctttacgaaatgtggatggtggcagagatcattggatgacggcaggagggagtggtagctggtatctggtgacaacaattgaaaagattttagggacgaaaaagggatagactattgtcttgaagtgtcagtgaagagcagggaacttatttatatcatgtccaaggcccctgacacaaatggtatgggagagaaaacaggtacaagttgggagtgctgcagggacaagccagggtagaggaagaatgtgaagagagcccctagagaagccattgaggacacaattttgctgctggaactacactccagaggcttgctgaggcttttgggggttgggagaaactggagacgggactgactggaacagggcttggacagaaccatacaggacctgaagtacagggtggcaagagaacgtttggcagcttggggcttcttggcggggcctgaaaaaatgggacagagggggaagtaggtctccagtctgattttggtggtgaggttttgagtataggtagaggtaggtgaggtcttgaaaggagtactcatgctccggagacccaggtgactcctgatggcagtatagaggctagaggggggtcacatttcgtgacttgatgtcagttccagagagttagtatgagacgttttttcaaattctttaatctcatttccccctccatttccaggtactgcaaaaagcctttgacttcaaactgcacaattcagatagcaacacctgggaaaggcaagaagtcaacaccaaaacccatccctattctagctgctggtttttgctcagacaaaatgtcattgttgcttgtatatggcagttggtttcagcctactattgagcgagtggtacgtagctgctactctggagtaaagcaatatagcatccctgtgtccatggaagagagtgattttaaaaataacaacattggtctttaagataaataatatattcttttttaattaaaggatttcttcatggagtggtttattttaattttgagagctctatatccaacataatttaacacctggtcagtttaaagcattgtttgagttatttatatcagccctctcccttggtactatgttttaaaaatctggtgtgtattttgcacttctagcacatctcagtttggactagccacatttcaag

SEQ ID NO: 93473 - DNA, 2805 bp, Homo sapiens
cacacaagcatacgtgcatatggtttaattaaaaaaataaaaaaaggagaaaagtgttaagctgtaaacatggctccttgccatatgtgaattccatccctctctgtttgcagccattgttgactatttttttgcatctttcccgatattgattaattacatgggcatatagaattatgtatcactttaaatctttattggtttgctgcatctgactcccccgatcctatttaatatcgtgtcaggacatacagatgcattttgttaatcaacagtgctacctttgacttgcttatggaaaggacaataggagagttaagagtagaaccatttactattttgagcagactgtttcttaaaaggatgatgaactgatacgttttctttaaaacctgttacgtttaaaaattctgttgaactttaaaaaataaatgtgaaaaattcaagcagttcatagctgaggaaagtaaaccttggtacccaatgtcttcagaattaccatttttcttaactgccgtcagtctgagtggtgatcgtggttaacaattgagtgtggaagtcttccatactttttaatattttataaaaatgcacaagtagtcatttatttttcattttgttcttattcccagttgctttgtttgacactcttttttttttctttcctctcatcttcccctttaaaaaaaatatattttcaggctttaaactccagagaacctcatatgtgtttagtaagagatatttcaaactgctgggcccccaaagtagaaacagctataacaaaggtgagcacattacaaatttgaagttttaagaaaaagaatatttctttgggtgaatggaactgttacttagtattatgattaaactgagttttttattctttaatatctttattctcttgtcttataaattttgtgggattatggttttagatgtcaagattgtactcctgatttgttgagtgaatgaatgaatagaagactagcagttgaagaccttggatgtggttcttccctgcccaccatgcatgatcatctgggccaggaagaatgtagggataaatatcaatatcagatttatcagtagatagtttttatcaatctcagtacttaaaagagcattactttgctgagaggaatgctgtatttcagggtgtaataaaaccgtcatggggctagaatataataccacaaaagcataggagcatcatcatggtgctccattttgcatataacttggtgtctacatgtaggggacgtgtttcgtggtttagtgagaaagggaaagccaagacatgctatgatgacatccatatggtttcgctgctggctgagtttcagagatgacacctttctcttggctgtctgagcatttctggcagagattgaattctggaggtagttgtaaaatgtgtaacttcactttttaaatttttaaaaatcattgtgtctttatgtaatctgtagttttttaaagccagttgaatttagtagtgggggcttgtataccaacgttagtgacactaaatatttaataagttctgataaccaactactgtcaggccagtcggattttactcttatgtggtattgtaagctttaaattcacagtctttcagattgtcacttaaaaagtttgtcaacattcaatttaaaatatatcttaaattgatatcaagttaattatattgcatttttccaatagaggagccctttaaaagctgttttctcattgaggatacttaaggactaaggtatgatttcctttttcacactttggctattcctgttgaacaggtgaggacaccagtgatgaattctgaagcaaaagttctggtgcctgggattcctggtcatcatgcagctatcaagcccgctcctccacaaaccgagcaagtagagagcaagaggaagtcagggggaaatgaggtaatgcaactgctttgaccatatatttgagtttgtgatttaaaattactgggaaattctaacaagtgtgttggatagagccaaagttaaatctttagaaatttactgagatttctcctgttatgctctcttttatcttcaccatcatagatttcataattctagattgtcatctttgtttaacagagaagatggaaccttcagtaactaaagagggtgctgttttggccattagttagtagttagctgggtaacataaaatggaataagtcaagccaggacttgctgtgatgactatcattgggtttcgcatgttgctgagttccagtgatgcctcttttctcttggctgtctgagcaatcctggctaacctagtgccagttggtctctaaaagtgatagtcattataactgcctaagtgtttatgatcttcattttttcctcagttcccaaaatcctttgtggttactgtacatgtctgtgcagagttgttttttatcttccattcacattcttccctcttacataaggaatctggaattttaactgtttcattcttacagaaatactaggtttctttagctgattttactttaatttgtattctttttttttctttgtccaatttttgaaggataatttagctgattttaaatgcgtttattgggtggtggggtggggataacatagcttcataaaacatgttcataacatgttcataaaagttattcctcagttacatgatagctgactttaaaaataaagcgccaactttctttggcttggcctagtttcaactttttaatttccccatgtcctttttaatcttttttgtgttaggataaaccaagcacatctgtttgctatgtta

SEQ ID NO: 93474 - DNA, 2142 bp, Homo sapiens
gacacttagttgtagtatagcatattctagctaataaatcatcatttggagctcactgttaaaaataggaagacattttaaaaaattgttttgggaacataacatttctttatgcccttttaataatattttgtttcctcctgcagatctgagagtgacaccaagggatagttatagtggggcaagcttctgtgagaataggtcttaagtcttgtgttctagaatcagatgccaggtccttgccttttctgaatcttcatttagaaggatttttatgaatgaacattttcaaactatgtgcttcttgggccgttgtttttttcactagaatctggaagcttggattgcagatgtttgtctccaacattggcattatggtaatgaggttctcttggaataagaatgagcatattagtgttttctagggttgaggtgtaaatctattttattttattttattttattttttttgtctccaaactactttaagtcttgtctggtaacacattaacaatcctttctgttctgtaggttagcattgaagaacgtctgggagcaatggatatagacacacacaaaaaaggaaaggaagacctccagacgaatagctttccagttcttcttacccagggcttagaaagtaacgattttgaaatgctaaatgtaagtatatagcaatttttaactaaattaacatggttaatatttcttagaaaatgattgacatagcacattcacagctgtgagccatcatgttacagagccatttggaatgtaatgttttatgagtttagtcaaacatgtatcacttggtggcattatacagacagtcaccaacctacaacgggattgcattgagttattttgaacctggaatgcattttctcatagaaatactgttctgaattattaggttattaggctttagttcataaaagcctttataaacatagtgtagctgaatgataatactcagcattctagatcacaatttatatttttttctgtaggaaaatgcgttcctgagtttttactctggattccagaaacttatttccccctggccgtgagagggggcagtgaggtggaaccttggcaatgggtaggaggtttgggggaaaattcaagagggttgggggttatgttgtaaaatatgtagaggtaaaagtactagaaactttgtataaagggaggcatttatgatttctgtgtaagttggtgactgcttgtatgaagttactcagtttgattctcttaaattctacagtttgacagcattctatctagaatatttaagtgaaaaacagttcgattcaagtactgcctgatcagattaaagcagtttacatttgctaatgcatttattcttaatgactcatagcagtgttgtgatttcagtgagtgtcaatgtgactttaatccataacctatgaatagtgtgtctcattttatttgatccatttttttagggtacattgatcctaaaattacttttaaaatagtttgtgaatgtgtgtattgtggaggtagattttagtttaccatggcatagaaacctgggtgaagatttggtgaaaaatctgtagaaaacaattgacagtgtttttgaaatggaatataacttaactgccctcattgcgttctaattatgctttgaaaccttcctcagtaggtacaaatgaatcaagtacaaattttttctttttcttattaagaaacagttcaaaacatttagaatagtacagtggaccatcacgaactcattacctagtttcaaaaattatcagtactagccaatcaactgttgatttgttgatagtctcacttgtctccccaagttatggtgaagcaaatctcagatgatcacatatcattttatccataaatatgccccattcaacttaaaacatcctttaaaaaaataaccataatccattgttgcacctcaaaaaagtaattctttaaaaattatcaaatatcattagtgtttgtatttccctgattgtctcaaactttttttttatttctgctttttttttttttttggagatagagtcttgctttgtagcccaggctggagtgcagtggcgcaatctcggctcactgctatctctgcctcccaggtcctggttcaagcaattc

SEQ ID NO: 93475 - DNA, 1489 bp, Homo sapiens
aaaatggatctcagttttatctcaccttacacaaaaatcaatgcaaaatagaccatagacttgactgtaaaacctaaaactacaaaacttctgggaaaaaacaggagaacatctttgtgaacaagagtggggaaagatttcttagatatagcatacaatgcatgaaatgttaaagaaaaaattggtcatttgaaccttatcaaaattagaaacttctgttcttggaaaaacagtgttaggagtataacaaaacaagctgagggctgggaacaaaatattagcaactcatgttagacaaaggatttgtatctggactttaaagcagttggtaaaggtttgaatagacacttcacaatagaattcaaatggccagtaagcacatgtaaaggtattatgcattattaattatcacagaaaggcaaattaaaaccacagtgaaataaagcttgcacacaccccttataggttgataaaaatgcgaaagacagacaataataccatctgttggtgaggatgtagagcagctgaaattcaagtatgttactggtgggaatgtaaatggtataactactttggaaaacaattagtttattaaaaattgaggatgtatccacatatgatggagccattctgctgctagatatttaccaggagaataacacacatacgttcatacaaagacttcctcatgaatgttctttgtaatggccctaaactggaaagaacacatatgtcctttaacaggtgaatggagaaacaaattgttcatctagcaatataagtaatgtgttattaatagaccagtagtattcatgaatctcaaactaaggctgtgagaaagaagccaagcaaaaagtaatataaattcctatttatataaaaattctggaaaagcagaccaatacatagttcagtagctgcctgggaatcggggtggaaggagggatacatttaaagggacccaaggagacccgagggtgatacagtgtttatttttatcatatcatagtatttgtttcatgggtaaagagtatgtcaaactgatcaagcagtacactttaaatatatggtgtttattacgcttcatttgtactgcagtaaagttgtaaaagaaaaatcttgtcttcaacaccaccttcttagtagttataactatggcttataggtttgtttctttacatacatccttgatggaaattaatgaggctgactcctctgtttattatcatttcacttagtttgggataacgtatttttatttgctgattttaaattagaaaatcattactaattactgagaccaggaggtcaaagctgcagtgagctgtgatcatgtcagtgcactccagcccagacagcagaatgaggcccctgtttcaaataaatacattaataggttggaaactaacttcctctatttttgccttttggtgccactgctgtttctattctgagcatatttatagcaacaaccatcaccaacaaatac

SEQ ID NO: 93476 - DNA, 1071 bp, Homo sapiens
ccaccatagatgtacgcttaaagggttttgattcaagctctcattatgtcatcttttgattggcataaaattttaccaaaattttgacacctactttaaaaggatttcttgctttctaagtaattttactgttttgctcactctagggtggatacagcccaaatttcataaaatggaggtttgggaacatctttaaagtggcatatgtctgtattcaaacgtctagagatgttttaataaaacacaaagaagtaaaattacttcagtaatgaagtaaatttactgatacccaaagactgtgcttgtctgttaagcacaagacgtaatataacatactccattcagtccctccaacctttatttttgctaaattcagtttgtagtttattgccttggtcttaaatgatttaaaggattcatttttacagacttttttttttctgtgatgtccttggtttgtcagtatgctcatcttaataatccttttattttctcacagaaagtacttcaaactaggaatgtaaaccttataaagaagactgtattaaggatgcccctgcatactattattccgttgttacaagaggtaactgactgcttttttcatttcagcatcctaatgccatgagttaaatggaaaattcagtagttagagaaatggatttgtaatacgtaaggacacatggcatttagagtgagtaatggatggaggaaagtactttagacaaaaaaaaaaaaaaaaaaaaagtgaaattaattcctggggcaatgaaaggaaatgtcattggcagttttacctttattctgctaatggctattgtgtgtctgtttacctggaggcacttggaacttgtggcacagaatgctgtatgtacaggatatcatctacatgggaataattgttgtaaacaccccaaacataaagctcccaaattctcattttggtttttcccagtatgtcctgtgaggtaccttaacctaacaccgaaaccatttttatatgtattgattttcttaatcacagtttggttgttaatctctgtgactggcagtatggaattggaggtggga

SEQ ID NO: 93477 - DNA, 1026 bp, Homo sapiens
tgttgatatcgtaaaactgctgcttatagtacctgccgaacctctgatagctgcttaagactctgtaaaaatatgttttagctaaaagactaaattttgtgtcttttttcttgataatctgatcaaacatttaaataacatgacatcttaaagatcctaagcttatagtatattatcatcagtatctagatagtaaaatatgtagtttttctttaaaaattttttttctcgtggggtgcattagccttctgagctcacaaaagaggaaagctaaataattcattaattatgacttttttgcacatttttggtctatatttgccttttaatgttaatggaggactttgctattcttgacagatttttatgtttattgttaacataaaatgcaaaaccagtcgaactcaatttggacgaagattactgccctcatatcagttaattatgaagtaaagcacgggttttgctcttgaactgttttagaggaaggggttttgtcctgttttctgatgtggcccccaatccctgcccaaggtctatgacacagagctcagataatctgaaagaaaaaacggaaagtgatatatacacagtgatatatttattacagtcattttcacagagcaacatttatagaccttcacttgtctgtctgggttttctaacagctcagttgaatttacttttgaatttgtgaacattagtttacttggatttttttttccagtgctgtgctaatggttcagtggctaaaatgtgtgttaacagttcatgcatcatacctgtccacggtgagtcttttcagcttctgttgccgagtatgaatagtttggctttgataaggattgtaaactttgacaagtatggctgaacaaaaccatcctttccccatctatccttcagccgttagatgcttcctttagagattttgttttaccccgggtgcaatgacatgagccctttcatgatgtcactgctgtggctttttataaattggtcttcccctctgccccccggatgtaaaaa

SEQ ID NO: 93478 - DNA, 2300 bp, Homo sapiens
cagaggcaggtatttgaaggcagtgggacaggaagaggcttgttctggacttccaaatggcttcctttaaaaagaggcatttaaatttttccagttgctttttatagttgatctaggatagaaaaattatggccatcatggtttcctttcatattgttaaaaatgatcaaggggactttaagattttatgagaaaggcaaattaccattgttttattcctcagtgaacctggaggagccagacctttatcagtcgtgttgtgttccaaatataacagctatattctcaatacaaaagactctgatgagagcaacatgggagcaaaaaagagaatgtcctactttcattttttaaatatgtttcagaggactcattaacaggaagtatatttaaaatgcaaaaggtcaactttgtactttgttctactggtctctgggagctgggaaaaggcttctctgcctctttggggccttacagtaagggtagataatatgctagcatcagaggataagattcagaggaaagcctctttagcctggagatacgtggtagaggcatttttaatttcctgtctactttatatgggatattggccttatctgaaatagtttgatcaatacagaaaagtgccaccttgcagtttcactctcttgcccttatatcattttttttataagcctattattttttcctcctaggacattgagggtcttctgtgaaaattcgtgatgttgttaggctatgttgcaggtagccactgccactgggagtacttgtaagcagatgtgtgtggtgcagtggctaaatactgaggcatagctgagcatgatttgcgtgttcgtcatctctaatacgttaatagtgccaaatgatcatttttttctctagttgcctgacctggtaccccagctggggacactctaccagttaatggaaagcagagtcaaaacttttcagaaactttcacaccttcatggaaagcttattcttctaattacacaagtgagtaaatcatattgttctgggctaaaacttttggacatggtaggaatggagagaggaataaggatcattttgagacagggtcttgctctgtcgctcaggctgcactgcggtagcatgatcatagctcactgcagcctcgctcaagtgcctcccaagtagctgggactacacggatgcaccaccatgcctggctaatttttaaattttcgtagagatggcattgcctaggctggttttgaactcctaggctcaagggatcctaccaccttgacctcccaaagtgctggaattacaggcgtgacccaccacgcctggctgagagctccctgtttcagtaagaaattggtaaatcaggatctagtctttaacttggaaagcttatcagtttgacagtaagaaagtttagttgtgtctgtttcaacttttactcaaatctttttctcaccattgtgtttcagttgttatacagttagtaagttataggatatttatacagttaaaattttggcacagaaagatattctaatcacctcagagtttttcagctttacagagtaattctttccctcttgtatttgaaggacttttttgctctgtattgtatgaaggtcctccattatggtggtggagggtgagttagcagcaagcagtggggaaggttgggtatgctggtggtcgtgatacttgggatatgtttacactctacttcagaacagtactttatcttcttccaggtaacagcatcagagaagacaaagggagcaacttcccctggacagaaggcaaagttggtgtatgaagaaggtaaagactgggggaatgggatggagtctagaattataacattcagttttcagtgactgagttctgttatctttttgaaaacgtcaacataagatcttcctttggcaagccttctctaattaaaataggcaagtccgtggcaaaaatctgtaattcatcagataagaaaagaaaaggcacaagtataatacagtgacaaaaaagggcattagttatggaagattttttttttcttttctttttttttttttttaagacagtctcagtctgttgcctaggttgtagtgcagtgctgtgatcacagcttgctgcagcctcaacctcctgggctcaatgcaatcttcctgtctcagcctcctgagtagctgggactacaggcgtgcaccaccatgcccggccaactttggtatttttttgtaaagacagagtttcactatgttgcccaggatggtctcaaactcctgggctcaagtgatcccaatgtgcttgga

SEQ ID NO: 93479 - DNA, 2421 bp, Homo sapiens
ggcagaggttgcagtgagccaagattgctccactgcactccagcctgcaaaaaaaaaaaataataaaataatgttatttcttagttggatgattgctaaatataaataatatttctaaaagtaaattcaggaatctggttctgcttaatttccaggctgtaccctctgttttgttctaaaattaaggctgggttctttctccccttacagagtcttctgaagaggagtctgatgatgaaatagcagataaggattctgaagtgagtgatttgttccctgtatatacatcggcctttatatcctcatactctgtaagaatgagaccttcatgaatgctttccttgttggtatttcgactaggataattgggatgaagatgaggaggagagtgaaagtgaaaaagatgaggacgttgaagaggaagatgaggatgccgaaggaaaagatgaagaaaatggcgaggacagagatacagcaagtgaaaaagaattaaatggagattctgatttagatcctgaaaatgaaagtgaagaagaatgaagacagcaaagcaagccggtcaaactatataaactctggctcaccttgcccagtggtgagggctgcctctgtgccaggatgccaaggaccgctgcacatttccaaattcacagcagtggatcccatgccactttgctgtcctgagcaccccagacttgactgtgtaaataagagtgtttcattcaaatgttaataaactttacacagtatatagacacattttctgcaatgtactgacatcagtgtccaatatatggtatatttttataatataatatcctagtatgattggttatatcaagaattgacaagtgcagataaagacctttcccataggagttcaagaactggactgttgtgaagaagtcagctcttatctcaggttggtatctttcatcaaatccagatgcaaagcagcactagtgaaaatttttttaatttagtacatttaatttggtacattttcataaaatatgaagggataactacaaactggagtaaaaatgatggtaattaaaaaaaatcctcagtatccctagcttgtctattaactgtgataatctgacttgagtcagattgaatatttggagtgcttccccagaataaccacttatttttgaagctatcatgtgaagtatttttttaaaacaaaacaaaaattatggtcattaaaaaactagagaattagccatattaaggatttttcttgactgcaaattacttctaaagaatcatcagtgtatagattagaagtgctcattacctgcaacttttaaaaaaaattcagttatagctgcttttgaagaggtttccatttttatttaaattactaatggatcaaagaacaattgtttattttttctctttggttttagatattaatgataaccttgttggaattttttttccaaagaaaatatttttataattaaataatttaatgtttttcttccttttcattacctactcttggcagtgttagggtatctgtttacctttaaaatgataagtctcactcaagattttttatgtatgtataaatattttggtgtgctacaaaagcctttgcaaattatcagtagtagtttttttttttttttttttttttttaaagaatgagccgatattggcttagtgctcactaggggacatgcacatggaagctcacctctaagaaagggctgggcagatggatttattttttcccacctgtgaatatgtaaaacaaaaccattatctttgagggagtttttaataccaatgacagaacagagatttgtgtgctcatcttaagagccagagccatataagcatcttgggaaagcaagtttgaaccagctgctggtgtaatgtacagttatatttgtctataaatggagctgtttatggcaatttaataccattctctttgtaaagtgaataaatattcatctttacccagtgcttgtcttgtggtatatgtagaggaatacagccacatgtttgggcttgtggtgtgaaggtttttaaaaagcagttttgctcccctggcattaaataggtaaatgctttcaaagcttgtggataacctagaatttgcaacgaagtgaaagaaccaagacatttgtgttagtctagtgtcagctatagccagttgattcttcatgcattcccacttggctgggttgtgacttcacaacccagggctgtagtgacagtaaagaaagaggcctgtgctgataatttcagtcctttactggtaaccaacacttggcttatgagtccggtttcccttatacctgactctgcctaaagaagtaaatgatgacaaccatatggtaatttctaattatttttttggtttagaaaaatctggagttaaattagtgttgttacaaaaag

SEQ ID NO: 93480 - DNA, 1092 bp, Homo sapiens
acctggccaatttttaaattaatttaaatagtcacatgtggctagtagttagctggtcagatgccacagctttaacttattagtctccaggaagccttcgttgaccctcttgaatctgtgctttcataggactcagctgtccttggtcatagcacttactactttcaactttctggtaggaatcaacactaggctgtaatttatatgagggcaaggacagatctggtttctttacctttgcatagcttagaacttagtaagaaaaactgaataaatatttgttaaatgcataaatagctttttcagggcaggtatttcaatttttaattctctctaaggccaactaagtgttcagtactgtaaatacctgtttagtagattgtacagatgttatgtaggtagcaaataaaaggatcattggagttatgctttaaatacttacgtggtgagattggaatctcaggagaatgatgactcataacaaagtattacaggaaattgaatgaaagggcctcatgattccagctaatgtagacacagctttggtctcctattagttgaataactcaaggacactcttgaaccatatctcaaatctgaagtctcctggcttcagtaaggcccttttatggggtccagacagtcctgaaccagcctgaagatgctagtggacatccccatttattactgctctgtgttaaagcatggaccaaggagtcttggaaaaaaaatcacaaggtatttgagccacgttatgtaagatgcttttgctaacagctaacttggagtgatgagtagggtgaaattcctatagaaatcagagtttggggaatttgattctagctattgttagtatcagaggcacctgttctgtagacagttgattagtgccaattttttttttttttttttgagatggagtttcgctcttcttgcccaggctggactgcagtggcgggatctcggcttaccgcaatctctgcctcccaggttcaagcgattcttctgcctcagcctcctgagtagctgggattacaggtgccctccaccatgcccagcgaattttttgtatttttagtagagatggggttt

SEQ ID NO: 93481 - DNA, 1054 bp, Homo sapiens
ctggtacttatgtgatggagcagatcccattctgcctcataatctatagttattagtggtattttattcaccttaatagattgtaaactacctaagaagcatggaccatctgttaactcatttttgtatttgctgaaacatctagaatagtgtcttgtatatagtggttccttaataaatactcattactgtttggaattgatagtatttgaggaagatcaccgctgctctataacactaattccatgaacttgtcattttcctatttatgtggcaaggttaatgtcaaaatgcttctaagtatttggtggtaagtaattttagcatccaagaaaatgtgaataccttaaaatagtaacaactggattaggttacctaatatataacatctatatccatataagcatacgatttttgaggaaaaagaaagcctcctactttttaccagttcctgccagtattaagaaaacatgaatcaagttaggaagacaacagtgagctcaatgaaatgactgttttattgtagtggggaactgatggtaaggataattgagttagatatagggttggttaagtagaacagagcacacattaagtagtagctagtatggtgttgtctactaccagatcaagccattgattacctatttttattctgtgctttctactgaaataatctaaactcatttttcatttagttttataatgttttgcttacattttaaaaacaggaattcatgatacttcagatagtaaagatcggatacaaaagaaactggaaggcttttagcttcataagtttggttttactagcagtttctctgctttctacatcatttctgagatgtaggctagggtgtagtacaaagtctaatttagagcaaatttattctaagcactcatgttttctgggaaaaagaggtaatataagccatgtgctttaaaaggcatggcttccatctttggccaggatagaactcacatacctcggaccttgttaagttgaacaatcttagtaaactcttagatttgtaagagggatatgattaatttt

SEQ ID NO: 93482 - DNA, 1225 bp, Homo sapiens
taatcaactgggcttattttcagatataacaaaatcagttatgcaggggaaaccttgaaccttgtgcattgtaccttaggtatgatacttgtctcactccatcttgacttctaattgtcttattttctttcctatattgtagcgctttgggatggagaacaatcattttatttttgtttatctcaaaaaggctaatatagtcatttgttattagttgctcaatgattgttgaataaatacattgaatgaaaggtaataatggatattgacattttgcataactggaattaaacgttgaaaccccgtctctactaaaaatacaaaaattagccaggcatggtggtgtgcgcctatattgtcagctactcaggaggctgaggcaggagaatcacttgaaccaggaggcagaggttgcagtgagctgagatcgcatcactgcactccagcctgggccacagagtgagactttgtctccaaaaaaaaaaaaaaaaaaaaaaaagcattgtagtcttagaattataggtttttgtagactcttatgaacctttccccactcacctccctgtgtagacatcatattttcaggatctctgtcagataaccatttaacctcttgcatgtcttcaatagtgggaaactaacaaaatagttaattttattgttaaaaagctttagttgtaataaaattgttttcgtatgttgactcaaaattggtctccctgaaattttggccaagtgattctagtttgatacatggcacaaattcctttataggatagcctttaagtatctgcagatagtttgaacattttaacttagcctgaaactccttaggctacacatttctgtttccttcaccagtttctcattgtcaggatttctagacccttttcatcgtagctgctttcttggtacactgtggtcagtctccccttgaaaagcggcatatataattgcatttattgagcaagtatttattgagggcctcttgtgtgctagggactgtcctggatgctggagatatcagtgaccaagacaggtcttctatagggaagaccagtaaacaaacaaatgaatagacaaagcaaaaataggtcataatgaattctgtggaagaaagaaacagggtgctgtgatagagaacaatgggggcaaggcagctgctttagatggggtggtcattcggagaatcagaagaggctggctgtgagaagagcctgggaag

SEQ ID NO: 93483 - DNA, 1050 bp, Homo sapiens
aattcctgcttggatattgagtttcccaacatagttatatccctttttttttttttttttttttttgagaagagtctcactttgatgcctaggctggagtgcagtggcacagtcataggtcactgtagccccgaactcctgggctcaagcaaccctcctgcctcagcccctgtagtagctggaactacaggtgtgtgctactatccagctaattaggattcttatgtcttcttggaaattgactcccttattattatttaatgttctttttcatccttggtaatgttcctggctctgaagtgagagcaaggaacattaccaagcataaaaaggtaatgttgagagagcgaatttttaaaattcactttgagagagtgaatttttaaaaactcccatggtgaagtaaagttgcaagagtaggacccttggaattactaataattccccaaaattattctggtttatattttctttaggttggtacattaagattttgtggaacaactgaatttgcaagtgggcagtgggctggcattgaactggatgaaccagaaggaaaaaataatggaagtgttggaaaagtccagtactttaaatgtgcccccaagtatggtaaggttgatattatttaactcggtaagaattaattaaaaataatcaagttttactcttttacagttgttaaataaaacttttctcctgatttcttatgtgataaatgaggggcatgtggatgtagggaggactttttaaagataggagatagttatatttatttacactgacgagaggcgacgtgagagggagaaatggtggttgcaggagagaaaggggacatttccaggaggaaagtcctgaaaaacttgaaagggaaaaggatttcagtataagagttagccttgcattagatcaggcgcagctttccactatttatttatttgtttgagacggagtcttgctctgtcgcccaggctatagtgcagtggctcgatctcggctcactgcaacctctgcctcccaggttcaagcgattctcctgcctcagcctcc

SEQ ID NO: 93484 - DNA, 1018 bp, Homo sapiens
ctagataatccataattgaggaagttaaatgaagaatttcagaaagatttgccttgacaagctgcttcttggtccacatcttattttccaccgtttgacacgttctttatctgttacagttgccctgcttggatctgtcagcagctgctcctctacatcttctttggaacacagacagagctaccccaagaaacagaatgcaatcagcagtaacaagaagacaatgagcaaaagcccttccctttcatccagagccagtgctggtatctatggctttttcaaccaggctttcttggtgttttttatcttggtttgtttgtaagtagatttgctctttttaaatgtgtagaaggaaccctttacttcaatcagattgaactacttttactcttccccacctcccccgaaccttaagccttaaggtctctttgttttgccgtctcagatataagactttgcatttattttcatgtaattcattcttagtggttttacctcatctgaatttagcttcttcacaggcctttgtgtcatcttcatatttaaaaagcatgctttctgtgtttttattcaagtgattgttttaaaactatgtttgcttaaaacctaggagaaggtcagagggtcctctcccaggatggcaataccagccagttttgatatggctttttaactagccgtgaacctgcataatctcactcagtccacatttcttcagttatttgtaaagatacgtaaaacactttatcagacttcttttcgaaatgacatagattttgtctgttgcagttcacttatttgcctatatagcgaacttgtccagaaaggcaaaagccatcttggcaaaatacgttcttcatgaacctctttattaccagattctttttttagtgcttctattaatagttcttgtagtgaaccaacattttattatggaaaatattcatgacagatttctaaaaaaatacttgatgggaagaaacctccaaagctctcaacaataacattgacataataa

SEQ ID NO: 93485 - DNA, 1141 bp, Homo sapiens
gaacagctttctagatcatatttctctaggacttctatgtttaatagtgggcatttcaaggtttagttttgaatcaggttgacagggcagtggttttgttcttaataacaaaatcactttaggataattagaaccgtatagcaatttaaccttcaaatcacactacttttggctggtcacagtggctcatgcctgttatcttagcactttgggaagctgaggtgggaggatcactcaagcccaggagtttgagaccagcttggtcaacacagcaagaccctgtttctttaaaaaaaaaaaaaaaaaaaaaaaagtcaaatcacatgactttttatataatttacactgagtctaagtgaactattaatactataattctagtattttagtagaatagaaattgtcaaactatggcccatgggccaaatctgacctaccacttgtttttgtaaataaagttctttggaatgcagccatgcacatttgaaaaaaatatattgtctatatctactttcatgctgcaacagcagagttcaatagttgtggcagaggtggtatggctagcaaatcctaacatatttactgtccagcaatttgcagaaacagtttgctgtgacccctgttctagtagagatgctgcaggcaatcttggaagagttggtagtttaccagggatcaggttttgtgaatttcccatggcagtaattttcccaggaaactcttcacatttcctttgagcagcttgacctcacatgtgagaaacacaactgtagatgacttatgtgatgaaaggcatcagatatcaaaatcaccaactaactagactagttagaatacctagtgtgattttttggctaatgtgctttttgagtttttctccctttgttttttctcctcttttcctgccctgcccctgtatccctccctgacttaaacaggtttgaattcctcagcaacatctacagcaaataatagccgttgcgagggggaactccgcctcggagagagagtgttagtggtaggacagagactgggcaccattaggttctttgggacaacaaacttcgctccaggtaactcatctgcatattttcttaacttgaattctttagagtacaaaaggtttaaaattttacatgta

SEQ ID NO: 93486 - DNA, 1046 bp, Homo sapiens
gtaaatggactactagatacttctaattggtcttgaggcaccctcaattagaaaatccttattttaggattttgtgtccatttaccttatattgggtaaaaccacatttaaagcaaccttgctactttaattttaggctgtctagaaaaggaaatcctgttatttccttcagagtaggtccttttaaatacaaaaagtctttaaaataattctccctattagctaacctaaaccttttcatttaggtaaaaaaaaaaagatttttctttttaccttgggtggaaaaaagaaaagaaaaagcactcatcatgatgtctagtggtattttctataatatttttgtccttctttaattatttgagcactgtttgtggtgttctaatgttaggtgagtaagatgaaaagattgcatgttcattttatgatttttaaatctcaatattatgtttcacttctttcactgaaacactatattaccaagtcaagaacagtttttcactgcagcttttagatatattttggtcatatactgtttacacaattgccaattcttgccaaatttgtgtttgtgcattttattttcctcctttaatgtactgctctgcaattatgcttgtaaaatgtttttcctgttcactttttgaattttcaaagtttacaattttataatttgaaatcttaatgagtatcatgatcttccctcattttggtcatttatggaaatgttaaaacacctcgactttggttttgtatagtagcataagagttttggataaagtacagatgcttttgaaatgcaatattcatgttctaggatattggtatggtatagagcttgaaaaaccccatggcaagaatgatggttcagttggaggtgtgcagtattttagctgttctccaagatatggaatatttgctcccccatccagggtgcaaaggtgagagaatgaaatttatgtttatttacagaaactttttgtaatctgcagtggttaatagagacactaattttatattaaagatatgctctgattgtagctcatgtc

SEQ ID NO: 93487 - DNA, 1002 bp, Homo sapiens
ccgtcttacctggggtcactaactggttggttaactgagctaagaatagactgtgggtctcctcacttgtggcccagtgctctttctgctatacaaaatgtctaatctcagatttttcttctgctgcttgactgcttcatctggatgaactacaaaaaacccatgattaaggtttatgaattcaagtaataattagattttttttgcacagacttacttaacttccttattggatatgtttgtaacacataaacacaaagcacttttcaaacatgatgcacttttatctttgtgaataatttactgtcctttcctcctgggatatgagaaacattttaaaaaacgtatttaacagaagagagcaaataaagatatatcaggaaggatgtattagttatttacttaaatgtttataatatctggattttttttgttttgttactcatagaactggtgttgtttgctgtttttatttctctaattgttgcagagttctgcctgttacaaagctacagaactgtattgtttttattttccttcttgagcacatgttaacaaactaagcttcacattagagtgatgtcataatgtaaaatgtttgcattgtggttaggtattgaagtttatgtcctgtctgtgtaaagattcatcttttattgtaaatatttagactttaccacagaaatattggaacagtttgctttataagattaaaaagcatccttcagaatggagcttgccttgtgcttagaaataatatgttgaactattttgcaatatactattttaaatctaaattctgtcacttcgctgcctttttaaaatagtgtggtatttcaaatattgctagagctattttcctgaaatacatttgcaaaataaggctgctttgtaatcaaggaatatttttattgattgaaggaaatgactgtactgcgattcaaaagtaaacttattttattatacagattatttcttaaaaactctatttataccttaaca

SEQ ID NO: 93488 - DNA, 1062 bp, Homo sapiens
caaatacagtggttaatacaaaactcacgttatcgtgtatatttttagtaattgtttagtatcccttggtacacaggccttatttacaaacaatgtcacatatactgtttgattataaaataaacattcctaatgaaatttgtgtatgggctgaacaagttaagctttcaggacatgttaatagtgtattataagcagaatatgatgcctttgcataggcaaaaagattttgttctaccatattttttttgctaattctcctttttatgagaggaaaagtatacgtggtggaatttgagtagacgagcacatattactgacattaatatcgtttcattatgtgtggtcaaatgaaactttttgttttatagctctcccttgagagcagcctcaaggtgtaagagaagctttttccgtttatctttttagaatgtcttccagtgaatagaatgttcatgacaataaatcagcagcaaatttcatcatttactatacctttcaaatagggcaagcgtagtcgtcatggtggtgctgagaaggggcagggcattctgaattattaaagatatttcaggtgtttaaattgaggctgttagctgaaaacataatctgttcccaaggatcactggtgtcattttttaaatgctcataaatctggtttaaattcggctctaaaatctcacatgaacccagatatgtgagtttgttgctaccgtaaccccaatagactcctgtgtcaggagaaatttggtctcaggattagatatgtagtcagagttgtttcaactggctacataaaatccaactgggatcagttgaactgagcaagctaactatcctgtactgaatttgaattttaggcatttctaaagcatggaaggtttaaccatccaagtgctgtgttcttggcctgtgtccatctggtggaggttaagttctttcagttccagcccttcatgactttattccacgtagacagacttaccttattgaagactgaactaattattatttttcacctaacaaatcaaatcagactgacatggagatgaatcaggttaa

SEQ ID NO: 93489 - DNA, 1034 bp, Homo sapiens
ccaccattctacctgctgtctgtatggatttcactacacaaggtatctcatgtaagtgaaatggcacatttgtctttttgaaactggcttatttcacttagcatagtgtcttcaaggttcatccatatggaagcatgtgttagaatttatttccttttcaaagctgaattgaggaacaactatattgttttccatatcagccacaccattttacattcccaccaacaacacacaagggttcaaatttctctatatctttgccaacactcattattttctatttctatttttttatagtaaccataccaaatcagtcatcttcttgtatatttcggtcatattcattgaaggaatcaagtgaaagataacacattcaaaaaatgcccaatacatagtaggctgaatattattttcgttgttgttatttatccttcctgcctgcctatcatccagttttccttcttcattaggtttctcccaatcttgtggttctgagaagttcagaccctcacatgagaggcttagaaaagaactaaaaactaaaaaatacaaagaggttcttgactcctagccatagcaagtgatcttcatcttttcataggggactctacccgtttccaggtttctttgcctgaactgtacctatcaaatttgataacaccaaaccttcttacatttcctccaaggacaccctgcttcctctcccccctagctggaagaatggcccatccactgcacactgctaggttggagtctgttttgcacttggctttgtgcctagaatgggaagcactttttttttgagagatggagtcttgctctgttgtccaggctggaatgcaaaagcacaatcatagctcactgcagactcaacctcctgcagtgaaggctaaagcgatcctccctccttagccttccaagtagctaatactacaggcacatgccactgggcccagctgggaagcccttgctgactgtctcccagcctctcgctactcactgtgaatcagccatcactctcctccatgtatggt

SEQ ID NO: 93490 - DNA, 1051 bp, Homo sapiens
gttccccacttccccctacctccaaccccaggcaaccaccactatactttctgtctatatgaatttgactactctaggtacctcaaaaatgtagaattcgatggtatttgtcgttttgtgattgacatttcacttagcataatgtgctcaaggttcattcatattgtaacgtgtgtcagagttttcttccttttttaatgctgaataatattccattgtatgtatataccacatttggtttattcattcatctgtcaatggagacttgagttgctttcaacatttgactattgtgaataatgctgctataatcatggttgtgcaaatacctcttcaagaccctgctttcccttttcttggatatatacctagaagtggaattgctggatcctacggtaatttggcttttaattttctaaggagttaccatgatgtttccatagtggctgcatcattttacattcctaccagcagtgcacaaggattccaatgtctctacatcctcactgatattttcacctcttcctttaagtgtctttgtcagttacaagctgggtcattccccagtgtcccacccaaaacactgtttcggtcttctttaccccatccaaatcctgcttaactttttttttttgttttgtttttgagacggagtcttgctccgtcacccaggctggagggcagtggcacaatctcggctcaccgcaagctctgcctcctgggttcacaccattctcctgcctcagcctcctgaggagctgggactacaggcacccaccaccaggcctggctaattttttgtatttttagtaaagatggggtttcaccgtgttggccaggatggtctcaatctcccgacctcatgatccacccgcctcggcctcccaaagtgctgggattacagacatgagccaatcctgctcaacttctaaagctaagtctcatattttctaaaaagtgcaaagcattatcccctgatgagctcaccctgtttatacctgatcatgagtgtctcattctctaatcgccttctattaccccactagagatc

SEQ ID NO: 93491 - DNA, 1054 bp, Homo sapiens
tatatgtggttttattacacatttgtgtgacaaatgtttctatgcatagacagaccactttctttaagaaacattgtagaaaagagtctgataatgaagctaaagtatttgtagagatatttttgatttcacaagttagtattattaataaaaggagaaaaatcaaaatttggaaatataatttactacaaattgtctggaggagaaatatttacagcttatgacacagactgaatagtgtaagcttataaacaccaaatggaggctacctcatggcccttgagggctagtaataagccttgagaaacctagaaaatgtcatcagtatatacctgtgcaggtagaatattgatcagaaaaccctaagctaaatgtcacttccacatttaaatgaaacctggatggttctcacaggccccactaaaatcaatagcaaaaccctaaggcttcttgataatagcttctgtatttaaatgagagtgaattcatgaaatcacagtggccacctttctatttgccctgccttacctgccaccattcaagtccttatatagagactacaaccttgagaattgattcttgctacatttcttgtatccctcgtcattgaaagttgtcttgacagtaacacaaatcctcaagacagtcttgtttgcaatagtaaggactgtgatgacaataataacaggagtgaacagttcttgaacccttgctgaatgccacacagtgtgctaagcattttacatgggtttcctccgtgagacttctccatagttctacaagagagtcctgtcactgtccctatttcatagacactttagaaacgctacatgccttgtcctacagtaagatcacacagcaagtaatggcagagccaggacttggcataggtggtcagagctctgaacagtggggaaataaccccctaggctgcggcatctcccagataggctctgcagatactagttgggctatcacaggtacaaattcctgatgccaggtttggcttggggtgcattttgaccatctcctcactgagggggcatacagatgc

SEQ ID NO: 93492 - DNA, 1130 bp, Homo sapiens
gttcagatgtccacacactatatgtggtaaccagtttgcctttgcagatgccattccctttcctggtgatgtatcttgcttcccagtaccagccctggaaactttaatacctgcccatatcattttaacttttcaatgcatatttcaaacccaccatgacccccaagaaaccattattatttttccccagccaaaaagattatcttctttggctttcccccataccattttatctctttggctttcccccataccattttatctctgtctcttttaaatcttcacttcttactttctattaggtgttattattattcctaaattttaaatctctaataaactctgagctcccagaggaaagaggcaggttggatttaatctcacatagtatgatacttggggtaccaaactatgtaggtgctaaataaaagttggtggaataaatgactaaatgatagttactgaaacaattcctgaagacagtaggcaaactgagtttaaattcaagtagagaagtaaatatggaaagagattgggatttatccatgtagtactaatggaagaaattataacaggttttttgttgttgttgcttattttgatttgcctgtttttctttttttaaagaagagctgaataggtgagagttgagtctgagacaggagagaaactgcagaacacagctcaggatgagaaggacccagtgaaaaaggaagctgaaagagaggaggatatttaatgcccctgagaagaaatttatgccgacccagatttgaagtcaacctctgattatctactatttatatattttaaagaaatatgcaggagattttagtgcttccttttttgtttgtctctcaatatatgcatgagccagcacaattcaggacttgatttacctttgctgattcggcttcttttctctgagcttatttatggctgtgagagaggcattctgtccttgctgataaaggacaaccgaattgcattcaaagctcagccactgagttgctttgcttctgctagaaagttggtttcttctccaatggccaagttttcctgaactataggaaataaggtgcatatttgaaaggtagagtcctagactagaacttctcaaattttaatgt

SEQ ID NO: 93493 - DNA, 1081 bp, Homo sapiens
atgtgtatgttttaccttaattttttttaaaagaataagttacttgcttaaagtcacatggctagttaatggcatgctcaagattggagctcagatctgtgtcttcagcccatcatcctctttcagaatagtcctggatgagaaattaggaagttcttctggatcataaggtcatacatgaataattgattcagttatcaaaagaggtctcagaatctcctgtttgggagacactgagtaatgagtactggtctagaatggtttagaaaggagatgagagccttgaggagatacaagggcattgatcaagtgacttctgggagctcctttcttattctatgactcaacagagtaagaaaataccatttttttgatagtttcaaattaggtagctcattttcaaagcagtggggagaaaaaaaagggaccctagaaacgaccatctagtaattcaatccctgttaatatagtggaacaaatattaagaggaataaaatactatctaggataatggaattatgagcaataagcattataggttttaaaagaacaaatcatgccagacaaagttgattgcttttttgatgagtagactaacggaatagagtagatgtaatacatcttgatttcagcaaaagattttatagtgtctcatgaaattttactcaggaaattaattgaaaatggcctagagatgagcactgttgcgtgaacttcggcatggtggcaggacagcagaagggaatgagaaacacccatgcatgagagtagggagacatggggcagggaatttcaggtcaagggttagttctatttaattatttcattacttctcaggaacaagaggaggttgatcttacgtaagtgaaattcatggtatatcttatctgtgtgctttaatgaaaaaaaaaatcatttgaaagctagcaagtctacgtaggttccaatcccaggcttaaactcattctgggtcccaggggaagccctgttgaagcaaacaatatcaagtaggccaatacttaatttcaactctaattctgaatgatgaagtgggtgtaatgttcttagccaagagctctgc

SEQ ID NO: 93494 - DNA, 1441 bp, Homo sapiens
ggcctgttaggatgggatgcatagctggaggtgagtagcaagcaagccagcattactgcctgagctccgcctcctgtcagatcagctgccgcattagattcttataggaacatgaatcctattgtgattataaaaacgtgaatcgtattgtgcactgtgcacacacacagactgtgcatgcaagggttctaggttgagtacttcttatgagaatctaatgcctgatgatctgaggtggaacagtttcatcccaaaaccatccgtggaaaaattgtcttccaagaaactagtccttgatgccaaaaaggttggggaccattgctctagagcatgtaactaagagtggaattgctgggtgagagggtcagaacatcttccatttcattgggtaatgccaatctattttccaaagtggttacaccaatttgtactccctctagtaatatattggtattcctccccatggctttacatcctcatcagtattgctattgtcaggctgtatttttttgtctgtctggtgaattaaatacagcatcccattgcagcttcaattttcatagaaatctgttttatttcatttttcataagtttcttggatgattctgaggcatagctgggcttgtaatactgttgacttactcccattcagacttactcccattcagccacccctaggactatctccagattccaacacttgacctctagaaacattttttttggtcgttacaggttttttaaaaatttatattccaggagtggaactgtgattacagttcagtgagatcaagagacagggacaagtggaaattgtgttctttgtaaattccacagatgttactgagtcacacatgataactttgaaagtttgtgctttaaagaaatgtttttaaacagtgccaataaattgtacatttcacttggtgacctgtttctcctcctccacctgtgatcgctgacatgcgcacaatacactgagtgctatgacaaaacaaaaaagaagggggggagaggagggaaggaagaaaataaataaatttttacttctcagcattctttagcatggaaacatatcaatgcctttagtttttatgaagctggatcccaagggtcagtgcacacactgaatgtgaaactttcccattagatgaatcaggattggaatatctgttttttttaaagtaaatgttgtcaacttccattgctctgaaaagtcatcactgttagcatcaggtagtagttagcaatactaaggatggtggtgtgaacaaccatagcaaaagctgctgtggatacaccagtctcctttaccaagctctttcatgaatggacacatccaaacataacttaagagaggctcaccactgtcagaaacttctgctaatttgtctggggtctaatggagtggtctgtactcacacagcatggatcagtcacg

SEQ ID NO: 93495 - DNA, 1509 bp, Homo sapiens
tgtaatgttcctaatccctagcacagtgactggcacatatttgaagaataaatgggccaggtgcggtggctcatgcctgtaatcccagcactttgaaaggctgaggcgggtggatcacttgaggccaggatttcaagacaagcctggctaacatggtgaaaccctgtctctactaaaaatacaataattagccagtcgtggtggtgcgtgcctgtaatcccaactactcaggaggctgaggcaggagaatctgccgggaggcagagattgcagtgagccgagatcgtgccactgcatgccagcctgggcaacagagtgagtgagactctgtctcaaaaaaaaaaaaaaaaatcaatgagtaaatgatctactgtactttgctaaggggcttgcttcagagtcatggaaatagttataaagacatcaacacagtatatagaggattgactacatgctgagacagggtagtgaataaacagacagggtccttgtccccttctgagtttacaacctagctgggaaggcagatatgacacagatacttaggactgacaaagtataaaatctgaaaagagttgttaacaaaagtcctgggagtcttgagagcatttaaaaggtccggaaggtcctcccgggaaatggacttttgagctgagccatgaagcaagaccaatttagccaagtgaaaagggggaagaagagaattgtagtccaagggaactgcatgtgcaaaggcctggaggcggggtaggcccagaatgttcaaggagcataaaggagtgcagggagcccaaggatgtgggctccttgccactgtgtgtagaaacctattagtcccgctcagtgctcgggctttttgtgttctggcttgatgcttacatcagcacaactgaggtgcatctgggccaacggcagcctccttgcatgtacttattaaaacttgggtttgttattcttttcagttcatttaagcactggcagaaagggctgagctgacaggtctgaagactgatggatggatgggtgatgcggcacaggtgcttgaggtgctgcgactcttttttgccactccctgtttggcagtgacagccccgcaggaacagcacagccttgagtcagccctgggtgtcctctcattggcaagctctatgagcctcaatctccccactaacaaaatggggaggtgggtactaatatgtgcctcgtaaaaaacaagataattagaagggatataatgtgctcagtttgttgcctggcacatgcaggggaccccggaatggtgagcctgtctctcattcctccctcttcaaacccagccttcttctactcagcggaatccattccagagaaggaagacttgaagctaacgttttccatcctgggccctttgaaattccggttacctgagatagtctgcagaaataggtgctgtggtaaaataggtccgtggagaattcttcccctaaaaccgcaaggttccttcttaaagcaccaaccaggggattttcc

SEQ ID NO: 93496 - DNA, 1077 bp, Homo sapiens
gcttgagtcttgggcaaaatgaaaaagacttcagcaatctcactcacattccagtttgtttcttctgaaaggtaattttgtgtttttatcgccaattttcttaaagctgagtctggttttcctgaagcaacaactgtgtgcctgctgtttgcaggatatcggtatgttctgctgaaatggctcccacctccccactcccctcatatataccaggaagtgcctgggacagaactgtcctctgcttgtgtctaactccttgtacccatgagcttacgtgcaccaggatatcagcagtgcttagaggcaggtaggggagagagggcagagtcctgtgagaaatctgtggccagagtgtaggcccagctctccggatgtctaagccagtacttgtccctctttttgctatgctgtcccccacagcaggatccatcctgaaaagggatacttcttgtcagtggttcagggcagctcgacttgatcctcccttctgtgtcagaggcacattcaaaactgctggtggaaggagatactgcctctgtggatttctcgtaggtcttctagttgagccatgctttataaactaaagcagaagagagcactgcatctcttgctaaacaacagggagaatggtttaggaggcactataacgtaataacatagtgcaaaggctaggttggattcctgggttcaatcatagcttcaaataattagcagtctgaacttggatcagttctttgttgttgttgttgttgttgtttttgttgttgttgttgttgagacggaggtcttgctctgtcacccagcctggaatgcaatggtatgatctcggttcactgcaacctctgcctcctgggttcaagcgattcttctgctcagtctcccaagtagctgggattacaggtgcctgccaccacacctggctaatttttgtacttttagtagagacagggttttgccacattggccaggctggtcttgaactcctgacctcaagtgatctgcccgcctcagccttccaaagtgctgggattacaggcgtgagccactgtgcccagcctggaccagttctttaactcc

SEQ ID NO: 93497 - DNA, 1024 bp, Homo sapiens
gcctcttctatgaaacagaatagtatgcctgcctcctagggttgctgttaacatttgcagagtgctcaaagtattagctatttttgttattttcttcttccagggacctgagtctgggctgttgcaccccaggggaggtcagccccaagtttctttattccttgtaccactgtgggagaaatcaggccccagactttggaagagaggtttaaagagatagcctctcggatgttactgaaatatgaacttatcctttctttctctccttaagtttcttccagacatgacagccatggacttaatagaattcaattcactaaaattctattcattctggatatgaatgatagaaggatctttcccaggaagctgcttatgggactgatgatatagatgctatttgccacacaattgtgagttacggggttccacaaggagaacagactgagtttagatgagacacttggagtcggcagatgtggatgctgtagagttcagcatcgggtccgggttacaagctgatattactacagtgggccattatttgtgcaaggcagggcctctcattttataaagaaacagacacccatatccctgtaagttctaggaaatttatttttatgcctcttcttttttaatataaataatgaatttagcaggctgtcttgggggagacagtgactccttgcttctggtgtaacaagaatatgcaaccttgagccctcaacacagttatttccttagcctgctttccctcctcctcctcctccatccactccctaattcccctcaaacccccattcttagtgctaagagattctagcttgtgacatctctgctgcatctttcttgggcacttactgcccagactgaaatggatgtttggcctttacctaaatatgaggtgaggacacctggaaaagacatttttgaatcttctttggtgcctggcacagtgcggaacctctagtagatgggctcaggaaatactggctggagaaaggcatgaatgtgctgtactctg

SEQ ID NO: 93498 - DNA, 1039 bp, Homo sapiens
gcagtggcttagagggtgggtagctaaagaagtgttggggcagccagaccaggcttcctggacgaggaaagggcttgggagaaagcacaggggcagagatgagcaaaggatttctctgtattcccggggaacagttcccttgggaagtactacaaaatacactgggaggcacagctgagaccagatggtacaaccaagtctagggagaggaaacacccccgagcctggctgcatagaccccagactatcttgaccccaaatgaagctatccttgaggttgtggccaaggtcccttttgggaggcctcatgcaagggattgaggcctttttctgcagttgccaatgagaattccctgttcagtctctttatcaggctctggggcatccctgagagttgctggctttgcccttgtttttaaacctttttatagaagtataacaatcatagaaaaaattacataaaccttaagtgcatagcacaaagaatttttttcaaatgaacacacctatgttccccctgcctccccacatcatgatcaagaaacaggacattcccagcacccggaagtgcccccgcctctgccattcctcatctggcactgccctccctgcagggaaccagtcccgacttctaacttgctgctttttgtcttctatgggctctttggtttctagcttcccagcgtgatgtttgtgagctatgtccacagtgttgcctgtagttgtagattgattcatcctcattgctgtgtgatattccatcaggtgacgtgtatacactgccattgatttgtcttgttctactgtcaatgggcattttggtagtttgcagtttggggctatcattttgttgcattttaaactttgacctgggtcttccttttcagtttgctcagattccccttattgtcactaatttcctctcctctaaaactgttgtactctgttgtatgtgtgtttgacaatggaaacaaataaaaaaagaatactaaatgaaaaattggcaccacgagattggagggatgaggggggagggcac

SEQ ID NO: 93499 - DNA, 1015 bp, Homo sapiens
cacaaggtttcctgagtgaaatgactagtcttattttctaatatttaaatataagtgttattgaaatatagtgaacttgaaagtcatctaacaaaacaggaaaaaataaggcattattgaggggggagaacaaaaatatatccttaaaacgtactgcaaatgaagacctgattccacaacaggacatcatttgacacagcaaagtaaactggtcacgtactgcaagaggaaagcagagcttgcttgtgtcactgaaaacttagcttgttatatattttgcacaaaaattggaaagttgattgtatggatcaaactgttttcccatgtagattttttaatagcgtttagtcacaactcagtataaagagttgatgaaattacaatagcagtaagtgctgattattatagtaatcaacccagcactcttaaaagttatttgggtttttatcctttgttttggcgagggaagagattaaaaacgagataggaaagctggcttccacgggattccattttagcagagtcattgcgaaacaaaaccacctctgcaaggggcaggttcctttaaccctttctgcgctagatgcctgcatactcagttccctgcagcagtctttgtaccttgcctttgtcccatcttctgatgcaatggaaaacccactgtggtctgtccaacactggggatctggtgaagtgtgtattctatggaaatgccctgaggcgatggtttcatttactaaggaaaagtttatctgtgaactgggtgtttttccgtcagaaggttctatgagatgcgaatagatacctaccctccctggtatttttagggctgggaagtggtgcctcccttgactaattccacttaccagggttgaaaccaaactggattattaattatagggacaacaagtacctattttaagacccagaactgtgacatgcttcagaaggtttctaactttcctccagcttctgatttctatcacctggttgcttagctttagcataattagca

SEQ ID NO: 93500 - DNA, 1058 bp, Homo sapiens
tagaaatgggcggcacatgcctttgaccatatttttgtagctctatgtagcagaaatgaagtggtacgtatgaatgtatgttgggtttaacagtcacactcgctgaccctgaaagttttatccggatgtgaggagagtttgaatctaatacagtgatgaaggggagggaggaaaacttccaaaagtgatttaggaagtcttgttaattttgcagttttttaaatgacttactagggtttctagtttaggagagtttgtgattgcagttggcatcaaccaagatagggaatacaggaggaacagcatggaagcaggaagggctgatggtaaaccctgagggagagagtaaatctgatagccctctaatcactagagagataatagaatgcagtggcttggccacttctggaaagtcacagtctctttaattcatctataaaagtgaggtgataaatacctactttaaaaattgtcaaaattaaatgcggtatgtaaataccaagtacagtgtcccatacagtgtagatgctaaataattattaggtctaaggcagagttcaatatgttattcaggtccagagaagcctgattcaagtgttatatcttagtatcttagctttttaatgactgtcctttgtttttttttttttttttttggtttttttgagacggagtctcattctgtggcccaggctggaatgcagtagcacaatctcagctcactgcaagctccgcctcctgggttcatgcctttctcctgcctcagcctcctgagtagctgggactacaggtgcccgccaccatgcccggctaatttttttgtatttttagtagagacggggtttcacagtgttagccaggatggtttcgatctcctgacgtcgtgatccgcccaccttggcctccccaaagggccgggattacaggtgtgagccaccgcgcccggcctttgtcctccttaaataagtggctgtcttagttccttctggctgctctaacagggtactatagactgtatggcttataaacaacaaatttatttctcccagttctagagg

SEQ ID NO: 93501 - DNA, 1055 bp, Homo sapiens
ttttaaattaaaactgtggtatattcttgactatatctagatctttaagaatactgtttaggataattagttatgatggatttaagaacttgcatatagtaacttccctaacttttgaatgttataaagtgttaccctagtttcagacatatgtttcaaacttacatcttttcagtgtttcagcacttttatgatttattgaatcagtaagatttcttaaagataatcaagttatgtatgggaaagcttatctttcccttattctgttctcattgctttagccttatgccagcctggaccatcttggaggcagtgtaggatcatggaagaactttgaattaggtgaattgcattctgtacttttctgtagttaacagctttgtaacctttgaccagttaataacctttttagccttgacttggatgatctgtgaagtgatggtaacaacctcacagagctgtgacaattttgaaataagtacctagtaacagtgctccctagacattgacttaaagttagtcatcacctctatagttgtagatgcacctggtgatcacagacctactcactctgtgttctcaaaccagactactctcttcttgttttctaattgcccctttatctacttgtatcccactgaaacctcacaattcttttctgaaattatacatgctcagaacgtatacttaacatttatgctaaaccttttttctcacctctctgccagtgctttacatcattcattttctgaaattccactttccattttctttttccacaccagccataagagaagtgacactattctttggccttggctaataggtttacttccttggctcactgctttaaaatcttcttagcttaggcatgcctgtttatttgttcagtgtgtgaactttggatctttttgttcaggatcagctatttcacacatcgagtactacaaagcagagattacataaatacgtatacaaattgttctctatgacaccccccaagtaggtgctaacatgattattataatgcatttgttatccttttctatttgctc

SEQ ID NO: 93502 - DNA, 1043 bp, Homo sapiens
gcaatttccagatgtctgcctgccccagcagcttctaataaataagtcttgcgtattataggtttgactaaactaacaagttctttctccttttctgaagttgctgttgcattaaccataatattttgtacatacttggcaaataactaacatgccttgcaattttgattttccttgtcccttgttaggtagttaacctgcagtacagtgaagttcaagatcgggtcatgctcactggccgccacatggttcgagatgtgagctgcaaaaactgcaatagcaaactgggatggatctatgagtttgccactgaagacagccagcgatataaggaaggccgcgtgatcctggaacgtgctctagttcgagagagtgagggctttgaggagcatgtaccatctgataactcttgaagatacagagagaaatccatcttttcccaggtctccttcactgaaaacaaaaatctacttacatacactgtcaccttagcatcagagtcggattaatgaactgcggaacaagaggttgtgagaatctaagatggaacctttctttctttctttctttttttttaaattttgtattttccatccaacagcagtgtgtagagagaatattatgcagatgccgttaattttttaccctatgtttacatcttgaggcagcagagtctgtctgcagctatgtggtgagctatgtaaggaaaaaaatctgggctgttagagtgaaaaagtgtgttttatgtcaattgtgaaaggaaaatgttaggagtatggtttttaaacttgggcttcattttaaacttttttttttaaacccagttatttcacttgatttgctagcttcagagaagagatccgaatctgtgcccagcgctaaaggctcagtgttagcatggcttgtgctggccggtgtgccatattcttgttggagatgaaccgtagcaccagagcccattcttccttgtcagtcttggcccaaagatgtcaccattcctagttatttgtcaccacataattggtgttgattggaaacttttt

SEQ ID NO: 93503 - DNA, 1346 bp, Homo sapiens
attaggctctacagacttgtcaaaaaatcaatgcaaaactgagggggaaaggctgaaatgctttgtaaagcagtatttttagacaagttgcttcatttcccccttttctaaaacagatgcagattaaatgtttttttgcatgaatgcacattgacattctgttcaactgttttctaaatgcaacactgcgggtttcaacagtatgctttcatttaaacaaagaatattatatgcatggtcaatttagtttaagagatgaaaaaaaactttactactatgaaaattgcttatcaaatactctcctcttttataaggtgtttttaaaagcaacacaggaccaaaagcatccaactattactttatttatattactatgcttaagttacatggaaaaagacaacccagcagttctgtcccatctcagaaaaagtttccaatcaacaccaattatgtggtgacaaataactaggaatggtgacatctttgggccaagactgacaaggaagaatgggctctggtgctacggttcatctccaacaagaatatggcacaccggccagcacaagccatgctaacactgagcctttagcgctgggcacagattcggatctcttctctgaagctagcaaatcaagtgaaataactgggtttaaaaaaaaaagtttaaaatgaagcccaagtttaaaaaccatactcctaacattttcctttcacaattgacataaaacacactttttcactctaacagcccagatttttttccttacatagctcaccacatagctgcagacagactctgctgcctcaagatgtaaacatagggtaaaaaattaacggcatctgcataatattctctctacacactgctgttggatggaaaatacaaaatttaaaaaaaaagaaagaaagaaagaaaggttccatcttagattctcacaacctcttgttccgcagttcattaatccgactctgatgctaaggtgacagtgtatgtaagtagatttttgttttcagtgaaggagacctgggaaaagatggatttctctctgtatcttcaagagttatcagatggtacatgctcctcaaagccctcactctctcgaactagagcacgttccaggatcacgcggccttccttatatcgctggctgtcttcagtggcaaactcatagatccatcccagtttgctattgcagtttttgcagctcacatctcgaaccatgtggcggccagtgagcatgacccgatcttgaacttcactgtactgcaggttaactacctaacaagggacaaggaaaatcaaaattgcaaggcatgttagttatttgccaagtatgtacaaaata

SEQ ID NO: 93504 - DNA, 1048 bp, Homo sapiens
ctcgcagaagtgggagaggccggcagcctgcaccgagaggggctttcctctctcttgctccccgcttcgttctgttttggctgcagagagtggttcatccatactctcattccctcgcctccccttgtggacgggggtcttgccttttcaattcctgtgttttggtgtcttcccttatctgctaccctgaatcacctgtcctggtcttgctgtgtgatgggaacatgcttgtaaactgcgtaacaaatctactttgtgtatgtgtctgtttatgggggtggtttattatttttgctggtccctagaccactttgtatgaccgtttgcagtctgagcaggccaggggctgacagctaatgtcaggaccctcagcggtggagcctgctggggggacccagctgctcttggacaagtggctgagctcctatctggcctcctctttttttttttttcaagtaatttgtgtgtatttctaactgattgtattgaaaaaattcctagtatttcagtaaaaatgcctgttgtgagatgaacctcctgtaacttctatctgttcttttttgaggctcagggagaaactagcatttttttttttccaaactactttttgtcactgtgacagttgtaaataaagtttgaaaatgctttccactctggtctggtttcctttttcccttcctgttccgttggaatggagtgagctcaggagcaagaagaagtcctgcaggaggctgagctgggggagtcccaagagaggctccttatgtagctcacctgatggcttgtctggggagaattcactggggagatttaacccacagccaaggtgtgaactacccttctaaaggaagaaaaacccaagacatatctgaaggtcattcacaggggctggagggtgagtgggtgggcatgtggcaagctcaggctatcatgcaaagcatttactgagcacctactgcttggcaggcattagtaagaggtcaaggtcacaaatggcaatggccctggttctcatggccctgccttggtgaaaaattaaatgacgaat

SEQ ID NO: 93505 - DNA, 1044 bp, Homo sapiens
ggcggagcttgcagtgagccgagattgcgccactgcactccagccggggcgacagagcgagactccatctcaaaagaaaaaaaaaaaagaaaaggattgttgcaataagtagaggtgatatctagacacatttatctgtgggttaaaaggagcttgtcttattctcagttccctctctgactctctacctgaactttaacattgttttcttttcctgtgtcttggtttccacatttataagctagacttgtaccaagaagaaaccaatacataattggaaaaagaaaatgctatgtaaataatattagaggttctcctgctgtttgcttgacagcagttcacttggaaggttcaagatccttttgatcttagatgagaggcaccagctgctgagagagatgaagtctgatttaatccagagttaaccttccagaatatctttgtcaataatttgtgatgcttctttgtagtctaaattcaggataaaggaggagaatatgatttgtggaattggtaatcactataaactataatttctgatcaaaccgttttattttgtgttgtttatgtttcccacatacgcccttctgcgcagactcaagaaaccagtatctggacagatacttaggaactcgcaaaggccttttatcctgactatttaagcaaaaataaacgatagctcaagatatcagaagctacacaaaattcagaatggaaagtatgtccagcacttttgactcctgattttgagaggctttaagataatgtcgctccacagagccaatatggagaaaggctcattttggttggggggggtggtggggggtcacaaaacgtacttactggactacatacaactgtctccctgcaatcctccctcacgtctccacagccagattggagcagcctgtggaaaaaattcctgtctattttcagaaacagataaaagcattcagattatgcagtacaaatctcagcctgaaagcagctggaaaaatctgtttcttgccactgtcactgacccccctgacccttgcaagtaat

SEQ ID NO: 93506 - DNA, 1073 bp, Homo sapiens
gattagggattgaagtcactttaagtccaagaaaagtattgaagatatgtgttgaaggcattaccaagatgaaatatttattcatatcattaacttatttgttcaaagaaacgtcatctcatgaagtataactacgtgggttagttttcaaaaaactgacttgatgaaagccctttttgtaaaacatattttttgagagtaagtaaaaatacatcatcactttttcgtttaggtttctgttgcacattgtactttgatatgcttgatatgacagataagcataatgttaactgacttttgtttttggtagtaggcttgattttatggagtagtaccttgttctgtaactgagaaaaacgtaatagcgcttgtgtttcagtcatcaatagctgcaatctctggagtgccaactatgtgtcagtttctgtgaaagctaggcttctcctactttttaatttgaacacatggtcgtctgcatctgcccccaccaggtctttaggctggctgttgctgacaaccaggaggaagcaatggggaaaacccaaaagattcttccaaactggatccatggagatttggtcagtttgtcctggggttgaggttatgggtggattctagtccaaactctgccacttaaaaatatcttagggtaatcatacaacttcactattggtgtcttatctctaaagtgagtatttcttattcaaacaatctcattgcactgttgggaggaaaaagaaaagacagtatgtgtgaaagggctttaaaaagttaaaaaaacagtgaaaatatttgaaatttattcctctgcattcatgtactctgccaggcactgaatccggggacttatatgtgccaactcagtcatctagcatcactgtgaggcggatacatttattatctttattttgcagatgaggaaactgaagcacattgaagtttaagtaatttgtccatatcacacaattagcattgtgtttccagcctgtgttcttactgtcttactaccaccatgcctactatcttcctatgacatacagatgtgttatgtattaaggggaaacattaattca

SEQ ID NO: 93507 - DNA, 1101 bp, Homo sapiens
ttgaaaaaaaaatgatttgttgtctctgaatatagttgatatttgtgtaccatatatccatggcctcaccagtcaggagagagatttccatcttggaaaatagtttgtctggagtgaatgtttctgattaattcattatgtgtataggaaaattatatatgtatgacagttacatatgttagacagttatatgtgtctaactgtattacatatataactaccatatgacagttgcatatgctattatgaagacatatatatgtatgtgtgtatacatatatataaagttctgaacaaggagggcgggttgtatgcttcttatagtaaaaggaatctgaatctattacgatctttcttttaagttagtgtccttgggataaggagagcaggtagacggaagagaacctggtaagcttaaaagccacctgattctcctgatttgggtcacccgcatctggaacatcctctttaatttggttatcaacatgttttttcatccctttatttattctataattccttataatcgtgataatttatgaacctaaacaaagactttttgtgttgatttcttcagtgacataaaaattaacctacttctgtggatggatagatgaacatggatgcgttctatggagcagagtctaccaaaattatttttttaaatcatctgaaacaaattgtgctattggattgaccattttcctcagttgttttaactgtttacagggaatgaagatgagtgggcaacaggttgtggttgctagagttcatgtcttcaccattatctgcagtctgaatattggctctaaaggttctgaaacctggtttcctagttttatgcagtgctaatttataccagtgaaatttataagggattgattttcaaaacccaaaggcttgtttattagtttacatgggcagtggacctttccagtccaattcactgtttggattgtttttgtgttggtatctgagtatcaaacaacatcttaccaataataagaaaactgtgtaatgtgttaaagataatataatgacttatgcagctatgaaaatacatgtgttaaagaaaaactcataatcagggaagaaggcaaa

SEQ ID NO: 93508 - DNA, 1021 bp, Homo sapiens
cacgcgccaccatgcccagctaatttttgtatttttagtagagatggggtttcctcatgttggccaggatggtctcgatctcctgacctcgtgatctgctccccttggcctcccaaaatgctgggattacaggcatgagccaccgctggaccaaccccctaaacttatattgtgttgtttctttgtagtcaaaccatctccctacttgtaatctttgccaaccgctgatctgtttccttatcctttgggtttgccttgtctggaatgtcatataaatgaaataatccagtaaaagattttaaaatcatatcttttgagtctggcctctttcattcagcataatacatttgagattaactcaacatgttgcatggatcagtagtttgtcgttattctgagtagtatgccattgtgtggatgtactacggttttgtttatccattctccctgactgacatttggctggtttccagtttttggtaattatgaataatgctgctgtgaataattacgtataggtttttgtgtgaatatacattttcatttgtcttggatattcagtagaatttctgggttttattgtaagtgtatatttaggattttaagaaactaccaaacttttccaaagtggccatcccattttgcattcccaccagcaatgtttgcaagttctggttgctgcatatccttgtcagctcctggtattgtcagtggttttattgttttaaaatttttttttttagctattccaaataagtgtatagctagcataatttggaaccaagtttgtccatcaaactcttgagacttggaagaagataaagaatagggctggattaaatgcagagtcacataggagctcataaggaagagatggagagaccatcagatttgtgagagctttgcaatttctgtcatattcactgttgtaatccccagatgactaacatagtgcctggcacacggtaattgggatatctttgtatgtttattgaatcattgaaaatcaacaaatgattga

SEQ ID NO: 93509 - DNA, 1006 bp, Homo sapiens
tacctttccgggatttttttttttcccctgtacccagtgctaattctttgactgttctttctagaaaaaaaggtaataatgttacatatctatatccttaaaatattacacagtagaatattgatattcaccttttatactttttgcttaataagatatcttgatttcaaggacaatcagcattttttaattaggacatcacagaagcttaaaatagaaatagtgcttgatattctcattcttctagataacctcaccactcaattttttattatagaagcaaggatcatgggaaatactaacttttacatgttagaaatcataagatttatttatagggcatgataaaatttacctatggaaaatcataactttaatttgctgtatatctgtattgttttcttaggcattattggagaccatgtttggtgtaaaagtgattataactggggatgcatttgttcctggagaaagaagtgtcattatcatgaaccatcggacaagaatggactggatgttcctgtggaattgcctgatgcgatatagctacctcagattggagaaaatttgcctcaaagcgagtctcaaaggtgttcctggatttggtaggttattcacacattattttaagtggttcattcattttagatgtaatgcacccactgtaaaactgacttaagcattaaagcgattccatttttttcctcactgggccaaaaacaatctctggttcttttgtctttagtggatctgctatggcagatgactttattttaatctgtttttaaaaaatattactctgaaagagaaaataaactgttctcaaggaaatggatatatagtatctgaggaccacagcattgaaggatatgaattaatagtttagtaactttttattgcaggtagtacttgtgatttcggccagaaactggtctgtgctgataaagtacttgacattgactgattcattcatattcatgtagtaagtattaattgaatatgtagg

SEQ ID NO: 93510 - DNA, 1053 bp, Homo sapiens
tgtgttattccacatattacttaataactaaaggtcagaagtagtattttactaatcttaacagtgaaccactgtgatgcacacatcctatgacagagaatgaaaataccagatactggctttctcagcctcctgtcagcagggatggttgtttgagccagtctaaccaaagggtcttatgggagtctgttggagtctctgggaaagatactcctccttaataagatgaaagaagtcaatgaaggtccagtgccactcttttctgcttgtggacagtattgtgttagcacatgaggcttggaacttttgcaggcattccctcaaagagggggaggtcctcagacatcaggaggatggcatagtagagtgggagatcctggctcctgaactagcgttggggccagactttattttacgtgagaagcgtaaacccaaattgtttatatgacttttagattggtattctgttatttatagccaaaagcatcctgatgtaacttgctttcccctatttcaccaagccataagaaatgtatccattgtttgatttactcgttcagtaaattttattaatgctagtcatgaatgaaaatttttatgaaaaccatcaaataaagtagaatatgttaaacatattttagttctgttgcctggaagacacacatacatctctgcttgtttttagatatataacagattatttcattttagcaattctattggtatttgaaacataaagttttggtaattgttgattttgtagttttggttgccagcattgcttggccgagatgagttttgatgcatggccgggagggtggtaagtagtggggatatacgtttgttgacgaaaagaatcgaactctgtaaaatatttgaagagatttattctgagccaaatgtgattgaccatggcctgtaacacagccctcaagaagtcctgagaacatgtgcccaaagtggtcggggtacagcttgggtttatatattttagggagccacgggacatcaatcaaatacatttaagaaatacattggtttggttcagaaagg

SEQ ID NO: 93511 - DNA, 1052 bp, Homo sapiens
tggtcttgaactcctgggctcacgccaacctcctgccttggcttcccaaagtgctgagattataggcatgagccactgcgcctagcctgggagtgcctgaaggttggctcttatgtccttttgacatactaccatcttttttcttttaaccacttatttttttggcactttaaattctccaggttcatcttgtatttttccttgccccatccctagactcagcatttcgctaaggagccctagatcccttttttttatgaagaatgatgtgagaaactaaaatctaggcacttactatgctctgtatgagttttccattgcagcttatactacaaatatagagtggtttaaaggacacaaatttattatataacagttttagaggtttgatgtgggttctactgggctgaaatcaaggcattggcaggactggtttctttctgtaggattgctacgggatctgtttcctagccttttctagcttctaatggatgcctacattccttggcttgtggccccttcttctggcttcaaagccagcattggctggttgagtccttctcacatcagtactaagtcatcttgtgcctccctcttccacttaaaaaaaatttatttttaattttcataggtacatagtaggtatatatttatggggtttctctcccacctttaatgacacttatgattacattgggcccactagaataatctaggctaatctcactaccttaaattcgtctgattagcaatcttaattcccctttgctgtataacacagtgccttcacagttccaggaattaagatgtggacatcttttgggggatgattattctgcctaccatatgttaattgctactgggatgtctttgattataggtcctctcagtgtgcaaagctaggaatgtacttaggaatcagttttgcaacaggaagaaatatctcagataatagctcatttagaaaattggtcaaatttccaatctcatataatatgaaagatgagtttggtctctctcatgttaacatgaaccccaaaattgtaacatga

SEQ ID NO: 93512 - DNA, 2326 bp, Homo sapiens
taagatgggactttagaacactagttcactatcttctcagtttgctggctctctgtttaaaacctgctttccctcccaccaaacttggcctcttgtgtttggctttcgagcagcaaatagccaaacctgggtctggttacataagtaggtctgggatcttgataatggaccatctgcaatgtttgtatcttctcatttgactcagtattcagtaattagagaataattaacagctattttttatcaaaaaaaattctgcacttctttccttaccttgtttatttccctttagtttatgatttataatggtccattgttttgtttagaaaacagcaagtctcgaagtaatgcatttgctgaaaaaaatggacttcagaaatatgaatatgttttacatccaagaactacaggctttacttttgtggtagaccgtctaagagaaggtaagcacccatttcaaaatgtactttttaataaaagtggcaaaaattgctaagctttatatatagccctttagagtttgtaaaggattttttactactttgtctcaagaaatgagatattgtatttttattccaagttggcctatgtactaaaatgttttgccatgtatttgttagagatatagaagagatctctgtaaaaaattctttccccttttttggaacagacataactctatattacatatatatatatgtttgtatatagagagttaggctataattccattttaggatatttctccaagtggcaaaaatgtctttctttcttttttttttttttttttttgagatggagtcttgctctgttgcccaggttggagtgcagtggtgctatctcggctcactgcaagctctgcctcccaggttcccgccattcccctgcctcagcctcccaagtagctgggactacaggtgcccaccaccacgcccagctaattttttgtattttcagtagagagggggtttcaacatgttagccgggatggtctcgatttcctgacctcgtgatccagcagcctcagcctcccaaactgctggaattacaggcgtgagccacggcgcccggccaaaaatgtcttaagagtatcttgtcacttaatccatttctctagtaatcatgaatagcaaaaaaaaaaaaaaaaaaaagagaaaaaaaatcttatcacttaaactaaccatatgtttggctcttagggtttgagaatatatcattctcttactattttaagctatagagaaatataacgatctgaaaaataattttactttaattatttcactcagtccaccaagtaactggttggtaggaaggcaagtgccactacctctactattttatagttaaatagaactggcatccagtgcggtaagtacattttcacaggttacttgagtcagggatagaaccttcttctgcttcctaatttgtggctcatatcacacttctttcaaactgtgtctattcaggggcatatatgagcagaaagtgattccgttgatgatatcgcacccatttaaatgcttaggttttgatgtaaataaaaaccaattgtactttttaattatagttctgcatatttgcaagtttatatatttatacacatttgtacatacaaataacacatatatgaagaaaaggtaactattcggaaacatactgaagtgttaattttataacagttcaaagcccacagtcaactaacagaagtgtgtttgcacatttctgctcttcactctgatttccagtaagccatattgtgtaatggtgatctctgtgacaaatgtcaccttcatctggtaactgatatattttcataaaactgttgtgcataacatgaaaagtcttgaaccattatgtaagaaaaggtatgaagttctttccctaaatggcatcactgttgttctctttaggatttaatatactttaagataaaaagtataacctgccaagatgaagcatatttataaccaagtacccatgatttaaagaaaggttcacaatcaattcaaaatcacatggtatggtaaaccaaaaatgttattcatattactttggtttgcttttgcaattccgtgattacaactaatataacatggacttgtggacttgatattcatgttgtatgtgattagtgagtgcccatctacccgtggaagttcatggagaatacagttcttcatgcctgtggaatggggtggagaggcacgaagacattcaagcagtgatgcttttttttttaatttgataccatttactatggcatgtaacttagactcacccttctcattcaacaatgtttttctattttacagtatttaat

SEQ ID NO: 93513 - DNA, 1087 bp, Homo sapiens
tatttgttagaaacataaaatgggacttgtatactataataataaaaataaaaaatatgatgaggataactataatagtatagcagctaacgttaactgagcatttactatgtacctggcattatgctgtgtgttttatgcctatgatcaattcatcttcacaacaactgtacatggtagttataaatatttatctcattgtgcaaaactgaagcagaaattgaggtaaagaacctcatcaaaattattggaatacagtttgtctaactgaatagctcttgttctttctactgtaactagttgctgcttgtatttatagtatgattttagttaacaaaatctccagatcattaagcacctttctaacactagtgagctggaatattttctttaagaaagagttaaataggaaaagaatttaaaaagaggctaaatggccagaacacggagagatggtagtcaccaggcaggtggttgtgatgctgcctgagataacgggggagcagagcaggaagaggctaaggaggcatcagttggggagttgagggcaactctcatttctgggggttcaagtgaataaagagagaaaaagtttcattagtgattggaggtgaggaggatcttagaggtcatctagtccagagttccttttagaatgggaatctaagactcacaaaggggcccagcctggctttctgatttttaagctcatgtattattaagacttgagatcatcatatagatttatttgagttttaggtttgaaatacttgtttttgaattcaaagaaagcagtttatatttcaatccatacttagctcatatgcttaaattctgaatataaaggaatgaaggatgtaatctttccactattactctagggggatacagggttaaccacaaaatagaaattaaattcccactaggtaatttggatcagcacacctgaaccaaattcttcggtttgtattcagggagagagaattgctgacttaacatgcaggttacatatatagtgtcagtagtcttgtttgtgggacgctcatgtttgtctacaatagttctcatgtgctctgagaaagttgat

SEQ ID NO: 93514 - DNA, 1013 bp, Homo sapiens
aaaatatatgttctttattagatgattatcattttcatagatgagtgaaaattatatacagttgtattttactcatgcataaggcatgtctgtgcctaaatattggtgccctgtataatgtttaatatattttttaagaatgacacactgaaaaatgctgataactgtgacctttacaaaatgtgtttatttcaaaattcagaattttggaagcagcttttgtgagtaaaatttgtggaattgcctttgagtgatgactttcggtagactttacactgaccataaagaatattgttacatacattgaaatatttttgtcggtttcccattggagggcaaaagtgagagatagaaaacaacttctgaaggtgtgagtagctgtgtcaatactatttactcattgtgtggcagatgggcactacatgtttatgtacttagaatctcgtttgcagtaaaatagagaagataagtttcagtgagtatgcaaaatgtatgtaacaatatactttaccttcctgttcatatgaaaatcaaaattctcagcaaaggtgagattttgacctgagtctaaaccctgtggacctttgaatccagaaattcatcttaacaggagcttatgcctgccttttggttttatatagtatgcagtttcattgtgaatgtatatgcttcttttttgggtttgtccaaaaaaggtttaccttgtttcttctttattgttgacatgtgtccatttcattatttataaagtctgtgccttttcttttagctttatagattttttcttcctaattcaaaatattctgtctgcatttttctaattattagaacctttttttgcattttttcatagttgatatttgtgttgagtattgcaaagtaatattaaaacagtactcatttgctggagtatatgtgtgtacacatgcaaaaccaaattcatatacctcacttgtaaaaaatatgaaactaaatacagaaattgtttacttattaatgttgaaaattatttg

SEQ ID NO: 93515 - DNA, 1039 bp, Homo sapiens
ataggactttgaatttgatctggaggaatggcaggatttgaattggtaaagaaattgggagagtgtagtcagggttactcagcagtggagaccagcctttttatgtggcaagaactaagttagagaagtagtcttagttgtcatgaagtctcacttctaacaaactgtatagaaaagaaagggaattagaaagagtgggaactgtgaaagttctagtatttatgactataaatactccaaacctggtgagtacattgttcccttcttagtattctaagacagtttattatcttcctaagcagtttactacttgttctaagataaaataagacctttagaataaggctttagcatcatcatagttatcccaaaatagtatcttattttgagacttctgcatgaattatgttcagttaaaagagactcagtaaaagtaattatacctcatgttttttacaactcctttgatccatgagcgaggtatttacagactatatgatggcatatagtaggaaaagactgtgattcatcccaattacaaagatgttttctaggaaagaaactctggagaaatgtctgtgtctttactaatggttttgggacttaaacaaataaatcttgtcttttctgtgtatggttgtaaatggtcgtaattttatacttgcaaatatcaatttgatctgaatcaaacttttccagcatagttggcctatttgtaaggttggatatccacaggctgaaatggatatatgctgtctaaggtatcagcggtttatctggattttaggtactagtaacatctttgaacgtaaaatctgagaagtatcctttgggtgcagcaactataatgtatttgatgaccttagagagggaatagtttcacaggaacgaggcaacaggagccaaatgtaagtgaagagtgatataagtggagatatgtagtttagatgactgctacagggagtttcctgatgaagcggagagggctggggtgtagacaacagaaaggggaagctgcctcaaggatgaatagaagagt

SEQ ID NO: 93516 - DNA, 1058 bp, Homo sapiens
atctgttatgtccataagaattctggatccttctgcttaggaaaggccttcattttaaataaacgcctagtgatttgagaacatttgtgagtgaagatgtgtcttgaaatatcacttaaaaataatttttgccagctatttaaacttccatcattgactttaaaatactgtaactagggcttttgatagatttttttttttgaaattggaaacaatagttgattagttattccctagctgaaacaactttatagatggcagggaaatcacttgatttataaaaagaagtgaagaattaattagaaggaataaaagattttatttaccctaccaaaaggtagtaaacctatttattacccattcttatgtgaaggtggacatattttatatatatatatattatatgtatatctattattatattctgggagtgatgaggcatggcttttacagggaggacggaaatgaagaagcaaattacatatttactttggaatggaaacttgacattaaaacagatcatcttatgtttcactgtttgaaactcagtaagagtttcagaaactaattatttagcagcaggtagtggcatggaaatatattaaatatacatagaaaactctgatacttgagcaaggaaaagggctaggttactttatttttacacaaataaaacaaagttcaaaggcgttaaatatcattaaaataaatactaagtactaataaccagcaaagaaatgcctagccaagactagatatcacagatgaaatacactgcatgatttgtaacatcaaagctgttctgatgtcctaaatgttccctcttcagtccttcaacttcgaggtaaaattggagagctgatatatgtattgtgacttttgcagtttagggcattagaaaatcagtttgtataactgaaattggaactaaatgttatagctattgaggaaaataatgttactttccaaactagagtatagtgattgtgacttttgcagtttagggcattagaaaatcagtttgtataactgaaattggaactaagtgttatagctat

SEQ ID NO: 93517 - DNA, 1029 bp, Homo sapiens
acttggtacttactaagcactccatatatgtgaatgaatggatactgtcaacctttttgccctcttcaatctgtttcccatattccaacatgcacctttgaaagacactgacagaacatcaaagaaatgaaccaaaactcgggcatggaaaggaaaattgaaaaaccaattcacttgataggaaagcattatttttctttcctaacttaatattcatagaccaaactgggcaacatagggagaccctgtctctacaaataataaaatattagccaggcatggtggcacatgcctgtaatcccagctacacgggaggttgaggtgagaggatggcttgagcttgcttgggaggtcgaggctgcagtgagctgcaattgcaccaccatactccagcctgggtgacagagcaagaccctgtctaaagaaaaaaagagatatattaatgtatagtaaagtcctattaatgtcagtttctcgattgaaaatgaattatgttgtttataaaactgaactgagatatcatataattatttcaaagacagagttgctaagcagagtaacaatttgattaaaactgctgaagattgtttaatccattacatacattttagtagcatctatttaaatatatttagttacacattgattacaaataatcatctacttattaaagtaggtccaataggacctgttatttaccaatctgctactaacacttattttaaaaattgttactgatatgtaacagttgtatgtattttggggggcatatgtgatattttgataactgtatacaatgtgtaacaatcaactcagaataattggactgtcacctcaaacatttatcttttcacattagaaacatttattaataattcttgccttctagctattttaaatatatgcaatacattattaactataatttctctaccatactagaacttactccttctaactatttttgtacatcttaaccaacttctctacatccctcccgactttccccttcccttgccagcctctggt

SEQ ID NO: 93518 - DNA, 1106 bp, Homo sapiens
tcttccaggaacagcggaacagtaatttacagcatggatttgagaactggaaagaattgagttagaatcataattccatgtcttattagctgtgtgacctagggtggtatatttaacatccccttggtaaatgaggataataaagctttacctaacattcttattgtgctgcttcagtgaaataatatatctaagaaatttagcatcaatatataatgcaacatatgtaagaaatttaaaatatgtgtggcacagtatctggcacagaataaacattcagagaattaataaacattcagagaattgttttctctttgccacagagaataaattagcaagaaattattcaatgaataattttagaattttaaaaaaacctagcgtgtctagagatacaatacagtgaacgaaaaagacagatcataatcatcattaaatttcagaccagcaacaaagcaaggatcctaaaagcttccaaagagatcaaaacttagaatgctgtcacattgtccaaggcaacactggtagaaaaagtggaggaaaccttcaatttttgcttttttttttttgaaggaaaatggtttccaactggagaattctgagcatactcaaattctcaatcaaatgagaggacagaataggcattttcaaacattcaagatctcctttgcacctttcttggggaactgttgaaggatgtattgtaacaaaagagtaaactaaaaagggtgatagagaatttaggaaacaaggaaaacaacatatgaatagaatctccaggattattatgttgaaggaggatccaaggatgacagctgtgcaacatgcatgtaagattatagtcctgatcagagtagggacatgaagggttccaggaagaatggccccaagatgatgaaagcaatagatcatctgacatatttgaatgtatgggaaggagatttgtacttctagcagagagtatggggataaattagtgacaggtctctagaaaattaagcaaagagaaaaataaggtaattattaaccagggaaaaatgatttgtggaataagaaatgtaattgctactacataattatactgtgaatatttacctggctgtata

SEQ ID NO: 93519 - DNA, 1831 bp, Homo sapiens
ccaacaatattcagtacagtaacatgctgtacaggtttgtagcctaggagcaacaggccataccatatagcctaggtgggtcatagactatatactgtctaggtttgtgtgagtatgctctatgatgttcccatgacaaaaaaattgcctaaagacacatctctcagaacatatccccgtcaagtgacacatagttgtatgtccaagagtagaactgctgagtcatagggtttggtaaccttaatttgaccagccccaaattatactacataatagatactcccctctaaacacccactggcaatgcacaagggtgcctgtttcctctcattcctgtgaacacttggtattatccagctttctactctttgccagtcaaataggtatattttaatttggttttgtctgattacaaaggattttcacatgcctgatattttctgggtttcctcatctattcattgcctgtttatatcttgtctgtgtttctattgggattactatagtgacttgttaattcgcactagttcttatgttctagatataatcccttgttgaattttagacattgcaggtatgttctattttattacatattcattgaacagaaattcctggtgtaatcaaattaagaagtttttatcttacgacctatgctcttgaagtctggtttttaaaaacctttcttgttacttggtctccattttcttttgttaattgtataattatgttttacatttcagctttatccatctggagtcccttacatgtgttgtttggtgtgaggatctggttttatttttctccaacagtgtgtacttaatctgttattctccattgatttgtgatgttacctttatcatatattaagtccccatatattcatgagaatggctttgaactctattctgatacttgtttttccacaaccacttgattcttttagaatgtattttccatagtgaagacccagtttcttctaaatctcaaggaactagtttatgcatgtgttataccaggatagcctttttgtgtgcataactgtttaggcatttcagcccacagtgatcctgtcctcctttgaactcatagtgttcattctctactacactcacctcacttctcttaaaattttctattaacttgtattcgtttcctgtgttattacttaacttttcacatatttatatgttgtacttcaactagattataaacttctaaaaggcaaggattgcttccatgtctttaaatctcccatggtagctgtagctagcacaggacttaaaatcattatcataagcatgatttagtgagcaattattaaactctttattgatacttttgatgtgatgaatgcatgtcttaacataattttaagcacataaaggcaatgaccgatttttgaaggatataggacaaatatgcagtttctacatgtacaaattgaacatagccataccccctgcatttttctaataactagactttgtcacatattacttcctctatttcttaaaaggttttagtttactaattttttcgttccttctttagtaattgcatttttttttttaggtttccttaataaaccctgtgaaaagcaatgtgctaaataaattatatgcagggcaaagcaatacattataattaggcattccattattgaattgatgcctctggcttctcatggtctctgtctaatcctgaaacaaattctttttgtggacaaatattagcctataataattattcatctaagctaacgcttttcattaaatctccttctgattaagatagctccataagtacagactgatttaatttaacatga

SEQ ID NO: 93520 - DNA, 1076 bp, Homo sapiens
tactttgttactgctcttgttttcacattgaattttgaatgccctgtctgaaaaatgataatgaaaacaaggtatatgaatgtaaaggattatgagtacatgaatttacacatgtatatatgttgtatacaagtctttgtgattttctcacgtgtgtagattcatgttttcgtaatcctttaagctcttctgtatttatgattttagtttactgtatgtaatcttaaatacttatgctttttcccctcagtcagatccatagggtttaagtatcttactcatcttgtcaaataactaacttctgcatttattttttagttttattatattaagtactgctttttatctttagtaattttctctttctctttccatttgtattcttttttttctccctctaattttcaatatgagtagtttctctttttcagttttcctctttagtaatgaagcatgtaaggtcataaatttttctttctattgcagtcttcattgtatcctatagattctctttttcattgctttttagataattcgtaattttccttttgattttatcttttatccatgggttatctaaactttttttaaaaagaggaatattttattatttatttttatggaatcttgatgtgagaatgtgcatcataaagtctcagtttttacaaaatgtgtttaaattgtcttgccactaggtaagtaatcagattttttataaatgctcatggttactgatacctttaaaatatttttgagtatcagatgggtctgtgagaaacacactcacccatccaaacccaaagaatggacttagaggcacaaagaacagcaaaagtgagacttattttaatagcgatcttgcaagatggggtgtctggtgggcaggcacacccaggccagctacaacagataatttatctcctagcacacaagtccctcccccagttccccattggtcgagtactctggggttacaatcttctctgatgtcacctaagtctcattatccgccttataaggttataccctggtccccttccccacttaagtttcgatttcccaataacgaaactttc

SEQ ID NO: 93521 - DNA, 1024 bp, Homo sapiens
tctgtgtccaggctctgttgaaaccaggcctgcaaagaagaatgagaacaggcatgttcaccagcaacctctctcctatgtagtgaaacaggtactgcactaaagtaaatataagagagcctgggatcgtcctcatctgtcctctgtcgccctcagtgtatgtgcctgtctttgagctccctggtggcaagaaacttatctcttctttatccccactgctgggctgggcatttcagcctctcagtgggcgttttcctaaatggatgattgaaaaactattccttgtctgggacaagtgacattatttatgttttcctacccttataaagtcacagaatgcaggtggtgttgggtgtttctcaaacacccaaaggaatgggggcaaaggaataaaggcctcagccccagggggacaaacacacctcatctcagcctattttgatgtggcttagttgtccccctggcctccctcttatagccaaagcccttggggtgataacgaagagtcaccttaaaggatgtggagggtagtctgctaaaggagatgggatggttctcatgtgagctgctgtgcctgtgtcttaaagcctccttagtggaaaatggaggttcaaaactctgatggtgcaaataggaatctctacaactgtgcagagttatccaaatgctctctagccactaacctgagggtgatgcagccaaagcaagaggagttggggatttaaaagtgagcaaagcagccattctgaacctccaccagttcgaggcaaagctgacaatcactggatgggatagtgacattctccagccccagggatgcctttgcctgcaggtgtgcagcagagaatgtgtgtagccaagctttccctggctgtctgatgttttggtagatgctgaatgagagccctcagtcaaatccgaatattgagtttgaatgccaaaaggtagtaacctggactagcacacttagtaggtcaccagtagctgtgggtgaaggtgaaagtttgtcaaatgctatcagcct

SEQ ID NO: 93522 - DNA, 1024 bp, Homo sapiens
tgtcacctccatggggacagagagctctctcccaggaagttggtcccattcccactttatgttttatgtttgtgtttctctttgcctttctggccctggaaattagggaaaatggaacatgatgaaaatgacccattcattttctctttgtggctctggcctctgcaatgtgtgctggaagtgcaggacttggaaggaaatcctaatttctatttaggtcaacatagctttttgtttagtaatagatgtgcatgaatcacctcacccagggccttgctgaggtcacatcttcgcccacctgatcagactccagtggaagcccctgtttaggatgtacccgtggcagcccaccagcggtttcccatcttcctgttaccacccaggagcagcagccagtccctccctcctggacaggtcgctgtacctgctggtttccagagctcagtagaaaccgcctcttcgggtggtcattcaagagtgggcatgtgagtatacacagtgtacaaggccacagaatagacctgagtcacaattggaacagtcctggttcagaggtattacaacatgtgacgaggacgctggagtccagcaggcctggttcaaattccctttgctagttggagtgagttcctcagcctttctgtgcctcagtttcctcattagtgaatctgtaaaccagtagcagcctcataggattactgtgagcagtaaatatgtgaggtgctctgcgtggtgcctgctgagaaaggttcaatgagcagtagtttaacagctttccaggaggtggataccgtcatcactgtaaaccgggagctccaagcagcgaaggttcagtcccagtgtgtcccacgccacgccaggcctgtttgatttccatttcattgtgctgtgtagttgcctgaccttttcccattctctaactgtcttcagactcccgtctgggatgccagagcccacctttaagattcggagccattgtcaattccagagaagccagagcggcttctctttgacactgacattt

SEQ ID NO: 93523 - DNA, 1029 bp, Homo sapiens
ttccactttgactcaaaagagaaaagacagctatccattttgcatttcctcccaccatgaataattggtggaactaagaccggacgtaggatgctagagccctggcaggagtgccactggggcagttggcaagcaggaaagatgggtgaactccttggaggtttccccctttgagtgcctgtcaagcatggggagacagagcgggcaaaatcacctgccccaggtcactggatcaagtttgtccgaacatccggcaaacccatatggggtgctgctgtgtgggaagccctgtgtaggaagcgggggtgaattctgagggagtgtggagtgtgtagcagtggctctctgctggcccctccctcaccacttctgattcccgaacactgtgttcctcttagatgtattgctgtattactggaaagatacaactgtgtctctggggatgctgtttaatggtggaaggaactgcaaaatggatagctgtcttttctcttttgagtcaaagtggaatgtgaggccaaggggaagaagagaatctttgccggggtacatggggatacaagtttgagacaattgcttttaaatttaccaggcgttgttctgcatggttgaatttcctgtcctgatcatgtcactcttccgttagctcagaaaactgtggttgaagtttaatctcatccttaaagctgtttcactaaaataggaaactgttattccacagggctgcttattagaagaagaaggatttagggaggtcttttaaagtcattttagtgatttttttgaaagaagcatttgccgcaatccacttgtccccaaagcatctgctgtttcaaagcataacactagtggaagcataacaggaagggaaagccagcatcaggatagggaataggctgagcaacccacttttatttagtcagttgaggacacctgtcgtgggttctatacgttttgggcaccatggaccaggtagcctatggatcaactgcaacccctactttctccactgtttttgtatggcctgtg

SEQ ID NO: 93524 - DNA, 1066 bp, Homo sapiens
ctcggtccttccctgccacgtttcgggtcgccctgcaccccccacccaggctcgcttctcttcgaagcgggaagggcgccttgcaggatcctgccgcccctccaaccggatcctgggtctagagctccccagagcgaggcgctcgccaggactcctgccccgccaaccctgaccgccggggggtgcccccgggacgtagcgccgcggagaggaagcggcaaaggggaccatgcggcgcctgactcgtcggctggttctgccagtcttcggggtgctctggatcacggtgctgctgttcttctgggtaaccaagaggaagttggaggtgccgacgggacctgaagtgcagacccctaaggtaggcggcttgccggcgcgctggcgctgagcggtggcttgcgggagggcgcgcagcccgcgtgccgggtttgcgggctcccgggaaaccagggcgagggtctgggtgctgcgagcaggtaacagccgccggatgtggctaccatgtgatgtttctggattttaaaacgctcgggggcatctccggacccgcggtgtgcatgagtggcagtgggtgtgggtggtgggcgcgcgctcgcctgcggagcggggctcccaacttgagctgcgcgcgagggtcccggggcggagggggctctgcggacgggcggcccaggggctggcggtctccgggcgctgccagagagtcgccggcggtcgggtcgggccagcgcccgggcgaagtgtggcggctgcgctgacctccttcccgcagctgccaggcccgacctggggaggccggaggccgggtgcgccgcgcgcgcctgtgcgttgcgggcgagcgccttgcagcctcccgggcggctgccacccctgttctctaactgttcccgaccctctcagctgcattggaagttgaatgtgcccagaacaccacgaaagagcctgtaaaaacagacgccttggtattggcggggagttgaggaaatgggaatccaagtggcttttccaactcctgctcagtcagttcctgtgagggagccagaaggttccccctataggctcactc

SEQ ID NO: 93525 - DNA, 1383 bp, Homo sapiens
aggctagtcttgaactcctggcctcaagtgatccacccgccttgacctcccaaagtgctgagattacaggcgtgaaccactgtgcccagccaatcctatgtatttcatagtatacagtgataatcttagagtgaatatgaaaaaaagcctctaaacttccttaacacagactatcaatcatttaatagctgaatatttggtgtgagtgggataatacttgatatagcattctttgggtatagaccttaagtttttcataggttttctcatgattttgcatgtgaactaaactgttatatctctatcacattcattgagaatccattatgtactagacatttgaaaaggagagtaaaaactggtttagaataactagtctggaataatttcaacaggttctttgagggtttaattacaaaggtttgattgcaggccgactcaagaaattgaaaggggagttttaacaattttaaagttttacttcagtgacataagcaatagtaaagttgacaatccttaatccaaaaattgaaatgctccaaaatctgaaaagtgtttgagcaaagacgtgacaccacaagtaggaaattccacaccagacctcatgtgacaggtcacagtcaaaaagcagtctaaactttgtttcatgcacaaaattattaagaatattatataaaattaccttcaggttatatgtattaggtatatataaaacatgaatgaattttatgtttagtcttggatcccatccccaggatatctcattatgtctatgcaaatattccataatctgaaagaaattcaaaatttgaaacatgtctggtcccaaacatttcagataaaggatattcaacctttagacgcagctctataaatgcctactgagagtatcagaaagatagtgttaacttgcatggtctatttttgggttgcacttatgaaaatctcttgggcaaggacaaaaccagacctttataggcaactaagacttaccttcatacatgtagagatagatatacatacatgtgtataataataactattataatataattgtataatataactactataataactataataactattattgctaatgttagtggcagtagtagatataaatgatgatgtagacaccataacataaaaagatgtctataccagtagaatctattcagtgagtttatagtgtaatcatgggctaaatcagactgatataaattctatcatgtagattataaaatttacataataaagtttgcaatctacccatctgacaaagggctaatatccggtatctacaaggagcttaaacaaatttacaagaagaaaacaactccatcaaaaagtgggtgaaggatatgaacagacacttttcaa

SEQ ID NO: 93526 - DNA, 1354 bp, Homo sapiens
ttaagtttctggatacttttatcaaagagtattctgtgatctttgttaaagcaaaactttttgtgattttattaaagattaaggaatatggaatttataaattgaacaagctctacactaaattgattacattgttgtaattcaaaaaatgaggagggtatgcagtcagttctgagttggtttcctctatggagtattctgtttgaattttttgttgcttttgtctgcgtttcttacttgcagctttgataacatgtttttaaaattggaaatactggtttttatgttttctaagaatcgatgtgggaaatgtgtatcagttttcttgtttcttttcctgtgtaaaaattgtgatttagtgtctcaagtatattttttatttatttggtttttgaggtggaacatagatgaaactgaaggaagcttatagctctatttatagagtcactctaagattagcacacacaagcattttcccataagaacaacagatcatttaaagaatatatttaattagttaccctgggttcagtgcggtggcttacgcctgtaatctgagcactttgggaggccgaggtgggcagatcacctgaggagttcaagaccagcctggccaacatgacaaaaccctgtctctactaaaaatacaaaaattagccaggtgttgtggcatgcgcctgtaatcccagctactcgggaggctgaggcaggaaaatcacttgaacctgggaggcagagtttgcagtgaatcaaaatcatgccactgtactccagcctgggcaacagtgtgagactctgtctcaaaaaaataataataattagttatcctggttataaagtaacatctttaaacatatcttgctctctatattatatgtatctatatatctatgtatatagatatatattggtgtagatagagtccctttaattaccttgttgtaccttcaggttctgctatgttctcttgaatatatggcaggacatttcttgacctttgaggttgtatttgttagaaatggtcaaagatcagctgtgtgattagattggataataaggtttaagggaggaatatgttagttataaagaattaagttgcctttctcctgggacatacgtgctttaaaatgtccctaccccaaagcgccacagtggcacattggaataagcttacagtctaagtaactgttaatatcacttatactatcgaaaattaatcttgttgctttttagacatgttatatccaaataactacctaatttattactaaattcatagttacttgacatctcaaatatctcagtatggtaaattgaaaatctgtgtaaaaaccagagacagtttaaaaaatgt

SEQ ID NO: 93527 - DNA, 1057 bp, Homo sapiens
cctgtaatcccagcactttgggaggctgaggtgggaggactgcttgagtccaggagtttgagaccagcctgagcaatatagtgagaccgcgtctctacaaaaaaaaaaaaattaaaattaaaattaaaaaatgagccaggtgtggcagcatgcacctgtactctcagctactcaggaggttgaggtgagaggatcgcttgagcccgagaggcggaagttgctgtgaactgagattgcaccaccacagactccagtctgggtgacagagcgagactgtctcaagaaaaaaaaattattatcaatttgaatttagcacagaatagatattcagttgctgtttgttcagtttcaatgaattgaattttgaaggaaggagaacaaaagataatcttcatgtgaagtgttttctaaaggtcaggaaagcataaaccttttcactggaagcatcttttaattggcttttttcattttcaatgattatggaaatcattgtcctcagtaactttaaggtagggtagaatttaatattcctaggctgtatatttgatgctaaatgaaataaattgtaatgtaagttatctggtacaattgaacctgttggcccatgattcctagctcatatttggcaatgtccgatggtgtttaccattacttgaaggtgttgaaaaattttttaaagttaaataaaatgtgctttagctgcatgcccaatgacatgtccagccaactctcaagtaaaaagatacttatggagtgttagaaattctggactagaatctgtttacaactttgctggtgagttgctactggtttgctagaacgagtcactcttcctttctagattagagtttatttctttattaatgtgagttagaattgaataatattacttctaagggtctttccacctttgactttttaggacatgaatgaaaacaccttatttatttaatgtattgtactttaacatttttaaatctgtttcacaacatttcccctgctctgttaatctcaaggattacaggccagacattgttaccttaattttactgttaca

SEQ ID NO: 93528 - DNA, 1042 bp, Homo sapiens
gcattagaagtattcagataaaagctagattggtgattatcgaagtagagtccctggactatcaacatcagtatcacctagagatgtgtaattatgatcaccaagctaaaaaaagctagtatacaagtaaaatggaacttatttgtataaaactgttgagaagttatttttaaatcaaaattgattttgaccatttaacactaactttaaacacagagattataaattgatgattattgctttattgttactagggtaacactggtgtaccagttactgggggaaccttagaataattaattattctgttttagttaaaacatttaaatatagggcagagttctaccatttcctaaaataaagttggtctttgaatgaatgactcaattaaacagagctgctttttcaatctaaaacacagccatatcagttggcagaaaaggaacttgaaggactggtttttttatacctattaatgtcaaaatattaggataacctggagcagctgtcacataagacgttttcctatctacttcctgttctagtatcccaccacataccagtacatacagctgagtggcatggcatactgtcatctatagctatgctacacattttgacaaagctctctcaagtaatgctgataactggaacctctacctctttaaagtcactgttgaggatggatttgtttgcctatcctgtcttcaagtattcattagtactatgtaaagaactttggagtttcagatttgtcatttattctagggttctctgatgattccagagtggtttgtatccaggatgtatcacatttactgtgtatgtgtgtgtactctgtgtgtgtgtgtgtgtgtgtgtgtgtgtgcgcgcgcgcgcgtgcgtgcgcacatgtatttaattctaatgcaaaattttggcaatcactataaaaataatgaaaagaattttaaaagccagtttgtctgagtttgaaaggtatgctataatgcagttgtttttttattattaattgtaaattatgttcaaatgaacatttctc

SEQ ID NO: 93529 - DNA, 2957 bp, Homo sapiens
aaaatttgtattataaagtaaatgctgaaccaatcgacaattaaagtaaaaatcctagcatataccttttagatttggattttaatttgtatacatttcaaatttagtcaaagtcagataaagactccgacgtcttaagacagaagtggccagggatttggtttatacggtaaagagaaatatatttaaaaagttaaaaagggtttaaaaaatggccttattacagggagagggagggtaaatgatgactgatacttaattatcaaaaaacaagattagaagttatttgagaaaatgataaggaattcttttttttctattttaatatgatgcaacaagagaaattcaagaaacaaaagagcaaaagagataatctaggcttcagctgtgaagtggacaaagtcaaaccgcaaacacattgagtgcccagttttttatgtgatgtgtgtcctaaccaaatttttcttttttctaggctatcacagagctccagaagaatggaatgaatatgagtttttcgtttttgaattatgcccagtcgagccagtgtagaaactggcaagacagttcagtgagttatgcagctggagcactcacggtccactgaagctctgaatcctcagggatgccacctgcacattctcatactctgtccggggtcccagcctagcctttaccacgatactggtcctggtttggggggattctgaaacctcaaactaatagaactttcttctctttttttctagtaggtgtagtccttccttaatttcaactcattaaaaaatgctttatagtttagggcagtggaaggaaggctggcatcaaaatattttgatcaaaaaagatgacaatgtaaaggctcagttgtggcagacagttttttgaaagtaacttgtaaagcatttaccatatcctaaatttgcactctttgcagacttgtgcacatatattccgctttcagaatagttttgcaaattgtacacaaacaaacaaaaaggtggaagctttttaataaagaaattgcatttataaatgatctgtattagaatataataaatctccagttatagtcaattactacccatgttgtacaacagataccttctattttagttgctaataaagggctacacaactcaaaatagtctgatttaaacttattgctctgtggtatatatgaaaattgttttttattaattccatctcagaatttttgttaaaaatggtaaacctcagctcttatgtaaaaatatattaggatgtattttatattttatatatttgtatgatttttttaaatcagaaattagaatcatatgatcttaaagttaactttttaaattacatgcagtttgcctttttgtctgtgacatccctttgtgtcattactatattgtaacagaatatatattcaagattggtaaaagaacgtagatgtaatccttgacttcaaagatcatgtttgatagtctgcaaatgaggaaacattgaagagtgttcttagtgtttttcaaatcattgcagaccttacactgctgtgcttttttaatgctttaagcagtttgactcttttacttgaatttttagccagagatcattaacatcatcaacaacaacaagccactggattttcttatggttacacaattttttttgtcatgatttttggtgcggctcttccaactaaaataatggtatgatgttgtatttctttctttctttagcatagaccaattctagtcactttcgccaaaaaaaaaaaaaaaaaaaaaaaaaagatataatttagttaataattcagttaccatgtatgtactgcattatacctattttaacctaacagtgtctacattatattagagagtgtttatatctccagtgttatgccagagtagcacaatttttagatgccttgcaccaattttatttaaagatttatgtttcttatttattaaatatcaactttctatactcgagtgaaataaaataatgttaccttttagattcaaagtcgcccacctatgtatgtgtggaaattatattcttacacattagtgatttattttccgtaatttagatacactttttagtactattaatatttatttcttgtttaatatgaactataaaattttaaaatggacaacagtgaatttttaaaataatgttttctgagtataagactaatacatgattattttagaaaatttgaaaattactgaaaagttataaagagaaaaaattatctgcaatctcactacccagagataaccctgttaatatttttctgtatttcttttcagtctttgtctgtgctatttctatgtatgagtgtgtatacatgtgtttgtgtgtgtgtgtaataacaaacttgagattatactgaccatatagttatgtaccctgttttttataacctaacttcatacatatttacccatgtctatgaaaatgtgacttttaaaaatggctgcctaatattctattgtatgaatatgccacaatttaactacttctctctttggatattaggttgttctaatctttcaccattataaataatagtgggatagacatccttgtttgtaaaatttcatctctatattagactctttaggatatactcatgtacatggaataagtggtttagacagtgagaactttttaggctctttaaaatatttccaagttataaccctttagaaagattgtactaaattaacaatgtatgagtacccatcattctgccccttcaccagtatcattatttttttaatctttgacagttggttaacataacaatcggttgtttctttgaccattctaataagagttgctttataatggccgggcgcggtggctcacgcctgtaatcccagcactttgggaggccgaggcgggcggatcacgaggtcaggagatcgagaccatcccggctaaaacggtgaaacccc

SEQ ID NO: 93530 - DNA, 1231 bp, Homo sapiens
taagaagagtggtgtgtataaaagaggcagggagctgataatatagggtaataattgaaggtaagaactttatataagtacaataggaagtgaaatgatataatttgaattatttttaaggtcactgtggtagttgtgtggcaaatggattacacaggagggtcagaggtagcaacaatggggctgggggcggtggctcatgcctgtaatcccagcagtttggggggccgaggcgagcagatcacttgaggtcaggagtttgagaccagcctagccaacatgacgaaaccccctttctcctaaaaatacaaaaattagtcgggcatggtggtgcatgcctgtagtcccagctactcgggaggctgaggcaggagaatcgcttaaacctggtaggtggaggttacagtgagccgagattgcaccactgcactccagctctggggacagagctgagactctgtctcaaaaagaaaaaaaataaaggaagtagcaacaatgggccattggcagaagttcaagggagagatgatagtaacttggactgtggtgatgttggtggaggtagaatgaagtggatggaggtcagatcttttcagaaataagagtcaaaaggactttgctaatgggttgactattttggtttggaactcaggaaggctttcaattggactagagatgtaagtttgggaggtctcagtagatcattaaagccaggacagagatgagattgcctactatagtaatcattaaccttatcattacaacagaactcacttgtggtactttgttgaaatttgctgagaccctgtctcaaaaaagaaaaaagggaataaattgtacagtagaaccacttagcccaggttgacttctaagtttgcatctgatttaccttactttagatatcccaaattactggaacataattttaaaaattttatttaaataccctggaatatgatttctgaataaatattgagtatttgcttcatattaatatgcttgaatttaatatttgattttaacatttggacttggagtttatttctgtggtccatttgttgagatatatttatttatatatagaatttttaaatggctcataagtgttctattttattagtatattgttgattcaacttataagtcaattctgggagttagaatacatgggtcaaaataataagacccgtgtatggttagctctagacataaacttaggtgtgtttatatt

SEQ ID NO: 93531 - DNA, 1157 bp, Homo sapiens
ttgaacatctagataaaatggtaagtctttcaggtgtgggattttaatgctctaaggctttttctttaatttcagattagtaattcaagacttaacatgttgaaataatatattttttccctatctttaaatgtacaaaatgcaatgtgtcatcatataaatactgactataagaataatccctattctagtaggaatttccgtcatcataattttgtttgattaatgagaatatttaagaataatatatacggatttaaaatactttctagagaagtactttagctttaggaacagtaagatactaataccattatttactgttaagcagtaataaccatagcagatgatgggataccttgactctaattcctgtttgtttcacgactacctgaaatatttttttttgagtccttcttttgactccttctgaacagcattgttgttttttaaaatttattaaataacttagtatatttttagttttgatagcagaccaaattactgttcttaagtgatgatgaagattttatgaattagctaataaaaatctgtattctgttggaggaattatatgtaaacttgaagtaaataacctgaaaattttagactgaaagtctttattttttaaattattgcccctttacctctggaaataaaagacatcatagccttatgatgacagtgtgcaggaattccaatatacacaaaatgtagctaacttgaatcttgtctgctatgctgaagggatttatacatatactttattttaaaatttaaaatttcaggcatgtttgttttgttttgttaatttatttttattatttccttggaccagcagtttgacctgacagaggcatatttattttggaactactttttttttccttcaaatttttagaagctctcaaaatctaaaattcagtggaattaatattttaaacataataaactcacatcattgatatatttctgtaaaatatcctgtaaatcagattgttatatatctaatttcatttttgttttgatttgcatttcccattgatcttaagcatgcatattaagatatttcttttttcctttttttaagagacagggactcattccgttactgaggctggagtgcagtggcacatcatagctccctgcaacctgga

SEQ ID NO: 93532 - DNA, 1034 bp, Homo sapiens
aaatgaatgaagtgtttcagttctatgatgtgtggtttttcagaaaaggacatcaaagagggttttataattttgcactgcccatcatttacataatttttttagtaagatgaacagaaaacttaaaaatcttaattatctagccgaagagttccatgtcttcaggtgtgagggtggtaactggatatatcaacattgctctgaacgtgaagcacaagacacatgatgtgtgtacatgatttgtatggtctaattcctttagaaatgcattttggtcaatctttaacattaaggaaatacaaaagtaatgagttcttagaaaaaaggcactgctaaaagatttaggtgtatctgaaatacgttgcagtcagttgagtaatactccccataattagttaagaaaatttttaacttgattttcatgtaactagtaggaaacagaatttattttctgagacttttgttttctgttttctctttaagcttctttcattttaccttctctattctttggagaatagccaaaacattgaatgttctatgcttataatcttattgagattttatgtcagggtaggaatatttattatatttatattatatttacccttttgtgtattctgttcacgttgcataaggcacttgtattgatccttttccaagttgtgcaaaaatgagataatttttaaaaaatttacttcataaaagtcacacaagtcacagtatttgcgacctcatggtttttttttttttcccccgtaatagagatcaaaactttgtacagcaaaagctaaggcttttagtgatttgttataccaagatagttttcttaaaccaaatattcttaagtaatattctttgggtttactttccaatatagactgataaaatgtttaacaatgcttctaacttttaagctattttgtttccttaatcttgtatttctggtgattttaaggtttctacaatttgaaacagttcttaacatcataaaacattggtgatatcatttctttattaccttcccaaatgtg

SEQ ID NO: 93533 - DNA, 1049 bp, Homo sapiens
tcttcctttctgtcagtctcttgggtataaggctgttgctattttctaaatagttaaataggtttgagtgtaagttagctaattcttaaaatgtaccttaaccaagccatcatatttgtcttctcaaatatttgtacatgcagattttacatatttagtttttgactttttgcagatttgagataaggctaatacttatacattagcacttcagattgaaagcatgatcgtatttagcttttaaaagagattaccttatttgatgctacttacataatatttcctttatgaaatacattttttctttggtagtgatttcaattatgaatgtccccaggttgggtccttagtatagaatggcctaataatttatctcacaaggttgttgtgaggtttaacttaaatatttgaaagtggcttagcatataaacgatgtgattaagtaaatgtgtgacagtataatttttattttatgtatctgaaaatctatcttattgactgatcttttgggggctttatagatcaactttccaaggtcattatttatttttgcagttcagtgcatagcttaatgttgaggtatttactgttcttttaccttttgttttaaggtacttaaaaagtagcattggttcttgtaccattcattgttatgtttgtcctcattagttgattgttgtgtgttaaacagacatccctggagcttattctccacactctgtgaatccactcattaatcaccagtcacctttggagatgggaaaattacttacctgtatttctttttctcagaaagcgtgctctggaatggattcacaaatgagctaccctccttccctcaaagagtaaggtttctgctttacaggatttttttcttgggttatttttcctctcatcttttgaatttgaaaagaactgagggaaggcacctgaagaaactactgacatactcactaggggagttccaaagcttgtgctgcccctaggggcagtgtcaatggctcttaaagctagaaagctcatacttggagttgaaacaggggctcaaa

SEQ ID NO: 93534 - DNA, 1010 bp, Homo sapiens
gttagccagtgttctttataaacatgatttattttcttaaatttattttactttaaagatgttcatctttcagatgccttgtagcttttatttagacttgaaaagagacattagagaaataaaggtagacgtactgaagtactctcaagttttctttctagttgagttaagccaagggagagacaggaacctagattccattatcccccttctttcaatcccctcatttgagttccccaaaaagaaaccctgcatttcagttcctgccttttattgcatcaccagtcttgtacatatagaaatgccagattatatttctcaggcaacacttaaaatagtttcacctcatttcatcctttctgttactagcaggaagtagattaagtgaaaagacatttgccactagtctgtgtgctttaccatggttaaataaattgttccaatactttttgtgcttattaagttctatatcctataggatggctccgtatgagagaattttgtctggacctattttaattttttcagttagtagaattttcattctgttttctcaagtttcagttttggccttcttcatatatgtgattgatatttgtgttttcctgaccttcctgaaatttatatttctaaatttagattgttggcagctttcattaacgtaattttcacttctaagaagtttctaaatgaaattggatttagtgaaaatatatttttcaaaagtggagttatgaaccgggtatggtagtttgtgcctatagtcctagctatgtgggaggctgaggcaggaggattacttgaatctagcctggagaacaagtgagacctcatctctaacaaaaaataaacaaaaagtaaaagtggacttcatgctttatttgatttgccttttatggtggttttacaaatcagtttagataagtttacttggtgaatatttatgacatatatttttttaaatatgagaagtttactgtagtcttttcagcaattttgaatttttatgc

SEQ ID NO: 93535 - DNA, 1043 bp, Homo sapiens
gctgctaaataaacatcctgcagtggcacaggatggctcccacatcagagaattaccaggcccaaaatgtcagcagtgctgaggttgggaaacccagatttttaggatatgcaggtagttgcacttcctttccaaccccccagagaagctctcagggttcttcttctttttttaaatctgtttttaatattcagggttctttaattactgattttattggttagctggtttgctacctttggcagaagttacattttatggatataagtatactacttagatctgaaggctaggtagatgcttaaaaggagtgcctttctgtggaattttgaaatgtaataagtgaccttgaaaacttaagtatcattactgcaaaacagcatattttccttaatattgtgaatttgtgttggtaacaaagcatgtctgtatgttttgaaaattaaaattcttgaagcaagtgtcccacacctccttcatttttaaggctcttattaatcacttgatttacataattagttcccttgatattattttttagaacctgggctttctctctaggttggcaacctgtgcaactgtaacataaattcacataaaacgtcagtaaacatttcaatattgctcttttctgtggaatcatcctttttacctcattaataaagaattctaaagtaaccaaagcctagtccactgctatatgtaactacagtggctgagagagaaacataaatttgttttaccttctacctagattcttagaaaattattgaggttgttttgtctcctgatttcttggaaattttggtatctaaattgtaagataggatttccaggtgatagttacaaaaaagagctcaaaaattttaaagactcataaataatagttataagaattatccagagactaaaacattttttagatttatgtttggtgtttaagtagtagaacttttcaagtgttcattttttagtatcatcatcattaataatactcattaaatgttttctttgtacttatggaaagcaccgtgctactactt

SEQ ID NO: 93536 - DNA, 1335 bp, Homo sapiens
ttataataggataggattaaaataggtgaggaagagtttaatggtcttttataatcacagaaggatttggcagatgactgtagccttgataagtacttgaaaagaattgaattggtgctcttctgatgggcttgtttttattttttgagatgttattatacctggtagtaaaatagctttttttacctaaagaggtagtatatatttctgtagtttaaatggatatttttagtattctgtatgactcatatttttaatcgtacccttgtaccctttaaacatttaatttatggattttaagaattcatcaataataattacatatgttatccttaccactattaatacatattccactttctaatgccaacacatttggaaaactttcatttaagcatcttaaatgacattttttttttttctgttttctttaagccataaggatgagtttaccattattcctgtactggttggagctctgagtgagtcaaaagaacaggaattcggaaaactcttcagtaaatatctagcggatcctagtaatctctttgtggtttcttctgatttctgccattggggtaagttctagattttaacatatcatggtagatgttatatacttctggttaaaggtatcttttcattctaagctctgattttcagttttttatcactttccttggaaagttttacttctggcagcagtgtttaaaagtgaataaaaaatcttttgatcctttaaaaaggatcagattacaatagtggattatgggtacatttccaaaggcgactggtataattggattcacactgtgaaggcatccttgtttagacacttatttagtgggagttaagatcttttaacctcatttccaagtaggtgtgtatggtagattctctgaagttagttttggtggataaatccaatgttctttagagtatagaagagcactgtgtgctgtgccagtccttttccacatttccttttttgtaattagtcttttttttttttcccctttggtgcttagtttttactcacaattgccatcagtttaaagctaccctccaaagattataaaatattggctattaagcactgtggtcatcattggtaatgtttttataagggtaaggactcttgagtgattttttgattattgtaagagcaaggacacgtcacagtgagtacgttgtaagagaagtgagctgtttgtggatgcctcttttagtaaacgttgcttctacagtctttggatgcagtttgctttcctttatccattactgtcccagaatatttctaagttttgttcgttttaggacatctctttgacctat

SEQ ID NO: 93537 - DNA, 1753 bp, Homo sapiens
gtgagctgaaatcattttgctgtccccagcaaaatgctgtcacccagcctggcctgggtgacagggtgaagccctgtctccaaaaataaataaataaatataaaaataaaataataaaagagtccatttgcaagaaaaaattcttctttcttatttttggcataagttttcataatttgaggctttaggtatcacacaatattagcaatttgttaatgcgtcttattaatgaaatgagtatttctaaccttacttcctgagagggttttagggaacacattttacttttaaaaccttgttggggcattcagaaaattttaattttgggtagcttgccagtgaagaaatagagaattttttcaagaaaagaggtcatacaaccatttatttctttctttgatacaggtaaacccatttaaggatctaattataaaattggttctattctatgctaaaaatattcttatacatattttttacatgttaacttttatctttttcttgttccacaatattcaattttaagcacagttcatcagaaaggcctgaattactaggtgttttaaagttgggacggtattgtggcgaatttatattttgatccatcctacaagcttaattttgaattttcaggaaaatagcattagtgagaattttctcttcttggtatggcagaaacctcaggtgtgaaataataccacacattttattaaaaaacaaaactcagaaactgtgcttttgacctcatgagttaaatagactagtggtttttccatatttcagtaggaattctaattatgttcttgctagcatgtactgattaaagtcaaggaaaagcctagacccgaaggtgattttagaaataatgaaaggagctgatgaagaatttaaattatcattttttatataactatgtaacatatacaaatgatgagtaagtctttacacgtattactgttttacctgttacataaaaactagttctgtttttttctctttctccttactctccctccttcctttcctttctttctattgttttgttttgttttaataaaaatgagaatattatatggtgtttctgtctcttgccaaaaagcatgtagttttgtgttactgggtggaatctcacaggataaggatatacattaatatatttattttactgtattttgaaatctctttagtttacggagaactgtggaagacaggaatgtttgaacgcatgtctctgcagacagatgaagatgaacacagtattgaaatgcatttgccttatacagctaaagccatggaaaggtatattgattgatataagaaatccccaggaaatcatagacattaatttctttggtaatttaaaactagtaaatcctagtaattatcagggtaaggagattaagatgtgagataaaaaattgagacaagaatgtcttaaggtggattgttggttttgaatagtttgcctatgaaggctgaacatacgaattgacatgatggttttattaggtggaagtattaaaaaacccatgggtatgtgagtgtatgtgggtatgtatatatcttgctttgcttgtattttattcattagacatttctttatctcagaataataattacattcttttatggtacaatgctataattaatcgtaaaattttaggcttgtatttaatgttggaggtcatttatttcaaccttgtgcaaggtacatgaatctcttttatggtatgctcgacagactgttacgtgg

SEQ ID NO: 93538 - DNA, 2209 bp, Homo sapiens
ccttgaacttaaagtaaaagttaaagaaaaggataatctgtttctgaccagaaatggcctgtggatgaagtcttaatgtttgctgtatgtgctgtcttaaggaggttttgggactctaaactgagaatcacttacccacaactttcttttttttttttttttcatagcagaacaacttaatatccacagctttatctcctccctgcaatttatgaagtaacatataaccaataattggttaattttcttagctgtaatagaattttatgagaataaatacattgctaaagcacacattccctggcctgcaaatttttgacagaaaagaactagctcatctctcagcttttgttcattaattgagcaatcagtaatacttttctagctacatagcatatcatatattttcttctcatagttttggctttatgagtctgtaagttttgtatgtgatgtgggaaggttggttcatatgaattttggagaacagagaaaattgatagttttggaattcagattgtagggcaggtttgggtatttgacagaatgagaggaaattaacattactcttgatgtcaagataaagagattgtaaagatttaagctacactttagctcagttcttttctttagactacagtgcaaataacacataatctagtttctttgtttttgagaatgacttctacttgaatgggaatagagaaagcttattatatagaattcttttcaacaagatgcctttttcaccctaccatggaagaaatatggaaatagctttatcagaatgcttttttataatggatattttgtatagatatttagaattttatgctattatgcatttttattaaaatcatggtggatcttagaaggttattttagaatgtgttagaattttgaaattttagtagcttaaatgcataaaatccatttaataaaatacagcttctgaatacctgttgcatccttgtcattgagagtatagagattattttatgcatagtgggttggtttactgtattaattgataactggtatttccaagtattgaatatgattctcttaaaggccatccaacaaagacagaaataaggaattgaacttaactgaggagcaagtcattattaggtgtattagtttgctagggctgtcataacaaaataccacagattaggtggtttaaacaacacaaatttattttttaacaattctggaagcttgaaattcaatatcaagtttctgtcagggttgggccccttctgacatgatcatatctctgtgcaggcatacttctggtgtctctttttcctataaggacaccagactcattggatgaggtccccactctaatggcctcatttgaacttaatcgcctctttgaagaccttatctctaaatagcactacagtctgtgctactggggattggttcttcaacatgtgaattttggaggggaacacagttcagccattaacagttggtaattaagaaggaaaacaagtgatttgtaagaattacttttttctcttttatttaataaggtttgtgtagaagtgcaattgttacgtgtttttttgttgtgtatctcctagccggagaattttcatccttgggccttctcatcatgtgcccctctctcgatgtgcactttccagtgtggatatatataggacacctctgtatgaccttcgtattgaccaaaagagtaagtatatagaaatattatagctttcaaatagctaatgttcttttaacaggacttgtaaattaatttaaaaacttatgaatatcataagtaatatctcaatatttaaaataaaaattgttataactaatctgcataaaacagcaaaaaaagaaactcttccatatccctaaaaggcaactagtgttttttagctagctacagaaatctgtcagatctgccagtgtgcagattgtagtggttacattaatattcagaaaaatgccatgtactcagtgtaccaggagacaaaaaattagtacccataccaatttcataaagattctgggcgtgttaatttacttccatgtaacgccacttttctcactgtaaatagataatgctgataatatctttattttctttcaaatgatttttatgggaaaaaatgagcctttaattatgaaactctgaaagaaaggtgctatataaatgataaatatattttatttttaaacatgc

SEQ ID NO: 93539 - DNA, 1020 bp, Homo sapiens
atgaaccaccgtgcctgacttccattcactttggggaaatcttctgccagctacctaaattggaatagccgtaatttatctacagttgtcttttgaagtaaaaattttgttccatgaggaaaatgtctggttcagcttacaactcaaaactacacaactgctttttcctgaaacatacttccatatgcagcagaaatgttttatcaccacagattgaatgcattttgtcatatagaatattaaaaagatacctactcgagagtcaagatttaatgaaattaggaactcccttttaaacttagtgtgagtaaggttaaaaaataggactgctagtgcatgttgatgatactgctttgatctttgttctaatgggccagtggttttacgctcccctcacctttgcaccataagtgcaaatgaaaaaagtaaataacttccttgcattcttatgaaaatagttttaattttatggactgctgcatagggtcttgaggaaaaccagaattccagagttcacagtttgagaactattgtggtagaccttaagagggtgacttgatttaaattgtgggaaaggtattggggaaagtatctccgggaacagattttttttttttttttttttttttgagacggagtcttgctctgtcccccaggctggagtgcagtggcacaatctcagctcactgcaacctctgcctcccgggttcaaacgattctcctgcctcagcctcctgagtagctgggattacaggcgtgtgccaccacgcctggctaattttttgtatttttagtagagatggggtttcaccatgttagccagatggtctcgatctcctgacctcgtgatccgcctgcttcagcctcccaaagtgctggcatttcaggcatgaggcactgcacccaaccgaggaacacattttttaagccagggtagccaagcaatggggaacaatagcatgggtgaaaagtttgaagtaggcaaagttgttggtgttatcaaggaactgcaagaagacc

SEQ ID NO: 93540 - DNA, 1111 bp, Homo sapiens
ataatggtggcatgcgcctatggtctcagctactgaggaagctgaggcaggaggattgcttgagcctgggaggttgaggctgaagtgagccatgattgcaccactgtattgcagcctaggtgacaaagtgagactctgtctcaaaaaaaaaaaacaacaacaaaaaccaacctcaataatcgtgttacatagcaacttcaagtaaacttgaacacctctaaatttgtctttcagacaaaaaaaaattacaaagtatttttaaagtttagaattggaacacagtatagatcatgtgtttcctaatttcttctagaagtcacatcattaactacattgttatttaacatatgctctcaattctgttgtgtttaccataggtactgtatttatttcaaggtttttctttctagaatatcttgattttgaatctgatgattaagtttaaaaatattttgttttgtagccatgcaggatatacgtactgtgggtcttgtgctgcccatgcttataaacaagtggatccgtctattacgtaagtaatgtagttttgttttaagtcggagaagcttgagaatttattgctttgttatagaagtaatttgctttttatacttattgttattatgtactcaatttcatgagggatttgacttttgatgaattttactatactttgtataggttactgaaaacttcaatacttcttttttgttgttgttggagcatttgatttttaccttccctttggcatgtaaaatgtttagttatgaaggttaaatattttgttttttgatatttctttgaaaacccagagatgagcattcttaagaaaaatgcaaagccctctgatctgttttaatcatttcgtaatttaagattctttattgtacttgttaaaattgtggttactgaaaggataatttctcgttgacaggataaggtatttgaaatattttagaatctgacagtgaatttaatatggtgtttgaggcatattaactcttaataattcaatgacagctctgaaattagcttagaaaaaaaaaaacttcctgggaacttgagactcttttaatagtatactactctgtaagaaacttgtgaacttaca

SEQ ID NO: 93541 - DNA, 1021 bp, Homo sapiens
ggatgacagttactgaaatttaaattgagaagatttggccaggcctggtggctcacacctgtaatcctagcactttggtaggctgaggcgggcggatcacttgaggtcaggagctcaagagcagtctgaccaacatggggaaacactctctctactaaaaatacaaaaattagccgggtatggtggtgggtgcctgtaatcccagctacttgggtggctgaggcacaagaattgcttgaaccccggaagtggaggttgcagtgagccaagatcacaccactgcactccagcctgggtaatagagtgagactctaaataaataaataaatagagaagattttacttttcatattgaagtactttatccaaagtaacttttgttattatatcttaatttattgtaattattgaatattagttacaaatagttcttaatcatattttgtgtgttagcagggtacagtgtaattattttcatgcttgtgttttgctacagtaaacaggatagtttagaaaggctataattaatagatgttcaaaagttgctttgatgtccttagataaaagctatgcttccaacaccaaatgctagtatttttaattatcattctcctttttaatttgaaataatggcttgagtactgtagtgctagctccaggattcttagcctgtattgtttaatgtgaatgtgcagaaaacattttagaattttttttttttttttgagagaggatcttgctctatcacccaggctgcagtgcagtggcgtgatatcgactcactgcaacttctgcctcctaggtccaagcagttctcatgcctcagcctcccatgtagctgggactataggcatgcgccgccacacccggctgatttttgtacttttagccaggctggtcttgaactcctggcctcaagtgatccgccctcctgggactcccaaagtgctgggattgtaggcatgaaccaccacaccaggccagaaatgattaacatttatctttcaaaaaatgcactttt

SEQ ID NO: 93542 - DNA, 1056 bp, Homo sapiens
tctatcttgcctcttggttaaggtctaagtcccctcataacttgccatcttcctatctctatgaccgctttcccctaccccaacccagttttggttttaccctccttaagtgacatctaatagttgttcattgtttctttaaatacatcatgctgtttcttatcactgtgctcttgcacaaactggtccctctgttgaaatattctttgttgggataattcctactcctcttttgaagactcaagtgttaacacctccaagaaacctaccctggtgctttgcctccccaatgtggtttttgatgttacctgtatatgaggtaagccaggtaccatgtcttactcatttttttgtaccctaagtactcagcataggttttgtacatagtagatgctcaataagtatttaactgaatgttaaagtgcttggcatatagtaggcgtataattagcaagtgggaagtattggtagcatatatggacagggatacaaatgtttacattctgaagagcggtggggctgatatgagactgctgccattcaagtctctgatcatggtatagatgaagcatcttggtggtaggaagggattaccaatcctgttctgccagttagggatccagggagtgtaagatttttaaagtatgacatactttaaacaagttcagctagatgaattaagtacattcacataatgagtattcaactcaagaaacacatcagtactggaattcccaccaaatgcccctctccccattccatgttccttgtattttaagaacagaaaaattttgtctgttttccaattctttatcagtggaattatatagtatgtattctttgagcttcttttttttttttttttttggtgacagagtctctctgtcacccaggctagagtgccgtggctcgatcatagctcactgcagcctcaacttcctgggctcaagcagtcttcctccttcagcctccttaagtgttgggattataggtgtgagccactgcacctggctcctttgagcttttgctcggtgttacatttgtaagattaataca

SEQ ID NO: 93543 - DNA, 1105 bp, Homo sapiens
gtcctaaaaaagtgtgagtaataggagatggagaggtgtttgtggattgtcattctgtggttcctacagcattcaagttgcgtccgtagaattaatgtgtttaattaccgacataaataagggtgaaaacacatttgctttagttatatagctatttcagaaaaaaagtgtgtgtacatatataaatattacatatatacacacacatatatcttctttttgtttatcccttgttatatgctagatccatttatagagagtaacaaattttttcttgccctcaaggaattttcagtttatttgaagtaagtaagaacttttagggcagcaaataaatatcaagtaagttgagatgtgcttttaggactactgaggagggtagaatcattttggggtaggatttgaattatgctttgaaggaagagtatttgaacaggtttggagcagggaggaaggaacattggattgggaaaccccacacagatacagaggcaggtaaatgtaaatagttcaatttaataagaatggaaggtacacaggggcatagttcatgagcctggagtagtaggctggtcctagagtacagatgcctatgaatgctaggcatcattgggactggacttactcagttgagagtgaggaccaatggaggtttcttagtaggggactaatatgatgcaaatagcattttaggaaatttaatctcataggatgattcattctcacttctttttttttttttttttttttttgagatggaatcttgctgtgttgcccagggtggagtgcaatggcacgatcttggctcactgcagcctccacctcctgggttcaagagatccctctgcctcagcctcctgagtagctgagactgcaggcccccgccaccatgcctggctaatttttgtatttttagtagagatggggtttcaccatattggccaggctggtcttgaactcctgacctcgtgatctgcctgcctcggcctcccaaagtgctgggattacaggcgtgagccaccacacccagcccattctcacttctttatgtgtgtgcagcaggtatcagcaaactaactgtggcccatactgcaaatgtagctgc

SEQ ID NO: 93544 - DNA, 1314 bp, Homo sapiens
gcacctttaaggggctccgctgtcttgcagggagtgaagggtagcacttttttacgttaccagactacagacgaggtctctgcatggggagatctgtcagaggagggcctttcagggatttgtcactttgtatgttggggctggggtggaagtactgctaagctaggggcttgggggtgggggggctcccagctcttctgtcagtgtttgcattgttactgtcattcacgaaaggggcagctggatatggcatcagcacttttcccgagcagtcgccccagtcactggtcgccctacaccaggcaggtgctggaactacctaacgaattaagtttaagctttgagcgagttgagttttctgtctccactgtctaaaagcattttagacttctttatgtgaaagtgtagggactttccctttaataaagtgcttgttagaatgcctgttttctgggattattttcaggagtcacatttctggtatgttaacaaagacagttctactgtgattcctcatagtcttcagtcatttggtattggcttgtcaataactagacctaacttctcgaggtgaatcggatcatgtttccttttgcaaagaattggcttggagagtgacatggcctgtgagaaagcaaagatttggaagaaaattcatttctctgaggttgctaaactagctcattaaatacatgtaccttactgaaatacatgactcactgaagattttctgtgttagggagacacaaaagaattgtgaggattggatttgcagctatagctaacaggtagctatagttttgcattaagcaaatatgacattttatggttaaagtggcttccattcatggtcctaaagtacttcataaacatttaatcttcctcagagcctgagaatgccagttaaattattcttgttcagcttatggggaaacatgtagagaagtggttttttttttcctctctagacggagtcttgctctgtcgcccaggctggagtgcaatggctcgatcttgactcattgcaacctccgcctcctgggttcaagcgattctcctgcttcagcctcctgagtagctgagattacaggcgcgcgccaccacgcccagctaattttttgtatttttagtagagacaggtttcaccatgttggccatgctggtctctaactcccgacttcgtgatcctcccgcctgggcctcccaaagtcctgggattaccggcgtgagccactgtgccaggccagaagttcaatgttttaaactttcgttgtagtttgcattggaatgtgggcaagtgattctggaggaatt

SEQ ID NO: 93545 - DNA, 1163 bp, Homo sapiens
tattacacagaatattacacatatcataggtatacagcttgatgaattttcacaaactaaacatacctgtgtagcttgcagtcagatcaagaaactgaatactgccagcatctcagaagccatccatgtgaccccttcaagtcattattctttctggggtaatgatcatcccattgtcaatacattttttaaacatgttttaaaattgagttcataaccagatttaagccatacaaaaatttcagtctcattaaactattttgttggctaattaatttgcttgcttatctcatttattttatttactacaaatgtcctttgactgtgaaatgaaaattaaacttaaaaagatgagttttcattatggaacaatatgtttaaattaacacacctaggaaatatatttctaaactttggatttcttttcccttacagaccaccaaatcccattgaatttctagcatcttatcttttaaaaaacaaggcacagtttgaagatcgaaactgacttaatgggaagaacagaaaaatttagttgctactgtagatttacatgattaagaggcagctttaattgccatgatcattccctctttttggatgtataagaaccttccggacaacagaacctatttctggaattgcagaagataacatatttcccttattttgatttaatcaccataaaccatacctatttaatgagtgtattctgtgcaatttttttctcagattgtctttaactttgtttttaaaatgaccttcaaaataaactgtcaaaacaccattattttaaagtagtttttgttctgtatgacaaatattttacatgattgaattgttttatgaatttctctttttcttctgtcttcaaatgctgcagagttttacaacagagagaaaatacagcagtcaagtataatttaaaaaattcagccaatttttctcagcattgtttctggacctttctgagggtgggatctgggcatcttcaatggcttaacaagtatcacaggtgattctaatgtacattaaagttggagtactaataaaagcattgcaaaggggatacaatatcttctaatgttatcaacatttatagtaatagctgtaatttattgcattcctactaagtttcaggcatagtacatttttacttaaat

SEQ ID NO: 93546 - DNA, 1076 bp, Homo sapiens
ctgcgccaggcctgatttttgtatttttggtaaagactggattttgcagttgtccaggctggatatatttctttaaaaaagaaacataaagggaaaaacattctcattgtgataaatagagggtaaccataaaaatgacaacagtgaatacaagacaatggtaataaattttagctgtattctcttgagtgtataagccttggaccctgaagcttgctctctctgatgtgaccagctttcttactatgatttggtgctgtttggtgttacattcattattttttttttttttttttgggaacacactctaagaagatacatgaaaaagagaaaaaggatttgtatttactcctgcaaagtcagaaggaaagggagaaagagtaggatcttgagacatgacattagaacaatgagataataggtgcttttggagagagagagcttgaatgagattgaaagatgggtctgaatttattttgggcagagaagtttgtggtctagtaccatctttctagtcattgatttgccttttctattagtgtcatatttccattagttttgtttagcactcaaaataacctggttatttgaaatgttcatgcactgtttttttgaattcactagagaatagtagaaaatgagaagattaatgcagaaaagtcatcaaagcagaaggtagatctccagtctttgccaactcgtgcctacctggatcagacagttgtgcctatcttattacagggacttgctgtgcttgcaaaggaaaggtaagataattgtgtccacaaatggagttagtaaagaaagcaaaatagattcccctatctgaaatatcatagttatgtatagcgactttttactgtgtgatttatggatgttaaagtttttaagaaagtattcagccataatctcataattcagacatttaaattttttcccaccagtcttagatcatatgcatatttgtaaagatttgtaatcatgatatacatgtaattttgatttttctttttatttattatgacataacatttttctgtatctctccacagtcttcatgattataatttattatt

SEQ ID NO: 93547 - DNA, 1301 bp, Homo sapiens
ttcgtgggtgggtaggatgaaggaagattgtagctcgtagcttccgaggccagaccttggccaggactcacgcggactgcagagagcctcggggactgacgatggttctgcgcgcctcccagcttcttgtccgccgggaggttctgcgcaggcgcggcagtcgtgcgacagccgtcacttacggccggagctgtttgtgctgggagctggtggcgcggtgcagggctcttaagaacgaacggcttgggcgcgggtaatcagctccctttcccccactttctcacttattctaggtacttgggactgtcgtagagtttccagaccccatgtaggcgcccagtcgtggactgtcccactctgctgctctactgctcgtggtgctcccgcgcccaggtgggggtgaggggcggggtcgggggctgggctgcactccatcctggagtcttcgtgttgaaatctcccaggtaactcgcggctcttcttgttttccaagactggtatccggggactgtgacttgcagggtccgccatggagccagagcagatgctggagggacaaacgcaggtatcaggaggccgtggattcagggtggcggtgtgcagggaggcagcgagaaaggggggacttatatctctgtgaccggtgttttgttttctaggttgcagaaaatcctcactctgagtacggtctcacagacaacgttgaggtaactcgccaagttcctatgcctcatctgtgttgtctcttgcaagctggagaaaacttgggatctgcttttactaggtggctatgcacaagggaaaactttgttatcgtgaactgaatagtatcaagttatgggtagcttgttttattagcagtactaatgcttcttggtgtacagacgtacaaattacgtttgagtcaaaggattgaacttttattgcgaaacacatattcttgagggatactgtctgaatcatttttcttggtggcttttaatcgatcttttgggatgttgctacgtaaaaaccgcatattaaaattaagaaacccttcgccgggcgcgatggcccacgcctatcatcccagcactttgggaggccaaggctggcggaccacctgaggtcaggagttccagaccagcctgaccaacatggtgaaaccccgtctctactaaaaatacaaaaattagccgggcatgatggtggatgactgtaatcctatctgttcgggtggctgaggccagagaatctcttgaatctggaagacaggttgcagtgagctgagatcgcgccactgcactacagcctgggcggca

SEQ ID NO: 93548 - DNA, 1012 bp, Homo sapiens
aaataaaaacttcctctagagaggaggtacccagcaatgaacacattatatcagatttgaatatgagattaaacaatgctttttgtttcattgttattgaaatcatatttgtatttttcaaaagtatatatacttaaaaattcctaaataaaatgtctttctgtaatacagcattttaggttataaggatcaataccatgggctgataagcaaaataggactcacggccccaaaatgttgataaacatcatgaccatattccccataatggagttacatatacacattacaatgataaaaatactaagaagttatatagtaatgtttctcagacttgttcacaaccctgttttttatgtattacctctcaacagcatgatttgcaatatttagtgtactcttcatacgatctatacaaataattttttattttaaagcaggacagaaggagcaagctgtggaatggtataagaaaggtattgaagaactggaaaaaggaatagctgttatagttacaggacaaggtaagattgtatttgtttatagccatcccaaattatgatatattcacatgattgtccagatttcagatctatttatttatttatttatttttctttctttcttttcttttcttttcttttttttttttttttttgagacagggtctttcctctgttacccaggctggagtgcagtgatgtgatcatagctcactgcaacctcaaacttctgggctcaagtgatcctcctgcctctgcttcccatgtagctgggaccacaggcgcacactaccatacttagctaattattattattattattattattattattactagtttttgagacagagtctcgctcttttgcccaggctgtagtgcaatggtgcaatctcggctcactgcaatctccgcctcccggattcaggctatttattctcctgcctgagactcctgagtagctgggattacaggtgcatgccaccgtgcccagctaatttttgtatttt

SEQ ID NO: 93549 - DNA, 1054 bp, Homo sapiens
ctacctgggcctcctaaagtgatgggattacaggcatgagccactgcacctggctgatacacttttaagtttttcagctacttttcaatgtagaagtagatggaaaaccatgtacgttatcttcagtagtgtgtttttggttggttaaatttgacagtatgattgtcattattttttgtaaattaaatttttacctggaagagcttaccttactatattgagtatctttctaacccctgatttttgcttctactatcataataactttatttaagtaatcagtatgttatagcttttttttttttttaagtattcttttgccagaagtttttatcaggctctggatacctctttcctctgcatagtcctcctggatggaagaaacaaagagggaaagagtaacttttccttagatgtttgtctttctcaaagcagttatctttgtatatctaagaagagaggagaataacactgtctctctttttttttaaatctctctctactcattctctctcaggaggagagtagaaagaagcacagctcttcctataacctgtccttattactgagaaaggaacacattgattgccatgtattggggattgtattataccttacatttttatttttattttttattaatttttttttttagacagtcttactctatcacccaagctggagtgcagtgatgtgatctcggctcactaccatctcttccttctgggttcaagcaattctgccacgtcagcttcctgagtagctgggattacaggcatgcgccaccacgcctgactaatttttgtatttttattagagatgggatttcaccatgttggccaggctggtctcaaactcttggcctcaagtgatgcgcctgcctcggcctccgaaagtgctgggattacaggcatgagccaccacacctggcctcatagcttacatttttagagaatcttttctagtacttaaatcggtaaatatggttatcttttaaatgtaatatattgaactaatttaatatttgctcttgtgatttttaaaggctaaagca

SEQ ID NO: 93550 - DNA, 1209 bp, Homo sapiens
tttggttgttttaaggaagggaaattaaattcctgtgtgctagattttcaacataaaatttaaaaaactggaataatgttgcattttatgtgtataacagtataatgctttgttttaggtgggagaaggagagaaattggtgagggctctttttgctgtggctcgagaacttcaaccttctataatttttataggtaagaacatattttccaactaagttattgactatttgtgaaatttccctctccaaataggaaagatacgattggaaacattattcagaaggaagaagttttaaagaagggcaagcttaaagactatctaatgaatttagtaggacccactatattaataagtagtaaactagattaatctcagatgactcacatagcttggtctttaattaaagtcttatacttgtatttcctctagatgaagttgatagccttttgtgtgaaagaagagaaggggagcacgatgctagtagacgcctaaaaactgaatttctaatagaatttgatggtgtaagtgttgattatgatatttttaatgtggcagcattttagtatattttcctattaaatggccaaggttaaaaatacaaatatctttatatttgttattacttttctaaatgaattgaaaaaagattttttgcttgtaggtacagtctgctggagatgacagagtacttgtaatgggtgcaactaataggccacaagagcttgatgaggctgttctcaggtagggagatttatatggaaatacatgcatttattacagacaatatttactcatgtgtccatcttacatattatttccttactctcagttttaagactaaattcactattttcttccagtactatctctagcctcttgttaccaactacataaggattttgaggtcaacagcttgatatcaggagaattagtctagtaaaggtttagttacggttttaggcaaattggtcagttcttctgggttgcattaaattatctttaaacttgaaaattgattcttaccgtcttttattgggcttcatgagaaaataatcaaatcagggttcatggaaaatgtgttttctgttcttgtgtgtttgagcagtttattcccttcatactggaaggacggtttgggtcagcataaaattcttgggcatcctttcccaaggaatttacaatattgctccattgtttctagattgg

SEQ ID NO: 93551 - DNA, 2204 bp, Homo sapiens
tcatggcgaaaccctgtctctactaaaaatacaaaaattagctgggcatggaggcatgtgcctgtaatcccagctactcgggaggctgagacagaagaattgcttgaaccttggagggggaggttgcatatctgagtggtgaaattgtgattctttttttctctttgtctgtatttttgaacttttctataaatgattgtgttttgtttttatattggaaaaatattatgctttcaaatgttaatacctatgaaactaaacacaagtaataaatatattagtatagcatttattaaggtttcttgtgtagcagatcaacatagaaaatatatttaaatggctgacataattttctaagaatacatacacgtatattttttataacattaagaaacagcagcatcattactttaatccatcatttcgttaaccaccatatacctgttgatcatttgtattgtcatgtgctttttaaaaatctagatgagaaatattcgattatctgacttcactgaatccttgaaaaaaataaaacgcagcgtcagccctcaaactttagaagcgtacatacgttggaacaaggactttggagataccactgtttaaggaaatacctttgtaaacctgcagaacattttacttaaaagaggaaacacaagatcttcaatgaacgtcatcggctacagaaacagcctaagtttacaggactttttagagtcttacatatttgtgcaccaaacttgaagatgaaccagaaaacagacttaaacaaaatatacaatgcaaatgtaattttttgttgtttaaggccttgccttgatggtcacagttatcccaatggacactaagttagagcacaacaaaacctgattctggtcttctttaccaatataatcataatgtaaataataatttgtatattgtgttgcagatgaaagtattccaggaacagtgaatggtagaagacacaagaacatttgtttgtttgtcttctgatgttttttcttaaaatagtaatttctcctacttttcttttctactgttgtcttaactacaggtgattggaatgccaaacactcttaagtttattttcttttttcgttttataaattcagtgtgccaaatgaaacttttttcctaagtaactgtaataggaaaaagtttattttgagagtttcttcttcataaatctacagacattaaacaattgttgtgttctttttaccttttatttttctattaccttgctaccaaacagtttagatagcaatataatagcaaaaaagcaaatatggtaaaatagagaaggtttgaaggtttgagttactctgtcatataacatgtagatcagtcttcatgtgacctgcagtatttttttttctaatgtatttgtcagaaatctgttgtagactgttaacttcttcctgatggaatttattttctgcaagaattattctgatatttaagagagccaattttaactgctgtgaaaatgtttccagtgcaagagaagggaaatactaggaactaagacatttctaatttattgcttattactttcttaattttacaggataattataagcaagtggaactaccatcttttattcttaataattattaatcccttcaatgaaactttaaaaaaactgaatttttatacatggcatacatttttctagttccttctgcttgctttattaactcaaaagttctagttctagtctgttgatctgccttttgttctcccaaaatgtacagtaattccatttgtttgtataaatatgcctggattttcattataaaaatgtcattgtagggagtagagactcatatcatggccttttaaatattgtaataaaggcaaatagatatttgcccttagtttactggttaaaagtttgtttacagaacttttctctggtgcttaaatgatgctatgtaaaatgtcatgagtggaaagaatatttgtagtagtaacaagaatttttcatttaggaaagatttcttaggttttgaaagaatacattaaaataaaaaacttgcccctactaggtaagaactttataatgaagacatacattcttcttaattttactcttgctcttgttaaagatttgtttgaatatagaagatgcatgatttctgggtttttttttttttttgagacagagtttcgctcttgttgcccaggctggagtgca

SEQ ID NO: 93552 - DNA, 1315 bp, Homo sapiens
atcatattaaaggactatgtggttccagctcaacttttaatatattgtctcctttaaaactatcatggttataattctattgggaaagacttttagataacaaagatttcaaatgttaaaagagataaaagtcaggttaatactatcttaaacactgagtcagaaaatcattactgtatagaagttgctttcctgatcaagtctgaacttcagctagtgctagagaactattttctatgacttaactctaaccaagttttattttaagctgtttctttgatagaagggccatgaaaatagagtaatgatatagtaggagataagggattggtttggtctttttcaataaagatagaagttgctgaagttttctgaattaataatgacttagattgtgaccttttagattcggtgttgagctctgtgttgtattacttcctaaaagataatgcttaaacattaagcattagtgtgctcttcatgttaatatggcagagttttgtaaactaaattaaaacttactgatatattggactttgagccaagggaaagaatgagtactatctttccagatatcttaagggtaaaagcttattctaagacagtctgtccattgagaatattagatttctgacttgcaaatatgtttgtactccagaagaattagaggaaaagcagatactagaattctaatttaattacatatacagccgtctttgtttatagtgtagaattctttatattttgtacaaaaactaattcttttggtaaaatgaaccatttacagttcggttttggactctgagtcaaaggattttcctttaaatgcttgtctcaattttagtctggtcttttgtacttttcttcagaagaaatgaattaaagggtacagttgcataaagtgggtttttatcctaatgtattggaaataaatgataaactttattttgtctttacttttttactttaaaactttttgatattttaggggttggagtctgataatgaaggagttgtgtgtattggactcttagtaacaattataaacgcttaacaaaatatagaaagcaatgattgggtggctctgcagagcaatcaaaacaaggtagaaactgcaaagtcctataatggaagagattcaggctgggtgtggtggctcatgcctgtttgggaggccagtatgggagaatcgcttacactcaggaattcaagaccagcctggggaatatagggagaccctgtttctgccaaaaaaaaaaaaaaaaaaaaaactaaactaaaaattagccaggtttggtggcctacacctgtagtc

SEQ ID NO: 93553 - DNA, 1049 bp, Homo sapiens
cccccatctcttgaaaaaaagaaaaaagtggataaagtaattctaataaggggttgggaggtttagatgaggtaatatgttaagcactctggtgtctaacgcacagtgggtcaattaagtgttattattatgattgtgattatttctagaaaataaggactataattgggtcctggtaattgtcttttttttttttttaatcattttaaagtttttctggaaagagaaagcctctgacatgggctgaaggtgctctctcttctgagtcctaggaattgtacaaataggtactccttggaatctgtgattttcattgtttattattattctagaaaccctaatctgctctaacagtgttgggctcatagtagacagcacatatgtatattaagtgagcaaataaatgaatgtaaatgtgttctagagagactggtttgtgaattgaaagaattgtgatgatctaattaatgttttggtttcaggtttgaaagattagaagtcctggctgtatttgcctccacagtcttggcacagttgggagctctctttatattaaaagaaaggtacatttgtataggatattattctaaatccccccatgacacctttgggaacatgaaagaaacccgtcagacacatttgctttcaagggtatgaaaacttagatgagcagggctggagttttgatagtacactttctttatgtttcagactttttcttctgtttcattttttttacttccttccttaatgctactaaattgaatcagaagtggttgtgaatgaaacagagattcagtcaggcatgtttgatgcttattacaaacccattgaaataggcttggcagagaaagatagacattacatattaaggataatttgtgaaaaaagaaaacaactaaaaaggataatttatgagtctccttgcctcatcactgctaatagttaatagttataatattaaaagattttgtgaactttaaggtgggtgaatgatatatttaataaagctttttaactttataatttataggacttatttaatatat

SEQ ID NO: 93554 - DNA, 1003 bp, Homo sapiens
agttggccaatgtcagatttcagactgtggcaacataacgtttttgctggtatttcacaaacaaaattccctaatactaagactccgtttctttactcttaacagttcccaagttctaaatatttttatactacacaggaaggcctttctatcttggcttcaggcttctcattatttccaggcctaggaaacactaacccagcttcccctagtcttctgtaatttcaaatttgaccttcaaaatctttgcatagcacctgtagaaaagagaattggacgaggctcagggattcagtgtaatcccagcactttgggaggctaaggcaggaggatcgcttgagttcaggagttcaagaccaacctggacaacagagtgagaccctgtctccaaaaaaaagaaacgtatatatgtttcatatatattgcaactatgtgattttcatatatatatgaaaagagaattgtatgtatcatatatatgaaaaaacaattgtatttctcaaccacagagctgccaactatatggaccttatctattctgatcagtttaattccacaaagtctgacttgtccagtatatcgtaaaacaaataccattgatatttatacagatttataacagcgtttacctgtagcaagatactgttaatgctaaaagtccttacttatcctttgtaagatggagcaacagtagatgggacatgggtgatggggctagtaactaagttcagattctgtatctggaaacaccaaatcattaaagcagaccactttaccttcccacctcttagtccctctacgtattgaaattacatactgataataccaagaacaaattaaaggtgaatgttatcgttgttctttttaggggaagattattagttggtacttttgtggctctttgtttcaacctgttcacgatgctttctattcggaataaaccttttgcttatgtctcagaaggtatgttttttatttactattaatttaaaaatccaactaa

SEQ ID NO: 93555 - DNA, 1097 bp, Homo sapiens
ggacttctttatatattggtattattgcttattcttaccaagtatgccatacattttcattgcttttccctcagtgtggaatgcgtctctactttttgaaattctgtttaatcaccaaccgtagattaaatgccatcttcttttgaagtcctcttcaattggaattaatacctaccttttcggctcttacattgtattttttgtatgtttcatttatattcttccttgtattataatattcctatcttgttcctacatggatatttctttttttgtattttaaagattcacaaattatttaactcattacaatgataatcaccagcaagtagtctttaagaaatattaacattaagctttttctttcaaagaaaatgccaggaacttaccaaatcataaataaaatgttttatctaatgaattttttgttagtataattctaagcaatctctttgttatgattttgccccttttaggctggatcagtgcatgtaagaattcgacgagatgccaatgaacaaatggttcttgctcatgtgaccaacaggctgtacactctagtgtctactctaactgttcaaattttcaaggatgactggattaggcctgccttattgtctgggcctgttgcagccaatgtcctaaacttttcagatcatcacgtaatcccaatgcctcttttaaagggtactgatgatttgaacccagttacatcaactccagctaaacctagtagtccacctccagaattttcatttaacactcctgggaaaaatgtgaacccagttattcttctaaacacacaaacaaggccttatggttttggtctcaatcatggacacacaccttacagcagcatgcttaatcaaggacttggagttccaggaattggagcaactcaaggattgaggactggttttacaaatataccaagtagatatggaactaataatagaattggacaaccaagaccatgatagactctaacttatttttataaggaatattgactccttggcttccaatttatttagtaatccaactttgcattgactgtttaatcatttactctaaatgttagataatagtagtcttgt

SEQ ID NO: 93556 - DNA, 1029 bp, Homo sapiens
attcagaggcaacacctgtgcatctgtcccaccaaaggtgctttaatacctaccttcactatttgagaaaggacactcacagttgcctgtgggttatgaaagaattggccctacgtcctgcatgtaagatgttacaggggacattgggccaggcattattatatagagaagtcttatttgccaagctctgactaacttctggatatgaaaataaggaacttgcccagcataggcctataggcagcagccttactagtaaatcttgccacagaatcacttgaagctagacagagaaagaagttcaatttaaatatttgtcccattgtttgtgattaggatgtaagctttgtggaatgtaattaaccctgctttacgaagtcaccatattataataggaaaaacactgcctaggaggcaagagatctgaattccagttctgatgctgccactgtgtaaggaagtagttttataacccatgggcaaatcatctgagctttctcatctgtaaagttagggagaggaattaattagttgatctgtaaaataatcagcttcaaaacgttatggctaaatctgtagaatgtatgcccaattgctaaacggatgttgtgcccagaattttatctagtgactacctcaacatacaggccaagcgttacctacaccaacacccaagccattaatttgaggtgccatgagaataggtgaaccacagcctaacaccatttaggtttttgtgtttttttcaggcttgcctctacttaaatatatttagatgagagagttctcttagacttctttctttgtaaggaagggttatttggggaagtgttggaaaaaagattagggcagggtacccttagtttatatagggtacaaaagaatgggaaacatcttccctttcttctttaatctctgaagtcatgtttggaattacatataatgtagcaggtactggagaggacctgaatttcaagcttctgatttagctgtttgtaaacttccaagttttgcttgactaaagaatgc

SEQ ID NO: 93557 - DNA, 2033 bp, Homo sapiens
tattgtataaaatttttacttaatcgattttcttatttagaaggaaaaggaaaatttcctactttgcaggaattagttttctctcagtaatttggtataataatagttttttcaaaagttgcctaatcataatcaccagggaacttatttaaaatactgataactagatccttcccttagaaattatagctcaaagaaaaagaaacaataagttataatttaacagaactagagagtcccccaagtctttttaataggcaccccaagtgattcttatgattagactggtttgataagaccacatttacagaagtcaaggagtagagcaaagatggacattcttaataagtttttaacatttgtaacaagttttactatttaccaaaattggttgttgattttttaaaaatattgtaaacaccatttttactctatgatatccaaaaagttaattgacttgctaatatgctgccttttgtcttttttcctttttttaaagctgtttggtgtgttttgggctgcctacagtgctgcttcattgttagtgggtgaagaattcaagaccaaaaagcctcttctgatttatccaatctttttattatacatttattttttgtcgttatatactggtgtgtgatccaagttatacatgaatagaaaaagatggtgttaaatttgtgtgtaggctgggaattcttgctgaaggaattggagaaaacctgttgctgcaaaattttacatgttccagatggaaagggaagtctaagcgctttttaaaacaatttttttttgtatttaattaagcaattgcagttatctgggatttttgggtcagaattttaaattctgtttgattctccatattccagtgaataaaatacaaaagcattgtgtttttaagattgtgtcgatattcacctaaaaacttgtgccaaaagcacctggattggtaattatatttcacttaaagggtaaatttgacaatatcttgataatcaaaagtgcaatttttttcttcaaaatgttttctccagcatcacagatcctgcagatatatatttatatttatacatatatatttatgaaataattcttactcacaaaatatatttctgataaacattaagatattaaatctgatgcacaaactttttaatttggccattaatcttttttatttaaaaatttaaatttgtttttaaaattgtatatagtttttaaaatctcacacatgcttcgatacttccttgttaagaattcttaataactactaaaactgatttttaatagttgctgatatatatttggtttgtttgggtatacttttcaaaaccatttttgaatgtccaaacatctgatttaaagtttctgtttatctttctgaccaaaggagcaagaggtataatggatatggcattcattaaaatctttactatgtacaaaaacagtaatatttacagcatcagtaaatatttttaagtggtacttctaaatcataaaagttggggaaagagacctttaaaatcttgtggtgttgaacaatgttatatgaagtagaaaaaataaaatacttcccagttgtgtgttttgttttacagcaccatgtcctgtattacttgatattttaacaagtatcaggtactctctaacaaatgtacagtttttgctaagggaaatattaagaaatttttatcagtgaaatatttgttgcaaataatttcataggtttttagatacacctgtagttaatattactttgtaaagtaggtaaatcattttatttatgtccataaaatatcaaatgtctgttaactattagcaaattattgtattatcctttctggtctcacctggaagagtttcctgctgtcctcagtatgataacatggcgacctcttggtatgtatttctttagcaaacttacccatcaggaaatatccagcacctctgaagcaaacctacaaatgagtgtgttatcaagcccagccgtcttcctttcccctaatcccaaaaggaaagaaagaaaaacttat

SEQ ID NO: 93558 - DNA, 1288 bp, Homo sapiens
ccgcttccggccacggccgaacagctgcaccgtgcgtaccgggaacggtcaaggcgcagctggaaccgctgcaaaaggcctccgggcgtaccggacaggtcgcaagggcgggggtccccacctagcggaaatgcacggaggccaacccctccccctgcccccgcgaggagcggggcggactcggcagccgccactccccaggctcacaggaagaaactgggacgctgcggacgcggaactggccagacccgcggcgcgtggcacgcgcgagccctcccgcgcatgctccacccgccggcctccagcccgcgccccgggccccgcctccctccctgcttctccccctctcccgtcagcctccctccgagtttggcccctccggccgggcgatcgacgttccgcgtgcgtgcgggcgcctgacttcacttccggctaacgcgctcggcttgccccctggccccggatggtgactggtggtggtgctgcacctcccgggactgtcactgagccgcttcccagtgtgattgtgctgagcgcaggccggaagatggcggctgcggctgcggcggcctcgggccccggctgctcctcggcggcgggggcgggggcggccggggtctcagagtggctggtgctgcgggacggctgcatgcactgcgacgccgacgggctgcacagcctgtcctaccaccctgcgctcaacgccatcctggccgtcactagccgcgggaccatcaaagtcatcgacggcacctcgggggccacactgcaggcctccgcgctcagtggtgagtcttccgcacgccgggcgggcgcgaagccggggaaagaagccgtccagccccggggctcggcctcgcgactcggggaagcgagatggcgagagggcagggctgggggttcgggcccagccgtgaagggaggcccggaagctgatggagggggaccttaggacttggctttttcagcggctgcagttgggaggaaagaccggcgagtcagggagtggtgggaggggagttgcctttcgggcctggagcgtccggtctggcttggtcctccgcgagaggtgaggagaccttggagcttggcaccggaggaagcgaggcccgggtaggccctggagaggctgtcggtcctgcgtccggttagatgagagcgaaaggctggaagggttgaccccgggcggagaggctggtggccggaggcgaggggcggggagcgtctgagccggcaaccaagccctcccttgtgggagaggagccggcagtctgctgttctcaggtcc

SEQ ID NO: 93559 - DNA, 1041 bp, Homo sapiens
ggaaggaaagacaatattcactttagtggtagattactaaagaggagggttttagatgtataacatgaaggtgtaggtagataagtaaaatgtagcattgatttgggataacaggttttgttggggcatctgttgattagaagagttcgggattggatacaattgcaggtccccatgcatgaagattgagtatgtgaattaaaatatgtagaagggtttatagtgaacggaatgaaggattacagaaaaaatttggaagttaacaatggatgcattctgaaacattttcatatatgagaagtgaaatttattattatttgtaaaatttattcgtatttgtagagatggggttttgctgtgttgcccaggctggtcttgaacttccggcctcaaatgatcctcccacctcagcctcccaaagtgctggtattacaggcatgagctgtcccacctggccagaagtttgttattaataataattatcagaggttgtatagggtcctatttgccccagttcagatgattgaggagggaatgctgcattttatgttttacttagaatctgcaggtatttagtaagtttgcttttaatgattaatagagggtgacagccctataaatagagtagagagaagatgccagtagcgatcatggtcctaacataatccctctttcccgtttatgggcaatgggccactttcttttctaccacagaggaaagacatctgtgtctgaggggataaagactaggtgatacagtaataggtcttatggacgcctggggttcagtttatagggttatgggttgcctgtagatttgcagttgaaggatgggaacaggacttgtatgtatatgtattgagtggcaaagacagtgaatttttaactatgactactagtatatgtctttatattatctgtatctgatataaaatgtttataaatacagtttaactggattaagagctatcagtatatacacaggctgggtaagtatttgctccctgtcagtatttaagagtgaagatttttgaagctctg

SEQ ID NO: 93560 - DNA, 1083 bp, Homo sapiens
tcattttgcacttacagaaaaattgcaagaatagaatgttacaaagaacttccctatataccctttacccagctctactagttttaaacattttactacatttgcttattattcccttaatatatatgtgtgtgtgtgtgtgtgtgtgtgtgtgtgtgtgtgtatacacatcatattttattctacttgagagttggttgcatatatcatgctcattttccctatactgttgctgtgtttatttctcagaacaatgatgttcttttataatagcaatttggttgtcaaattttagtaatttcacattgatacttttatctaatttatggtacatatttgaatttaatccagttggcccaataatgttctttagagaagttttttccagtttaagatccaattcaggataatatattgtgtttagtcactatgtaaacatttatttttaatagaccattggcctgaaaatcttaagtgttgaatttttgttcttttaacagctaaaccaggtggacaggtgaaatgtcagtatatctctgctgtggataaagttatatttgtggatgattatgcagtagggtgtaggaaggaccttaatggaatcttgttgttagacactgctctgcaaactccagtttcaaagcaggatgatgtggttcagcttgaattacccgttacagaggtaagttgaaataagtatcaatgtggtcctctacttaatgtaatcttagacatattagatgttaaatgaaattaagtcatcctttaaggacgttattatatatattgctataaaaacaatttacttattgaccacaacttcatttaaatattaatactcaccttttctctgcataattaattcttgttgaagtggtgtttttaggtgtgaatggtgcatcagcacaggttaaacagctgtaaccgagacccaaaaaaacaatggcttaaacaggatagcttgtttccaataatagtccagggctaagtgtatggccatcattgccaacctcaacacttgggttagcttgggagtttaagacagctgctctaggtgtcattatttcccagtcacagggaaag

SEQ ID NO: 93561 - DNA, 1018 bp, Homo sapiens
gactttatatagcttgagtatttaaagctcattggaggactttaagtttgtctcttcagattttttcctgtattatttttgcttatggtttcagcttgtccatttttctatcttgatttggtttacaataactactttgtgtttaaactttaccatgtagtatttctacactgaatacattgctttatctcatttaattttataatagccctttaaattattgtttaattaagtagatttgttaaaaggtaagtttagtatagtacctgtcataatcattgcatattaaaatatctgaaagaggatctgaatttaattttttgttgttcttgtgttgaattttctgtgatttttttattttttattttttatttaggcacagcagctcttatcagcatgtttagaaaaggtagatatttctagtacagagggttatgatttgttcatcacacagctcaaagatggtttaaaaaatacatctcatgagactgcagcaaaccacaaagttgctaaggtaagaagttaatagattgcctcttttggggttatattacaatggacacctccattcttttgcactttcctttcctctccttttggaaatgttctaattctagatttttcttttaaaaagcagaatgtgcttataagtcatcttaaagttgaaactggctgggcacggtggctcacacctgtaatcccagctgagggaggctgaggcgggcagatcacctgaggtcaggagtttgagaccagcctggccaacatggcgaaaccccatctctattaaaaatactaaaattagccaggcgtggtggcaggcgcctgtaatcccagctacttggaggctgagacatgagaatcacttgaacccaggaggcggagttagctgagattgcagagattgcgccactgcactacagcctgggggaaagagtgagactctgttgcccaaaaaaaaagaaaaaagttgaaactttgaaacttcttaatcgaagcttaacttcagtttgtggga

SEQ ID NO: 93562 - DNA, 1023 bp, Homo sapiens
acaggtgtgaaccactgcacctggctcttttttttttttttttttggttcgagacagagtctcactctgtaacctaggctggagtgcagtggtgtgatcttatctcactgcaacctccgcctcgtggattcaagctattctcctgcctcagcctcccgagtagctgggattataggcacacgccaccatgcctggctaatttttgtatttttagtagaaattgggtttcactatgttggccaggcttgtcttgagctcttaacctcgtgattcacccatctcggcctcccaaagtgttgggattacaggtgtgagccaccgtgcctggccaccttgctttttttcactcaagaatttgtcttggatatcttctcatatcctcagagatcatctatgttcttcttagtagttgcattgaatttttttttgtagatttgtcatgattgtattataccttactctattgatggggcattttatttaggaaaacagaaactgtcctatgagtttcaacagagataatttattgtaagaaattaactggtgtttgaaaactgaaaaagtgaaaaggagatcctgagataacagagataactataggaagcagttttcacctaggtctggaggaacaaagagtagagattaggggttatcagaacctagaaacttagagaataggccccgtggatctgggactaggaagtgctacccagttggtaactcaggagcttggacgagggcgttgcaaaactgggactcagatctctgaagagagatgctacttgactgatggtagtacctctgagggaactctatgaaactggatctcggaatgctaaaacaaccaaaccaaaacaaaatgctgaagactggaagaatcaactactgcatcatgtcctttgctgaaacagtgctgatggcaatggccagtaaataagaaggagcaagtctttcttcatctttctttccagtttccttcctgtgctgttgctgggagaacctaaaagccaggaaactggttga

SEQ ID NO: 93563 - DNA, 1029 bp, Homo sapiens
gctgaggcaggagaatcacttgaacccaggaggcagaggttgcagtgagccgagattgcaccactgcattccagcctggcgacagagtaagactccgtctcaaaaaaaaaaaaaaaaagaaatatacaatacatgattagtaactgcagtcaccagatcactaaaattaattcctcctaagcttcccaaagtgttgggattacaggcgtaagccactgcacctggcctttactgcacattttctttacccagtcacccattgatggatacttagattggttccatatcttggcttttgtaaaatattttatttttttttataactgcaagtttctgttttaaatgataaactaatgaagaaaactgacttgaaactgatgagtgttctttatttgataatggttaagttatgattttggttaaaactgttgagtacattttcctttgcttatactcccattttctttcagtgggccacagttacatttcatcttcctcatcatgtgttgaagtccattgccagtgccattgtaaatgaactcaagaaaataaatcaaaatgttgctgccttacctgtggcgtcctcagtgatggacagattgtcttacctcttacctagtgcacgtccagaactcggagtggggccaggccgttctgtagacaggtatgaaccttgctaacaaaggtgacagtgagatagaattgattagtttttgcattaaacaaggaataactagaaaatctggttatgatttttaaaaatttcacaatttctagcctaattttgaaattaaaaaaaaatcaatatgaattagaatctgaaaaccagatttaaagtaaactgctacttgaattgctatttttaaacactatattttagtacactaaaggtatttgaagggattataaagccacattttggaaattccagtttagtacttgcttagtaaatattttagtcaaattaaaattactataattatttaatgattaataactatttttccattgatgacattttgtgacctt

SEQ ID NO: 93564 - DNA, 1090 bp, Homo sapiens
aatagccaaatagaatgtgctatgttcatataatagactgtggtccaacagttaaggggaatgaacagtaagatctctgttaatcaccctcagtaactttcagatatgttactgtatcaagaaatctttcgtgttaatagaatggtagatgattggatacatgataaaatgtatatgtgtcatgtacagtgacaccaattgtttaacaatttaagaccctgtattttatttttaaaattttttttcatacatacttccacatcatgtattttctatatgtacatttatgtatgtaaacttaaaaaatattttagaaatgtatcacttaaatttataatggtggtttcctggaggtgggattggaaattattgggattagattttaaaattgatgtgggtctttagctttattttatatagccgcgtgtaacttatataaataaaattttattgaaaaagttaaaactcaggaaagagagagagacggaaaggggtaaggtacgctagatttagctgggagggaacctggcccaaatgtcatttgcttggaagtgcactgtaaaaggatttaggaaagacatctacatattaaaaattgcccaggatttatagatggatttatatatgtaagttgtaggtgcattgtaaaaagaaatacatacattttaaggagtagcatgttttatgtgtaaagttctttctttgccatggaaataaaacaatgagtttaaaaacaatggttctttaagaaacatttatttttaaaattttatttatttatttatttatttttttggagacacagtcttactttgttgcccaggctggagtgcagtggcgcgatcttggttcactgcaacccttgcctcccaggttcaagagagtctcgtgcctcagtttcccaagtagctgggactacaggtgtgcgccacaatgcctagctaatatatgtatttttagtagagatggggtttccccatgttggccaggctggtctggaactcctgacctcaagtgatgcacccatctcagcctcccaaagtggtgggattacaggcgtgagccaccacgcccagcctattttattttt

SEQ ID NO: 93565 - DNA, 1028 bp, Homo sapiens
ctgttttaatgtacaaactgaattgctttatttttagtaaacttttcctttctaaatctatgcaaaggtctgaacacgaaagacattccccaaactgcccatttgtgaaaggtgagcacacacagaatgtgccattgtcagtcactcttgcaacaagtcctgcacagtttccttgtacggatggaactgacagaatatcttgctttgggtcggggagctgccctcattttctagctgctgcaactaaacgaggaaagatctgcatatgggatgtttccaaacttatgaaggtatgtttgaattttgaagtaacaaattagtaattgaaaaaagatcagttgtaaacttaggcttttcatttgtttaggtgcacttaaagtttgaaattaatgcctatgatccagcaattgtacaacagcttattctatcaggagacccaagctcaggagttgattcaaggagaccaactttggcgtggctggaggactcctctagttgctcagatataccaaaattggaaggagataggtatgtgagtttgttttagtagtatttaatagatgttacatgttttcctaaattttatattctcatagttctaataattaaagaggaggaaaaaaaagttacgcagttaagagatcagagagtaaatgtttggttagaaatctgaaatctgtgattcttgaagaaaaatcttcattcagaaacaccgtagtttataaaatatgcttaactttctatcacaatctatgtcaattggaaataattgccacattgaacaatagatgatgaaaagtcaacattggaaagtctaaataatgaaatgaaattctattgtagtttcaccttctgctaaatcttttcatagagcattcgaactagatgatttcagtttccgttttttcattagcacctcaaattatggcagtgctaatgaataataataatgggatgacctgaggtgaggcaagaggatctaattgtttaaaacagtgtaccagtagtcagcagtgagttgagatacc

SEQ ID NO: 93566 - DNA, 1054 bp, Homo sapiens
tttctgaccatattttgccaataggactagatattaagcatgcttaatttctgtgatttcttagaagttagtggaaaagtaatagaagataatgaaatttatatgtccttctaggcacttactttaatttgaactttgtcttgaagttttgtaatttggggattaaaaatggaatcaaaatatacttctaggattacatacacccatacacatatagtcacaccctcctaggtaaaatctgcattttagataaacatgtattctgtattattagtggaaatacttctcaacattatatggggtaatgtgcttgagttgaggtaatctctacttgcttttaagaaattcacaatctagggtcgaaggtcaattttctctgaagaaagtctcaaacaaatcatacaaaaacattaagttgatgtggtaggaggaagctgaagaggtgaaacttcatccctaaccttaagccccctctcttcacttcccctccccaagaagtaggagcagtcctgttggaattgatagtgaatataatgagccacactacctctcactttatgtgacacaagatccaatatgtttggttataaaatatactatgtgggtttcattagcttgaagaataatacattaattggaaaaatctaagcttatccaagaagtttaaagtaattagcaatatagtttgcttagaatagtttttgtaaaatttgtttttatttcttatttacattgaaggactaaggaattgtttttgacaattttttcttagaagactatatttgtcttctgaattaaggaagaagatatgctaatacatttaattttaatgaattaagatttcttctagatgattcacttgtcatttgtatatcaggtcaagttggtaaaaattccttgaatgtaaatgaaattgtttatgggattgctgtaaaccaaggtactgttacaatattagtatgtctgtttttcagaaacacatataatcttaactaaacatttttactttaaccataatatttattttgcatgtttattgctttgtaaaaggttt

SEQ ID NO: 93567 - DNA, 1040 bp, Homo sapiens
tttttgtcagtgttgttaatcagttatgatatcaaactactctttatatatcatttaagcctattttaattatatggttgagatgtgtagtagtgattttaacactgtactttcaggccaggcatagtggctcatgcgtataatcccaggactttgagaggtagaggtgggaagattgcttaagcccaagggttcaagaccagcctgggcaacatggtgagaccccgtctctgcaaaaattaaaagaaaaaagtagctgggcatggtggcgtgtgcctgtggtcccacctacacgggaggctgaggcaggaggattggttgaggccaggaggaggtcagggctgcagtgagctgtgttcctgccactgtactccagcctggatgacagactgagaccctgtctcaaaaaaacccacaaaaccaactgttcttttttctttgctttctcatatgatgtatactttttttgaaattcaaattgtttactttgttttttgatttaagtgatgatttactggaggattcagacagtgaagagcattccagatcagattctgtgacaggtatgtaaaaagtattagataatgtatttaaaaaattctttacacagttgtgcatacagctaactaccacttaattctgaatttcttagttaatgctaactctaaatttttgctagtatacacagaagactgaaatattgtgtgtcagagatctcaaattagtagtatgtacatagtgttccatatttaaaatttaaatggtacctatttgagccaaaggaattacagtggatagttacgttaaagttttgtcacatatgtcaggtaattaaatgtttttatttgtataatgtattctgttaactaaaagtagtgtttaaagctctttattcatgtaggtgaataaagaactacattttaatgtgtgaaattatagacattaaaacatcaagtaaatgctgccttactagcttttaagatactagggcaaaataatatacttcgtattttaatgttattttgtaggaaaagctaata

SEQ ID NO: 93568 - DNA, 2108 bp, Homo sapiens
ggtggctcacgcctgtaatcccagcactttgggaggctgaggtgggtggatcacctgaggtcaggagtttgagaccatcctggacaacatggtgaaacccaggctctactaaaaatagaaaaattagctgggtgtggtggcgtgagcttgtaatcccagctacttgggaggctgaggcactagaatcacttgaacctgggattcagaggttgtggtgagccgaaattgcaccactgcactctagcctgtgtgacagagcaagaatttgtctcaaaaataaataaataaataaataaataattttacttgtgtattcataatgtgctgactggatgagtagaaacatatctaatgaatattgttcctttttaaagggcatacatcacagaaggaagccatggaagtaagccttgatataacagcactcagcattctccaacagccagaaaaacttcagtgggagattgttgcaaatgtgcttgaagatactgttaaggatcttgaagaacttggggcaaatccttgtttaacaaactctaagagtgaaaagacaaaggaaaagcaccaggagcaacacaacattccttttccatgtttattagctggaggtttattaacatataaatctcctgctacctcacccattagtagtaattctcacaggtcactggatggtttaagcagaactcagggtgaaagtatatcagaacaagggtcaactgacaatgaatcctgcactaattcagaactaaattctcctctggtaaggaggactttaccggttttgcttctttatagcatcaaggaatctgatgagaaagcaggaaagatcttttcacagatgaacaatattatgagtaaaagtttgcatgatgatggttttactgttccacagattattgaaatggagctggatagtcaggagcagttgttattgcaggatcctcctgtgacttacattcagcaatttgcagatgcagcagccaaccttacctctccggattctgagaagtggaactctgtgtttcccaagcctgggactttggttcagtgcttgaggctgccaaagtttgcagaggaggagaatctttgtatagactcaataactccttgtgctgacggaattcatttgttggtaggactgcggacatgccctgttgaatccttgagtgcaataaatcaagtagaggccttgaataatttaaataaattaaactctgcactatgtaatagacggaaaggtgagctggaatcaaatcttgctgtagtgaatggtgcaaatattagtgtaatccaacatgaatcaccagcagatgtacagactcctttaataattcagcctgagcagaggaatgttagtggtggatatttagtgctttataaaatgaattatgccactcggatagtgactttagaagaggagccaataaaaatacaacatatcaaagatccccaggacacaattacctcgctcattttgcttccacccgatatattggataatcgagaggatgactgtgaggaacctattgaggacatgcagttaacctcaaagaatggttttgagagagaaaaaacgtctgacatttctactcttggacacctggtaataaccactcagggaggatatgtaaaaatactagatctttcaaactttgaaattttggccaaagtggagcctcccaaaaaggagggcactgaggaacaggacacatttgtttctgtgatttactgttctggcacagacaggctgtgtgcatgcaccaaaggtaagttgtctgattatgctataaatcttataaaatccatgtatatatggcatttgtttatgtgcaaacctagtatgaattttaggttcaaatagatggggaggaattaatttttttgtaatgaagtggtaaatccttctttttaaactgttcttaaaacttttttctactgccctaggtaaggattctaactgtaaataagttagtaagtcacttagcaagtatcttctgctttaacctcaagaaaatcacgtgcttttatttcagtgagtccctgactctgcatctgctcaaatttatgaccttgggcaagttatgttaaattcattaaacctgttt

SEQ ID NO: 93569 - DNA, 1045 bp, Homo sapiens
tctccctaccttttgccaggtggttgttgctttgtttgttttgtgaaaacaaacaaactgttgaatctgtgaaatctgaatctgtaaaatctcttctgtattgtgcagctgctgatttctgtcatttattctgcctagttttaatttttaagacttgtttcttattttgtttcttttggggcagcagagcttagtattcagccaaagattgataggtttggtgtccaaatacctttagccagtaaggctgtgctcaagtgtgccctggcttttattttctgttgtgctttctcaggtctcttttgcataggcatagaggcttagttgactgaggatgtaataatggcttcggctccctctggtctttgctggacacgtgcacagcctctgatcaaggtgggatttgtggagagtttaccaggccccctgtgcttctctcactacatgtaattctgtgttaaatccctggtgtttccagtgctttgcttgccccacacagaattgtgacctcaagtagcagatctccttgtttgtttcccattgaaatcacctgtttaaactggacgctctccatcaatcaagtcccatctggagatagcagtgaatgtgctggttttcactgcttacctcaccctcgttaaattacagttttgtctagctttatagttgcctttcaggaaggggatttatcatcttccttcttctgctatgctggaagtgaatctccaaattagaatgttagaatatactattacccattaatttttttgtcttaattaaagctaaatttgctgtcagtttttttcctgtgacagagattttaaactagaaatttgagttgccttcatttcattgtgaatgctttaaaaaataagagtatttgttaagttttgttattgttgagattaagagatctggctgtggattccagtatagctagtgcctcatctgtaaaatggccacagtaatagttctaccacaagggtttttggtaaaaagtaaatgaattaattaaagcacttaaaatactgtctcataaaagtaa

SEQ ID NO: 93570 - DNA, 1906 bp, Homo sapiens
atgctactccctgccaaaaaatcattatttgccttgtagacttttatgaaatcatagtagcctgcttctcaatctccagttacttgagttaaccaaggtgtcttggttaagtatacaacttggtataaaaagctaaaatactgaatattctcatattttataggttattggttgaatggagaagattttttataaagtacagaaaaatgctttttagtagaggaaagatgaattttgtaatgaagaaataaataatggaaagaaagaagattgacatgctgttaatatttacaaactaagcagatttaaaagggtctagactttgagaaaaagatgtaatttgaattaaacttgtaataattttatagaacttgctgtcatttttttattgtgaaaatactctaaacctaccagattttatattttagtattttattaattttttaaaatgggaacaatggcttagcattttttaatgttatacatttcactgatgtgaatacatgtatagcatttgtaaagaagcctaattagtatgaagcacgttattactcttataatactagcatgtatgcaagattttcttaactgccacagaaatagaaaaaacaatttaatttttcagtttgtaagtatttctttaccacatagcttttgactgttttagtgttttattcatatgttatgtacttgcttgatgtctagcattttattttttaaaaaatagggtctaaaagttaattattggtctgatgtacattggcttgcactttagtaccactgcttttcttgccatccttattagggctaaagttcagtaagcccttttctaacaggttgggtttgggtttcttcaatagcgagtattgtctctaattttaaatatttaagttagaattttcttctttgctattttttagccagagttagttatcttagttatatatagatacctgagcccactttattaactttcagaatatttggcaagtgttgcaatagaaaacctacccatgaattaaaacttcacttcattgtcttctttttttttttttttttttttccacacctatttcaaatactgctctcactaatgttaaggagttgatttattggtggaccagccattcacccttgaaatcttgacatccctagtggagctaacccgctttgagactttgactccaaggttttcagcgactgttcctccatgctgggtagaagttcaacaagaacagcagcaaaggaggcatcctcaacatttgcatcagcaacaccatggtgatgctgctcagcatactcgaacttggaaactacagaccgacaggtaaaagatattcccaagataattaattttaagtccatcttgtgtatttgtcagagacaacgtagaattcctaggtatattactgtttatcttttttttttttttttttttttttttttttttgagacagagtctcactctgtcacccaggctggagtgcagtggcgcaatctcggctcactgcaaccactgcctcctgggttcaagtgattctcctgcctcagcctctcaagtagctgggactacaggtgcgcatcaccacgtccggctaatttttgtattttaggtagagatggggtttcactctgttggccatgctggtcccgaactcctgatctcaggtgatccacctacctcggcctcccgaagtgctgggattatgggcatgagccaccatgcctggcctgtttgtgttttaaactgtctaaaagatatacagtaatatacttaggaattctgtgttgtctctaacaaatatataagctaatttttgcatgttgatgactttgttccttctatttgtcatattgcttttggaaattgttatattcttattcttaattttaggataaaataatg

SEQ ID NO: 93571 - DNA, 2279 bp, Homo sapiens
tataatcccagcattttgagaggccaaggcaggaggatcactttagcccaggaatttgagaccagcctgggaagtatagcaagcacatgtctacaaaatttttttaaaaaaattagctgggtgtagtggtgcacacctgtggtgctactcaggtggcagtactcatgaggctgaggcaggaggatcacttgagcccaggatttggaggttacagtgagctatgactgcaccactgcactccagcctaggtgacagagtgagactctgtctgaaataaataaatagtatttgcatggcattcacattgtattaggttttattagtaaactaaagatgattaaaagtatacgggaggatatgaataaggttatatacaaatattatgccattttatataagggactggaacatctgtggattttgacatctgtgggggtcctggaactaatcccccacagatactgagggatggatgactatatgtgtgtctgtatatttatgtgagtctgtgtgtatatggatatgttcatatgtgtgcagtcttttgacagattttgaattaattgggtggaggactcaggatttggtagtttcaaagctctgcaagtgcttgtaccaggcagcctagggtaagaacttttagtttagttgccagcagattgtttctttaggcaaatattttattaccgttaaaagagagaagaatgtataaaacaattgaatcaaaattttcctccaatcattttatagcatctgtgatgaaaatcacagaagttcccaagttaacaggaaattttagatttttcaggcacataaatcattgatattaaagaaaattaagtttactaatatttttatcctctagaaacagcagtagataggcagatcacctttcctttgtctccagctcttaacattgaagtggaacaaaatgggaaaccgtccctggttgatttgaatgaagaaatgcagcacatggatgtagaggaatcacagtgtgagttaaattatagagctgttgtccatgacagtaaaaggagtagtgatctgaatgcaacatgtcgggcaagatttccttatggcttgcaaaaacttggtttcaagaacacaattaaaaaataacctataattctgctttggcaatatgctttaactttcagctcatcttttgtgaccacagctgcgctaatgcattcttggtttttaataccttgggatttgaaatcaagtcgtggtttataatttttttgaaaataaaggtgaactgtaaaataatatgggaatggaaagcaacataacaaataattgattatagttccttagcatgacaattcttattttaacacattctaagtatgatattttgtgtggtggtattatatgtaaatgggatgatatttgcttattaaatattacattttaaatgaatgaatttaaaagaaaaatatgtatttttctttttaggtcttagattatgtccatttttggaggatcataaagaagacattctatgtgggccagtatggcttgctagtggccttgatctatcagggcatgctggaatgttgacgttaacaagccccaaacttgttaaaggtgaagtaatacattttacaaaagcagaattaataataccacagttgtaaaaaagacgaaaaaaaactgatctcaaaaaaaataagattgttttctttgggactttcgttcgaaatttcatcagttttctggtagctgaggtcatttcctgtcataaagtaactaactgtatggttatctgatcctactttttgtgtcttaagaggtctcagtgctttttgaaaaaacgttgaagaaatgactacaggatgacttagtgtgacataacagagctcttttgagtaagcagacataatgttctgccatttttacccttcccatcacatcagagtcccgtctcttcagagttttattatatattattacagtatcttcccttaaaagaggtattttgtttgtttgtttttgtttttttgagacagtctcattctgtcacccaggctggagtgtagtggcgctatctttgctcactgaaacctccgcctcctaggttcaagtgattctcttgcctcagcctcccaagtagcagggattacgcccagataatttttgtagttttagtagagatggggtttcaccatgttggccaagctggtctggaactcctgacctcaaatcatctgcccaccttggcctcccaaagtgttgggattacaggcgtcagcaccgcacctggccaagag

SEQ ID NO: 93572 - DNA, 1011 bp, Homo sapiens
cttcattggtttatctctagtgtccgcacagtgcttgttgtatagcaggaatggatgatagttattaatttgacacgtactcgtcaggcaagggagcatgtatctatagtcctagctactcaagacgtgggggtaggaggatcacttgaacccaggagtttgagtccagcctggacaacagagggacacccaatctctggagaaaaaaaacaaaacaaaaagaaattatacacattccatgttacattacaacacattattgtaaatgttattaaaaaattttctacaaatgaaatacttgacatatagctattgattgtttttaaatgtacttgagatgttcatgaattaaaattaaacattgcctttccagccaggttgtgatagctttagttgttctgttttgtttggtaatgtgtttatattttctttttttgtagagtgcaacgatgtgccatgttacagttttcagaatttcatgagaagcttgttaatactctttgcagaaaaacagatgatggccagatcacagaacatgcccagagccttgtgttggatactctctgttggttagctggagttcattcaaatggacccggaaggttaataattaaaattttgcttaccactgttgattgccttttagatgttatgattgaaagttcaggatgagtctaaatgtctgctattgttttgcagctcaaaggaaggaaatgagaacctactttcaaaaacacgaaaatttctgtcagacatcgtacgtgtttgcttctttgaggcaggacgaagtatagcccataagtgtgcccgatttctagccttgtgcattaggttggtatgtttttaagttgaaagcatactttctaggtacacctgcaatttagtgggtgataccttgtttatagtgtgatttgatccttgtttaatgtatgtataatttaagagaatttcaaaagttgatgaagattgttgataatcttagcaagaattttgggttcttaggggaaagtg

SEQ ID NO: 93573 - DNA, 1860 bp, Homo sapiens
accctggtttgatcattgtgcattgcatccatatttcaaaacatcacatataccccctatatatgtgcaattattatgtatcaaaaaagaatgaaggtagttatcaagtaggaattcataaagcagttctctaaaatagcacatatataaggtaatgaagatttttaaagattcttactgtttttgctagtacatggtgttactatgaagggctactaacttggccttttaagccaaattttatttattgatagacatttttcacaatctgttttattaaaaaacaaaccattcaggctgggcacagtggctcacacttgtaatcccagcacttcgggaggccatggagggaggattgcttgaggccaggagtttaaaaaaacaacccattcaacaagttacctcagtgagttatatatttcataaagatttcatctttgtgttaaacaaaaaaaatgcttgtttagagttgttgaaaagttatatcattttcttaatttaggtaaagcgtgtttatatttacattgaacatattttggctacaaccattaactctatggaatagaacattttgactcagttgctcattacgatagtctctaatgtttaaaagcttcttaaggatagttttaaagttgggacgcttaagttttggcatgtatgtagcagttaataaaagtaaaaatacactgtcatgataatcttttaagcaatgtcgatctgtacctaacgcattatagaataattttattccccattcattcactaaaatgggctgtttgaagctcactgccatccactattttttaaagtttagtacagagaaacagtatgttggtaaggatgatttgaaggaccttcagtctcctcactttttcagctatttcgaagtgtccctcagaggcatctcacattattatacacctaaataaatacacattattatacacctaaatgactttataaaactctccagaaatatttgaaattcttagtgtaagactgtgcctcagtgtgttgtttatattttaagtgtcctctttgatccctccaaggagttatctttgtaaattgcctataagattgtctttccagaaaagggagtatctttctagcaaaaggaagtattctgataaataggtaatcttaaattctcattgttagaggaaaaggaggaaaaagaaacatttattttgtttttattgtttccaggttctgtctattggtattttgtcttactgaattatgtgaaagatgaagatctggctggatgcagtacagcttgtgcatctttgcttactgcagtgtccagacagttacaggacaggctaacaccaatggaggctttacttcagacaaggtattttagtatatctaatgactaataataggcgtctctgagtatgatcacgcttttgcagagaactgttatttaatatatatatgctgataacagtctttttcttacaaaaatgtttagtttataccttactttttccatacgataatagcctgaggttttactttcttctgttttgtcagaaattactcttttttttttttatcgagatggagttttgttcttgttgcccaggctggagtgcaatggtgtgatctcagctcaccacaacctccatctcccgggttcaagcgattctcctgcctcagcctcccgagtagctgggattacaggcatgcaccacaggcctggctaattttgtatgtttagtagagacggggtttcttcatgttggtcaggctgttcgcaaactcccaacctcagttgatccgcccgcctcagcctcccaaagtgctgggattacaggcatgagccaccgtgcccggccagaaattactctt

SEQ ID NO: 93574 - DNA, 1050 bp, Homo sapiens
tgggaggtggttgtagcgagccgagatcacgccactgcactccagccttggcaccattgagcactgagtgaacgagactccgtctgcaatcccggcacctcgggaggccgaggctggcggatcactcgcggttaggagctggagaccagcccggccaacacagcaaaaccccgtctccaccaaaaaaaaccgaaaaccagtcaggcgtggcgacgcgcgcctgcaatggcaggcactcggcaggctgaggcaggagaatcaggcagggaggttgcagtgagccgagatcgcagcagtacagtccagcttcggctcggcatcagagggagaccgtggaaggggaccgtggagaggggagaggggagaggggagaggggagagggagagccctctgcgctgttagtcagactgcttttaaaactaagtaaaggtaatttgttaattagatggctgaaaggaaaattgttagtgcattattttatttttcagatatggattatatagctcaccatttgatccagtcctctttgatttggagatgagtggctcttcttgtaaaaatgtttataacagcagcattggtgtccagtcagatgaaattgatttatcagatgtcctttcaggtagtgatttcttttattaaaggaaattctgaatgttgtatcttggatttaagttgccatttgacttaatagattatagtcatgatgttttgtctttagaaaactaaaattccttagaacttatcatatgaattattaaaatgtttcctagaagttcttaacttcctctttccctctgaagaaaatcccagtatattaaagtcatatttgaaagggttgtgactttaattttttgtttttgttatgcatttcatttcagtgtgattttaatgcttatgagactatttaaaatgtatttgttgtagccttttcagttttatttgatgtatctttgctgcctctataaagttaaaaaagatttcctatttcaaaaatacaaaattagtaatatatacttactgtaataaggatgcacaaacaaaagata

SEQ ID NO: 93575 - DNA, 1870 bp, Homo sapiens
ccagtgagttccttcggggttactcctgcagtaggtggactatcatctgggacagttggggaagcctcgacagccctgagttcagcagcccaggtagctttgcagtctctctctcatgcaatggcttcagccgagcaacagctacaggtgctgcaagagaaacagcagcagcttttgaagcttcagcaacaggttggagactatttggctctttgttcatgctgtctctaaacttcaaaagctgaaaaagtactttaaaaatgaccattattttcataaagaaacgtaggttgactgatctgagctaatcagtttcaacaaaaattgaggtaaagtctttgtgatatttaaattggttaaaattgtatgaatacatcttatttgatacatatttgagggaatatgattgatattttttgtgcaatcttgaagtaaatccattctctacacactcgatcaaagaatatgtacagttactagttactatttatatggagtatagttcctaaaacaaaattttatagaacagttaaatttaatgtgacttaaaattcactaataatgacagatgcttcataaattttattgtggcctaaattaggggtctccagtccctgggccatggaccagtaccaataaatagcctttcaggaactgggctgcacagcaagatgtgagcggtgggcaagcaagcaccacctgagctccatctccttttagatcagcaggggcatttgattctcataggagcatgaacattattgtgaactgtgcatgtgagggatctaggttgcatgttccttatgagagtctaatgcctgatgatctgaggtggaacagtttcatcccgaaaccagtcccctgcgcctctgccacatctccccgcatccgtggcaaaagtgtcttccatgaaactggtccctggtgtcaaaaaggttgaggaccgctggtttaaatgaaatctttggcaattccaggtgacaaattgtattacattagtcaacatgagaattcaactccttataatattttgttttgagcagatattccttatttacattaattgttctgcttccttttcaccactaccttgaaagagtcctagttcccaaatgcacaggaaattttgtgttaaacatttaaagtgtatatagcaaagcaatgatccatttatatcgagtccagttttgatttaatttcatctttaagtatgatcaatttaatcatgtttatcttcataatatatgtccatgtggtattctgccacaatttaggtaggcaggattagtctatatatgttgcttttacttcttttgcagaaagcaaagctggaagccaagttacatcagacaacagctgcagcagctgcagcagcatcagcagtaggtcctgttcacaactctgtgccttccaacccagtggctgcccctggattcttcattcatccatctgatgttattccacccactccaaaaacaacacctctttttatgactccaccactcactccacccaatgaagcagtttccgttgtgattaatgccgaacttgcacagcttttcccaggctcagtcattgatcccccagcagtcaatcttgctgcacataacaaaaattccaacaagtccagaatggtaaattatgttttaaataggtgttggcttagacatttaaaaatatcttgaaatatactctaactttagaaggcaaaatttttaataccaactagatgtatcaagttattttcttttataaaatattacagtacatacattaagagaagaaacttattaatttgctattatggttagtagtttttatagaactatagtaatatcaatataaagttagattttttttttttccctgc

SEQ ID NO: 93576 - DNA, 1061 bp, Homo sapiens
ttatactagaaattacactcaaaatattcctaaaactagccttcttatagtagaactctttcttgagaagagcaaacagaactactgcttactgtaataactggataagaataataacatatcctaggctctgaatagtttgaatgttacctgagtttgtcttctgcttatatgctacagaactgacattgggatagatgctttcaatcacaacatatttgtgaataaactctaggcaacttttctcttaaaacagttggttttaactaccaccaacatttttgtgctttagcagcagtagaattcaacaaaatcctcagggaaataacatggttatagtatacactgtagcatgtatcattatatgaagaattaaatagtatttgcgttcttgcaatgtggttgtttcctctttgtaagagggagtttgaaagctaaaataaaagtcttacagtattttctgcccaactaatcattcattggtaacaacattagtgttgatgacatttagagtggaaatttgttattctgaagtcttatgggagatgagcagttgtttacactgtagtttgtttttttatacatagcaatgactgtagtacataagcctcctgaggaggataactatgttctttctttttttttaataatttttcttgttagggaagtattagtaactgccttgttttcttttaaactagctctgtcgagaatagcactattcctagaagtttaatttagttgttttccttcactataaaatgtagctggtaagattactagctgacccaccccaaaacaataaggaagaaaaagaattatgacattattaatgatctgccttctgttttttaattgaacttattcttgtaatgtgggtgaaatgagggatgtaaatctgctttttctttacctatctcatctggcattgagctgaagagactgggatatgtctatactgggaaaaagcattgtttgagatccattagaggaccttcccaaggcctttttcagtggtattttgattatatatgattgtagtcctgctttcactttggatc

SEQ ID NO: 93577 - DNA, 1021 bp, Homo sapiens
aaaaaaaaaaaagaggggtttcgctgtattgcccagtgtggagtatagtggctattcacaggtgcagtagcagtctagtgtattgcagcctggagctcctcggctcaagcaattctcctgtctcaggtcccccagtagctgggactagaggcacttgccactgtgcccagctactcttaattttctacttacgtcttggggttcaaaactaacacagactgggatttcagaaaatttttgaatcaattgacaaggccatttttacatatttacttttcctcttatttatagtttagtgagttgctttcatattttaagatgagtgctccaaattatttttgagtgtatcatttggttaattgatatatttttggtcaactgtttcttctttctctcataggagcaagaagatttgtgaccttggattttgggaggcctatattgttgactgatgtattgattcccacttgtggagacttggcctctttgtcaattgacatttggacattaggagaagaggtggatggaaggcggttggtagtggcaactgatataagcactcattcactaattcttcatgacttaataccacctcccgtgtgcagattcatgaaggtaaagaactttaagaaagtaaattgatacgctttctatgtttctgacaagttatgaaaaatgaatatataattaaaaaatataactatctttttaaatacattgctcagatttttattgtggcagatgtgtatatatgtatatttataatttttcatttcagatcactgttattggacgttacgggagtacaaatgccagagccaaaatcccattaggattttactatggtcatacctacatcttgccttgggaaagtgaactgaagttaatgcatgatcctctaaagggagagggagaatctgcaaaccagccagaaattgaccagcatttagcaatgatggttgctttgcaggaggatatacagtgcaggttagtacagagtgcaaattttaatgttattgaa

SEQ ID NO: 93578 - DNA, 3630 bp, Homo sapiens
attagtacctatcaagtgggtaattctttttaatggttgtatgttaacaggtttaagagatttaattcttagtatttgtacatgtacataaagaggacattacaagaattattttgttcaatctttttttactttaggtataacttggcttgtcatcgtctggaaacccttttgcaaagtattgatcttcctcctctaaacagtgctaacaatgcacagtactttttacgaaaaccagataaggcagttgaggaagacagtagggttttttctgcttatcaagattgtattcagctacagcttcaactaaatttggctcataatgcagtgcagaggctcaaagtggcgctaggtgcaagccggaagatgttgagtgaaacatcaaatccagaagatttaattcagacatcttccacagagcagttacgtactatcatcagatatttactggacactttgctcagcctgcttcatgcttctaatggtttgtatttggcttacatattttaaaggctgggaatatacttgatgtgatttcgctgcatgttttaggatctgtgtcaatattttctattgtaaattttggtattttaaaaaatgtcagtatttatgaaatgtctctttaggttaatctatttctccctgttattttaaacatttcttaaatgaagttgtgtgtgttttttttgggtttctggtattgacatgcacatcattgtgctactggcaaagtattaagtattgcattgaagttgaacagtgaaacttttcataaattgctaacctaatatagagctatcattttctagccaggaggtatttttgatcattacacgagctcacacattcactgacacagccatctgacacatccagctccataggcaagaaatgtaatttacttaagtgctaaatattttcgtctccaagtatgtaacagatttctacatacaaggagtaaatacattgcagaataaatagaatataattatctactgattactagaaaagaggaaagtgtatttaggcatgcgtattttaatattatacaatacatttaaataggaaagtttactgttttctttcttgtaataggacactctgttcctgcagttttgcagagcacatttcatgcccaggcctgtgaagagctctttaaacacttgtgcatcagtggaaccccaaagatacggttacatactggtcttcttcttgttcaactgtgtggtggtgaaaggtggtggggtcaatttctttctaatgtccttcaggaattgtacaattcggaacagcttctcatctttccacaggataggtaggtcagaaaatgttggaggtatttgttattaatgatgtgtacttttcacagttactggttagcttttgaaatctttgaaatgtggatactaagttgtgaatatgaagcagatctcagagtttgtgaaatgaccagtgaagggcaccagcactgtgtatcgaagaagataataagtgataattagagtctactctttagttttctaattgaacttgtggacttcatagatctgtgtttataagtatttctattagattatgttgctttatatgctaaatgtgtttgtttgtggctaataaaattctctcattcactaagtgcttgatttcttgttaataacattagaaaatgtaaccagtagttagaaaaaaaactaattttagcttcatacctccagatacaaatcttgctttcccagtctgaaatatggtatgttttaagaaagcaaatattctatcattactctgttaaatttctatgtaaattattttaaaaattgaacaatcgaattgattcttattcttttcttttttgtttgttttgtttttagggtcttcatgttactttcctgcattggtcaaagatcacttagtaatagtggagtattagaaagcttacttaatctcttggataatttattgtcacctcttcagccacagttacccatgcataggaggacagaaggtattaagagaaagcagtgttctttagtaaaaacaatattcctgcaaatatttcttttataaaatatcttctctgaaatactttaataattatttgcagcacatttaatatttttatgatgtaagcttttaagaatgagcaaccctcatgtgattgactgccatatagttaatacttttaaaatttattccttttcattatttgaacttagtatagtatgtttttcctgtactattataactaaagtcaaactcccttacataagtttgagctgtaaggcacagttgttgttcccatcaacaataatgagttttgtttgaacacacttttttataggaataaaaacattagaacctagtttagtgctatatgaattataagttgagagttagatgttttatttcagttcctgtgaatctaagaatagtatcttataccttgctttctagtttatatagtccattttggattcagcctgcacttaatctgttcttataccttgaagtctttgtctttcattagatttgatgttctactcagtttctggctgttggtgtctattttttagacttattacatataaatattagtgttagtaatgataagatatgttttggatttatagaatgttttgtttcacttatattatcagatctaattaggaatcctaaagtcatctggatgtttttcctttgctgtcatctctctccaggagtactagatattcccatgatcagttgggttgttatgctggtgtccaggttgctggattatgtggcaactgttgaagatgaagcagcagctgcaaagaaacctttgaatggtaaagacagggagaggtttctgacaggtatcagaagtttataataatatgttggtggggattttgagtgacttcgcagttgttccagaactggctattggcctggagctaccagctgtatgtaatttaaggaaaatacaaatgaacttcactacaattctgtttaaagataacatttatacttggtggactttatagacaagctcctttgtctggacatgacttttagtttctaaatgcagctatgacttttgcaaggtgtcttccctcaggcttgtttaaagactttataatagcatgcatgtaagttagttatgaaagggaaatcagagtttttattttttcttagtatgatgtgtcatttcatttagcattattggtatctactaattaactacaaatggcctgtatttttaaatacagaaattctcagattttgagttgtaagctttctttataggttcaaagcacagaaaaatttaaaaattaaaggaaatcaacctgcaacattattttattaccctcttcccagttaacaaggctttttatttttctttatttttatttttcctcagagattcttgttctgaaaataagggtttttaaataaaggatttgagatacctaaatccagtatgtaagccattgagatatgtaagcctacatatgcttacatatggcttacatgtagtatgtaagccattgaaatccataaaatttggaattctgtacattgtcaggaactcagtatttttaagagttcccttgagatgttatagtggaatcagttgtttatagtgcatat

SEQ ID NO: 93579 - DNA, 1030 bp, Homo sapiens
ttatttcttaagctacattgtagcaaaaaactacaatgatctcaatccaaattttaataaaaaatatagacataccaaaatgtgtactactcttgagatttccataaaaacaaagctaagaaatattaagcaataaaatatttttctcatttatttaattaaaagtaaatttttttctctctattaaaaaatatatatcgctcgattatgttagtggcttatataagaaagtcttccagttatttcttactcccatgggtaagggagattttaatgaaaacagggagagatctcaaagtcaggatttgaaatgattttttaaaaaattatcatcacagttaaaattatactacatctttcaagataatgtgcattccattagtttgatgtatgaattctgtgaggagtataataatttttttgtttttaacgttgttaaagattaagttgtttatttgttttataaagcaacttaacctactaaaagcaaagcagaaggcattggtagaacagatggaaaaagaaaaaatacaaagtaacaaaggatcatcatataaactcctggtagaacaagcaaaactaaagcaggccacttcaaaggtatgatctatacttttcaatatagttatctcagaaaagtcaaggagttatgatctttaattacgatcgagaaacttaaatatacattactctgcttaacagagaagccaacctactctggacttttttttggtggggtagtttaactgaaggaaatgtatgataaatgtggtatttaagtattattgtaatgtattaccttcattgtggattgagttccagtaaattgaagataaaggatagtggaatgtatagttttgctaatgtggcattgatagagcagtttatttccattttacaatacaaaattatacaagatgattgcaaatattattgtatcagcctcacaaataaaatgtatatgtaaagtgaaaaatgtggcattctctttacccttagtattgttattggaatattttggtggctgagt

SEQ ID NO: 93580 - DNA, 1133 bp, Homo sapiens
gagggataccgtgtatgtatcaaacaagtttgtagtctttctataacatgaaattatgattattccgccagattttgaagtaactcgaattaatattttgtacttgatgttatattagttttctttaccttcaagcttttacaaattatgtttaggatgttacggtaatatttatgttgttagatttgacttaataacttaatatattatctacattgaatgtctgtagaatttcacttttctgaaactctgttacatatctgatactttactccaaataggaagtaaggtatattggtcagtttagcttttaatattcttacttttgaaacttacagtgtatctaaaaattttgctctttagaagttgtaatatggagtggatattttcattacataaatctatactgaaaaaattttcattaagtaaacattgatttaaacactatacatttttgtgtgcagcactttaaggatttaattcgtttacgtcggacagcagaatggtcccgttctaatttagacacagaagttacaacagcaaaagaaagtcctgagatagaaccacttccatttactctggcccatgagcgttgtatctcagtagtccagaaacttgttctgtttcttctctccatggactttacatgtcatgcagatctcttattgtttgtttgtaaggtatgtaaactataagtgtagacttacagggttggccgggcgcagtggctcatgcctgtaatcccagcactttgggagactgaggtgggtggattatctgagtctaggagttccagactagtgtgggcaatgtggcaaaaccccgtctctacaaaaaaaaaaaaaaaaaagtgacttataggttaattaaaaactagcaaaggatgatgtttttagtcaattttcattaagagaaatgatgcctcttttggttttgcttttttgcagttagtttttttattgtgtcttaaaagatgaaaaaaattcttttcaaatttttccttaaggaaatctgatttatattttaatttatttaaaacttgagggtttgaaatgtaagtaatgtggatatgtttatctccaacctgcctttcttatattaattaaaataggaaatacacaagtaagtgtcaa

SEQ ID NO: 93581 - DNA, 1144 bp, Homo sapiens
aaacccgtccttactaaaaatacaaaaattagctgggtgtggtggcatgcacctgtagtcccagttactcgggaggctgaggcaggagaattgcttgaacctgggggcgatgaggttgcagtgagctgaaatcgcgccacttcacaccagcctggcgacagaccgagactgtctcaaaaaaataaaaaaagaagaaggacttttaatgtcatgattgcttttctgtggcatattcactgttcgtagaaatttaattcttaactatacaattagatcttaaaccagattttaatatttgattcatgaaattacattcttttttgcattccatctcaagcaattttttttgataccagactcatacatcattgttgaaacctattgttcagtgctaaagtattggtagacttctgttagtgtttgaaaaaacatgtaattgctatttaagtgtatgattttataaaatgtattacaggttcttgcacgcattgcaaatgccacgaggccaactattcatctgtgtgagattgtgaacgaaccccagctggaaagactgctgttacttttggttggaactgacttcaatagaggagatatatcttggggtggtgcttgggctcagtattccttaacttgcatgctacaagatattttagcaggtgtgttaggatttttcttcatagagtatgtcaaaattaccttgtcattgctcaactaagaatcttcaaagggatctttaacccctagagggatctttaaccccctaaaagcataaaggtctgtttaatcggtgtgatgttatagcagtagcaaccattgaaaattacttttgtatttaagtatattgatagtcgcgataaatgcaaggctttagaaaggctttgggttgttaaagtgcatgaatattggagctagcctgctttattattaacatcagtggtatgctgcttactgggtggggaaatcactttgcctcattttcttcatatataacataaggataataaggataatctttgtataaggttgtttttatgaataagcgtgttaatgtatgtacagtaattaaaataactctttgtacatgttatgtgtttactggatacttgtctctagcatttgaaagtaatggagtgagtcctag

SEQ ID NO: 93582 - DNA, 1025 bp, Homo sapiens
gcaacgatgaagaaaatgcaatgtagaaaacatgtaaaaatacaaagtgatgaagacagcagttttaaaagctcttattctttaagatccagcatgtgatttttttggtgtatttttttcttactttttctttttttttcctttttaaaaagtatctttataaattagcatgtataatcctttatcatctccataccccttacttttcaaaagtctgttttgggtactaatctgtatatgtcagatgctgcagtcattttcaaccatttgtcattccttaatcttatgtttgctcatgattttctattttttacttgatattctctttatctggagtagatttcctgtgtgcacgatgaacacttcgttatcgaaggttcacataaagcgtgcctttctctaagaggctttttctgtcattcccagcagagttagggactttgccatctgtacttcccttgcgctctcaaatatctctgctagcacatatcatgttgtagtcagttttaattatagtgcacccccacctctgaatttctcttaatttattggattggagagttttattaatcttcatgtacttatactcaaaccctcatacaggctggcatttactaggcattctataaagttatgttgaataagaggataggaatgatggaaaagtaagagttatagaggggtacttataagggttataagaaagctacttaaaaatttggagacatctgagagacaataatttctaattcataacagaaaaataaggtaaatggctttttttttttttttttttttttttttttttttttttgagacggagtcttgctcttgtcacccaggctggagcacaatggcgtgatctcagctcactgcaccctctgcctcctgggttcaagcgattctcctgcttcagcccctggaatagctgggattacaggcggccaccaccacacccagctaatttttgtattttttgtagagacagggttctgccatgttggtcaggctgttctcaaactcct

SEQ ID NO: 93583 - DNA, 1050 bp, Homo sapiens
gaactacatttaagtatacagaagtatagttatagatcaccaacatttcagacagccatctaaacttcatccgagctgtgttcattgcagagtctacttgtatgttagcctacttttttttaaaggagaatcacctgtaataatttatggtggtacagttctttggtccataagagattttattagggatgctactttcagtttctaaacatataaggtatttttagattttggcagaaagtgaggagaaaattactggaccattcttataaatcattaaaattataaggggatttgggaaatttaaagggtggatagaatatttattttgtagttctgtttgggtttagataatgtaaataacgtgtcattcagccaagaggcaaaaataaaccacagttttttttccattcttttaagccaataagcagtacatggtatgattattggggtgctgattatgggacctacaattacaacccttacattggaggtctgggaattcctgtagcaaagccaccagcaaacacggagaagaacggatcacagacagttagcgtttcagtctctcagggtaagtgtatgtttatattttaagacatatgctattcttaaaacaagtctgtcatttatgtatactttgtcccttgagaagttgagcctgggtgtatgccagtgggtttagtatcacagctgtgccgtgagtaccattcagagctgtttctttgtagtcactttagaggaacttctatctttttggttctctgtcagaataacacctagcaagtgttgtatgggattggcaatgattttaatgaactgtgctgtattttaattgttgactttaatagtaaacttgtattttatttataaagagaatgaaactacattaaataagtattatttttgcagtttttttttttttttgagatggagtcttgttctgttgcccaggctggggtgcagtgatgtgatcccatctcaccgcaaccgctgcctcccaggtcgaggggcttctcttgcctcagcctcttgagtagctgggagtat

SEQ ID NO: 93584 - DNA, 1050 bp, Homo sapiens
cgtggtggacagagctagggagtatgtgtttgtgtgtgcgtgtgaacacacacacttggcatctatatttctgtatctgtctatctattctgaatatgatgaattcacatcagtgtatctggatttaatctaactccatagggttcattttagctttcttcttgtctgtatttatagcactttattctgacagtgagaaacctggttctcattatccttaatgtctttgtttccattattgttacttcacttatttaatatttctgtctctatataaccaatcgcctgtctctaccctcctttccacagatattcttcccctgctgtggctccgatactgcatgttaggtggctgttctgtaagaacacactcttcatcctctcttgggttcagatgtcatcattttattgtaggaggtaggacatgagtaataattgtcaatgttttctttttctttcaattgctttttgtagccctggatgctcgcctagaagttggacttgaacagcaagcagaactgatgttgaaaatgatgtctactctggaggcagattccattttacaggcattaacaaatacatctcctacatgtaagtaaaatgaccatttttagagtattgcagtgaatgattcagctcttcatcattttcaggtggattcatcaaggacagatttttaaattccatgatgtgagtctgaggggacttagtatgtagcactttcctggctccgagttagtagcaagttgaaaactaagacaaaggattaacaaatgcagagagtatcatgcaaaatacttccatgtagtgctgtcagttcagtgcagaaacctccattgtgttttgtttactgtattgttgtaaggttaataaaattcctacagaagccttcatacctgcctgtgagttcattgcactattccaaatttatgatgaagtagattttttgtagtaacatctttatcatccttaaagactaggatagagaatatagtgtaggatgacagccaaataggcctgttagttgaaagccagaattgagaggattta

SEQ ID NO: 93585 - DNA, 1776 bp, Homo sapiens
agcctggccaacatggtgaaaaaaatacaaaaattagccggctgtgttgacgcatgcctataataccagtttttccagtatctgttactgttttcagttgccagttttgtagagtgtgaggatttttagtaaattgtattgaagtagaaatgcctatggtttggaaagtacaacatactgagagtgataacatgtcatttcaggtgttgtgggctgagctttaaaccttatcctaaaatgttactgattcttaatgcgttagttgtatttaatggagaattccttttatttgcatgttttgaagacactggttaaggagcggatttaaagaaatagtgtcttgtttttaaatttattcttttgacttagttcttcataaacattgtttttctgaaaaatattttccctttctcttttctgcatagcatcaataactagctttctcacagtgttagcttggtatcccaatactttgctccggacatggtgccttgtgcttcatagcctaacactcatgacaaacatgcagcttaattgtaagttcataaatttattcatttaaatctctgacatatactttagtgttctactattggattcttaaaacagagttttccaaggagtggtatacttgtcaaagtggttgagttggccagatgtggtggctcacgcctgtaaacccagcactttgggaggccagcacgggtggatcacttgaggtcaggagctcgagagcagcctggccaacatggtgaaaccttatctctactaaaaatacaaaagttagtgggcgcctgtagtcccagctacttgggagggtgacgcacgaaaatcacttgaacctggaaggcgaagtttgcagtgagcttagatcacgccactgcacaccagcctaggtgacagagtgagactctgtctccaataaaagtgactgagttttttcttctaacatgtctcttctgaattagttcttatatatcctttgtgcttgtttactttgataatatagtctcatatgtctcgttggatgttcaaatcatattttttaccttttaaaaactgattaaaagaaaattgattgcttttagagtacaaaggcaggtttttacatttcatctaagtttttatgttattcttttaagatacctttgtacttaaaaatgatttattcattattatattcataaacatgcataactagattcctgggttttgtttaataatttaaatcattgcttagctttaaaatgctattatcttttttcatttggaatgtattttccaaaaatgagatcaaaagcatcactgtgatactgaaggtggatttcatgcaaaggatattttattcatctcagaaaactgttgtgttacctgtacgttagttcacagttaacctgtatacaactaacatgcaaaaaggaataattttgctacaacttattttagaaaacttgattaaagtttacctgaaaagtagatctctgactgtttctggaagggggagttagttagaataggctttccaaataagagtcaggacctagttatatcttttctgtttgactgtactaaataagatgtacattaagctcgaggtgttttcagaatcagaagggggcagaagagatagatggtagatagagagggaagtcctgcttagtcaatatagtagaaactgaaacccctttaataaactgtaattactaggaatgtatgaattttccttggaactaaaagatgctttcagatactgcatttccattatttcatggtcca

SEQ ID NO: 93586 - DNA, 1072 bp, Homo sapiens
tttttttgacttggtataaatttatttttatttagtttttgttttgtttttcacttagcttaatgcttgctttgctagttgttagaaacatgaccttttatggatcattttacctctctgctcctgagttatttgattttgaaatggggtaattaagaaggttatttgtgaaaatctatgttgaagttatttatactctaaaaagcattataaaagtatttattgtgtaattcaggtgaactttttttagtattgagttcaataaacctaatatagttgtggtgtataaactataatgaaaaagtattaacagtatttttatttgcaattcaaaataaatacatcaagacctaaaaaattcatttcctgctatcattgttaatacttttgttttcctcgtacgaaaagttacagtgtatagcttttgactttctacttgataatttttaaatgaatgattttttacatgttaccagtaagcagttttcagtgaatatacatttctctttaggttggtcctacagctacacaagctatgcaagaatttcttactcgattacaagtgcatctttcttcaacatgtcctcagatattcagtgaatttttgctcaagctaattcatatactttcaactgaaaggtaaatttttgtgtactaatttgttcctgatatagaagtaacatgtaattctccaaatatacttttctttaacatttgttgggaatttatctgtgaacaaataagcaggaggacggtagtaattaagggggaaggatatattggtgtgtttcctgattgtttccatttcatttcattatggttttctcaagtccttatacctctactctctttaatatgaaaggaatacagttgacttgcttttaatggttttatagattagttattataagctttttaaaaggtgaaatttattttgaagctgtttaaactctaaagctaccagtgattttgtatgtaagaaaacctgaaaaatagagcttataaaagaaaattgtatactaatcttgtgtagaaattctaaataaatttattaacaaaatcagactccatg

SEQ ID NO: 93587 - DNA, 1031 bp, Homo sapiens
ttgtatctctctctctctctctttttctgtctctctctctctctctctgcaggggtgctttccagacaggccaaggacctctcgatgcccaagtgaagctcttagaattcactctggagcagaattttgaagtcgtttcagttagtactatttctgccgtgatagaatcggttacatttttagtgcaccactatatcacttgctcagacaaagtaatgtcaagaagtggatcagatagctccgtgggtgctcgagcatgctttgggggactctttgccaatcttattcgtccgggtgatgcaaaagcagtttgtggcgaaatgacaagagatcaactcatgtttgatttgttaaaacttgttaacattttagtgcagctgcctctttcaggcaatagggaatacagtgcaagagtgtctgtgaccacaaatacaacagatagtgtttcagatgaagaaaaagtctcaggaggcaaagatggcaatggaagcagtaccagtgttcaaggatcgcctgcatatgttgctgacttagtcttagccaaccaacaaattatgagccagattttgtctgctctgggcctgtgtaatagcagtgccatggcaatgataattggtatgtattgagaatattaatcttaccattgtctctgatactataactggtttttttttaagcaatatatggattcattttctttttactttatagtgtaaaactgctttaagcttttcatgactgatttttattggtgaggacttctgtttaggggcttcaattaatgaatgaaagtgaaatattgacaaatgtcatgtcagtttggtttgttttctttttattgagatgcctcccaggttcaagcaattctcgtgcctcagccacccaagtagctgggaccataggtgcctgccaccacacccagctaattttttttttttttttaccccgagccagagtcttgctcccacgctggagtacaatggcgcgatctcggctcactgtaacccccgcctcccagattcgagtgatac

SEQ ID NO: 93588 - DNA, 1559 bp, Homo sapiens
tcctttttgtatttcatttttacaaatgaaattgtaggaaccagattattttactttcttgtccatttcccattttgaaatgcagatattagaacagtttcttatgtcttttatatagcagtgtataattatcatttttgtaaacatttgttgaatgtgtatatttctctattagaaaatacaaaggtactttaaatggttcaaattttaaatgaaattggtgtctaaatgcatattaagagaaaagataataatggatgaagacacatgctttaaaaaattctctgagttcagggagatggtttttttattcaggtaagatttcttatgtattttggcagacattttgtatttagcgtatttaaggctgtcagtttacaaaaattaactaggaaggaatattacatgcattgagtttagttcttattcacaggaatatataaagtcataatatgcatatttcattttttagggctctcttgctacttgccagttatctgagccattattgtggttcattttgagagtattggatactagtgatgccttgaaagcatttcatgatatgggtaagataatatttcaataactatcatttaagtgtagttatgtgatagtatgttacattttcatttttgtagtcttttgtggaagtttacttttgatgttgaaccatctgtcctgagatcgatttcatttcatattctttataaatttaggtggtgttcagctcatatgcaataatatggttactagtacaagggctattgtgaacactgcaagaagtatggtatcaactattatgaaatttcttgactctggtccaaataaagctgttgacagcacattgaaaacaagaatactagcttctgagcctgacaatgctgaagggattcataactttgcacccctcggtaagaaaagtgttactaaatcttacttatgtgaaattatctagtttattagctggtatgaaacaaaattagttgaagtcagttgatgatgttatatatcactattttaattacaaacagtttattttagaggtagtggatatctcgacattctacttatgagagggaatgctttgtttgtttgtttgtttgtttgtttgttttgagacggagttttgctcttattgcccaagcaggagtgcaatggcgtgatctcagctcactgcaacctctgcctcctgggttcaagcgattcctgcctcagcctcccgagtagctgggattacaggcacctgccaccacgcctggctaatttttgtatttttagtggagacagggtttcaccatgttggccaggctggtcttgaatgcctgacctccagtgatccacctgcctcggcctcccaaagtgctgggattacaggcatgagccaccatgcctggccgagagggaatgttttaacagttctttagcagtaaagtttgtttttatttgtgagtctaaatagaagcacaatttaagaaactaaacagagattcttccgtaagttttctctttaaatgttaatcaattttaaatctcattttccttcttaaagtggtgct

SEQ ID NO: 93589 - DNA, 1111 bp, Homo sapiens
tacctgccttggcctcctaaagtgctgagattacaggtgtgactactgcacccagcccattttgtgttttatatggttcacaaatgctttcaatatagttataattttgccagaattgtttaaattaatacacatgcttacatttattgattgattctcattgctatcaaatatcactcaataattgcatgaggagctgtgggaaatgttgtagattcctggcatctttggagaaaacaatttttttctatgtgtttgcaagattagactgatatagcttaattacttgtggcatccacactccttagataaaaaacagataatataaaggtagaaggaaaatatgctagtacacggtgttttaggaggtcaaaaataactatattaaaaggcaaatataagtcaatgtaagacttaggctacctctaaaattggaaagagattgcttttatttggaaagcaaaggagtttggtcataagtggtggcttttgaagttcagctggatttttcatatgggaattgaaacaggaagcatattatgaagggggaacccctgtgaaaaattaattggtttaggtgttccctacttaagtgtacttgattacaaaatttggttttattattggattagagcagaagttgaaaatatgttgtgatacagtggaaataacagtctttagaatcaaacatggacttgaatctaaggtgtgacatttcttgtgggagcgtggattacttaatctctttttgctatgtctgcttgtgtaaaatgtagataatactttcctcaaaaggttttgaagtagaaatttaaaaattaacttgactgtctagtaatcagtgtaaagctggcatgtaattccttctttttttaccactgaaattaaaaataaaaccaaatttcaaaagttttagttgacatatttattagatggggttccatgttaagctagaaataaataattttctggtagttcattggggactccttaaatttcagcaagaattgattttttaaaaaaaatcctgtggatatttggtttaatttgaaaaggaggctgggcgcagtgggtcacacctgtaatcccagcactttgggaggctgcggca

SEQ ID NO: 93590 - DNA, 1019 bp, Homo sapiens
ccaaattatttaaaatagtaaaccatagcatattaatcaaaggtagttttgtattatttgtgataattttgagtaaaatagaaatgatgacataattacctatttggctggttttattcatagggagcatcaggtacatgtgcatcacacatctttggttcctctttttttaggtgaatattagactgtttaagtataatttttattgtagatcaaatattttgtgttgaaaaatagctccaacattaattatggtgaaagtcattgtcaaactatattttgttgtataagttttccttttacaagttcatgatgaatacaactgtgaaagctgctattttactgggattttaataaactgttcaatctagtatactttgtcttttgtgatgattcagttttctctttttatagcctgcccttcctcagtgtctgttgaagtaagtgcagatggggtaaatatgctacctttgtccactcctgttgtcacaagtggcctcacctacataaaaattcagcttgtaaaagccgaagtagcttctgctgtctgccttagactacatcgtccacgggatgccagcacattaggcctttcacaaattaaattattggggctcactgcttttggtaccacctcttctgcaacagttaataatccattccttccatctgaagatcaggtatccaaaacaaggtatgttttgtttgtcctttttttttttttttttttttttttttggcatggttgggagataggggacttaattattttgtgggttttttcttttttaggtcttaggaaggtctttgttccataggtatctgtataatacaattttattaggtgtaatagagacagttttgtggaaacagaatgctgacactgattaaaattaaggtgtatatatgtttagtctttgagatgatctgtatgctacatgtaggtgtacattgtaattttctggcttgtaattttttgtatcatactctgtttcgggaatttgcaaatgcctatgacc

SEQ ID NO: 93591 - DNA, 1800 bp, Homo sapiens
ctcactgcaacttctgcctcccgagttcaaatgattctcctgccccaccttcccaagtagctgggattacaggcgcccaccaccatgcccaactaatctttgtatttttagtagataaggggtttcaccaagttggccaggatggtctcgaactcctgaccttgtcatccacctgcctcggcctcccaaagtgctgagattacaggtgttagccaccgtgcctggccatgatttatcttataggggaaacttactgtctgtttacttaatttgcagcattctaaaaaaacatgtcttagattggttaatgctgtttatgaaacacaacatgctgatctttaaaaagttatgttctaccccgaagtgatttgagcgacttatattgatcatacaagtcattttgtattttcagtattggatggttacggttattacatcattgccttactcacataagtgatctagaaggaatgatggcaagtgcagctgcacctactgctaatctgctgcagacttgtgcggccttattgatgtcaccttactgtggaatgcattcacccaacatcgaggttgtgcttgtaaagataggactgcagtctactagaattggcctgaagctcatagacattctcctgagaaattgtgcagcatcaggcagtgatcctacaggtgataattaactttgatatttaaatgtttacatatctgtaaagtaacagcagttgaactgtgcgatcttcgtgcttaactctgttttgggaattattttttcttttagtttatgtttatctctcctctcttctctgatggagtctcactctgttgcccaggctggagtgcagtggcgcaatcttggctcactacaacctccacctccctagtagctgggattacaggcatctgccaccacacccggctaatttttgtatttttagtagagatggggtttctccatattgatcaggctggttttgaactcctgacctcaggtgatccacccaccttggcctcccagagtgctgggattacacgtgtgaaccactgcacccagcctagtttcattatttttagagtttgttctgtgttgttggaatttatggaagcctcatttttaatgaataacttaattcaattaagtaaatcttcccatggttaacttgcttatttagcaaactttttctttggattctttgttgcaagatttgaatagtcctttactttttggaagactaaatggactctcttctgactctacgatagatattctttaccagcttggaacaactcaggatcctggtacaaaagacaggtacgattttatttttcatttaattaagcacacacatgcacataatcatgctatagtaaatgtttctgacagtttttccttagatgatctcataaaagacaatactgtgatatattgtatgtttaccatatgcctcacacgatgtaacttctgcaagtattcatgaacattagacatacatttgtatgtgtttggacatactttaagcaaatttgaacttaaatagaattctttgttaatactgcttttgaggaatggaataaaacatatatttttaagttggctacgtgtgaaaggaaccttgtaaagtgatggtatcagagtcatactgtcttaggtagtactttatatgtgtatatgaatgtagggatattgtgtctgtagttggtacttcaactgtttttataatggttctgtttatttattattgattatcgtattcatcgaaatcttttcatgactttctgcaccctttcctgctgtttacagaa

SEQ ID NO: 93592 - DNA, 1276 bp, Homo sapiens
cacagaatgatagaaccattttaaaataatttacttgattttctgtactcattgacaagtctaactcaacttgcattgtacctacattcttcaattttaaatatatatatgtgtgtctatatatatatatatgcagtcttaaatcttacaatgttttattattcaatgtcaaataaagtatataatgtcagagtatactttgaactataacagaaatatttgaaatagtttcttctaaaaatatacttgtatcattaatatgatatcttttattttttaggttactttttaattggtccatgtctcttccctgcaatatggttttgaagaaagctgttgacagtctactttgctcaatgtgtcacgtacacccaaactatttttctttgctcatgggctggatgggaattacccctcctccagtgcaatgtcatcatagactgtccatgacagatgatagcaaaaagcaggatcttagttcatctttaacagatgactctaaaaatgcacaagcacctctcgcattaactgaatcacatttggctacccttgcttcctcttctcaatctcctgaagctattaaacaattactagactcaggtttgccttctcttcttgtgaggagtctggctagtttctgctttagccacatttctagctcagaaagcattgcccagtcaatagatatttcccaggacaaactcaggcgccatcatgtcccacaacaatgtaataagatgcctatcacagccgacctagttgctcctattcttaggtttttgacagaagttggcaatagccatattatgaaagattggcttggtggttctgaagtcaatccactatggacagcacttctgtttttattgtgtcactctgggtccacttctggaagccataatttaggtgcacaacagaccagtgcaagatcagcttctctttcttcagctgctacaacaggactgactactcaacagcgcacagcaattgagaatgcaactgttgcgttctttctacagtgcatttcatgccatcctaataatcaaaagctgatggcacaggtaagacaaaaaaataacttacattttagttgttttattacataagaaagggccatgtataaaggccaggtaataataaatttagtgagggttgagtgcctttaaggatctgaatttaagctataaagtactgatatctcctttctccccctcaaaatatgctgtcactggaatcacttattctttatgatgagatgactagcagatgcattggg

SEQ ID NO: 93593 - DNA, 1988 bp, Homo sapiens
taacatacctagcatagagcctatatgagatatggtagacactagtaaataacttttctccttgttatttaatagtgctcattcaagtcaaactttagtagtacctagaaaaatagataatataatttttataaaatattgaaggagttagttttattaagaagaagggcaggtcgggtgctgtggcttatacctataatcccagctctttgggaagccaaggcgggtggaacacttgagcttagaagtttgaggccagttttgacaacatggcaaaacctcctgtctaccaaaaaaagaaatcataaccaaaattagccgggcatggtgatacgtgcctttggtctcagctactcaggaggcttgaggtgggaggatcacttgagcctaggaggttgaggctgtagtgagctgagatcacaccactgccctccatcctgggcgacagagcgagaccctgtctcaacaaaaacctaaacaaaacagaggaagaagagaaagatatttaactgcctgtagtaattaattactgggaaaatatctctgctaaatatgcattaaaaggaaatgcttaaattaccaacttcacccgagggcatgattctaggtatttgaaaatttggtttgtgcttctgggtagcatgaactctttgtgtcccattgatttctctcttggtttcttagtaaggctttatatacattttgggggtgaggtggggcaggatctctctctgttgcccaggcctgtagtgcagttgcacaatcagtgagccgtggctcactgaaactttcgggctcaagaagtcctgcctcagcctcccaagtagctgggactactggcacatgccaccatgcccagcttatttttttttggttgggggagtgggtagagacaggtttcaccacgttgcctaggctggtctggaattcctgggctcaaatgatctcttctcttagtttcccaaagttctgagattatcagcatgaccttggccttgttatatatttttaatatgctttttctcataatttttattttaagataaccacaccaatattgactaaagttaacgggagttcgttatgctaggtattcattatgtgcaaaccgtttagtactaattttttctaaccctggacacgtttcttacacttttatctcctttggtattcatatattttaagataaaatcatttctttcctccttaaaaaaaaaaaacttaactactagacccccagagacatttgttctttagctactgatttgatatgttaaaataaacttattcatattttctgtttcctttttatctttcaaaataaaaagctgcatataaatcttgcatttaactttttaaatattttgtcttgccaggttctttgtgaactatttcagacatctcctcaaagagggaaccttccaacatctgggaacatttcagggtttatacgaagattatttttacagttgatgctggaagatgagaaagtgacaatgtttcttcagtctccatgtccagtgagtatttaacacttaatcattggctgtgtatacatgtattttacaattttgtatcagagcctgcagttacctcctatgttctaacttcgagtatagcaaagtgaaactagcacagcctttatacctaatgacagaacttgacaatttcaggatagcgctctccctcatgcctaggaataacataattttaccttagcctgagaagtatagtttgatttgtggaaaaaaatgaaaaaaggtacagagtgataatgcaaaagttgaccaacaaatcatggcaactatgccatatctaaattaattatatcttgtaggatttattgagtattttattcttagatgcttttgagattattttataacaatatgtattccaaaaagttacttcctgatttctttgatttcttgattttcagctgtacaaaggtagaattaatgctactagccacgtcatccagcatccaa

SEQ ID NO: 93594 - DNA, 1627 bp, Homo sapiens
gctatagactgaatcttgagcttgagtcccatatttgccatatacagattatatcagtagcctttctaaggctgtttcttcattttgaaaataacattcatttctatgttgcgaggactgaattagatgcagttgccaagcacattgaactatggctaaaataaagcaagttttcatgctactggtttttcattgtttctggaggtggtaccattaaaatactgtatataatactttacagagattagatcttaaatattctggcttaagtacagtggtgagtcttcctcatcaatgtcagtaaagattgggtatcaggcctttacctcatgccatttctcctaaattcctttatattgccttagtattaaggataatattatcttgcataatctccctctgaaacatatattacttctcttcttaatgatttggaaaagcagtgtattttagataatatcttcttacagatactccaagtatcacagctaaattaattagtgaacaaaaagatgacaaagaaaagaaaaaccatgaagagaaagaaaaagttaaagcggaaaatggatttcaagacaattacagtgttgttgttgcctctggtatgctttctattttttataatcttgattttgtttgggtttctataaaatattagaattttagttacaggaaatttatgtaatacattgtactaatataaaaagctgactcgtaatgatgttttaatactagatttttatctttttatttttattttttttcactttccactaaataggttgtcatctgtatttcagagattatagcagctagctacagtttttactttttaggaaaatagttacagatgcaatgccaaaattatttatttgttgtcatgaaggacgaatagaattgggagattagatattggattagaaggaacatttctgttttctgacattagctaggaatgcatgccttattaaaatattttaggaacactgttttccttcatattagtgtgttgactatgtagaatcttactgatccttttcttttagggctgaagtctcaatctaaacgtgctgtgtcagctacaccacctcgcccaccatccaggagggggaggacaatacctgataaaataggaagtacttcaggagcagaggctgccaacaaaataattactgtcccagtgtttcacctgtttcacaaactcttggcaggtaatattcctcaatgaataaacgtcaaagaaattttagtagccttaaaactatgtaaatcagaggcacagtcaccaaaatcattttaatcaggtgccattgatgagatcagtgagttagtgagacttcttccatacagttcctccgaagagaagtgagagcaaaggaggagtaatctattacgtatcctttttaacactatcaagttatttatttctactttactggttttctaagtttttctgtcagtgtgccatgaaatgattgatgaaatagacatttagagagttcatgacaagttatttaggaaacaccgtggggcaaatttgtaggactagttcaagcagtagaactcttagaccactggtagttaagccatatgttcttcccagataaaacacatttattgagcacca

SEQ ID NO: 93595 - DNA, 1106 bp, Homo sapiens
aatacggtataaaattaccttaaggctatgtatataagggatgtgtgtatgtgtgtatacacacaaaaataaattttgtgtttccacttggatcccctccctaagataactcattgtgtacatgcaaatattagaaaatgcaaaaaaaagaaaaaaaaagaaatctgaaacagttctagtctcaagcattttggatgagggatacccatcctctattttatcaccattttcatgctgtattaaaatgaaattgccaactcagttcaaaggaatttttcttcttagctttacattgttgattcatggtggaggcgaacaaactatcgactggtgggttggataccttggtccagagaggtccttgtgacatatctcatggcccattacctaggtgatgtgagtcttgccttctgcctgcaataaagttttgttggaatgcagctatgcccatttactagtgtattgtccatagctgcttctctgctacaatgtagattagcagttgtaacagagactatatggcccccccaggttaaagtatttattagctgtccttttatagaaaaaaatgtcccacatcagatttatggaaatgtctgttcctttgtttacgttttgcccatgactttttaacactttcacagacattattgttcattattatatgtcagaaataaactcactttttgtaaactttccaatggctgttgaattttttaattgttttgaaattggtttcagaatcaaactcttgcctgtaatttagtaaaagcagataataattaaaccaagtaaatgtttctttctcggtttccagatttaacttagttatatcattttaggccagccattgccagctgaaatgacacttgcccagcttttaactctcctatatgaccgaaaacttcctcagggttaccgctcaatagatctgactgttaaattgggatcaagagttataacagaccccagtctatcaaaaacagattcttataaaagactacaccctgaaaaaggtatgtgcataatactactttaaaaattacagactgtcatacaaagaggcagagatttctatagctaatgacttaattgacttgtgtttt

SEQ ID NO: 93596 - DNA, 1080 bp, Homo sapiens
tatttgtaatttattgtctagatcatggagacttacttgctagctgtccagaagatgaggctctcactccaggtgatgaatgcatggatgggatactggatgaatctttgcttgaaacctgtccaattcagtcaccattacaagtttttgcaggaatgggtggactggctcttattgctgaaagactacccatgctatatccagaagtaattcaacaggtaagataagatttcctaatcgagtatatcattccatagctaagcccttcattctttttaatgtttgttttttaatgtacttggattaactttgtagaaataccctttgctttatattttttgaacattatataactctttcaatggtcagtctgtacagagcttcatgaccttcagtaggtatggaagaaatgttgaagatcaagcacacttgccagacttactacactgttgcatttatcttgatttcatggttgtaacactagcattctcttttctatgctgctttaagtgtgatatttattagagatattattggaaataggagaagtaaaatagcagtgtatactgccaccaatatatgtctttttgtttaccttttattcctgtttcaggtgccatttccatttttggtggtttaaaaacatgacctattcccgtgttcatttacgaagctgtcaatgtctgtgctttccatgctcttgtatcaatcagtaggaagtatggtgcatggagagttgtaaaaacaaaactttgtgtttgttgaatgaagtaggggaattattctctttgatttcatgtcgtgtgtgtgtgtgtgtgtgtgtgtgtgtgtgtgtgtggttattttggtatagtagctctagactctattatagtttcctgagctgctgtaccaaaataccacaaacgggctggcttaaaacaactgaaatttattctcaatagttgaggaggctgtaagtctgaaatcaagatatcagcagggccatgctccctctgaattcaggctgtagggaagactccttccttgcttcttcctggcttctattggttgccagtagttcttgctgttcattggttt

SEQ ID NO: 93597 - DNA, 1732 bp, Homo sapiens
ttggaagcttgtttttatttttatttatttttttgagatagttttgttgcccaggctggagtgcggtggtgtgatcttggctcactgtgccttccacctcctgggttcaagtgtttctcctgcctcagcctcctgagtagctgggactacaggtgtgcaccaccacacctggctaatttctgtatttttagtagagacggtgtttcaccgtgttggccaggctggtctcgagttcctgacctcaagtaatccacctgcctcagcctcccaaagtgctgggataacaggcgtgagccactgcgcccggctggaagcttgttttttaaagcaagcagctttattaatccttataatcctatattttaaagagatcatttaaagttaagtctttactttgaatctgatgttgaaaatgtgaatggccaagccaacacttttctttttctttaggtgagtgctccagttgtaacatctaccactcaggaaaagccgaaggatagcgatcagtttgaatgggtgaccattgaacagtcaggggagttagtttatgaagcaccagaaactgttgcggctgaacctccacctatcaagtcagcagtacagaccatgtctcccatacctgcccattctttggctgcttttggattatttcttcgtcttccgggctatgcggaagtgctactgaaagagagaaaacatgcccagtgccttcttcgattggtattgggagtgacagatgatggagaaggaagtaagtgtttagtattaaatttatcaacacatatgtgaataggttgtgtaaaggtatccagatcattgcctattattcatcatttatttccttcatagttaagctgttagatgatttgtaagtggtagctcacttccagtattagttatacataataaatcctaaagaatcttcattttcatctctgtgttcattcaaaaattattttccttgtgctgacaaaactgttgggcatcactggggggatgtaaacatgaagcagttatttagagctacccccaagtagctaatgttctccagtaatagaaacaagggatgtacataaacatgtatacttagcaagttataaaatcccttcagtactcttgagtgcagtattatggagaaacacacatgtgagattatttctttactactcagcaatgtgaatgaagtggcatggtagtttttagtggggccttgaaggacagattagatttaggttgggatgagttatctcagaaaataaatggaaagagcagtgttttgaggttaaaatgtatgagaggggataagttagcagatgaaaatttgcacaaaagggagcattgtgagcattttaaaagctaatattggtaacagatcatggaaaaaacgtactaaaaactttagattttattttgaatagcaataaaggtttattaaaatgtgttaagattagtgatgtgttgaatatagtttttttcagaaaatgaatctggtagcaatacttagattaaagagaacagaattaggaaaatgatgccataatatgtattaatgataacatagaataataagagaaagctgtgatgattgtttccattgggttggcattgttatttaatagaaaaactgaagaattacaggatagcctcacaagtagattttcatttgggtgacgtctgcattttcttttttctttcttcttcttttttttttttgcattttcacttactattt

SEQ ID NO: 93598 - DNA, 1047 bp, Homo sapiens
tacttgttcattatctgttcttggttaaagctactcccaagaaaagcagttactttcttactgttgtaagatactactaatgcttcttttctattgttcaggttttagtttaaattctagttcgtaataattttgacataatctatagctatgatcatacatatgtttccatttttttgaggtttatgtataccgtgtctgacagagtttttcctgatacttattcgttattaaattttaagatattactgttgtatttgtggtatttggttttctaaataatttagtggtatacttttgtattacagtgtcattattaatttatgaccctgtatgtaacttcttatgtgtttttaactgtttttaatcttgagtcctcttctttcttcaatctaggtcatattcttcaatctccatcagccaatgtgcttccaacccttcctttccacgtccttcgtagcttgtttagcactacacctttgacaactgatgatggtgtacttctaaggcggatggcattggaaattggagccttacacctcattcttgtctgtctctctgctttgagccaccattccccacgagttccaaactctagcgtgaatcaaactgaggtaggttcacttttaattatttcagttattaaaaaaactagatttaattagggagtacagaataaagtttttttctgaattaatctttcagagacttgggtgttccattttcacatctaaaaggatatttaaaacagaaattgtaaattaattgttttctctattagtcttcttcagtaaaccaaaaagaaacctatctacttgaaaagcagaaaagatttaagcgcttaataagctttcccatttaccaagatacactgaatttatactgtgatccttcttcctttcctttttgaacttttaagaataatactatagaatgggggttgtgggtggggatctagccagtgcaataagacaggaaattcaagaaagaaagaaaaaaattcctcattatttcaatatgatttaattgtattgtagaacataccag

SEQ ID NO: 93599 - DNA, 2471 bp, Homo sapiens
cctagctacttgggaggctgaggcaggtgaatctgtctgtgctcatgtatatcttcagtgggttagatatgatagtgcaataatattatttcttcccagatcaatccttaagtttgatacaattccagattcattttggaggaagtttacaagccaattataaaatgtatataaacatgcaaagggtcaggaatagctgagatatccttttgctatatttatcctaaaaagatctgctcatatctgtattcttttcactgttttctcaattcaattttgagtcattgactttttaggctctaaggtggtttatcccttcttttcttgataaatatttgaaaatttgtatttatttatgtgtttattgattcattcattcttaaatataagcagtttctctccatttaccccttcccccagcccctggcaattaccagtctgcattctgtctccatgcatttacctattttggatattgcatataaattgaatcatgtaatgtgttgttccttgcgtctgtcttctttcatttagtataatgttttctaggtttattcgtgtagcgtatatcagtacttcatttcttcttatggctcaataaatatcctgtttgttgatccattcatcggttggcatctaggctattttcatcttttgttttaaatggtgctgctgtaaacgtgtgtgtctatttcagcaccagtttttatctgttttaatactagaagtagaattgctgggtcatacagaaaatctgtgttcaatttttttgagcagccaccaaactgttttccatagtagcttcatcattttactttcccagtgataaatatttttgaagataagcaaaaacaaattgtaatggattttcattttttgttattttaagccacaggtgtcaagctctcataaccctacatcaacagaagaacaacagttatattgggccaaagggactggctttggaacaggctctacagcttctgggtgggatgtggaacaagccttaactaagcaaaggctggaagaggaacatgttacctgccttctgcaggtatatttgtaaacttgatattgttcatgataatggctttttttttgtatttattattttaaaatattgataactaatccaactttcctcagctatgtttatgcccacttgtggtccttcttcccagtgcattctaagataccactggataaagattgttcttgcttacttgtgactctgtatttcttccctctcaactagcttcttcactgagaggaaagtggcagggatgaaattatccagtagctggaagatgcatcttcctacaggcattttcttgtttaatgtgttgtatctggccttttttttttttttaagtgttatttatttatatgcattttggttgcttacttttttttttttttttttttttgagacggagctcactctgtggcccaggctggagtgcagtggcgtgatctcagctcactgcaaccttcacctcccaggttcacggttgcttacattttttaaaataacttttcagccgggcgtggtggctcatgcctgttatcccagcactttgagaggctgaggtgggtggatcacctgaggtcaggagtttgagaccagcctggcaaacatggtgaaacctgcctctactaataaatagaaagattagctgggcttggtggcacatgcctgtaatcccagctactcaggaggctgaggcaggagaatcacttaaacccgggaggcagaggtcgcagcgagccaagattgcaccattgcactccagcctgggcgataagagtgaaactcggtctcaaaaaaatgaatagataaataaataacttttctagattcaggcaagttggacaagaatagaaagtctttataccacagaaatgtataggggaaataatgaaaaggttagctttgcttcctgcatcagctaattgaagttcgtcagtgctttgaatgtgtcttctgcaactctagaatgctccttctagtataaagttctaagattttgttaccttcaaactgtgaattgagtctattcaataaaatatgtaaataatacagagttgctactacattttttatgttcgtagttgtattgcttttatatgtctagtcatatgtagtgtaccatcctttgtaagcaacactctcagacaaaacagatccttctcttttgaaaatttaaacaaataattattttaaaacatagtataagatactgattaagtagaaaatatgtactcttagtattcagattgaatttctaacctacaataaaaacttttgaagtatgtgaaactgaaatccaaattaatttcaacaatttttaggttcttgccagttacataaatcccgtcagtagtgcggtaaatggagaagctcagtcatctcatgagactagagggcagaacagtaatgcccttccttctgtacttctcgagcttctcag

SEQ ID NO: 93600 - DNA, 2074 bp, Homo sapiens
ctgaattttgaagcatttatactgttaatggaagtttactcctttttcagttaccttttgagtaaattaatgtcatttaccgtatttactgtatttactttgctttttctcacttattttttaagaacctatgacttaagaaatagtgtagatcaaaagatcatagagaattggtcactggaagaataattcttgttagtctttgcctatgagggagaaatcaccttgtgaaggaattctgactttgttggcttaatgtgttgtcattatcactttattcatttattttaatagcttttggcatacaaatggtttttgattacatgggtgaattatatggtggtgatggctcattgccaggcagtcagaatcataaattatagaaaagatgaaatgaagagccagttggtagagataaaaagttgtagactcatacaactctgttactagtaatggaaaatgtaaaggtatattttctttgatagtgtgatattttttcttttgtagagaagagaatagtgttgtatttggtcccctcctatcttgtggccccccccagaatctttctcactggtaaccaaggaagctagtgtaataatataacaatagtgtggtatcataattgaactgaacatctgattgtctcattgagctaatgcctccttgagaagtgtctactaaaacatcttattcccttccctggccatctgtgttgcttattcttgtagaataaacatagttttcagtatatcaatatgtataatatatactgagctttgaaactgccatcatgtctttttaggggaatcttgccctgtatttctgtaccttacatttctgtgttttgagatgactctgttagcttataactaaaattgaaaatttataaaaccttgagtgttttttacccaggtatattttgtcttttagatgaaaaattgcataatgatttggaatgttgttttaggtttagccttgattaaaaacagtatcacacatttatagtgttacaaagtgaaaataaaaccagtaaataataatatccttctttaaactgtgtatttccttatgctataatttctattagatcctgcaaaaatggagttatagagtattgaattctaaggtaattatagaatattcttattgcaggaaatttggacacctatagtgcctctttggtctatttgcttttcttagcttaatctatttcctgttcacataacactgtataattttttgagaaaggaatcttctttataaaaatacaccagttaattcaccatgaaaatttaatttcagatagaggataactgagtttcaattaactggagctctttatttttctatttgattaaccggatgaaattattccatttaaattcttttattcttcagccagagaacattcttcagacttataaactatgtaccaacaaaatatgcatgtgaagatataatgagtgttcgtaaagctcatttcattagattattttatctttacagtgaccgtgtgcagtacatatttttagtaattctttttactgataaacattattatattttgcattaagacttgaatatactttttcgttgaaaccctcatggtctctgctaatctgtgcagcctctgttataagacggcaccggtaaagactaataatgttactacatctctactttcaaggtttaccatatagagaattcattttcagcttcacagagagagtaaaatctattcttttccagttgtcacaacttaagatgtatttttttttctaacagagttcacaaaataatccatttttcccttacagtgtatacccacagaaagtggccttagtttaattttaacactgactcaaagctccccaccccacctgtctgcctcattcccaactgtatttcacaaaaatcctagaatactctgagaagagaatgattcaggaaaatgtgttctgttaatgtatcactttcagggtctattttagtgttttttgagggtttggagctgtaactttaaaaatgctgtgtatcacggccgggtgcagtggctcacggctgtaatcccagc

SEQ ID NO: 93601 - DNA, 1689 bp, Homo sapiens
tgaaatctatcctgaggccactgcctaaacccaattaattttgatctgataattcagagaatggaggagattccataggtttgtgcgcccccaagcccaaaacccttacaagaggagataaaaagacatcattaagaatctggatcccagtgccagcactttgggaggcttaggtgggacgatcacttgaagccgggagttcaagaccagccttggcaacatagggagaccctgtctctacaaaacataaaaataaattagtcaatatcgtgggctgcacctgtagtcctagctgctcaggaggttgaggtgggaggatcgcttgagactaggattttgaggttacagtgagctatgattttaccactgcattctatcctgggcgacagagtgagacccactctgcatgtgtaagaacaaaaataaagaaaataaaaaagaaagctggaaaggcttatcatttaccttacatttatctaatttgtaacatattcatgattataagaaattcatgattaacactgataggtgagatctggcctggtcacaaaatcattactgatgcattcacttaacagattttttttttaatgtctgtgggcacataactagaaaattggtcttctttctaaggggctgacatataaatgggggaaataataaccaggcaggtttttttttttttttttggacagagtctcgctctctcggccaggctggagtgcagtggcttgatctcggctcactgcaacctccgtctcctggtttcaagcaattctcttgcttcagcctcccgagtagctgggattacaggcgtgtgtcaccacgcccagctaatttttgtatttttagtagagacggggtttcaccatgttggccaggctggtcacaaactcctgacctcaggtaatccgcccgcctcagcctcccaaagttctgggagtacatacaggtgtgagccactgcgctgggccaacctggcagttgtaacaacatagtatctgacatattagtagaattcaagacactacaggaaaatcaatccagatttggaggcctaaaggatacataggaattaaccaagaatagagtacaaatgaagaggggcaagggattggtgtcccaagggtatgaaaacaatgttagcagtgaaggaaagcatcacatattcaggggaccttgaaaagtttggtgtgcctgagcatagtgtagctggaaggtagtggtgggagatgagcctggagaggaaatcaggggctagaagataaacaggaatatatcacagagttacttaccttaaaagtaatgttgagccactgaaaggttttcagcagctctcatcaggtttgcattatagaaagatggtcttcaggtgtagttgaatggttggaggggaagttggaacaagaccaaactaccatggaagagactttcatctgttttgtctcagcagatagagctgtatatgtcttctccctgtcctactgttttgggggactgagattttggtactcatcagcactcttgctctcatattatggacttaatagatagttagtttccaggtagaaatatattccatgctccagatatttgtcttaaaaagcaatctgtgttcatattggcaactgcagatttatctctagggatctccttcaatagagtacaagtgccatagcataaatggat

SEQ ID NO: 93602 - DNA, 1636 bp, Homo sapiens
agtgagccaagatctgccattgcactccagcctggacaacaagagtgaaactccgtctcaataaataaataaataagatttttctgaaattttcttaattattgatggatgtacttttctactgtcttttcaagatgatttggtatccactttcgtagattagggcaatgtcttggtgataaaatggcattaccaaaagaagccccctgctcccacacacacagtattattttccatttcctgcattttattgtggtttaatgtaccctatatttctaatatctttagctcctttgtcaagaagagatggttaaaggatttatgcagcagtacttgatatttaaagagtaagcaaaaacactccccatttatgagtattgttcaacattttattttagactgttagaaaagacagaacttgaaagtaactctcagttacctccactaataaagggatttctggcgtggataacataatactttaaatctgtacatacatattgtttttacttgaatttaaatattattatctattgtgaaaattcattctgttacccacaaaatagtcactctgtgaagatgggaccctttagcatttacaagttagttctggtgaaatttatctcctgctggtcattccagctggtattatcttaagatgaaattaaaatatagccatagtagttttacttttgaataaatatggtatttcatagcttccttcaagcaggaacaaagccttttttttatatctgatcttttgtgcagactttttctgctgtactccaataagcaaaaatcgtatttagtgtagttggtatttgatggtttcaccaaaaatttgagagagaaacttattgtgaataaaaaaatcttatttgctgccagggcatgacacaaatgactctatgttcagtgtaaagtgttctggatatttaacttctctttgaacagcattgaagcaagcatcttttattgccgtttttcctagctatctcaaagtttcttcctaatggaaagttgttcatcatagttttaaataactgaagtcacttgtacaagtaccccacttcctttttatatacctaagcaatgggagatcacttgatttacatctttcaaggcatattttctaccagactcttttattttaacccccataagctggatcttctagcactttagttaaaaaaaatttcagttccagccctcctactttgatttctgttgaaaaacactcttttacctctgcttcttatacctaaaaatgaaaaagtcctgatttcttagccagatagcatttgttatacccatatatttctttaaacattcctgtttttgatggtggtaaacaagttcagttgtttgtcagtcttttttcacacagataggcaaatatttattttaacatctcttctttgactggctcagttgggttgtcccctggtaaactgctgaaacatattatttgtggcaactctatttaacagtagcatgcagtaccttccgtatgtctggtgatgtttaatttggcctaaaaattagtatatttgtgtctagtatagaaatcaaggttttatttttaaaggcttcttataactattttaagtattcccttctttcatgctcacttatg

SEQ ID NO: 93603 - DNA, 1194 bp, Homo sapiens
agcacagtgtgatcagtgctttttggtaaatgtagaagtttcattctcttatagttttagaatcttcttctgcagtgctaattcttaatagttgtgaatctacatttcagcatgtagtctccagataacttcttcaaatggctctccttttttaaatgtttattgcaactttgcagtatgtttagcttagatttaggagtgcaaagggttaaaggggtcttgttttatcaaggaaatagctgtattaagctgttttcagtttttggattataaaataccataattctgacatggtgtatttagtcttactaatactcaactttatttgggcggtagatactggtagaggcagttcaatataattgaatgttgaggtatgggtttgcttttttgttttgttttcaggagaaagatttgcccattttgctcacatcctacttcagatatgtgtcacagagccaaaatttgtttaactaattagctatttagttggaattcacagcatagtggaaaatgtttgcagataattctgtgcaatagtggaaacttcagttgcttcctcgtatttcttcagggcagtgatcacaaccagattcaacgtatgcacaaagcagcggataccatggtagcggccgtcgctgattgcttttaccatgttggatccattgtcagtctcaaagacctacttccagctaggtgccttgaactcaaatagcttttcacacagacttcaggatgtgagctaaggtatggccttttttcatgagctgggcctacatatgggttgacagtaacctgcaacttttatagaaaagagactactggctatagtttaatgtcagacaatgactagttagaatcattgataggcaggtagtgtgtgttcttcatatattcaaagtattctcaccatttagagattttctttttttcggtgtgtttttgtcagactattcaagtaaagatttctcattagaacctggtcaaaggtctaatatatatctgctttatgattcaaccattgtcttcaatatgaaatatatatcatttctttcacacatttgatgtaaagaatttttttaaacttctgaggattcttgcacaattatttttcttttactttttcttaattatggtaaaaaaataaaatttatcatcctaaccttgtgtactattttaataatctcttactaa

SEQ ID NO: 93604 - DNA, 1914 bp, Homo sapiens
gcctatttgttaaggattcttctactgtctgttactctttttatagttctctaaggctccatgaccactttgcgagatagtattttaatgtaatgaccaagtccctttttaggtaggtatacaactaaaaaaataagtgatgtatagtttagatcataccttagcataaatattttaaacacttttatttatatacgattttagtttgtttcaaatgatctatttaaagaattataaagatgtagatttttgaaattctaagcagtagtgtaaagatgtttgtgatgtcaataatgtgctgagagttggaatagagaaaaggaaataatgtttagttgtgttttcagtgactcttgtattaaactactagtacatttatctagaaaatttaaataaaaatgtaatgtcctatatacttaaaccttgctgtaatacatcctattgtgataacaatgtgaaatgaaattgggtacattttagatcctgataggaaataacagaataatatctttaaaatgaatatgccctaaaacttagtgtctcattaaaagatccaatgtatagaaacacattgtattaagacacccagtaatgaacctacattttactctaaaatatgtttttttttcttggaaatttaattctgagtgaaatacaaatagtattaaaatttaaaaactgcttgtggtcctttaattctcaaatattttaggtgtagaagtgatttctgtctctgaatatttataattatgtgtgtttttaaaagtgtgtctctgaggacatcaggtatctggatcttttacagtatgacatttatataatgtctgtctcttctctgattttatattagaagggaaaacctacccataactttactagccagtggcttcaaaagcaagttaatatagatcatgtgtgtgacaaatgaaatgcacacactcatttgtatattgatttatggaggtgttttagtcctaaaatcttaattttccttgcttttctttccatattaaaaaaattcagatctaaaagggaaaatgttaaaacaggagtaaaaccagatgcgtctgatcaagaaccagaaggacttactcttttggtaccagacatccaaaagactgctgagatagtttatgcagccaccaccagtttgcggcaagcaaatcagggtacaaaacttttcctattatgccacttttcatttgatgtaaagatgtttcatttacttactgaaacctgcctttgtgtttttgctttatgttaatgattttaaagcaagttcatttacctaaaaattttgttctctgttagattttgttctttatctgatttcaatcatgtatagtctaatttttaaacatttctactatatatgattgctaaatttagtaggctgagaacatacattataaatatttcttccccctgaaattcatgaaattgaaaaaatgcctttatattagatagaaaatagtacattaagactatgggtgagaatttagtttaaattgatatctctggctggcgcagtgactcacgcctttaacccccccagcactttgggaggactaaatggatagatcacttgagctcaggagttcaagatcagcttgggcaacatggtgaaaccccgtctctacgaaatacaggaaacattaggtgggcataatggcgtgtgcctgtggtcccggctacctggaaggctgaagtgggagaattacctgagcctgggaagttgaggttgcaattagctgtaattgcaccactgtactccaagcctgggagacagagtaatactctgtttccagatagatggatggatggatggatggatggatggacggatggatagatattttcctatgttagctgaagaaagtgatctgaattatctattgtttcacttcctctttt

SEQ ID NO: 93605 - DNA, 1022 bp, Homo sapiens
aaaaaaaaaaaaaaaatagtacatggctagttttatgctccttaagaacagtttgagcagaatgttgctatgagttgtttaaactcataaaacaactaaaaaaaaaataaactaaactaaaaaaacgaaatttttttagcattttttggaaatagattcttcatatctattattattattatcatctatcttcatatctattattattcaagaattcaagagtaaaaacagatgtgtaagtattacttatggctctattgtgcctaattttattttgcctttataatgaaatatttcaatgttataatcataaacattgattttattgtgatagaaatttgtggaaacacatattaaagaagagtctttgtggataaagcaggatatcagttaacccacagtaaaaatgtcccatcatagctgttcttttcctttattctttaggtgttggtgtctgtccagtcccttatattagtagctgagccttattttaatgaaccgggatatgaacggtctagaggcactcccagtggcacacagagttctcgagaatatgatggaaacattcgacaagcaacagttaagtgggcaatgctagaacaaatcagaaacccttcaccatgttttaaagaggtatgttcaataaaattagtgaaatactttgttaaagacattttacaatataggctgggcatggtggctcatgcctgtaatctcagcactttgggaggtcaaggcaggtggatcacttcaggtcaggagtctgagaccagcctggccaatatggcgaaaccgcatttctacttaaaaaaagaaaaagataaattagccaggcatggtggcaggcgcctgtaatctcagctacttggaacgtgaggttgaacctgggaggcggaagttgcagagagctgagactgcaccactgcactccagcctgggtgacagcagagcaagactccatctccaaaaaaaaaaaaaaaaaaaaaaaaagacattttaaaatatagtttgttagtattcta

SEQ ID NO: 93606 - DNA, 1051 bp, Homo sapiens
cctgccttgatctcccagaatgctgggattacaggcgtgagccaccacaccgggccataaatttcatatatttcaacacgtcatatcaaatcatgagcttgatttttccctgctaatattgtagagttgattaaattgcctttttttttttgtttgagatggaggcttgctctgtcgcccaggctggagtgcagtggcgcgaccttggctcactgcaagctccacctcccgggttcacgccattctcttgcctcagcctcccaaattgagttttatggatagaaaaacattgcagtgtctgtatatttatttcattaaatgtatttataataatattctaaatattaatttaaatgtatttatagaataaattatttaaatgtatttataatacattttacttctttgtaatgtcatttactgtgtcttttaaatttgactgtaaacactgcttgttctcctgtttactttttctcaaggtaatacacaaacatttttacttgaaaagagttgagataatggcccaatgtgaggagtggattgcggatatccagcagtacagcagtgataagcgggtaggcaggactatgtctcaccatgcagcagctctcaaggtgagtaagcctctctaacaggagccttgttgctttaagagttgtgtaattattgacagaaccatgcctaccagaagataatgggagggagggaattaaagaaacataatatgtattttcagttcagaggaataaattgttactcagaagtctatagaaaagatacatttttttttggtagtagattgacagttcctaaaataaaaagtgggtccaaggactgagacaacagagttttgtaaagttccttgaagataatgatgacaagatgtgctccatgaatgccttttcctttttctttttttcttttgagactggatttcattctgttgtcccagcctagagtgcagtggtggcatcatgactctctgtaaccttgaactcctgggctcaagcagtcctcccacctcagcttcccatgtagctaggactacagg

SEQ ID NO: 93607 - DNA, 1496 bp, Homo sapiens
gtgctagagggtttgcagttctaacattagtccttttctcctgcatagcgtcacactgctcagctccgcgaagagttgctgaaacttccctgccctgaaggcttggatcctgacactgacgatgccccagaggtgtgcagagccacaacaggtgctgaggagactctaatgcatgatcaggttaaacccagcagcagcaaagaactccccagtgacttccagttatgagctgcattgatgtggacttcatagacacaaaggcttcgaagcacaagccaaatatgtcaatatttgtatgtaagaaactaattatgtaataggtaatgaaactgaaactatactatgcccttaaggagatccagtttaattcaaggtgatcttttatttacctgtacaggagtgtaaacttttttgtgcttttatttttcaattgtgagaaccactgattggtatgttcaacaaatttgtgtatacaaagaaatggataaatcactgctatataagggaaactaccttaggaaagaatgtttactgaatgtttattttattttattttttttttactatagagtgaggggttgttaacaaagaatatatattggtcattcttacaactactatttaaagtcagcaacttttcactgaatttgatagattttatgtttggccatatcttcatgctcacatttgatttctgaagacctcctacatacacttcaataaaagttaaatggacatactccctcttttttgatttactggtacatttttaaaataataaatctgccataaaatgcattatatctggagacttgcacttgtatggatgaatttattacattcaacatatttaattttatgccttctaattctaagatgcagaaaaaaataaatgaacatgattttattctatgccaacatttgggcctctgaatgtatctgttatttgaatttaagtatttgaaaaggaatggtcaatttgaaagtcattctaaactgattttttttttctaaagggctccttttttcctggactatgtggttttatgactaaagtcacatgtatgtattaaacattgaggctctgtagaggagagaggatgtacctctctggtgctgttacagtacattctgtacctgccatacaggctcattttcatgcaaattcttcctagagccaaataaataaagacttaggtgaattagtatgtcttgtttctaaacccctttgccatggtgtgaaatgctatttctataaagaattgaacactttcaagacttaagcatgggaaaacaaagcatgtttttccaagaccagttgccgcaggggaaaggctaaggtgattctttgacagtatttttataaaataaaagtggcggctgtgcgcggtggctcacgcctgtaatcccagcactttgggaggccaaggcaggcgggtctcctgatgtcaggagttcgagacaagcctggccaatgcgatgaaatcatgtctcta

SEQ ID NO: 93608 - DNA, 1012 bp, Homo sapiens
agccaccgcgcccagcctaggaggcaaagattaattcttgtgagcaatgaatatttaccagagagataaagagttaaaaggcacatgcactggcacatctggttgtgggatttaggctggacccaaaagagtaataatgaacagtgtagtgtgtaagtactctgtgtgtatgtgtgtgtgtgtgggcacttgtgtgacacagtaggtgcttccagtgacaggaagtttgaactttggtggcctggaaaactttcctagaagaagttagacttgagctgattttggattaaagggtaagactaacaagtggagaagagttcaacaggcgatatcacaagtgcaaagtgtggaggcaggaatacgcatgggacattagggaaacaatgagtaaaccagcgctcttggagtgacttttcaagaagagaaaataatggaggtagaaagaaccagattgtgaaaagttttagaaccttgactaaggaaacttttgtattgtcagtaggaatctttgtgaatttcccagcaaaagactaaatacctattaatgaggaatattatttctggggctgacttccactttggggctcatagtcagtatgagtgagctgctaattctaggagagagaatgtttgtagaatgatggaaatttactgagtgccttgtgactgacatacagtaatcattctaagtctatagattgtttttgcacactaaaatggtagatttacctaatagtgttatcctttacggtatgaaaaataattttttttggattaccgcactaattttttatattacagagagtggatctttcctacaattgctactggaagggaactatgaagccatattcttaaattcaatgactcaaaatatttttaattcaacaacaaccgctgaagaaaagattgatagctacctggagaagcaggtagtaacattcctggattactcaacagatttggacacaacggaaaggtagaattttatttgaaattttcatagaggaac

SEQ ID NO: 93609 - DNA, 1017 bp, Homo sapiens
gccaccgtgcccggcccagttatttcatttcataattgatgaaactgaggcttcatcaggaaaacaattgtgggaaaaatttacatgtgctcacaaactaatgagaagcagagaaaggacactgtcctgtgcatgtgacattggaacccatgttcctgatgggtgaagattcttgctcgctattgtatggagctgttaaaattctgccatccaaattttaacaaccttgtccattgtaaaaaaatctctgtacaacaggagagtgcatttttcaaaggcatccttttttttttcagccttctgctcactctggtgtgtggtcatatgcccattctgcatttgatgcatgagaccttgttgattgtttggcttgatagaaattatggagtagagacttacttcataatgacattttccaggtattgaagcttaagtgaaatgtaggtgtttaatataaatatcaaatacactatttactataaatactttaatatagggatgcttttcattgagataatattttgttgtaagtgaatttatgaagtgatgatatctcttcaatgctagcattttttttgagttccttgtttctctaaagtttgaacatgccaggcgcagaagctttcacctgtaatcccagcactttgggagaccaaggcaggggatcacttaaggtcaggaattcgagaccaacctggccaacatggtgaaaccccatctctacttaaaatacaaaaacttagctggatgtggtggtgcgtgcctggagtcccagctattcgcccaggcaggaggatcacttgagcccgggagatggaagttgcagtgagccaagatcacgccactgcactccagcctgggcaacagagtgagactcccatctcaaaacaaaaacaaaaacaaaaacaaaacaccaaaaacccaaaaaatcaagtttgatcagatgggtggccatccatcagggcaggctggatttatagatgtctaagggcatttgcagtgttataattctgtcca

SEQ ID NO: 93610 - DNA, 1027 bp, Homo sapiens
agcctggtacctcagttggaaatgcagaaatcacctgccttctgccttgatttcgctgggagctggagacgggagctgttcctattggccatcttgacagccaccccctatttatgtatgtatgtatgtatgtatgtatgtatgtatgtatgtatgtatttatttatttatttatttggagacgggttcttgctctgtcgctcaggctggagtgcagtggtgcgatctcagctcactacaatctctgcctcttgggttgaagcgattctcctgcctcagcctcctgagtagctgggactacaggcgcatgccactatgcccggctaatttttgtatctttagtagagatggggtttcaccatgttggtcaggctggtctcgaactcctgaccttgtgatccgcccacctcggcctcgcaaggtacagggattacaggcgtgagccactgcgcccgtccccccactattttttttttttggcattgttaagacaaacccgctgagaaagagcaaggttatgaatcatatctcccaggattgtgtggaataaaggagatagtgtacataatgtccttagctcatgtctggagcatataagtgctcagataatgctggctggtaactattagtgttactgtattcctcaggtcttatgtttaaaattatttaacaacagagactatgtactatatactttatgtattatagactctattttacacattaatatatttttcttctcatcataacttttaatgttttatcttttgtcttgcagtgatgaaactacagaatctgtttgtagatgattcaggtcgatatttggctattcaattccatctggaatgtgcatatgtgtttttatattattatgagtacagaaaagcaaaagatcagttggatattgctaaggacatcagccaattacaaattgatttgacaggtaagacttattttttgtggataattgattttatttttatgataaaactatatacattggcagtttgtattgtatgttggtatt

SEQ ID NO: 93611 - DNA, 1069 bp, Homo sapiens
agactttctagactggtctttgtaatcaaggatctttgtaatctgaccttgtccagagagtggatgttggaacttttgcttttcttaaagtggtttgaaaacagctattctgcagtaagttatttcagagacataatgaaaaaattttggtcttacatgaagtcagatagtgtaataaactgttgatatagaaccaaaagatcctggctttaagctctggttctgatgctgagaagccctgtgatcatgaacaaatgactgtattctttagaacttttgtttctgtcatctgtgaaaaagagataataatagttcttctacctacaacactcaatgtgttactttttttttttttttttaaagggtggtagtttgatgcaaaaattagtatgtggactgtagtggcagaaatcctgggtttgagtcctggtaccagagcttgttggctttctaattttataagtcatttaaaacctgaggctgggcctcaggactttcttatgtgaaatggagaaaataccttgtaaactctaaagcactctgaaaatattactcttcatgactgtacagtagatctcatgggtaagtcagtagatataattttattgttttttcaggtgctttgggaaaaagaacacggttccaggaaaattatgtggcacaactgattctagatgtaagaagggaaggggatgtcctttcaaattgtgaattcactccagcacccactcctcaggaacatttaaccaaggcaagtaggacattaagttattaaattcaattaacacctgagtctaagaatttcaatagctgagtaccatagaaacactgaatgggttggggacagacttcattttattctttcttttgccttttaaaggttgctgagtcagggagaactggtgtttaactggtgtttttttttcctaacctgtgatagaaaaaactggtgttttttttttcctaacctgtatatagagataaatactgtttttcttctaggattcaataactatgaattaatgatgcagttagttatgtattacccctcttgaagaaatacgaaagg

SEQ ID NO: 93612 - DNA, 1010 bp, Homo sapiens
agtgtttatcatagtacattttgtccctgttttcacttatccagtactttcattttgcttcccactacacttgtgatcatattggatgatttctactatgttctctgggtaatggtggtcacagctttctctggggttaggtttcagtgtgtgcatattcagttttgatataggccagtctttgttaagatgccccttctaggaatgcattttcattaaaattggaaactccctaccctaacaaatgccagaaagcattctcatatgttttagaatgatttctgtaatacaaattgagaaaaagagaactttttgttaactgggaagattttcaaatctgtgtttaactgtaccctgatattttggaagaattaattttgtcctattcagaatgagatcacctagcttatctcttttctatgatttttttcttcccgcttctatcagtgtttgctttcacaaccaaagttctgggccattcagacatcagccttgatcctccggacaaaacttgagaaaggaagtactcgccgagtggaacgggcaatgaggcagacacaggtaagaattaatgtggcaatttgtgtgcttcttccaactctctattgctatcagtaagcatacatgtttgctatgaatgaaggaatgaaatggcttacatttcactcaaataatttgttactgtttagagaataagttctataatttaacttcttggttccaaagcccagctctgtgacttagcagctctgtgaactcggtatttaacctctccaaacctcattttcatcatctgtaaaagaggttaataataataacagcacttaggctgggcgcggtggctcacgcctgtgatcccaccactttgggaggccaaggcaggtggatcatgaggtgaggagtttgagaccagcctggccaacatggtgaaaccccgtctctactgaaaatacaaaaattagccaggcgtggtggtgggtgcctgtaatcccagccactcgggaggctga

SEQ ID NO: 93613 - DNA, 1810 bp, Homo sapiens
cccaaagtgctgggattacaggcgtgaaccaccgcgcccggccaggactgcctcttaaagttcatcttttcagcctgtaatcacaaaaagaggatctaggttctcccatctcccattagtagacccagttcctaccaacccataccctaaagtctgtcgtttctggggcagaagcaataactgagcatctccttgatcaggccacaccctgtctcccatatttttggatttatgtgtaaataagacagttaaatagagttctcagtatttttccaatgagaagctgctttcaattttgacacatctgacattgatcacatagttttacagaaggttttaataaagttgccaactgtggtctttggagtctgacaggctcacctatttcatcgccttatgactttgggcaagtcatttttatctctcacagcaacagtgttctatgtatgaggaaagactgggttcacaataagtttaatgatggtgttgatacttactaggtgtgttaacagttttaattgttattctccctgttcccattggcaattttcttgggcttggaggtttgagatggcaatgagcttgactagtctatttgtaaattacagctgaattgactgcagactcctgttagagaaagctgtttggctcaactattggattatatacatatttttataataaattccatcttcctatacacacacacacacacacacacacgtacaaagattgcacagcaaagccagcataaagtgatatggcatatgatcagtcataacttttagattatcagctaatttctacctgacccttcaaaaagccaatgaacacgtagatgtcatgctagtgagaatggatagctttcaggaaaagggtaggtcctttgggactatctctattcttttgaaaacgtgtgccatacttttagatgagaacatataaataagtctaaatcataccagacatttttcagaattgtccttttttactaaatcattctccatgtgctaattttaaaatgtagttttgatcttctctagtttttttctgggaaattccttctctgttgaaaacagagcattgaaaggagaggggacatcattgctttcttgggttttattccccattccatagagatatcccttgacctgtgacactgtggctcctggaagatttgggaattgttattgcatggggttagggggtctttatgcacaaatacatattctcaaaggacactgaaagtataaatgtctttaggcggagttagggagtaaatggcattaaaagggagtcttaaaacttgaaaacagtctcatatcacagtagtccatgcaacatgaagtcacctctggtatatccagcccctacttctggaccgcgccccaggggcctcctctctctctgcttgttaccttttacgtttattcacatctcttcagtcatccacctagagtagactgtcttgcttcaaactgcccttaatgattggtttagggtatatttgcttcttctccccctgtctccatttttgacattatcatctttccttaaagaccacctcctcataccactttttacttatgactaagccctaaaattaatgaaatttagaaactggaaagagaaaatgggtaagtgcaagggtaggacacactgctttggagaccatttacctaaatttctgggcgtgtgtgaaagcttgcgaggtacttctatctcatggagcacattgtttatattcgcattcatgcacataaatacctcaatagtagtgaggcttcacgtgcattcagtcccattctca

SEQ ID NO: 93614 - DNA, 1030 bp, Homo sapiens
ataaatgtatctcccagccagtgtaaaatagagaactttcaatttaggagaagcctccctgctcagaaactggtctccctgtcttagatttttaccaggacatggtagattcccgtcctttttttttctcctgaggcttggacttgctcccttttttactattttttgaaattttccatttaaaaaattaattttgtaaaaattttaaacagtttccaagttaccaaaaagttgcaagaacagtgcaactgtcttttgcatcccgaagttttggagagtaagttgccaacatggtgcttcatcatcctcaaatatgagaacgacattctcctacataacccagtatgcataataacatcaggaaattaacattgacttttcactaccgtctaatcctcataagagaggcctgtgaaaactagtcaactggcaaaaaaagaaaatttgagtactgcattgtagaaaaaagatcatgataattctcagttgagagtaggtataagtgtataataccagaaaaatatgtacacttaatgtaaactgaatggcaaatgaagaggcaggagaaaatgatcatgataatggggctgctgtccacatgcttctctagcaatcccacaatgtgtcttcattcgctttgatgctgaatacatgagctcttctatgacgaatcatttgaccactggatagctccagctttgagtttgcagttggccctggtaccttgtctcaaagtcagctattttggtcttgttggtctgcttcttgatgtagcttctgagagtttagttattcagtaccattgtagaaatttcagtacatcagagggattctttcatgtatgtgggttgcagctgcccactgcactgtatagatggtctcacatgagtgaatgtccagccttattgctctgttgctgaagagtgagagaacttgctctctgtgatcaaataggctactttttcctttcattttattcctgagcaaataatcctacatagagttcttcatgtaatttttctctgattta

SEQ ID NO: 93615 - DNA, 1222 bp, Homo sapiens
ttatttttacttgatttttctagcgccaacttgcaagtttgctctttgagttgggatgtaccagttcagcccttcagatatttgaaaagctagaaatgtgggaagatgttgtcatttgttatgaaagagccgggcagcacggaaaggtatgtaatagtccaatttgatgtactggtgagagccttccctctgggagcatcttctcacttgttttgtttttcaaacccacttttgccaatattcacttatattccttttttcactttttttccagaaaacttttaaatgttttctctgatttccactggggcagatttttacaaaatttttaagaaagactaacaagagctttgaagacgtgggattttgatttctttcctttactcaccttctcccttaggatgacttcaaagcgaaatatttggaatcattttaatgatcactgggttgcctgatgatcagatgctgtgggcctcaatggaggttccctaggagagagggtgagagcagctgggttggtctttaaaagaaaatccaaagggtgtgacgacacctcttgaggcagaagagttgtcaagtgtgtaatgcacatttaattctacccttaaattgggccaggagggaaaatgttgcaatatttgcatctgttatttgtctgttgtttttttcccctcatacatgaacagaattttaagaagaataaggggctctgcattgttagtcactttaaaaactgacacattgaaatcatatgttaaattttggattaaaaatttaaaagacttaagttgagtacataagcaagcagagtaaagcccacaaattggatcatttatacctacagtcaaccttttgccatcaccctaaaaaagagcaatagtggttcaagcatgtgtttttcttaaataccttcctaagtatgtctattttagattaatagtgaaagttgcatttctttcactaatcagttaatggcagtgaaggtctttgaattgtattgacttaaggagaaaccagaataagaacaaagttttactgtggaagattatcgactgggcatggtggttcacacttgtaatcctaacacctcgagaagctgaggtgggaagatcgcttgagcccaggagttcaagaccagcctgggcaaccaagtaagaccccatctctacaaaaaaacaaaattaaaaaataaaaaattagctgggtgtagtggtgcatgcct

SEQ ID NO: 93616 - DNA, 1050 bp, Homo sapiens
gtatgttgtgtttaattgccatttaaaatatcttcaaaaggatttcattatgatttggcactgaaacaaaaagttattgaatacagagaaaaagacagaaccaaattagagaaatgaaaatttagtattactgaaataaacatttgccatcagataaatcatcacaattccatttacttttctttaaaagcagcaaccaagtgctttatgagagtcaagaaagaaggatacccaaaagtagatgaagctttgttttgtactgagatgtatgaagaaaggttgtcatttaaaatgtcaagcaacgtattgaaggcaggaagaactgccaaatttttctgaatagactgaaaaaaatcaaagcaaacaagaggcattagattataattaaaagcattttttctttctttaacagagtttgtcttacaactgatagcatctcaaatttgatgaaatatagtcatgtatttcttcagcgacttaaatatctttttagtgcccgttgtctgacactaaagtagtactcagatgtttgtttaacaaaggaatgaatggatgaatgaatatcttgacttccagtctgatgtagttcccattgcatcattctttactgtgctagtctttttacactggccaagaaataagtaataactttatataaaaatatggtagtttttgaaataataatatttgaaataagcaagttggtaaatcacaaatgctcaaagcatattttagaatattaatttaattatttttagaaagtatggaaagatgagactttccttaattgcaggagaaaaaacataatgaatccatccccttcagagaagggatttgactgtccccctaagtagttgtgatgattattatttttttaaatgtgcacatgaccttgtaagaattgtgtgtaataatgacaaatgcttctgtttctaaatcctctagaaaatgtgcatatttaaaattttagaaatgtatagtcatttactttgtcttaagttttttgtgagttttagccaaacagcccccaaaatcttgatcttaaaagtt

SEQ ID NO: 93617 - DNA, 1076 bp, Homo sapiens
cgagtagctgggattacaggcgtgcagcaccttgcctggctgatttttgtatttttagtagagatgagggttcaccatattggccaggctggtcttgaattcctgacctcaggtgatccgcctgcctcagcctcccaaagtgctgggattacaggcatgagccaccgcacccagcctcactttatgatctgtctcctgtttccattgccaactgcattttctccttcttttactccccttcatacctactctgtcatccaggttgcacctgaagttccagcagtactttaatagcttgaattaaagtacttgtaagttcttgattttgtagcgccgtctcacttcagacctttgtaattgttgtctgtctagaacgtttgtcttctttcagctaactgctacttattctttaggagattgctttctacagagagccttcccagatactttcctcccacatttggtggtaccatccacctgtgtactcctatggcacccaaactactctggtaccccatttgttggctcatctgatctactaaatgtaagctgcttaagaaccagacctgtgtcaacagctgttggccaggtgtggtggctcacgcctgtaatcccagcacattggtaggctgaggcgggcagatcacgaggtcaagagatggaggccatcctggctaatatggtgaaaccccatctctactaaaaatacaaaaaaaaaaaaaaattaaccggacgtggtggcatgtgcctgtagtcccagctacttgggaggctgaggcaggagaatcacttgaacctgggaggtggtggttgcagtgagctgagatcacaccactgccctccagcctgggtgacagagcgagaatccaataaaaaaaacaaaaaacaaaacaacaacaacaacaaaaaaacagctgttgccccagaacctggcaaagttttggcatgtagcaagaagtcaatcatatttgctgcatgagtaactagtaagtgatcactcaatagttatctcattgaagcaatctccatgtaggacactccttatggatgactgcatgtggcagaagatacccctc

SEQ ID NO: 93618 - DNA, 1053 bp, Homo sapiens
aagtaggagtagacaccactacacagaagtgtagctgggagtgtctgatgggtggggcaaagtgttttgcacttgtcacctctcagctgctgctcatagaataagaatttagactaggagtaaattgccattctgctaaaagggttgttcttggtgagagggaaacgtgctttggagttctgtcagctgtgcccctgtcatctttatgtactgtattgaggacgtagagcacctttcagtggtcagtctccctgtcattgagaaacagcctctacaatagaatcagaatccattttttgctctctgcttcaaggtagaaggctagaattagactatggccaatgttttgtgagtcccttgtgtgtgtgtgcgcacacactttttaaaaattttttttaatcctaaagctattgtcaagatgccaaatctggctaattggggaaccttaaattcttagcctgctttttctccattctcttggagcaaacctgtatttattaagtctaattttgctcttcatgtggtcctcaaagatactcttcatagttggtgccatctctgggtctagagcttatttttttccccttcattttttacgtggagggcttcctatagttgttggtctgccaatttcccttcctaatatactgaccagttgcaaggtcagataagaaccactcttatcacacattagaattttaattctttccattaattcacaaaatttccgctaattcacaaagttaaggcacagatcacagccaaaaagggtagtttcattccttctcactcaagtatgaataactttcctgaaatattttgtctaccttttcactggaggctcaacttaatttttcacccatattctttaccccaaacccaaggcttcatccctgacagagtgcttcctggaatcctagtggtgcttagggtaggatcttctctcccacaaatctcaaatttcccatataacaacttgcagaaaaaccatatcatcataaatataaatgagccccaatatagcaggttttcaatatattagttccttttctt

SEQ ID NO: 93619 - DNA, 1052 bp, Homo sapiens
tatagactagattatgcaacacaattttttagtaatatgttaaaactattttggttgtaaaataattaacacatactagcttaggcaaaaaaggatattttattggttcttgctactgaaaattctagtagacttcgcatgagagctcttccaggggctcagatgatatcatcaggactttttagctctctccctgaggcagacatgatggccacaggaagcccaagtttagtaatctcagtggaaaaatacagtcaattccacatctctaaagaacgattcagtggaagactgaagggcttgagtcatgtgccttctgccatctcatctgataggaactacctggaccacacatgaagtgggttttcctcagggaagaggagtttaattttcagaagatcagggaagggatgctgagcaggaaaaaagcaactgtgatgtccactgtggggtgggagtttaatgacctaaatctgaagttgcaaactggcagcttatgggtgaatataggccagagagacagtttttttttgcctaactcagtattttgaaaaaaaaataataataaataaatattttaaggatacttcatcttaaaaaatctagacttcttggcctctcttaaagagtttaaagatgtggaaacactgagcagccagagtctcatgttggtgtcctaactggctggagctaagcagtggctctttcctttggatgctcatctaccagcccactatattcatctcaaaaattggcaagcatctctgggcaatttagggtatgacctttgctctaaatagtgcaggtttccctggtcaagtaaacagcatgttactccggttataattacaagttctgcttgagtcttggccaacttagttttgtgctgagatagtcattgccaaaaaaaagtattaaaattaataattagttgtgtggaattactatagattgttgaaacagcttagatttgtatgtatgtggagcgggggtaatgatctttggggtttgcatctgaaaagattcttgcaagcgctgcaggttcattgcaa

SEQ ID NO: 93620 - DNA, 1111 bp, Homo sapiens
atggtacaagttaaaatgccatgaagcttgctcttcttaccaagatttagcatttctcttgaataaatgcttcctgtattattgcaagtctttggttaattttcagagttctgaaaaagttggttctgacacttttggccagttttctggttattttgtagtggagggaattttcagatgttcttataccattacatttgctactgtctgcctgtggaatagtgttgaagctagaatcaagttcctgctttttaacttagtgtttcttgggttttgggtggccaattgactaagaaatctaagcttttatttctttctctcaaaaatgggcatgttaatatatactacttggaattattgtagggattacatgagatcatgcatttaagaatcaactggataaaagctaacctatatgttactaccaaatggaaggatacataagttcaaaaggtagaaatgggaaaaaaaaaagattttatcacttaggcctgttttatggaagcagagccactttgagtattttagagaataagtggtttactaaaggagttgaatcttaacacaaatgtgagaagagctggggaaatgaaggtatggaagagggaatcagaagatcaaggcaagaatcattgactagtccacttgaaacattggcacaagtgggtaagtcagaacttaaggtaaatccaagaagccaaatactttcagacattgaaatgggaccatgaagcaggggcttgtggagggatctgtggacaaccattatatctatatagctattaaccctgtgagtccacacagcaaatgtctcaggggcctggggatgctataggtcagcagagccagcagttggaaggacaaggtatacacacagagcatgggttctgggatctgcagagcatctccacatcttgtttgttaccatattagaccatgacaactttccaagagtaaaggctgttgcttcacttctgcctttgaaatccttgataggttctcctatgatgaactctaacatgaaatcagaaggaaaagggattttaggaaacagtttccagtttaagcaagttgacatagcataatccagtacatatgactatgcaagggt

SEQ ID NO: 93621 - DNA, 1084 bp, Homo sapiens
ctttgattttggcttttacctggttggtagctacagggaaaaataaattcttttagataatcatagaaattccctggttctctgacctgggggatttaaaacactgagtgttgtttgctttctttgagctgtctagtgaacttggaaacagccaacttacctcacagttgttgtattccctcataatctatcactcaatatgcaaagccgtgcattaggtaactgtcttagttctgttactacacatgataacttaagtaattctttcatcatgggatatcatggactaccagtgtttaaccctcttatgatcactgcagcctttctgtcttcaaacccaaccagatcagataccaatcacacatttccatttgccccaggagtacattgcctgaaatcatttctatacccaattactataatggtcattgtttaattacagaccactacagtacgctgtaactggctaaagcagaaaggaatttattaggtgaattggcctccagaatttctggggtgacgtgggtaccataccgtcagtatcgggctgtcaagagaaatgccttcaatcacgcagtgagatgatttcagcaaaaattctgctgcggctacagtttgtggttgaatacatctctttataggtgactagagttatagttaggtactttaatagctattgtattgatgtttgaagagaggaattacatggattatattctaaaactttatgtttattttgactgggacttaaaagtattttttcttagaaactgttttataaattccagtttcactttcagattaggtctaaaagcatacacaacctgaactatatcagaatgcagaggagccaacatccaaagacacttttagaagtatagtcttcttttaaaagagttcacaaaaattagactgcttaaggagtatagatatgcccaacctaaagaaaatcaaatatacagactttcggattgccaactgatgtatgttaggggctttaaagtctcattttagctgctaaaggatggctttcctggatatgtacatccattttggcaatggctatcctagcgtccttggcagc

SEQ ID NO: 93622 - DNA, 1389 bp, Homo sapiens
atatagaggccaaagagaacatttctacttttggtagacaatgaagagaggatgttggagtcggctttgaaagacaggtaggactagaataggcaaaggaagtgcagtggtgggggcattctaggcaggtgaagagtatgagcaaagctctagaaacacagagagaagtgtgtgtgtgtgtgtgtgtgtgtgtgtgtgtgtgtgtgtgtgtgtgtgtgttgggggaacagaggtttggtgaagaggttagttttttagggtagaaggaagtagggcagttatagtgcgaaacctagactggagccaggctgtgaaacgtcttcaatgtgaggctaaaccgttgggtttttatttgacagatagccattaaagggttgatttctttggagctttgttttaaatgaaggaatgtggtgtgtaaagaggtaattcaggaatattgttttggtaacactggctgtaggagattctagatggaggctgagttaagagactgtagcaatagtttagttttttgggtttttttttttgttttgttttttgagatggagtctcgctctgtcacccaggctggagtgcagtggcgcgatctcagcttctcagctcactgcaatctctgcttcccaggttcaggcgattctcctgcctcagccttccaagtagctgggattacaggcacatgccaccatgcccagctaatttttgtatttttagtagaaacggggtttcgccatgttggtcaggctggtcttgaactcctgaccttgtgatccgcccgcctcggtctcccaaagtgctgggattacaggcgtgagccaccgcgctcagcccaatagcctagtttttagccatggcaattctcagtgtgggaggggcaataggaaggaagggatgaagtgagggaagtcacaggggagaacttgacagggcttgctggtctcattatataatttagaattaattatttacgtagacaaagaaatgacaattgctcaaagcagagtcacagtataaacagatgttatgtgaaaatattttggagcttctcatatggatccaattcaggcgggcggtaaaccatgccaaaatatgcaggtattgaatgctgtaattgtacagaactactacaagatgcaaacttgaacactgtagactcattttaactgtgaaccaagtttgaactgtctggagggagaacgcctatatgctatgttgtctcctttaagacctgcaataaagggaaaatagaaacatggaatttaaaaaaattctatcctcttttttagacatatccaaagaattaggttaaataacaaaatttaggcaaaccaaagtggtatttgaatggcttctgcacctcttaataactttctaaagtcaaattggtat

SEQ ID NO: 93623 - DNA, 1088 bp, Homo sapiens
aaatatcaatgacatggtattagcataaaatatgactaaaacactgattaaagcatatgaatgtctactcagaataattaattttaattctgtaatagattatggaaatgtacaaaattataattgtacagcttgattaattctcctttattattttttaatgttcacataatcagcattaaaatttttttactttaatgtagttttatttttcaataattttgtttttgaaaataatttttgaatagaatcatcttataagtccccagatggagtaaaaccaatttattgatcaacagtttgttggttgataaatatgtttatttaaaccgtgtaatttaaattattttctttagtgctctggttcactttcaaaagtgttgcagtttgtacattacattatgtggttgcctaactaagcattatcaagtacttgtatatcagatatggatgtggttatgaattgtgctatgtcaacctatcaacagagaacagagagtttctgccaggaaatgataatggacagaactagtttccaaagggccttaaatgccctgtatcaagattacctaaccctgtagatgtgggagcctattgtggttttgaattaaaaagtgatatgacaaaagtggtattatgggaagtttaaataaggaatgaatatcatgggtgagttatcagtggcttgagtggtaagcatggaaaacatagaatgactgaagcctcattacagaggaaattttctgggacttacacattgggctggcagtattgagggagacgttggaatcagagaggaggccagttttctcaattttctgattaaaaaggaaaatgtctctattgatagccatagggatttaggaggaagggaaaatatcttttgccagcaaggtgatgtggttttggatgttgaatatgaggagatggtgctgtattgtagcagagattgttgctagtccattggagataaaagccctagtgaagcccaacagtgaggcctgagcatgcagatggggcttttctgtggaagttacttgaaaccatgaaagtgagttcttcacagaaaactgtgttggaagagaata

SEQ ID NO: 93624 - DNA, 1065 bp, Homo sapiens
aaaacaagcagagcacatgcattttgaggaccttgaggtcagttctcattgttcttgatttagtctcaaaataagaatcccttattccaagtaaacttggtatcataattctttgtatctaagatgccatcggttgtaagaagtacctttaagtaccactttgtatagaaaaaaaaatgttgccaataaaactgataagctattggtttttcagatgcatctctatttcagaaatgttaaatggtggggaaaaaagtacactttaacattgatgaaatataatacacagattttgaaactttttacttggttggagtttagagagcttgttttacatgttagcatcagactttaggttctctcagaatgtatcatgttcagcaagtgtggtttggtgcattgaagctcttttcatttaattttattaaaaaacagatgaaagcaaagtggtgagctcatttttaggttgttgaaagttccatgattcaaaaaagtgaacttctaacttttagtttcaacctagtacctctgcttctgccccctcccagtagacatatatccatcctcttttcagtcattacctgtccctctaacaaaatctgttctccataaaggctcctgataacagttatttatagcctcctgtgaattcatggcaaagcgttaaatggcccaagtctgcttgctttctaagctttatctctaattactggctaaaaatctttatctgcttaaagaactttcaggcctctgctagccacatggaacaagttttgtgggaatggctgaaggaggagtgatgtagaggcagcctcctactctgcctctatggaaggctgtggatagagaacagagtacctcattttctttcctaacctaaactgtccaagtaaatctgacagctggctcagtgcctttctggaagtcagtaagaaaggagacttcgatctgcttataaagttgcctttgctgactgttggaaggaaaacaactcataatagctgcatttctgactaattccattgaatttttgttagttttttgtgtttttgtttttgttttgtt

SEQ ID NO: 93625 - DNA, 1030 bp, Homo sapiens
ctgaaggtttttttctcacagggtgtagaattttggtttgcagcattttggttgcagattcatgaggagtgtgttgttttgttttgacctccttgcctctggtccctccactactgtctgcaccttttgtcttacaggtttgcaattgtgcttgcttggccactctgactccagatttggaacttgagtgtgccttctcctgaggtgatactgggattgatacctagttttaaaataatgtccttgttaccagtaaatagattaggaaaggaatatctctgtatgtatgctacatatgccatagggtctgtcactgaattttgtagggaagtttgagttggttttgtgttgtctgggtctctaattctgtttgtttatatgaacgaataaggacggacagtccacattagtattttatacatttagctatgctttattctaataaaaaaagagttcattattgctctctttaaaatttgaccttcaatagagtaaaagcttttagaactttacaagaagctctcaagtgtaactatgaacactggcagatttgggaaaactacatcctcaccagcactgacgttggggaattttcagaagccattaaagcttatcaccggctcttggacttacgtgacaaatacaaagatgttcaggtaggatattcctattccgttatttcagtttgtgtttgatactaatccttgatcatatggtataaattatttccttgaatatgcacaggaaaattttgttaaacacatgtaacatatgaaaagggtatttttttctagtcaaatattcttcatgatatatagaattctgctattctaatgtcaaatttgtttgtacagtcataaactgaatattactctgactcagttatgaaaatctgatatgtgggttacatatatagtcactttgcagaaactaaataaaacactgtgttacttagtactttgggtatctctgtgtgttctctgacttttggtagctggaataaatcctatactcacttgttcattcattt

SEQ ID NO: 93626 - DNA, 1078 bp, Homo sapiens
ttacatgtacacatgaaaggaagtggcttttctatttgctcttattctccttcgcttcccaaggcacatagagcaggtcaaagtggtatgtggtaaaataacaataattaatatttactgagggcttgccgtgtgtctgaaactatcctaagcacttcacatgtattagctcatttaattctcacctcagctgtgggggataggattatactgtcataagctatgtctaactctggatggatggatggatctctccacctgcttgttttaaggaaattaaaaatatcagacaaaataactattcaaagattgtttggaaaagctgttacttgtacatcatagagttataaagtcatcaagataatgccgattttagttaacttagatgaattaagtatggcaaatcttgctaactcgtgtattctaaaagaaaggcaagaaaaagtgaagcagaagtggttacaatagctgaaaaggtattgaagaatgttacttaaatttctcttttcttaccacccctaccacccccagattaggagtctcattctctctcaggatgaaaaaacattcttgctaatgtttagatgatacttctgtatttgagtatctgtaaatgtgtagggagagaggtgatatttagaattatctattggtagtaacagtggtattatagataccaaaggatataattttggtaacaataacctgagtatgtagatagttgattctgataaaactttcagttgtgatttgccctgttggatgccaaatcaaaatcattggaattttaagaacatttgcttagaaatctttcagccggctgggtgcagtggcttctacctgtaatcccagcattttgggaggccaaggcgggaaaattacttgagcccaggggtttgagaccagcctgcacaacattgcaaaaccctttctctacaaaaaaaatacaaaaaaaattcagctgggcttggtaatatgtacctgtggctactcgggaggctgaggtgggagggttccctgaggctggagaggttgaagctgcagtgagccatgatcacaccactgtaccccagcctgg

SEQ ID NO: 93627 - DNA, 1073 bp, Homo sapiens
tgtatttatttctagattatacatatttttattcatctatcataaaactgattttcatgttcctacataattagttcctgttcagttttccagtttttgactattataaataatgtcatgaatatccttgcagacgaatcctcatatatagccatacttctttccccaaggtaaattctgatgttgatttgttgggatatttttccttttcttccttttttgtttttctggataccttgggcaacattttgggaaaataatttaagtattgcattattgacattcatttgttgtttatatgtggaagaggaaggaaaggggattaatatatattgagtgcttactatgtttctgccacttaacacaggttatcttttattgggcatacagtatgtgaggtggatagtaaatactcctcattttatagttgattaatatgaaacccagagagcttatataacttgagcagtcatttggctagtaggaaccaaagacagaaatcacaggtaggcatgtcttatttttttctttgtcacgccttgaagtctgtgggggaagatttatgtcaaaagcacattttcccatcatattaatgtgcttgtgaactatacctaacaaaggtttttaaaaattcagacataatgtgcagataataagccaggcatggtgggatgtgcctacagccccagctacttgtgaggctacagcaggaggattgcttaagcccaggagtttgaggtttcagtgagctatgatcgtgccaccacactccagcctgggcaacagagcaaaaccccatctcaaaaaaatatgaaataaaataacaaaataaaaaaataatttgcagataattttaactacatgtattcttatgtaatcaccaccccaaacagttatggaacattttcattactacagaaagttctcttacatgcatttccagtcagttgaaacaccacctctttcccccatgaggcaactactttctgatttccatctccacagtttagttttgctttttcttgaataccatatagatagaatcatacagtatgtattcttgcatattgagg

SEQ ID NO: 93628 - DNA, 1052 bp, Homo sapiens
tcttatttatttatttatttatttatttatttatttatttattgacaaagtgttgctctgttgcccaggctggagtgcagtggcatgatctctgctcactgcaacttccacctcccaggctcaagtaattctcctgtgttagcctcccaagtagctgggactacaggcacatgtcaccatgcccggctaatttttgtattattattattattattattattattattttagtagagatggggtttcactgtgttggccaggctggtcttgagcttctgaccttaggtgatccacccaccttgaccttccaaactgctgggattataggtgtgagccactgctcccagcctgaaagcttcttttctaagatcagaaacaattcaaggatgcttgctttcacttctgttcatcacagcactgaaagttcaaggcagagcaattatacaagaaaaagaagtaaaagacatccaaattggtaagaaataaaattatctgtttgcagatgatgtgatcttgtatgtagaaaatgctaaagagtccacgaaaaagctgttagaactaataaatgaattcagcatagtagcaggatgcaaagtcagcacacaaaaatcagctgcatttctgtacactaacagtgaacaatcccaaaaggaagttatgaaaacaattccatttacaatagcataaaaaatactttggaattaagttaactaaggaagtaaaaatcttggaccacaaaaactagaaaacatgatgaaagagattaaagaagatacaaataaatggaaacacatctcatgttcatggattgaaaaacttaacattgttaagttgtcagtactacccaaagtgatgtctggaattcagcgcagagactgcagtgaaaaaataaagaggatactcaaattactgaaatcagaaatgaaaatggggacattactactgattctacagaaataaaaagattataagagaatattgtgaacaagtgtatgccaacaaagtggataacctagatgaaacagacaaattcctagaaactcaaagcctac

SEQ ID NO: 93629 - DNA, 1096 bp, Homo sapiens
ttacatgaagtacttagagtagtcaaaatcatagacacagaaagtagaatggtcgttggggctgaagagaggaggaatgaagagttatggtttaatggggtagagtttcagttttacaaggtgaaaatagttctggagatggatgctggtgatggttgtacaacattatgaatgtatttaatactgatgaattgtacatttaaaaatggttaagattctaaattgtatgttatgtgtattttactaaaatgagaaagagtagaggaaaaaaatctctctaagcatccaggtctaaaaagtttaccagattagtttatgatacaccaaacaaactccagatagactaaatctatgctaaatatttttaatctcatagaaaaattaggaatagggaatggaagtagatactgataaaagtgcttgaactctgaagcagtaaaagagagctggaatgaatttttatgatcacatttaaaaatatgtgacaagatatttgtaacaaataagaaagataaaaagctaataatatccttattatataaagagttaacatctgctgcaggaatgaaatggaacagaatagagaattcagaaacagattcaagtaggaatgagaatttaatacgtaataatgatggcattttaaatctgtgggataaaaataggatatttaatatgtattgaaatagctagccaaatgtttaggaccaaaagcttgaaaccaaaataaattcagttaaataaaatatttaaattggaatttcttgagaagcaggatgtgttgtagggaagagcacgtactctggagttaggcagcccatttctgccagtcactggctgcgtcgccttgggcaggttacttaaccactttgtgcctcagtttcatgaaatagggatgatagcgatacctgcctagtaggattcttgtgaggattaaataagttaatagactattaagaggagtaaatgagttaatatatgtaaagggcggggaacagtacctggcagatacatacaagtgctgttttttgtttttgtgttttttgagacggagtctcgccctgtcacccaggctggagtgcaatggcatgatctc

SEQ ID NO: 93630 - DNA, 1571 bp, Homo sapiens
ttcatatgtttattgctttctgaactaaaaccagaaaatgatttccagaagccaggagagtgccctcggaagagtttttctcagtgttttaactgtcttagtctttctgcttaaaaatgcaatgttagttttctagggctacaataacaaattaccacaaacttgctgccttaaagcaaaagaagtttgttctccccactgagttctagagaccagaagtcaagttcgaaatcaaggtgttgacttggccatgttcctctgcagatgctagggaagagtctttctgcaccttttccagcttcttgtggctcctggcgttcctcggctgtggcaccctaactccaatcactgcctccattttcatctcctctcttctgtgtgttcccttcttctgaggaagaagtcattggaattaggccaaccctagtccagaatgacacctcatcttaactagttacattgcaaagaccctatttcaggtcagattctgaggttctgggtgcacgtgaattttgggggaatgttattcagcgcaccacagcttttgtgctctgtttcaggaagaaaacagttgtagcagtagcattgagaacagcggtgttcatgaagaggggagtagatccaatacctcactgggagctgttagtggtagcagaggtgacaggcacagagttacaccaagggaagaccagaaagacctcaaccactcctatgaaagtcttgcctttagtgaacaccaccagagatttgaacatctggaagtgacgaaagagctgatgagactaggaagggagttgatggaaaactaataaaacttttcaaaagagacaaaaacttagtcatatacaatattgggagataagactggaatcccaggtcatgtgggacaaattaggatttgtgagaagtttctgttattagtcttcagcagattatgacattccctgacataccctgaaagaatttgtgtatatggatatatgcatattctagaaagcggatggaaaactctcattagatccgcaagggtgtccagaaccccaaggaaaaaaaaaacagagattaaagaattatctttggagtagactgttagatttagtttccagatgaaaaggcaagtgggcctttgcttataaacatcatggattaaaatttacctttataacttgttacagtacaaaggggaaaatatcactaaatgcatttatttagttttttaaagttaccaatttttttaactttttaaaagttacctagtttttaaaagtttttaagttacctagtttttaaaagttaccaatgttttaaactgtgtataaataatttttaaaacttccttttctcctattatcacccccatttctctggtgctctttttgtagtcaatccgtcaagacaggagtctctccacattatttctgcttcctctcctcatcctctttggaacttacaccattgcagttttatctcccctagtccacttagagtgctgttgtcaagttccgacttgccacatccagtggacagttgctggtcctcaggtttccagcaatattaaacaccattgcttt

SEQ ID NO: 93631 - DNA, 1056 bp, Homo sapiens
ttgtcaaaacaagaaaaaagcacaactgaattttctgtcttcttttatgactgtatataattaagaccatgaatctgagttcacattcctaaaagtatccatgttccagaggagcccctactcctcagccacatctcatgcacggatcagaatgttctaggaggagacagcaagatctcacactggttgcatttctctcagctacgctttctgaaagagttgtattcattcagtctttcaggcacaattatttattgagtcagtgcaattgcaatatgccaggcactatattaaacactggtgatacagaatgataaaatgccatcctctccctgcagttcacggtaaaattaaagatgtgggcagctgtctcttggagccttgcttctcgaagtgtgccctgcagaccgtcaacatcagcatcacctgggagcttgttggaaatgcagaatcttggtccaagatggatcagcatttttatccaggattctgcatttctaacaagctctgatgccagtgctgtcggtccatggactgcactgactagcatggtgttacagtactttcctcaagctggttcttttgctgtcccaccatcaaaggagtggaagattgcggttgtgttttctgtgccttcagatacacagcctaatgtagatatgacagatgtgcctttttataatataacctggtgcagactgcagtttaatccatctgtcagcattcaaagcatctgggatagaatgtgtaaaggctgactgatgataataagatagccaagaagttaggccgggcgcagtggctcatgcctgtaatcccagcactttgggaggccaaggcgggtgggtcacgaggtcaggagttcaagaccagcctggccaacatagtgaaaccccatctctactaaaaatacaaaaattagccaggcatggtggcgctcacctgtagtcccagctacttgggaggctgaggcaggagaatcacttgagcccgggaggcggaagttgtggtgctgagatcataccactgcactccagcctgggcaacagagtaaga

SEQ ID NO: 93632 - DNA, 1023 bp, Homo sapiens
tatatgaagctataggtgtggatccaatcattcagagagaatgttccaggtgagaagagccaagcaccaaacatggggccctttgaatgaaagaagaaccctctctggaagcttttgaagggacatcagagaggtagtcaccatgagatcctagagagtgctttaggattgaattttattttgcttttcaaaagcttaaaggtgatactcttaacaagtttcataaggtttttcattgtcattgtctttgatgatggtgagatagctctttgtttttgttattgtttgttggtttctaacttaccagtttgttctgtgcatttttaaggtccttaaaattctagtcagggcagtgattgatgggatgactgatcgaagtggagatgttgcaactggcctcaaaggaaagctgcaggagttatttggcagagtgacttcaagagtgacaaatgatggagaaatctggaggctgtatgcccacgtatatggaaatgggcagagtgaaaagcctgatgaaaatgaaaaggcaagtccttcattcctcctgagtccttgcctttcgtttgaacatgttgtagtagatctacttttttgatgggtggaggaagagtttaacaatctgaaagataagattagtatgcttaagttcagttctgattcagtctttaacctacgtactttgaattgtgggctggttaaaacttgtaacattcatctttttatttaccatgaagttttcttacatagttgttccctgtttcctgcaaaagggcctcttgaaatggccacccctactaaatctgcagcagagttggcttttgttatttactccatacccctttctgcaggcaccttgctaaagactacagtagatgggtacaaggagagaaggagtatttagatctgagatggggattaggaaaagaaaagagaaaaatgaacaagataaagatcttggaagagaacttttaagtcaaaacataatacttttacaaaggttgccctgccctttctcacaagtgc

SEQ ID NO: 93633 - DNA, 1113 bp, Homo sapiens
gcattgcttttagttattaatttttaaaaatgccagttaaatttggtaatgcatttttatatttatatttgaatatgggtgtgtgatgcagttccaataaaataatgatgcccccaatgttaagaactgaatcacaaagaccttacaccaatcctaaagttctccttctacttccctgcctaactaacttccttgctgccactaataattacaacaaatagggagcaaacaaggaagaatgcaaagggcagagctttaagatcagggagacctaagctccaggaccagctctatcacatgcttgctagttgaccttgggtaaataatttaacttctctgagccttactttcctcatcagtaaaatgggataatacctacccatgaagaataaatgaaaacattcaaacacttagcagtatttcacacatggtttagatattaataccctaccctctcaccaccaccctcttccttccaaagtagaggacttgagctatagatgataagggactcaaaactaaaaaaacaaaaattaagaacaaggataaagtttggcttgcttataaagaagtcacagaacattcagaaaatttagaaattagcttggtagttgataattctacttttgacctttgatatctttgacctaaaggatataaatatctaatttcctgggtcaccaagcacttggcagagaaggtagaagtgctgagctctatatagctgaaagtcaatgtagaaaagttgggggtaattgctaatagagccgtagaaggatgttttgggggtggttagaattcatgtggcttctactgacctcatgatgggtgggctcagttgggatccagtccttatgcttttggtctttgtggatattgtatgatatttggggaaacccacactgatgtattaggtacataattagcaggatgggatttactttgaaaaatttatcttatctacttcaacttgccaactctaagcatttctatgaactgctcgtctgtaacagtcaaagccacgctattttctgaactcaccaagtaatggtattaaacctgtcaaagagagatatgcaggttaaagagatactctaggaaaaatctttattt

SEQ ID NO: 93634 - DNA, 1090 bp, Homo sapiens
ataatctttgtggtctctgaggcctaagcgaaattaattttcaagtaagtagcataaagggtatgatttatatgaatttgaacatagaatatatttgttttgcctgcatacacaataaataaagtcattttgtttagttgaattatgtctgttcattcaaaaaccatcctataacattgaaatgaataatgagaatttaggcaaatgcgttgaagagcagagctcatttgaatttataagttcaggcatgttgttttgattcaccctttaattattttagcttgtacatttcttggctagtgaacagaaaaaaatgctaccattgctattataattgtatagtattattatgcaaaaggttttttaactctatactctgtatctattttattttaaagaaatttgtgttgttttaatacttctgctttgttttttatattacagcaactttttacagatgtggcaactggagaaatgtccagggaattagctgatgacataacagctatggacaccttagtgacagagctccaagacctaagcaaccagtttcgaaatcagtattgattctgctggaagcagattctggaaaaggtgctttcacctgctggtaaaagatacatctgtatatctgaaatgcaagatattgatttttaaaataaatttgttttatgacttaacattcttggttttgtgatgttttcaattttatatgctttctgaagtatattaaatttttaaaactccctatttcgttaggtctaattatagttgagttcagtatttttattcttgaggtattttggcacaaagagcaattaaattaattttgtttttaatatagtgtttattctctttcaacctaacattaattggatcatactttggaaaaccttttgtctaaacaggtgaaaatcacgtactacaagtttgtgaaatcattagattgactgctttattgttcaaaagtgataaaagagtggacttggagctagaaacatttatgtttcttgagattttgtgcttgtttcagaaagatacagacttggcgaaattggaaatgtgagcatggtttaacttctaaatcaag

SEQ ID NO: 93635 - DNA, 1046 bp, Homo sapiens
tcacaacatgcagaagtgcttataaatagatacgtttcaatcaacaagtagcttattcaggcatgtgctcaaatatagtagctgcattcattagacagacatttccactaatcccaagactatactaataaaagagtaatcccttatgggctaaaggtggtgctggtttgcttttaactcttggagtccttcacacaccaaggcctaataataattgtagctgtatttggttttcaccaagtgaacttaacccatttatgccggaggttgcaatttttaaaatttttgcaatcagagcttggtgatgaccttgagcagtagaatataaataactctcacacgcttagcgttccgataatggaacactaagcataaatgggttaaaagccgagcttatcttggaatttttctattcttatttttttaaattgcaggagcttagtgaagaaagaggtgctttttactctagatatgtagctttcagcaaagccaattcaaaaatcagtttgtgtgtgtgtatgttttctcgatactttatcataaagcacttgtctctttcaccttggttcatagaagtgttcgcttgagcagattctgttttgttctttgatgttaggataaataacaatggtcagttttgagagcatttgcaagctctcactatagtggtttgcctttttacgtggactttttccccttcaatagctctttactcctcctatgttactcagagctagctgtaatccgtttgcttagcacaacaccaaaatctttcccttgccagtggtgtcaaatctgccttcctttttattattctgacttataaactgcagtgacctctgagtcaacttcgccatctcttggccctgtgccaacattgtgttctgtgaaaagagagtcctgccaagggctacgaggcagaaaactgatattattaaagtggtcttctgaacggtaagtatcagccattttctaatcttttgtgatgttattgccagaaagggggaggggggggtaaatcatgttaatgttgttaaggatctaac

SEQ ID NO: 93636 - DNA, 1692 bp, Homo sapiens
tgctgcatatttccacatatataataagttcaaaaagcagattaaattaaactgtgttatttagtgatgcatgcttagtataaaaactataaaggaaagcaatgaagtgatcaccaccaaagacaggctaatgactactcttgtgggtataaatgggtggtggatgaatggtactaaaggacttccggggagctggcagtatcatagttattaactgggctcatggctaacatggttcttctggcaaatcatcaagttatacatttttgttttgtgcattcttcccaaatgtgtgttgtgtttcacagtaaaaagcattaagatattaggaagagtgcagtcaactcttaatgtgaacctgaatgtctgccttctcctctccacgtttttgcacttttctacctctttgtcttttccttctttttgaggagacctgagctctttcctcaagtaatttttctcacaactcataaaattgacttttgaaaaatcatactgcattttgaggtgaaacttggcaacacaaacccaaacttaactccatgtaactttaactccccacccacccccactaccaaacacctccttaaacaaaatataacaacattttacaactataaggtgcttttaccctaaggcaaaaatgtggataatttgacattgcactctaaattctttatttcttttgtctaatacagttaagatcctgtgctgtctggataaataggggggtactaacctaaggcaacccaggccagcataggcagtgattgagtgtggtcatcttggtgaccaaagccagcttctcacatttcttcttgaaaagcatggtgctgacatgtttaatatcctatggcattccctttgggctctgtagactgatggaaaaggcccctgttaacatctgatggccaagttgaatagcacagccttgagaccctccacttcacagctccggttaggggggtgatttctcaccaagttgtagtagaaataccgatagtcatatcctggcaggatccacataccaccggttatagggagaacacttttgtgtgcctggatggttttggacaaacaaaggtgaaatctcacccacaacttcatagggaatgataaatcaaaatccagcacactacaaaaaagaaaaagataaagctaaggtttgaagtttttctggaagaattccaaaaatgcatatttcaagggaatgtctcagggcaaccctaaatagactggtgacctacagatcaaagacactgtattttattagccgtctcctgacccagccaatccaactgtccttccctaactgttacatgcatccagataaaccctcccctgtctgtctttactttcttcctccgagaatcacaaatcaaccctgacaacatttggtttctcatcttaaggaatgttgctggtacattctttatgtgaaagaggcaatcccaggaaggggtatgaaccagactgaatgaagagtatcttatttcatctgcacagaacaaaagagtgtctttcctttcccaatgcctgcaagagtctaaggacttgaatgaaagcagactggctgagcttagtcctaaggatggatacaaggctggcagggaagaggggttctctggggtctgtggggtgactttccttcctccatgattgttcttataatggagtcctgtcttgctaagg

SEQ ID NO: 93637 - DNA, 1139 bp, Homo sapiens
acccttggtgctcagagatgcagtggtggatggcatcatccaggagggtgtgatgtggctggagttcaggtgacctagagaacggtctcaggctgtcccccatccctcttggcttggcatcgtgcttgccaaacttgggagtcgagcccagagtgattatatatttttttgtatgcctgctatggccattggcagctgctttgccaatagatctgcagtgaggtttaccatgacaactgctaggagggccaccccggcccccatgtgggagggtcagctggagaatcttgtcatgtgacacagacaacctcggtgaagagagaggaacccagaggtcaagttcacactaggtcaaatatgtgttctcgagactagttaaaatccacatttaggaaccataacactgtaatagtgcttaaaccttcatgatgaagccctcctccggcccatgggcctgctgaggatgccgcccgccccctgcctgctctgctttatcgaagtttttgctgcccagtgaaccctgggcccttaggaagcctgacttgttgaaaagacctttgacaaccacagggttttgctgtttctgaccctgttatttgttgtcttggatatttcagacgtactcaaacatgttcgagagctcaaattaaattttcctaaagtgcagattttgcttcccagtccttcctagcaatgaacagaggcgacttggagtgtgagggctatgtcaccacccttttaatacggaccaaaatcaggtccagcagagaggagctgccgatggggtgggggtaacttgtgtggtgctgtggagcttacagagagcattttcttgatcttcacaccctgtagtgtcattgaggcagggatgctttattaaccctattccagacagtggggcagtgctcagatgccactgcagatcttgtggctcttcctactgccctgggcttcctggacatccagtgctgtgacattctttcttgaggtcttggtctgaaaactgtcctgacagtcctcagttatctggattggcttccactgcctaacttcacatcatgattttccaagctatgtgagttttctcgggcttctgtaacaagttccacaagctgggtgacttagaacgatagaaatgt

SEQ ID NO: 93638 - DNA, 1002 bp, Homo sapiens
aatgtatatacagtcaaagattgctgcacatgcagtttttacatccagtttttctttagttagttgaatgtttgaagtatatatgtgtatttttgggagagctggaaatttgcaaaattgttgctgcatcagtgattatgtagagtgccttttaaaaaagatttaaacactttggaacagttgggtgttttcttccactaattttttttaattacaaaatttttaaagttatatacatgtatatttttgcgagagctggaaatttgcaaaattgttgctgcatcagtgattacatagagtgccttttaaaaaagattttttggaacatttgggtgtttttttccacaaattttttttaattacaaaatttttaaagtacacacaaacatagaagctgcccatcagggtcatgtttttaaaagctccctgatgtggtagttaagtacaatgatttatacataaaggagaaactatggtcttatctttctgtaaatgcgtgttttactaatggtttcctgctttcttagtggagagaaaatattacataatttgttggtgtgacacaaattggttgttttcgtacttatggaaaaatacatcagggttgtatttgcaagcatacctcagatatggagggttcagttccagcaaatatctcaataaagtgagtcacaaattttttggtttcccagtacatgtaaaactcatgtttatatactatattgtagactattaagtgtacaataatagcattatgtctaaaaaggcaagtgtataccttaattaaaaatattttgttactaaaaaatggaatgatcaagtcagccttgagtgagtcattatctttttgctagtggaaggtcttgccttgatatggctggttgctgaaagttggggtggctgtgacactttctttaaaataagaaaatgatgaagtttgctgcactaattgactcttcctttcgtgaaagctttctctgtagcatacagtgctgtttgata

SEQ ID NO: 93639 - DNA, 1068 bp, Homo sapiens
acaagcacagtcaacacaagtactataaaacacgagtgcatgcaagtgtattttattactaagaaattaaagaaaataaaggatttagtattttttaaggcatggaaaaatatcttacgtagaaaattcattagatcactttgattgctattttttattgatgagaaaaactgcacgtggaacagtgaagtacccaagtccacacacaaattattctcatagcctgaccacctgcctggtgcccagattgccagaccagccttgtgctgactggacctccgggtctctgccgagctctcgtggaaaggcaagaccctcagcagggagctgcgaggctgcggtttaggatgaaagtgtgagggtgaagaaagccaagtcactggtcactattgtgttaaaagtcaaattaatggggatccttacatggtactaaatttaaaaaaatgttcaatcctttaaaaattgattaaaaattttattttgatgatcatagaaaatctacagagagctgataggatgtgttaaagtggaagttaaatatttttggaacatttgtatgctcttctgaggttttgttcatcccccccacctcaacatctaatttacacgttgaattagtcattgactccgcctgccattttgtggtaaagatcaagtcaaatgaggctcatcacagtgcttcacaaaaggggccgggtgtggtggctcatgcctgtaatcccagcactttgggaggctgaggctggcggatcacctgaggtcaggagttcgagaccagactggccaacatagtgaaaccccgtctctactaaaaatacaaaaattagccgggcgtggtggtgggcgccggtaatcccagatacttgggaggttgaggcaggggaatcacttgaaccaggaggtggaggttgcagtgaatcaagattgtgccattgcactccagcctgggcaacaatagtgaaactccgtctcaaaaaaaaaaaaaaaaatccttcaatgcttcacagaagggccatataaacataaggtgaccttattaataaggtttttatgaccagtttgtacact

SEQ ID NO: 93640 - DNA, 1052 bp, Homo sapiens
tcaaggtcccacagttactaagtgacagtattacaatttaaacagaggcagtcacgtttcagcatccatgccctgaaggaaggagttggcaaaaattttctgtaaagggacagatagtaaatatttttagctttgtgggacatacggtttctgttgcatctactcagttctgccatggtagcacaaaagcagccatagacagtgtatgaattaatgagtgtgactgtgttctaataaaactttatggacattgaaatttgaatttcatataaatttcacaggtcatgaagtattattcttttttaaatttttttctcaaccattaaaaaacataaaagttatccttaacttctgggccataggaaagcaggctgtgggctggatttggcccatgaactgtagtttgctaactttttctctaaaggatagtagtgctttttttgtgtgtgccagaacatgaatataactgtgtgtccttggaacggtataaagctttgattatatcatagctagacatctcccttccaacattgttttggatattaaaaacaaaaaacaattctgtgttgaactatgctttggcgatcaagagtcagattactgtgaattgcaattagttttttctagcattatgacttacataaactgtaaagtaatttacaagcaacattattcatcttcaatatcaccatccactgttagaatttgaccctctatgatgtatatatatggattgttagtaagaaccgtatgtcggatgtcagataaaggaacagtctattttttttccttccttttggtagccgcggtgtactttagacaagaatgttgtgagtcaaagaggaggctaaggtttcagctctgactcagctttggtaaaataaagtcattaggcagtttgctttggagacttcatctgctgaatgaagatgcttttttatggtagcattgttataggcatgtatatatgggtgtgcctactggtgcacttttaagtaaagagaagagatgagaagagatggccttgggtgccatcaatcctgatattaata

SEQ ID NO: 93641 - DNA, 1028 bp, Homo sapiens
actgttttgggaaggagtctatataaagctaaaacactccctgcctcctgtctctgacttgcaggccttgtgccattgggaaaaaaaacagccaggcctatggtttaaggccttctgggcatctgactacctgcaccccagcactgtctacacagtttgtgtacatgagtatttttatggggaatggttacagagctcttctcagcctcagggaggcctataatccccaaacggctgtgaaccgctgttctagagggtgagattggcaaattcactacagtgatggcacagcaaatgttccatgtctcagcttgaaaacattatggcaggaagtcctgcgtcagatgaaattaggtatacattaaagtagtgggattgagcccagagccttttcaactcttgtatataacagctttgattctcttcctgacataatgagtctataataattggtcaagaattttttttttttacttattaaaagaaccacctcagataatatgttcctgattatgtaactataattataaaaaatcgtatattattgtgtttaataaaaaccaaaatttataggctgggtctaatatatgcatcttgccatgctatattttggagaagacagtagagtgtaagctatgatctttttgagaagacaggagccacgtgcgcagaccatgaagtccagaggagggtggtggagggagagagtgtttcaggctagaatggccggttttagctgtggatggaaaggtagtatttgatggaccaagaggagaggaaatctgtaagcaattgctcagaggaggaggaagtagaagaaggaatttggctgagcatgttttacatgaagtattcctattaggggagtagccataagtgagggtgagaatgcaacacaggtgaaataacattttgggaaatttatctggtggtggaggaccaggcggtggaggaccaggcatagagaagggaagagactaaaatgagagacggtgtttaaatagttaatgcaatcacatagtcatgaa

SEQ ID NO: 93642 - DNA, 1097 bp, Homo sapiens
ctataaataaataccagagactgggtaatttacaaagaaaagatatttaattggctcagggttctgcaggctgtacaggaagcacggcagcatctgcttctggggaggcctcaggagcttttactcgtggcagaaggcaaagtcagagcaagcatcttcacatggccagagcaggaggaagagagaggggggtgaggtgtcacatacttttaaacaaccagatcttgtgaaaactctgtcacaagacagcaccaaggggatggtgataaatcatttatgaagagtccacccccatgatccaggcacccccgaaccggccccacctccaatattggggattataattcgacgtgagatttgggtggggacacagatccaaaccgtatcaaaacgcattgttgttttttacttttatttacaaaccaagcccaaaactctcaaacattatattgttaaagaaaaatcctgttgaaattgtaataacaaaaattgtgttcgcttttgaacaagattacttttgcaacatcttggtgggtgtaaacattgaggtttaggcaaacaaaaggtcggcagcttgggtatcagtccactgaaagcaggatccgaacaggaggggaagtggtgaagcgggtgaactcacccttgtagattttgaggttgagtggcttacagcatgttcattcaggaagagaggccagtatgcagttgcaattgcttgcagcctggaggaaggtcacatctagatgcataaattttggagacaatttatttgtcactgatgcctttggagacggttgagacccttcattaatcatgaaatgtgataactgctgttgtaacagcatgaacttggtgttaatcacagagccaatattattaagtgatgttaagtgttgggaacacaaccagtattttctcttaaggaaatgggaaggctgtgtctctgacctcacaaataaatattctggagggtggagttgacagaattttagtgaagcaggtatccagttagcacaggcccacagtgccaaccaactatgaattttgaagcagttagaccttacctaaaattagctgtgctgttaaaagagtgaata

SEQ ID NO: 93643 - DNA, 1047 bp, Homo sapiens
agccatattaccaaactcttacttatatgttaccttaaggcagagctgttctcattgcagaatgttaccatttgaatgggaagctctagaggtcgagaaacgatcagtgactgaaaaaggaagttacagaaggttattcacgaagggaacattctttcatttcatgaccacctgacgcactgtcaaattgaggaagccagcattcctaatgggttttttgacctggaaggacattggatactctgaaagaggaagctactctaataaggttggggcccccagactggtaataactggttaacttggggagaccttgccgagtgttaattaaatttgcattacaggtggaggaatctgatgtctggaaatactttcccattccatttaaagggtaagctgcagatctctaaggctctctttgtgacttttaagaaaatagcagacaaagaaggcttttgtgggataaaaaaaacacggaaagtttcttgctgaaacttgatgagtctgcatttgcagcacatacatgtatcagatttttttgtgtgtgcccagataggcatttttgcttttaaattttcagctgagtctgattacctaattagttcagattggccctttcttggggagacagggaggaaagaggctttgaagttgtgaaagggaccatgaagcagacagggttctgggggttgggaaggtgctgctggtgggaggcgtcctggaggcttctgtctttatcctcattgcgtctgtagcagttcatgcagaggaactcttagggatcccgggtgatagcagtcactgggctttagggaactctgttggagagcctgcaggcaagtggatcaaaaaatcaaactgttgagaggggtgtaacatacaaagcaaggttacatcccttacagtccgtctccttaccacatcccactctctggaaaccaccattgacaagagtttcctgtttattcttataaaaaactcctgtgcgcaaacaggcacacattgcttttaaacacacatgatttgtttgttctcattattcagatt

SEQ ID NO: 93644 - DNA, 1016 bp, Homo sapiens
aatttttgctgtatctaggagacctaatgtaagatattggaacaagcagttgtctctagacttgtttctgccattgttgacatttacttaattttttgatgttgcataagttatttaatttcttttgcaatcagtttcctcacctgtagaatgaggagactggactaggtgatttcctaagtcccttttagctgtctgaacactgcttttcatcggtgaagttacaactggcctccttcaagaatgtagagtactagaccattatcacatgagttacagataaggtctggggaattacataaagtcatttactgtaattggcttgcagtactctgtgagtaccacataataatgctattttattattcagtgtgttagaggttacagattccccagttgccagagatgtgatgaatccccttggccttggcaaacagactgctttcatgagttgcactgcacatggttataaacccaatggctttctgagctaatgtgcaaggtaatgccatcttccaaatgaaaaaaaagttgcatttacccattcctctaacgagaatatatttctcctcactttaaaaataactccattaccaaatgcaaatatgcataatgagatggaattatttccaaatttatacactatatagtttttctagtgtaagtaaactgttgctatgaaaccaaaaactaagaactttactgccccttttgtagtctaattacttaaaaatgaacaaagaatggttttattctgtgctttttttaaagcaagaaaatatatatcagtatataacaatagtgatcttgaataaaggaaatgtgtttttaagatatagatggggcaaatttttcttatcagactaatggcactacagatgacaattacaaactctgaacaaaatataaagtgaactatttgaaggcatttgagagcaataaaaagcagactgaaattggagggaagttaactaaagaaagaagggacccccaaacatctatatataaactcttcc

SEQ ID NO: 93645 - DNA, 1033 bp, Homo sapiens
ctgataggccacacgaagtttaagatagctgtgaaacagtagatatggattggttataaatatttccaagaaacttacccagcaatatgaaaacagcaaagaagaaaaaccttctagggtgaaggatcatgtagtttaaattcctcgatgagcagccttcactaccagataaaggttttagttataagggcccaagagtttataagaaacaagcaaattcaaggacatttctgggtgttgagactgattttaagaaatcaatactgtatggctccagaatattctggagtcagactgattttttttttccctagggaaaggtaatacaaatgaatttattgtttgcatgtggggaaactgtaaagcaaagaaaaagaaaagagatggtgcctcctcagccttaggatacctttgccagaaattgagggttttagttgattttacttctggattgggaaagaattttgaggaaattaatcattattagaacagaaatggtagctttgattcaaaataaaataggcccacgcaaaatactgctcatgagatgtttcccagggacttaaagtagaatgctttgtcttctcatgaattagattccttatagaagagtccccttaatgttgaaaatgactgcattggagtaagtccatccccactttgacataaggatccataaatacctttctttctttcttttatttttgagatggagtctcgcactgtcacccaggctggagtggagtggtgcgatcttggcttactgcaagctccgcctcccgggttcatgccattcttctgcctcagcttcccgagtaggctgggactacaggcgcctgccaccacgcctggctaatttttttgtatttttagtagaggcggggtttcaccatattagccaggatggtcttgatctcccgacctcgtgatcctcccgccttggcctcccaaagtgctgggattatagacgagagcactgcgcctggcctgtaaatacctttcttatattttatatgtgacatttcttaaaaag

SEQ ID NO: 93646 - DNA, 1293 bp, Homo sapiens
tcagagcccaggaggttttggttttcttctctgccttgtcttttgactctttttttttcttttatgcagaatttaaatttcgtgaagtgtaataagtcatttccttcactatgtctgcctcggtgtcggaagaaaattcccaagccctctttatgaagatggtagaagcctgaggcattcaactcctttaaagttttgtgacttccagctatcagttgtttgagtaaaagtcatttctctgcctttcacattgtctgcccttcctgttgctttcccttcccattgtccatcttcccatggattctcagcctcagttcataccaggcctcttcatttccaacccccgtattccattcccatgacactcccctcttaccacattctctcttccagtcctaaaaagagaatcaccaggtgggacatttgttatagatagaaaaggaggataagaatatagactattttctttggcctgactgaggccaaaggaaggtgggaaaagtggagaaatatccatagacgtgtctgcaaagagtcaagagacaatggagggttgaaacatttggttgtgcctaggtcagtgaaaatcatggagggaaggagtattttagttgagtcaaaagggtggaatgtggggaagaagaggaaaaggtttttagggaaaggaaactgcatgagtgaggtgtctgagtggggacctgtggacagcgtggcttggctcaggccctggctttacatggagatgtggtgggaggcgaggctaggttggacctaggtaggaaaggggcttactttcccttaagggagtttgattttgtcagaaatatttgtcataacaatgatataggatcctaattttcaaagtgtgtggtagagataatttgggaccctcgagaggaatggccccctgtttagcttgtgagtaagccatcaaatgtgttccttggtaaacaaatagcccagtagatatctatcatttagtcagacatgcttctccacatacagataggtgttatttatagaaatggtcaaatgcctccatttacttgctctttgaaagacaacaaatgtggggataaataaaacctaactgtgttccaaaattaagggacagaaaatttgagtcatgtgaagcatatgtaacccactgtggttataaagagcctatgcaaattaggcagattgcatgcgtagtagagatggaagacaggtaagtgtgttgattgctctgctccttattctgtttacagagagcagtgaagtcagtcttcttgtcagttgcacatctgcaca

SEQ ID NO: 93647 - DNA, 1118 bp, Homo sapiens
ggaagaggcattagattgtgaggccatggggaaccaaattaggattaatgtgtgcaagttactgtgaggccagatttcagctcaataaaaaatagtacttgctgggaactgccataactatcatgtgcttttgtgggtaatgagctgcccgtcactagagattttcaagtaaaggttacacgaccacttgatacgtggaatgcaaacagtggatgagagatggttgcgttagaaaacctctggggccccattccaaccctgaaattggaatggcttctttggttaaagttctttgtttccaagctcagcttatgaccacagttttaatttgttgagggtcttatagaggcatcttgggatgattttctgaaaatataatattagccaaaccaaagcagtataaagagagacaagcttttctggtgggcaaagatggtataaaaaaggctggcccagagcctctctcccctttggccactccagtcatggagtggcgtcagaagggcactgcttcttgacggccttaaagcctgacagatgactggctgtcttcagctactgctaccatctttgctttctgcctagtctcctggaaagaggaaggacctggctaggggcctatcgcagatgtagcaatcaaaacagtgtgtgtcttgcaatttgccagagagttcaggttgcgatccagcagtgaagggcaggtctgggtgaagcagaactgcacagagacagtgcagttctgccgtcatagcacaaaagcagccatagacagtacagaaatgaatgagggtggctgtgttccagtaaagctttatttacaaaagcaggcagcaagctggattgggtccctgaactgtagcttgctgacctctgatagagacgttgaaagttagaagtgtgtagaaaatgccagtttcaattctctcaagttttggaaaaactgaactgaactggactgaaatggcatgtccggagtcacaccgtggttgagctgggattgtaaaccaggatatacttttagtctagggcttattttgtgataccacatagcctcggctgtgtggtcaggtgatagcatttcgtttttaagagaaggccacgctaatgaaagaaagctc

SEQ ID NO: 93648 - DNA, 2026 bp, Homo sapiens
agttagtgagcattttaagattcattctccaaatttatatcataaagaaagaaaataagaagagtcagatgcccttccattgccaatttaatgtgatactgtcattgatatacttattaaaacttgattttctatttagttgaagggtatgggcctaaggaatggtttactgttcaacctcattatcttgaatttagactcatgcaatacttactgaaagactggcatgactgagtgttggcttttcctaagatttggttggggagaaaaaaaaaaactttatgcaatactgagagatttcgttactctgagaccaaacttcattcagatgcccatcagcttcaataagaattggtctggattatggggactttataagttttcctagtgtagagattcagcccaattttcatcagattctccctagaagaggtaaaaggaaaacttgttgttagagtttactacagtgaggaaagcagaccactgcccttctcctggcaagttaggaagtatcctagagcattcttagctaaagtcttatttagcaagattagaatatgtcacttttcgccactgcattgtccttttctgaagaaaggatgatttatgagtcctctggatcttcttgtattaataacatcttgagccagctgttttattgggtgtacacagagggtaattagaaacatctgagaatcccatagcgtgcccagaaaaccatgacgctgtgtggaaatgaaaaaaaataacattaatgccaaaattgtgtacttggtaaatagatgaataagtattcaacaaaatttcctttgtattataccattttccaaaaagaagctaaagtctaaaggctgaaaatatccttttattgaaatacactcactgcagaaatcataaccttatttggtaaaagcctactgactctgctgttcatacagtaattatcatttcccttctgtcaaagtctatcatattttggaccattttgtgccagaagaagtatttcttctttttacctggcagttacttgaaaattttagacttctgaaggatctcatttaaggaaattaactcttaaaagcactaaaaggactaatagtgtccaatttacgtaatagtctatcctaaaaatcgggttgggatgtaggagtttgggctctatttcagctggttatttgaaatttgatctgctgcagtggtggctgagtttgaagtatttgtggatgcagcagcaacagccactaagttcttggggcttgatttaaatcaggcactgctcttcttactctcaagacaaaatctagacaagaaaacctaacaatttggtggtggcttgtgaatggttcctttcattttcattcacaaataacaagcccctatgagaagtcaatgttgagtcacacagacatagcccaggcagacatgggcagagcggagggtggaagcctccagtgtctttccagcctgtcttgctttgcatgtccctattcagtatgccatttttattctctttaattgttttgaatggattcctcattgatcacatgtattagtccattcttgcattgctgttaaaaactacctgagactgggtaggtttcaaagaagaggtttaaggaactcacagttccgcaagctgtacaggaagcatggttggggaggcctcaggaagcttacaatcatggtggaaggcaaaggggaagcaggcacatcttacatggttggagaaggaggagagagtgaaatgggagatgctacacacttttaaacaaccagatcttgtgagaactcattgtcacaagaacagcaagggaaagttcgcccccatgatccaatcacctcccaccaggcccctcctgggcccggggattacactggggattacaattttatatgagatttgggtgggaacacaaatccaaactatatcattacagagatgaagttgtagctaattgtgtgttttgctagaggttatcagtgacttaatgaagcccctggaaggagaagtggattcacctgtgta

SEQ ID NO: 93649 - DNA, 1045 bp, Homo sapiens
gaatggggggagaaataatgtggtaacttaactttctaaaaatattgctacccatcaccaaccagccctgcaagggatatcaacaaaaatgctgaaggcctttaagggaatattattctaatcagagacaagtgggaaagtcaaatcaaaatcatgtgtgtgtctgttctgcaaaaggacagatacgggttttccttcagatggaggtttgttttccctgctctgcctttgccacgataacttgaaatggtctgtctgctggcacagaaagccagggagcgggtggagtggccaggaccctgctgcaggaaggtcaagaacattcttagagtgccttttgggaaccagcagccgaagtatttttatagtcagctaagataacaggaaagaaagaggcagggtctgcctttttatggtataaatttttagaaaattcagtttgcccgcatttatatacaagtcatgaatatttgttcatctaaacaaggttccaattcgtggcacagaatgtgaatattattctgtcagcccaattacttgagtactgcaagttgttttacagaccaaagtgaatggtggaatacaactgaaacgcctgacttatttaaaacctccagcttgttgttcttccagcatggatccttttgctcattttgaccttttacagttgtaccgtgagatactttgagtgaccgtcacaaaattacactttctggagtaacaggctgaaggcctacctcttgttaattgcagtagttcccaggtgactctctgatgcaatatagtgaattatggtgatgaccagcaaagtatcaagctaacaaggttatggaatgtctcagccagcattctgcagttcaccttcctgtaatattttctaaaatatatgccccatggctagccttgtaaccagcgtaccacaagcatctcaagtcaaccttaacaataacgtactcttttcctcttgatgttctgaggttttatagaacttgggaagcacagatgatacatcactagatgatgttttgagagtggcatgaacttt

SEQ ID NO: 93650 - DNA, 1053 bp, Homo sapiens
gaatttaaaagctttcactgtaatacatttagagactttttagaaacaaacttaaagtttttaactgtttaatgggagtgttgggtgagtgtgaggtgacatgaggccaaggaagagaaattggccttgtgaaatgaccaagggccaatctaagaagtcaagttgaaaaaaaaggagatgactataggggattttgtgaggaatcaagcatcaggattgcgttacaggctgttgtgaagacaaggatgatgaagaaatgaacggttctgaattttcttctaaataaataaatgctaaataaatgctaactaaataaatgctcaccagagttgatttcttgacccttagcagggaggattgtgagaagatgagcaatgacatctttgttacaagcagcctcatccttgattaatattaggaagggtgtactcttaattatcagtcaaggaagtccagggtgttttcgagatggaatgctagagaattaatggagaaaattcagtgatcagtgaatagatttgctgatgatagcttaaattcatgaccacagaggacatttctttggattgcattataatgagaaaagagcgggaataatggagttaaaggtttctgtaatgttttctcaccttgacagagaatgccaacctgtagggaaaaaaacatttctattgttttgtttttgtaaaaagttacgtttagtatttcagagttctaaaaatatgtttaacaatcaaataaatcattggtgtttatgtgaattaggctgtctatataggcagtctctataggcatcactaaatctcctatattcaaagaacagaaattgatctcatagaactatatagggtgacagacaggagtggttttcttgaatataaatcaagtatgaagtagttggccggtcctaattttggcagagttaggtttctgtgctacctggagtaagttgtggtagtctacatatatgtgaaaacatttgcaagagtttgctcactgactgttagaatgacaattccagtggttacaatcaccagccacttcagggtaatc

SEQ ID NO: 93651 - DNA, 1063 bp, Homo sapiens
ttatggggataagttgtttgttggctgggaaggggcacaaagaaccttctcaggtgatggaaacattctttttttttttttttttttttttgagacggagtcttgctctgtcgcccaggctggagtgcagtggcgcgatctcggctcactccaagctccacctctcaggttcacgccattctcctgcctcagcctcctgagtagctgggactgcaggcacctgccaccacgcctggctaactttttgtatttttagtagagacggggtttcactgtgttagccaggatggtctcgatctcctgacttcgtgatctgcccacctcggcctcccaaagtgctgggattacaggcgtgagccaccgcgcccggccagaaacgttcttaatcacaatctgggtggtggttacaccacaagtagatatgcaaaaattcatctagttgtatacttaagattgatatattctagtgtatatacgttaaatataggaaacagaaatctaatctctaatttgtagtagctcaggaaatataaaaaaatagatgaaccaaggcagttgaaggaaacagtttttctggaagctgtgagaatgtgtcacaaaggaaggcccaggcttcctgggttcttcgggccaaaattaggggaagtgttggtgccagtgccggtggcacaagctgattaaaacagtcataacaggaagagtcttacacgattcttcgtctttgtggatgtttctgtttcttcctgtctatacctgataggtttgcttggtcattttgtttgttttcttccgtctgaattcctgtcctccattcccatggcatcagagtcaaggcagtaagcagtgtggagagtcaaagaaggggcattggaagagggtactaggcattggttgtaaatcaggtatttatgagtctggggggaaacctctacattaacctggcagccagccgcaaggctgagatggtgctgttatagaaaccacctagcaagggaaaattctgggtcctcaatcttatcatggaatgtgtagtggtgcagccaatgaacaggaatacaggcca

SEQ ID NO: 93652 - DNA, 1209 bp, Homo sapiens
atgtgctaccacgcccagctaattttttgtatttttagtagagacagggttttgccatattggtcaggctggtcttgaactcatgacctcaggtgatccacccgcctcagcctcccaaagtgctgggattataggtgtgagccaccatgcccggccacttttatttattttttaatgtggctttggtatataatgagctgcatctttcttgtctagtttgaaatttgccatttggttgacatgttcttcatgagtttactgccattcatttttaacgaagcttatctctcttaactctttgccctaaggtgagatatgtagaggtgataaaataaagacaaatgtagtaaaataaaaatgacagtctcatttattacttttaggtgagtttgttgagtcttttgaaatgttatcactaattactactcttttcctttaaaaactgtcaactgcagattaggaagttttacacgtaagtcctcttttctgtgttcttttacaaacagttctgatcatgaagcagacagacacctaattataaggctttcctaacgggtggtaaaattagaccataaaattacatttgcacacaaattacctttgaaactgatgcaaggatttggaaatttcaggccaaaaatcacattgttgatgacatccagataacttaggggatcatttttggctgatttgaatcacatgaataaatatgttaaatcattttataatttaaatgtaaagattgtagagtttggatatagagtttgttgtgaatgctttttccacccttttataatttgacttgtagtctggttacaattcttatattgaaggttgctgattaggtaaacttgcagaactagtcacaaaacgctctgtgaaactttgaccagatctgatgtctagagttgagggcagacatccaggttttaataagattatagaaatctgccaatgagatttttgaaacacttgcacatttccttagcatttattttccctgtcattgcccaaataattctgaacttattaaacaaccatccattcttatttgaaaaataaataattcaattttatggttcagctacaacagctgaactgataagtattaagagacgtttgttgctagttaagtgttccagttgagagttcgaagtgaaaacctgggctctttaccagtgttgagtgagaagatttatttctctttcc

SEQ ID NO: 93653 - DNA, 1030 bp, Homo sapiens
tagttaccctctgtatccatggttatgcatcagtggattcaacccaattggttggttgaatctgtggatgcagaactggatatggagggctgatcatactatgcaattttatgtaagggtcttgagcattgcagattttgatatccacaggggttatcctagaactaatccctcatggatactgaggaatgactatgtaaataatatgatatataaaatatatgctaagtatatgctatatataatatgtatattctgatttgggtaggataaggaattaacagatggaaaaatgtttagtaaaaaaaaagttggatttttttctttaaatatgcaagtttatcagaaattcgagcaatttgcttacattttgcacctgtttttgaagttttaaaatgtaactacattagtgatgatttattaagagctattcatcatgatattttcctctgtataagtttgcactgttagatttttaaaaggaatattttcccatcccaaatctagctgcttttaaggaaatctgtcctggtggaatgggttatacggtttctggcgttcatagacgcaggccaatccatcaccatgtaggtaaaggacctgtatttgtcaagccaaagaacactcaacctgttgctaaaagtactcatcctccacctctcccagccaaggaagagccagtggaggccctgaccttctcccgggaacacgggccaggagtggcggagccagaaggtgagagcggtaatggatcatggactctagacatctatctgtgtgtctttgctttgatttccctgtttataaccctctagaacagagtttctcagcctaagcactattggcattttagagtggagaattatttgattgggggctgccctgtgtattgtaaaatgtttagccactgctatagaataatatgtacctagtagataacaatattccatgctaattttagaatgctgtcctgatgtttgggggctgctttatcttggcgtttatatctggagagtaatttagatccttc

SEQ ID NO: 93654 - DNA, 1194 bp, Homo sapiens
ttaaatatagtaacatctctattatgcatcatttggtttgagttaatatagcattcagttattccaaaaaaatttattgagccattgtcatagattgggactcttctcagtgttaggaaaacaatagagaacaaataggacaaaaatctctactttcatgaagcttcaattctcgtgagaagaaaatgggaaactaatgggaatcaagggcataaatagaattcaatgtcacctgatggcctggaccatctgtgaaagaaaggctgtgacatgcttagataatcatgtattcttagagcacatatatagttagtgaagtacttcttagttcaactaaaatttaacatacatgtttgaattgagtttgagtaagaacagaacttacacttaaaagttacaatcaaatactagaatgttgctttttgaaaagtcagtctattggcttttgggcatagatgggggctatgaattgtgagacattttagtaggaaatgtaaacatttactggatctaagtcctatttatgtaatattgttccttctctgaatccggctttctttctttaataaaaacatccattttcattaaatgaatgaactttatgtcagagaactactatgatatattgctagactaaattatcgttgcattttgaaatgggatctcaatgcatgtaacaggctttaattttctttttatctccttctgcataataattacatgaaaattaggtaattattaaatatttatacatttatgtaccattctttaagctgacaagaatgcattattagaatttagatgaggcaatacatacatgagttattttaaatagtattctaaatcttataattatgggatagagtaacatatatgtcataacataagtgctgaaataagaaaaagagacttacaattttggagtgatagcactcgtccagaaagaggttatagtattttgagaccaaaaaatgtataacagatatgcatactttttgtgtacttttgaagctcttagcatctctaaagatcagtcacagcgagtagtttgcaattttgttgattttgaatttagtcctggttgatgtatggaagtaattatttagcttgtaggtgggccagccagcatcctggcagcctcatcacgactcagttcttctgtctttatgattgaatttaataactctcattaaa

SEQ ID NO: 93655 - DNA, 1752 bp, Homo sapiens
tgcctcacggtgatgggggaaattctgtaaactgcagtagtggattaacacctgatcctggtctgttccttgttggcattggccatggctgcagggaatggggtgcaattgagactggttgaggtcatctctagtaagtaatagaaagctagttttaagaagacagaggaaatgtgggaaaaactattaagtgctcagtatttgtaggagctgaattttggtaggtctactcaagttaagaagaaagaggaagccagttagattattacaataaactgaaaatgagagtgagtccggcctagggtggtgggatctatggatatgaaaaagggtgaacaactgttaagaaaaaagtgtcaatggacggggcttgcaatgaaaaatgaaagagggaggactaaaaggtgactttaaacctggatgggacagattaatgactgtggcactggtagaaatgaagttggaatgagagcctggatggttttggaagggtaggctggaggtatctgtgggatatctaaatggacttaccctgtaagcatttgtgcttgcaaagttggatttatgatgagatatccaggcagactatcttagaaaaagcagaaaataggtgatacttgaagccaggagaagaggataagaggttaacagaggccagaggagtaagctttctggaagaggacagaaccaagtaactcgatgagtacttgaatgtagtgatatgagctccctggtcacatctggtgtgagtgaagtcacagatccttaactaggctaattgttcagtctgcctgagccctgcacagttgtaaatggaagctgagccacggatgatggactgcttctttgcttgaggtccaggggacaagcgtgggcaccaaaatgtgtgatgaagccccaaatccttctccaagccagcacatttctgttgctctgcctggctaccactgttcagagagctggagttgtaaagttatcagacgtgaggttaaagaaggccatagtaactgactggtttaaaatattttaacttaccatgtgttctttgttatggcacatctgctatatccattatttaatctgcaaactgtggctggtcatcttagtggggcagagccacatgtgaatgaggcaatagtcctcgttgggggttagttttgccctgttgcagaccaaatatggacccctgggccaagacatttacttacaagatcagactttgggcctcagggaaatggctgaagatatgtgcgtggattagcaccactgggaaaaatttagggctttccatagtagcaccacatcaaaggttcttttttttttttttttttttgtaatttcacacaattatacatgtaaggtcctatgatatttctttgcctttctaagaatataattaattacataaaaatagtaatatgtgggaaactaaaaataatttccactttcaattcttttttttttcttattctcttttaaaatacaaccatccaggaaataccttcattggatcaagagaaaaccaaacttgagcctggtcaaccccagctgtctccaggcatttccactattcatctgcatccacagtttccaggtagcctgtgttgatctgtgctgtttgtcagagtattctgaataaaaatgtaagacgggaaatttttgtctttgactttgtgtagtaaattactagacttcataactgaagttcagtgttaagtatagtaatatacttatataatgttagcataatta

SEQ ID NO: 93656 - DNA, 1147 bp, Homo sapiens
ctttgtattcatgacatgtaagctggatcttactgattgatgcttctccttgatttataaattagagcagaaattgttttgggcagaaataggcaaaatgttagcaggtgttttctgagggactacattttttccctagtgtttagctcaggtcatacaatccctcatcctcaatagtttattatccacttcaaatatctatcatttcagactgtacctaacacacatcatccctaatgctttttggcaactcttgttggctcttctgttaacgtagcttcttctttcaagtcgtggatttcattcttctctagagagtcacgttcgtcattcggcactgtattccttggacctgacattcagcctggagttgctgcccactcgatccccacctttaatgactatttcatcactctgggttctggccagttccaaatggctatttcaaccaagtcctttcttaagggaagccaccctgtcaggtactcaatttacaggttcttcttggcttgtggagatctggcctgattgaaacccgatgagagccatcccccaaggaaactctctaatatttaattatttaaagatacatttgatattgctaatgtagagatcttagttccctgaatttagacagagtttgggctacatgacctctctgaagcttagttttattatctgtaaaatggggattgaaatacttgctgtttaagctttcttgccagaatgaagtaagcaatatgaagcacctagtaggcatctgacatatggtggaaccccatccatgctacaaccctttttccccaactattaccctcctctatactgctcttgtcctcaaacataagagatgcagtaataactggtacttggtaaagtaagttatgtatcacattctttttttttttttttttttttctgagatggagtctcactcttgtcgcccaggctggagtgcaatggcgtgatctcggctcactgcaacctccgcctccagggttcaagtgattctcctgcgtcagcctcccgagtagctgggattacaggtgcccgccaccacgcttggctaatttttgtatttttagtagagatggggtttcaccatgttggccaggctagcctcgaactcctgacctcaggtgatcca

SEQ ID NO: 93657 - DNA, 1057 bp, Homo sapiens
cttctctgtagggtcattagtgattcctaacaaatgttcaggcatctataataatgctgctatttccattcctgtactttattgtctctgctcaccttcacaaggcagaatatgccacctattggatatatgcagctagccttttgggggttgtcttgctttgtagttcagtttgtgatagaacttgagacccggtaacacaaaattctgagattttgtcagtgtaatctttcttttttaacccctgattaagttgagaatgactttctgactcccatttaaactctgtgaatgtaggtcttgggtatttgaagaatttagtatcattcagtctacttgacaactgattagctacagtcttaaccaagacctggcacagagaacttgaagaataaacttggacagaaaacatggagaactcattgttctagaagttcttttcacactaggctttattttcagatttgaagattcagtgttaactttcatggcttatatgaatattcatagactaatccaaaattgaagacttggtacagcagatatttgttttatagaagattgcaactgagtacagcatgtacctttttcatattttatgtgcaaacattagctttatccctacattattatatgctaaaggatgcttctaatcaatcactaagctatttattgagctgttgtctgtgtatctatatgccagagaagattggcagttataaaaacacccacccaaatgtccaacaatgatagactggattaagaaaacgtggcacgtatacaccatggaatactatgcagccataaaaaaatgatgagttcatgtcctttgtagggacagggatgaagctggaaaccatcattctcagcaaactatcgcaaggacaaaaaaccaaacaccgcatgttctcactcataggtgggaattgaacaatgagaacacatggacacaggaaggggaacatcacacaccaggacctgttgtggggtgaggggagggggaagagatagcattaggagatatacctaatgttaaatgaagagttaatgggtgcag

SEQ ID NO: 93658 - DNA, 1026 bp, Homo sapiens
cctaaatggtaatctgcagtgtctgttaatttactttacctagagaaagtatggtcttagaaattgattttgctgttatattctacagccttataaatcactttccctggtgcatgaataattaaagagagcaatccatacatttctgagcttgttaacatttttgaaacaaaaccagatactaaacatgacattttcctgttgctgtctggaatttctatgcctggtgtctaggctcattcccattatttactttggctccaatgcttggcttcttctttcaagttgtttgccttcagtgtttacagaagtggattcccacaaccaaggaaagggtggttaatgagtcagtctggaagtgctatttttgttatcgtggactagagtcagctcaccataattagtgatattttgtgaaagcaacgcagagcacctaggcagtgccatttccttggctcttctcagtatgtgcagggaacacacccgtgtgcacactcacagatacgtgtttgccacattttagtacaactccgtttctgcattccactgtaagaaagaatacagtcttaatacagtgcaaatgcatgcaatctagactctgggtttgtattgtcagtgtgcttgtgactgccttaagagggtagaaagctttgctgctttcgtggtgtagtgagcattgaaaagtgaaacagatgctgtcacgtgtcttttcctccttgtttgcctggcttaggcttaagatgctttgattatgttatagacccctataagattaagcctaattgtgttattgtatgtgtagttttagcattttgtgatttaagtttttcctctttaagttcttgcttattgatacctcactagtgtctgtcactgtgacatacggtggacctacccagggccattcaaatggagcacagaacttacatgtttatttatttttgaaaaatagtaatatgtagtagggacttaatattttttaatgaagtagattttagatgattattttcaatataaatgctgtgt

SEQ ID NO: 93659 - DNA, 1046 bp, Homo sapiens
agagttctttatacaactgtttggccttatagttcaacttctagacaaagtagaattatctgtttccttccataactgcctatgtttttggttttgtttttcaaattcctagtcgagttttccttctgacttctttcatgcaactaaacaggtctgcaaactatctgagcgacattatattgcatcaggttctgccttctgtttgcagctctaaaatatttcatgttgtattccaagacactgatggtgaggagtatgattattataaatagcttattgatttattgtctatttttagttatttctattctatagatcagtatactgaggttgatacaacagcatgggtggagtgataaatactaaagtgtgtagtgccagacataagaagtactattatttttgttacactaatcccagaatgcattgcagggagcactgcattctcctgggtagtctctttttcagaaaaattgccgttgttgtgtttgcagatattgatgaatgtcagcaagggaatctatgtgtaaacgggcagtgcaaaaataccgagggctccttcaggtgcacctgtggacaggggtaccagctgtcggcagctaaagaccagtgtgaaggtaagagggtagtaacatgaactactgaaacttcagcttaaagcacctggtctgaaaaaggtacgctcaatcaagtgagtttaccttttaaaaattacccagataattgcattatagtgccagaaagccaggacttaaacataagttaggaaagtcaataaaacaagattgaagacagttaaatttgaaaacctatggcattagctatcaatggctaggcattagtattaagaagaaaaattattgctttctgtgtaattctttactacagaaggtaatttccatttaaacatgtaaattaatttaaagtttttatatacttggatttcagcaattagaaagtcattatatcgggctgctttatgctgtggaatgttaataaccttaatttttgtatttaacgttgaaaaattttgtcttttaaaaaaa

SEQ ID NO: 93660 - DNA, 1015 bp, Homo sapiens
attctggatttgctagggttgaccttagactttttaaagaaacatttcattgaattgcacacagaaatacttcacttcccaataagtatgtgcttcctgaacttgaagatattatgatctcacctgtgtcaaccacaagtgtccagagttcttgagaggaaacgccatttcttatttaagaacagaatccacactgtataaggccattgtttcataaataaacaatatccacgtcttcatgtatactctgaatatttgagaagcaaaaaagtctcctgagatagtattacaaaagcgacaatacatgatggtcattacttgtatcaacattgtctttctagaatttacactgatccaattgagactgattgaaaatgtttttgaagcaccacttccacagtttctttgtattctcttgctcatagacattgatgaatgccagcaccgtcatctctgtgctcatgggcagtgcaggaacactgagggctcttttcaatgtgtgtgtgaccagggttacagagcatctgggcttggagaccactgtgaaggtaagaattgctcctgatttcagaatcataaaatgcccagatcggagggaaatctgggcatcatctcagccttgatctttgaacctcatctcttgatttcatagtgaagacattaggtccctgcaaagtgtcttccccggggtcacacaaataattcaaagaagggagtagagtccagattatctttgcactgcttggagctgtcttttagacttgtgccagccaaaggcataaaagaatcagtttaactttaccagctatagatggtttatcctgggtacatagttctgaactgtaacaccttatttatgcagaaccaacttctaaatgttccaaataagtaaatacaacttaattttccaggcaattagaaggtttttcagagccaaacatcaattcagtttttggctttttgcataaaatatttctgaaagatatcccacatgtccagtatcgtgcagtcatca

SEQ ID NO: 93661 - DNA, 1096 bp, Homo sapiens
ctttgaggaacatgatcaccttaggataaaatcttagaagttgatttactgattcattaacagtatacactttaaggcctttaaaacgctgccaaaattgccttcccgagggttgggtcatttacactcccagcagcaggaggatatggggctcagccacttgtgactgcttctgccaagttctctggtcagaaatgtagatgctgtaaatgacaatagatctttcccaatccactggactggtagtgaaaaaggatctggggctgctgaaatgtgtgtgtcatgaaaccattcaccaaaaggctcatccacttctctcaaaggtggggttcagaccctccttcaaaaacttggaccctgcatgggagacacaaccctgccaacatgcatatttctggtttcacaactgacaggctctaaatgcagtgaaacctcaggtgggctgggaaaaagcttgttacttaggtggacaatgaatgcagagaaaggtcacaagtgacagaccggtggtaaaagtgaaaaagaagcccactgggagaagatattccccgctccataagcaggcctggttcagtcacccaaccactgcagagagcttcttagccaaacaagtagtgaaagtggttgatgactgcacgatactggacatgtgggatatctttcagaaatattttatgcaaaaagccaaaaactgaattgatgtttggctctgaaaaaccttctaattgcctggaaaattaagttgtatttacttatttggaacatttagaagttggttctgcataaataaggtgttacagttcagaactatgtacccaggataaaccatctatagctggtaaagttaaactgattcttttatgcctttggctggcacaagtctaaaagacagctccaagcagtgcaaagataatctggactctactcccttctttgaattatttgtgtgaccccggggaagacactttgcagggacctaatgtcttcactatgaaatcaagagatgaggttcaaagatcaaggctgagatgatgcccagatttccctccgatctgggcattttatgattctgaaatcaggagcaattcttaccttc

SEQ ID NO: 93662 - DNA, 1043 bp, Homo sapiens
attacccatttccaatgagttatagattggagtctatttcatttatatattcagcagacatttgtgaagtgccatttatgagccaaatactataaataagacatgtctagccttgcccttaagaagcccacatcctagggatggataggcaggaatgtaacaaggtactacagactataacagctgtgtgcatggcaatgggagagggcaaagaaggacagcattctcaccaatgaagagcatctctcagagttgtggagtattcctcaagccccatatgtctaaaataagggtagctttgggttgaacctatgaaattgctttttttgcaggtcaaaaatgattgtacattggctatttcctaactcaacctaaatagtttctctctcataactcagcttgtcctgtggttgatttatggacaaatggtatagttgttccactaaataaatgtccagccatgtcataatagatttatttgccatctgtttgatagtatatgggaatgaaaccgatttttttcaagtttttaagactctattttaaattacagatattaatgaatgtgaacatccagggctctgtggtccgcaaggggagtgcctaaacacagagggttctttccattgtgtctgccagcagggtttctcaatctctgcagatggccgtacgtgtgaaggtaagataaaccatacgaaatcatattgttgtgtgataaaagagagaggagattgctttcacttatacaaagacttgaagacactaagaggtactgcataattcagagcctcaaagcatgtatgcatcaaagtaaaccatatctgaaagcatagctcaggggttgctgggatttacgaagaggataacctaaggttatgatgataaaaacactcacagatggctccacgactggtactgaattaatgagtggaaatgtgcaaggactgataggagacatgtaggagacctaaaggaaaactgtggcaacttccctttcccctgggactctgcttcttttgattgtgcttcatgtagatcgtctt

SEQ ID NO: 93663 - DNA, 1022 bp, Homo sapiens
gctgaagagctagtttccagcaggcattccacgttattttttcctattcattcaaatccaaaatattgctcatctaaactttctcggttaatcactgttacagtaagtctgagactgcaagacgcccagtaattcataaccagcttggggcttgttcaccttcaggtcaattatttggttcctgtgcacagtaacgagaaatcatcatctgctataattgcatagaattaataaaaaggaaagcaaggatgttccttcaggaatctggactgaaaagccaccaggtttctagtacataccttctctttctcctccttagctgtccttccactcattttagtagggaaataagttgctgatgaggttaagttaaaggttcctcaccctgagaaggagccctcgataagcacagcagtggcacaaaatgctctgggactggagaggagaggccctgagatctgcttgtggagtagttaaaggaggtgctgcagaggaggtgtctcttgggctgactcctgaagggccaagaggcatttctaagtaagtccaggggaaaggggtggcatggagattccagagacggaaggagtggcatggagattccagagacggaaggagtatgcaccaagtccatgaaaaattaaagaccgtaggttttcaaagacctctagtatgctaattgagccagagtgcaaattgggaaggaggttgtctggaaactgtggccagacatataggcaggaggcagatgaggaagggtgctccatgccctactaaggagtgtggttaccctttagccaagaggagattctgaacactctgagcaagggaatggtactggtgagtttgcattttgcagagagcacattggcagttttaggtggagaatggatagagggagggaggcaagactggagatgggaagatgacccaccaagagtatgagtatcaggaaagatagtaaagacggcatgacagggaaggacagagaataggagaaagtgaagggtgatattaagatt

SEQ ID NO: 93664 - DNA, 1050 bp, Homo sapiens
ctggatcaaggttatccacaaggttaagtaaactattgctcatttccacctgtaactatcagatgcaaatactattagcatttactgcaactaaaacaagtgacaatattttcacatgttttctctgtaggaatataaggtcccttggaaataaagagtcgagaacgtttaggtaatactgggcgtggcacttgcagccatcatttcagtctaaaaacatttcctaaggaaaagtactaaatgtttttttcatagaacccaacattttggctgttaaaccattttcatcaaaacattttatttatatgtaaaatattttaaaagctgttttctgtgtaaacatgttcatctcatcatcacacactaatcaggatgtgttgagtgcctctgtttatccattaatatctggtgtttgtcagcctgtgtttgttttgtgtctgatgttccatgtcttttttgcagatattgatgaatgtgtaaacaacactgtttgtgacagtcacgggttttgtgacaatacagctggctccttccgctgcctctgttatcagggctttcaagccccacaggatgggcaagggtgtgtgggtgagtttttagattttttcccaacgtgtttcacatgtccctagggaaaagaaatcacagtgaacaacaggagcttttaagcaggtaatttgggtagagctttatcgtaatttgattttgtcatacaatttgaggatgtgcaaaaatatcctatgttggctgggtgcatggctcacggttgtaaccccagcactttgggaggccaaggttggagaattgcttgagaccaggagtttgagaccagcctgggtagcatggtgagatcttttctctatgaataaaaattttaaaaaaaaaattagccaggcttgatggtggatgcctgtagtcccaactacttgggaggccgaggtgggaggatctcatgtgcccaggagtttgaggctgcaataagccgtgatcatgccactgcacggcagcttgggcaacagagaaagaccctgtctcaaaaaaaaaaaaaaa

SEQ ID NO: 93665 - DNA, 1033 bp, Homo sapiens
tgaaaagtcaggaatgataaaactagatggtcagtgggcacatactagttttgcagtacaattccagagtatcttttaaaactagattgggaattggctgggcgcagtggctcgcgcctgtaatcccagcacttttggaggccgaggtgggcggatcacgaggtcaggagatcgagaccatcctgcctaacacggtggaaccccgttgctacttaaaatacaaaacaaattagcggggcgtggtggcaggcacctgtggtcccagctattcaggaggctgaggcaggagaatggcgtgaacccgggaggcagagcttgcagtgagccgagatcgcgcctctgcactccagcctgggcgacagagcgagactccgtctcaaaaaaaaaaaaaaaaaaaaaaaacctaaattcggaattgtcttgaattttcatagtcctttcgtacagaccaaatctgacagctctaccttaaagagccccttccctaaaagagcagaaggggtttgactgctctctggggatcgccttcttttcagcaagacactattagccctggcacagctggtaaaatagagagctgtcgtgaatgaggcacacatctcacttggtctgtgctcccttttccagatgtgaatgaatgtgaactgctcagtggggtgtgtggtgaagccttctgtgaaaacgtggaagggtccttcctgtgcgtgtgtgctgatgaaaaccaagagtacagccccatgactgggcagtgccgctcccggacctccacaggtaagtcccagtgacactgtgcaagggaatgacaggctcctctcaaagacctgcacccacacagctttgggataaacgctgggagtgagataagaagcagccagatgtcctgacacagtgctgtctctggaagcttccatgatcttctgtgcctgccttgtcagtggaattaagatgtgggtgatgactctttgggctagatggcctctaatgttctatccaaaccagagatgcctccagtaaggtaaaggatccaaaatga

SEQ ID NO: 93666 - DNA, 1050 bp, Homo sapiens
tcatcgtgtactttgacagtcaggttctttgtgatattttggcagaaagttaattcagttttattccactttaaaattaaaatcagtctttgttgctgacaatgatacagcattattcgtaactaaagcttgtgtattgaagctatgatttcgtgtaattgattcttactaaacctttaagatactatacatcacagtagtggaaaaataatagttataatttcaagtaaagcatgagtaagaaaatattagtgaacttggaggttttttaaattaaaaagtgtaagaaaacctatgaagtcattagatttctttgcacttaatccatcattttttgagattgtactaaatttatttgctggaattgccttaaagttactgagtctgagaaagcaaaactgaatttgaaacatgcattcatggaagatgttgaatcttttttttttttttgtctcttctaaaatcagctgagttcactgaaatgtgtcccaaagggaaaggttttgtgcctgctggagaatcatcttctgaagctggtggtgagaactataaaggtcagaatcaagtggaaacaaattttcagcacattgtgtacatgtcagatattcaagtgaaaacatggcttgggtttcacagaattagagttctttttagtcatgaaaactgattacaaagtccttaattctaccattaaaagaaagtccccatggacttgcagtcagaacacaaactgtatgatgctcggagtttgacattgggaggtgaacttctgagtttctgtctcttcatccctgagataggaataatttctcaaaggttataatgattaagatatatatctgaaagtacttaacaaattctgtacctagtagatacttactaaatattttattctagatgcttaatagaaatcatatcaattatgatcatataaatttgaccactgtttgtctttatggtcatcaacaaagctaaggttcttgtatttttagactttatcctactgttgtggggccttttaccagtgtgcacaagttcataatgagaaat

SEQ ID NO: 93667 - DNA, 2059 bp, Homo sapiens
cagccattttaaatactgacccagactttaatgcttaagcagaaaaccatatacactaggcagaaaaacatagcaaaaggaaataattttaaaagttatcataaagagccatttaatcttaaatttctaagcatatcctgttcatggatgttttctttccttatttaatgtcagcagcagcagcagcaatgttgtttttcagtcagagcagcttacatttttatagacagagccactctcttttggatgataatgtgtggttaattaaaatttggcagcacctggaatctggactaaatatagcaatgtgtaaagtttgggaagtgtatgaggtacaactgatggctgattttctttagtaatacttttttttgctcttaagatatggatgaatgtcaagaccccagtagttgtattgatggccagtgtgttaatacagagggctcttacaactgcttctgtactcaccccatggtcctggatgcgtcagaaaaaagatgtatacgaccggctgagtcaaacggtatgtttccaggagatgcaaacctgtgtccaaataactatcataagattttccttttaactaaaatgtgaactattggaaaatagaaaaatggattccttgggtattttgaaataactaaaatgagatacaatgagatacttacagaaatagtaataagatgcatatcatcagtatgtaggagatttaatagcctggacatactcattaagtatggactatggagtggctgagcagatggcagggttgttccatggcttagggttcatcatccctaacctgcagaggcagctgagggaaatgtaattcagggaaagataattaggtgcactcagcagagtggaggatgtggataaggctcagcagaacagagggtggagttcaacagggtggtggagagccccgaagtccactgacaaactcctgtcctccctgatgctactgataattggcaaaaagccgctgataattggcataatctgtcattcgcctcaggagactgctttggatgaagtcaattgaaaggtaggaattaaagactctaggatgaagggtcactagtccagggctttggcagattaaatggataagaaggcatgaatccaatagctgttacatggaaagaaatggtagggtttgacaggagtaaatgaaaaagtgaagattaggagagtgagaagcctgatggcttatgaaggacaagcaagatagtgggcattttatataaaagtaggaagctatagagaactattgtgtcgggaccggatgggcagctggaatttcaactgatggaatgacacccagttggagatgacagagaattgatccattgaaagaccagactggattcagacttttacttggaagtcactcttagaaatagagatggaaactttgagacttgctggcttccaacacagtgtttataaataggaataactgtgcgattttcatggaactatgtcttccctttcagaacaaatagaagaaactgatgtctaccaagatttgtgctgggaacatctgagtgatgaatacgtgtgtagccggcctcttgtgggcaagcagacaacgtacactgagtgctgctgtctgtatggagaggcctggggcatgcagtgtgccctctgccccctgaaggattcaggtgagcccatatccaattccttctgcaggaggcctttggggacaagttcatctcacctcctttgtagcctgacatttctcttctgtatctttgccttcactcctgatatcttactttcatcccgtgtgtgtgtgtgtgtgtgtgtgtagggcagaactgcataaacatttggctcctggtttacctctactcccgaccctgtcgttaatttttgaaactctcattccattaccccaatgaatgataaatgacccaaaaaaacataacttagcaatcagtggcataggcttagaatttatatttcctggcagttcattttttactacaattcttctcattcctaacagtttctacttagaccaaaatgtgtattagagacggtagaaaat

SEQ ID NO: 93668 - DNA, 1080 bp, Homo sapiens
gtagacaaatgcagaaataattgttcttaatgtaagactgtcttttctagaccactgcttcgtaaacattaatgggcatgtcagttacctgggggagcttatcaaaaaacagattctggtttctcacttgcaaaagatggggcggggcgcgagacacaggattctgcatttctgataagtcccaagctgctgctgctgctgctgcttcctctgaggaggaagcaaagctctagagccatctaatagcatctaactttattttgttaaaacctacgttaatgctggtagttatctatcataaaggaagcaaagaatatgtgaattttaaaactagtttgttcatagtttctgccattgaaccttttaaatatactgttcccggatatcttaatcgttgagaaggaccacgttgtctatctcttcatctaagcactggactaatcccagcctgtcagacatcatgcatcccattttccttaggagtgcagtactgctttggggaacaattcgttactgatggaatcagtgctggaggaatttaaggaataaatcgcaccacttgtcatcagctttaagcattaaagtgcagtgtaaaataaagctttggctccagagcgagctttcacacttctggtccaacaggtcacgggcactaattcttgctaaagcagcaactacatctgagagtactggtaggtgcaggaggtaggagtggctgcttaaatagtgttctctgaagttagatggcatcttgcatattggtaccacatgcaggggaaatgagtgtgatggattgtgtcaggggagctttacataaggagaattgcataattgtagaattcatacatttctggggctgcttaggatcccatttcaatgctccactacagaggccagaccgcagactgcactaggaggaagttcctgatttttccttcaccatggatgtatcatggactgactgtctccccattcagacttctggaggccttccttgccccattgcagcccctgactcctcttctccttcccctttcacagtacccgctgatcctgcccactcttaaaatgatttgggtg

SEQ ID NO: 93669 - DNA, 1413 bp, Homo sapiens
taaattttgttttcttttactaaaagtaataagctattaaattataaagaaaattgtgttttaacgtattttaatcttgcttatttttttaaagcttcatagcagagaaagctcttctaatatttaaaactctcttaatattcagaagttcagatctcaaggttctgaataacaaagatataccactatccattaacattattggaagagcaagttctaatcaatgtaatatgaaaataacactaaacatagtcaatgactagtcatgaaaatgtatttcattcaataacaggaagtaagacatcactgcaaagtaaaagatggactatcttgaaatcctgattctgttttatgatttctttgtattctgccatttacttcaatctgagatgaccctcctctttccttcccctctggatctgttcactatcagatacagtcctagcaacttctgcctctggcagtgatttctttggaaggggctcacagattaccacatgaatgcattaaaagtaatggcagggccgggcacggtggctcatgcctatgaatcccagcactttgggaggccgaggtgggtggatcacaacgtcaggagattgagaccatcctggctaacaaggtaaaaccctctctctaataaaaatacaaaaaattagctgggcatggtggcaggcacctgtagtcccagctcctcaggaggctgaggcaggagaattgcttgaacctgggaggcggagcttgcagtgagccaagattgcaccactgcactccagcctgggcaacagaatgagactctgtcttggaaaaagaaaaaaaaaaaaaaaaaaaaaaagcaatggcaaaaactgaaattacttttgcaccaacctagtattttcttgaaatgagcagtgtacaatcagcacaactgctcaaaacagctcagcctgccactgagacttgaagcccagaaggaagcataaagaaggctttgttgtgtcagaagccctcccaatgagctaatgttttgtaatctgcttctttcttaaggtagtggctactgatgcttagcagaacaattactttctagcttctgctccctgcagatttgtaaatacaagaacctggtcattctaagaactttctagatgtttttctcccaatcataaggggcacaatctgtctgcggcataaaaggagaataaaatttacttcatccctcctctgcccggcttgcctgctctggccatgaggtcactgtttaacagacatgggcagtcagcagctttgttctagccatagttgtattattaggttcgttaagaagaggtcaaaagaaattcaaacgttagttgaattcaaaacctcaaacttagaacagtgcttaagcaattatgcacagtgattttctcaaagtcagactcatcacag

SEQ ID NO: 93670 - DNA, 1047 bp, Homo sapiens
acaagagagttagctaacacgcactattaagttcctacgcaccagacactacttttgcatacactgtttcatttaaaactcagaactctatgaaataattgtaattagctccttttgtttccaataagaaaactacactttttaatagcataacttgccttgcccaaggtcaggtgagggatttgaacccaaagtggtctatctgccaaaccatgttctttctactccccagctgtccttttgaaaccctgggaaaaaaattattaaatacactccctagaccttaagcatcaggtaagcacttagttcagcaataagcatttgtgactaaaattccagggagagtaataaccatgaatgctgatgagctcagctccaccaggggcagctccatcattagcaggatttatgtttattgaatttgctcgatttattaggtgaaagagatcaaattgcttaatgttcaattaaattgtacttgtcgaggacagggaagtaatgaagtctaaagtcttggcaaggtttatattctgtgggactcctgtaaatgttaatactctaaggagactcacgggccatagaccaaccacgttctccccactcccaaccttcacctaatgttaccctcctcattttagttactcccagagtttcccaacagactgctgtttatttagcaagacaaaatgaaaaaagagatttgttgggtagaaatgccaaaaaaatagtggttcctttgcattttaaaacctggatccaaacatttatactactgtaatagtattaaattatgccacacacaataaccttaaaataatgattgccaatgtatctggggcataggaaatatattaagtcttacatccaagcaatttcataggaaatcaggaatgaggcttctaaaattgataagagacaagactgaacaacacaataaacaaagaggcaaatgaaaagagtgttcagcatgttaaatttccaaactgatctacttcatattttttcagctgcaaggacaggtaaaccacttcatttcccctttcctgc

SEQ ID NO: 93671 - DNA, 1055 bp, Homo sapiens
gttttaaaatgcaaaggaaccactatttttttggcatttctacccaacaaatctcttttttcattttgtcttgctaaataaacagcagtctgttgggaaactctgggagtaactaaaatgaggagggtaacattaggtgaaggttgggagtggggagaacgtggttggtctatggcccgtgagtctccttagagtattaacatttacaggagtcccacagaatataaaccttgccaagactttagacttcattacttccctgtcctcgacaagtacaatttaattgaacattaagcaatttgatctctttcacctaataaatcgagcaaattcaataaacataaatcctgctaatgatggagctgcccctggtggagctgagctcatcagcattcatggttattactctccctggaattttagtcacaaatgcttattgctgaactaagtgcttacctgatgcttaaggtctagggagtgtatttaataatttttttcccagggtttcaaaaggacagctggggagtagaaagaacatggtttggcagatagaccactttgggttcaaatccctcacctgaccttgggcaaggcaagttatgctattaaaaagtgtagttttcttattggaaacaaaaggagctaattacaattatttcatagagttctgagttttaaatgaaacagtgtatgcaaaagtagtgtctggtgcgtaggaacttaatagtgcgtgttagctaactctcttgtttttaattgttcagtagcctgcatctacagcagttagcgccctactgcttcttttttttttttttttttttttttttttttttttttttgagacagagtctcgctctgttgcccaggctggagtgcagtggtgcgatctcggttcactgcaacctccacctcccgagttcaagcaattctcctgtctcagcctcccaggtagctgggactacaggtgcacgccaccacgcctggctaatttttgtatttttggtagagacggggtttcaccatattgttcaggctgctctcgaactcctgactgt

SEQ ID NO: 93672 - DNA, 1336 bp, Homo sapiens
atgtgccctgattgactatcatcacatctttccgtactctcaggtcccaccctgtccgtaatgaagcaatgaatgaatcacttttaatagagctaaggcaaagagtaccttaattccgtgcaataaatggagaaactaaggctaaaagaaccgtgtccagaccaagaaactaggaagtggagaaacaaggactagaacccaagtctttggattccaggtgtttgcagtgtatccagttttgcatcacaacaccacatattttagttttagggaaggagggttgctgcctgttcaccagagactgtaagcagtaatgtattccgggataaagagcaggacagacacccaggcagacatccagtctcacagtattgtggcaatacccaaggaggtctctcttccacctttctttactggtacagagtggaatgttctgtaaatggccaccgtttttctaatttcataacttttactaatttcatttaaagaaaagtgcccattggctgggcgcagtggctcacgcctgtaatcccagcactttgggaggccgaggcaggcagatcacgaggtcaggagctcaagaccagcctggccaacatactgaaaccccgtctctactaaaaatataaaattagccgggcatggtggcgcacatctgtagtcccagctactcgggaggctgaggcaggagaatcactcgaatctgggaggtggagattgcagtgaaccgagattgcgccactgcactccatcctgggtgacagagcgagactccgtctcaggggaataaaaaagtgtctattacaatgctggcttatcagtcactggaggagacagtcatttcattctctttatctcctccctctgtttcctagttgtgtgttttaaacaccattgtcgttaatccatgtttaaacctgtaagaaaaatacctggtctagaaattgtagtagcatgtgacccacttttctgcttctttttctcttttttttcttttctttctttttttagatagggtctcactctgctcaggctggagtgcagtggcacaatcacagctcactgcagcctggacttatctgggctcagatgatcctctagcctcagtgtgccgctatgcccagctaatttttgaatatttttttgtggagacagagtttcaccatgttgcccaggctggtctcaaactcctgggctcaagtgatctgcccacctcagcctcccaaagtgctgggattacaggcgtgagccactgcgcccagccctgacctgtttttcttaatgcatgaaaattggtccttgtttctcttatatttgaaaataacacagttcaaac

SEQ ID NO: 93673 - DNA, 1258 bp, Homo sapiens
ttatggaaggctttagacaggctgtatggagaggcctctgcgtaggtatctggttcctcttgacaaatctagcagttcctccatacctatgggaaggaatttggaagtaatatagttcctccaacttccttgaggttctactagaaaatgtcaagctcacaaaatgctcatgttttgctagataacagtgaaagaagttctagaacctccctgataatctgcctctttaagatctcaaaaaagtcatcttcgtcttgtctgtgactgaagcaatgacgagaaagcttccttggggtggtcgggggaagggcctcaggtaagcctcaggttatgtgtcctcacagaataatatccaagattgtttacctgcatggcttgacttattgcagatgtaaatgaatgcgatgagttgaacaaccggatgtctctctgcaagaatgccaagtgcattaacaccgatggttcctacaagtgtttgtgtctgccaggctacgtgccttctgacaagccaaactactgcactccgttgaataccgccttgaatttagagaaagacagtgacctggagtgaaacagaatctacataacctaagcccatatactctgcactgtgtaaaggaaaagggagaaatgtattatacttgagacattgcacctaccccggaaggctggaaatacagaaacagcatggaattgcaagtcctctgaagacaatgagaggatttaggatgagcccgataggtgtggcagaccaaatggacatttctctaaaaaaccagtatatatagtctgttcatatgtaaaattcaatggaagagaggtggaacagtgctgttattttaaacagaaggttgtattattatgttgttttgtttttttactattgcttgattaaatttggcatttaaatagtggtggaaatattttatataattttcattttttggttgtgcagttccttggctactgtttttcttttacttcagttttttaaaaatctcaaatgaaaaagtcttcgatacaatattgttaagctgtattataagtattgttacacagggttatgcaattcccggcctggagcatttttgaaattcaaattgtctgtcctgtggagcaggcagtgattttgttccaaaactttgtatacacatttggagaaaagtactttatattttcagtgttttgtctgattttaatgtccgttcttagccaagctgctagcaggtgttaattggatccctttccttcactgaaa

SEQ ID NO: 93674 - DNA, 4637 bp, Homo sapiens
ttaaattatgttttcttatacatagttttctagttgaacacccttagaatcattttgtgaatctcaggatttctgcagaatatttttatttgtgtaagattagaagcacttttctcatactttgtaaatatttcacacagctgataaaagtaaactgaaattaagtatggtgcatgtttctcgttgccaaatggattgccttcaagccaaaaacttcactgggctgagcttcacacagtaaattatgggaaagataaataagaattgtgtacttcacatactcttcattatgttttgtgaatcagctttttgtcacctatcatttcattaattgttagtatattatatggaataagaacttttgactgttaaatggccgggatctcagttatgaatgacacagacgtagtttttgcccttttgggacagagaatcaagcagatttaaactctaactagtctttttaattttgcttcaggaaaagatagaagcaattaaccaagccatagccaatgaatatgaagtccggagaaagctgctaataaaacgtttggatgtcactgtacaatcctttggctggtctgacagagctaaggtacacattaaataatttaaaagagcagactatttatagacatgatccctgaacatctaaacaatttagctacttggcaactatgggagaagtacatagaagacacacatagggatttttccttagtgagttattgagtagtggctctttcaactattcagcaatgatgaaaacatttatttttcaattttctattttttaacaaatctgaattttacagttcttattggagagagaagttcttattatgagagaaatggagttattctgaaaattactaaaataataaattgatttcaaattacttgtttactttaaataatttaatttgctaatagaagttagaaatattggatttggtatgatttatagacaattggagaatttggtaagacttaagttttttttcagctaaatgagacaatccaggtaaagaccttggtcattcagcagatagttattacctcatagaaaccaaagataggaaaattaaaaagcaaaattgttgaaatagctttatattcttatatttaaatagagaaaatgagtatgtttgatctgagaccaatgatgggggaacctttttatcacgttggcctcataaccctaaaggggcaccctctcactccacccctgcccccacagtccctgtcactccttgttgtgtcaacaagtctggcagctgtacttttaaggtagttcttgactatgtaggagcagtagtgagtatataacttttcctaccatctagagcctagtaaatatcattatcagatattttggagacctttaacttatttaatatgtgtttcttatgtcattttgaaaattgacatttctctttgaacacttttctttcaacagagccagacagaaaaattagccaaggtttaccagccgaaacgttcagtcttatcccctaaaactactatttctgttgcccatcttttggctgcaaggcaggacttgtcaaagattttaaggacaagcagcggctctataagagaaaagactgcctgtgccatcaataaggtgattagagtacctttaattttttccaaatgcatttatttctgttcataaaataaaagtttaaaatatctttcctattctgtaggtgttgatgggcagggtgcctgacagaggtggtagacccaatgaaatcgaacctccacccccagagatgccaccgtggcagaagaggcaagatggcccccagcagcaaacaggaggccgaggaggagggagaggtggctatgaacattcctcatacggaggacgaggaggtcatgaacaaggaggcgggagaggtggacgtggtggctatgaccatggtggccgagggggaggaagaggaaataagcatcaaggaggctggacagatggagggagtggtggaggaggtggctaccaagatggtggttatcgagattcaggtttccagccaggtggctatcatggtggccacagcagtggtggctatcaaggcggaggttatggtggcttccaaacatcttcttcatatacaggaagtggataccagggtggtggctaccagcaggacaatagataccaagatggcgggcaccatggtgatcgtggtggtggtcgtggtgggcgaggtggtcgtggaggccgaggtggtcgtgcaggccagggaggaggctggggaggaagagggagccagaattatcaccaagggggtcaatttgaacagcatttccagcatggaggttatcagtataatcattctggatttggacagggaagacattacactagttgaggctaccgaaccttacattttgctagagctcaagtaatagaaacttagtttcagaatcctgaattcagcacctattttgaattaatgtgagaccacaggtggcaggcagattcctgcttggcataagcatttgtaggtcttcattcaattctgttagatttttttattggacttacataatgccgtttatttgagaaacacataacatctctcctttctatgaaaaattttttaaaaggtggttaaaattgcctttaattgcccagtagactaattccacagtcagaacatgcaaacttttttgaagaaattacttgaataagtagttttcatgttttcaatatgcagttttgaaaatgaggattcacctagacttttttagatttactactaggaaaccttcctcatatgaataaccatttatatgtgttttgcttaaagtattccaatgcctattttccaagcacagttctgccccccggttgacttttatgccacgtgtgcttcatgatggaacttttaggtcagttcctattaaatgagctcttttgcagatagcacattcagtagccttattttgttgatggaatactgtatcatatgctcaactctgaaaaccttgaacacggccaaaatccataaagattataaaagcaaactaagttgtgaagctatagtacatgtaggcatttagttaagtatagcaattcaaactgacctgcatccatccaaaacaaattcctccttcaaccttatttttacttgaaatttgctagaagaaatagcaaaccgaaatttgttttatgcatgagttaataccactggctcagcaaatacaagttagtttgctttaagcaggtaactttttttgtaatggaagaaatgcactacaaagttaagacagatttttgctaagtgcaggaggccctttattattgctgcagaaaacaaaagcctggctgagttgatgttttacattctcccttactgaaatctacatgacatgatgcttcttgctgggtttttgtacatgtaaacattgtcaagctgtgaaagaaaatggctggaggtgtgctttgtgtgaaaggtgagcaataaagtatctgttaagttctctctttggtttgagttttattttagctactgaattattctggactcttgcgtcaagctgatgagctaaggcttttgttcccaaagattcttgagtatttccttaaaacctaattttagtgaaaggtgacttttatcctaaaaccttaaataaatggaaaaatggctctttccaggttttccttttataataatatagctagaaaccgtcaccactcatctctggccactgggtgtagctgttgctacacatactaggcaaaaatgtttttagggtttttttgttatttgcttctccattcttcctaagattgggggactttttttaaaaaaggaagtaactgaaaatataaatatgtttatcaaaagagaaattgtatttcctttctactaaattgggcttttttaaagaatcaactcatgtcatgccatttaaaataatctacttgctactgagataagcacattcttctaatactaaaaccatctttgaaaacccacattgatccttttaactttacctgtttatttttcagctaacatttacaattattttaaaatgttcaaatttgaagacaatttcaagtgttttatcattaaagtaagttaaggttttaagttgtcttgaatgttgtgttggtttctttaaactgttaagtaattatgtttatataggatttcctattaaaattgtcaaggtttcatattttaaatgtatcatatcttaggatgtatttatatttagtatttgctttgatctgttttgtagcctcagactccacaatatagctaatgaatacaggtttcattcttttgaaaaatattttgatttatctttacggttaatagattgctttttcgaatataaggatgtaagaacacaaatgatacatttcgccctgatagttctgaaatctgcagctcctgcttcaaactagattttcccccaacattattattttttaaaaaacttctatgttcaggggtacatgtgaaggtttgttatacaggtaaacttgtgtcacagcggtttgttgtacagactatttcatcatccaggtattaagcccaacacccgaaggttatcttttctgttcctctagttcctcccaccctccaccctcaagtagacccctatctgtt

SEQ ID NO: 93675 - DNA, 1227 bp, Homo sapiens
actttcttaaatttccaatttaggagctgagggtagacgtgtgcactggtagcattattgtttttgtaactgatactctttcaatatttcagcctcagtggtactcaggccgttgtgcttctcctaatgtgatcactggtagttttggagtgttgctcaagtgtgtgatcattaaacttacattttagactagaagcacatttttaagtatattaggaagatagtatggaaataatggagattttgtttagaaattcatttctttgaggagagtaagcatttataatagtagatacagttaatggttaatgtaatttaaagtattttgtcttgttgctatttctttgtggttgggtaattggggattttggttttgtttgtaaatattctggaataatacttgcattgttctggtacttattctgagaaatgagtttttatgaaaagttctttccttccatgttttttacatacttactactgttttgtctcttcacactgaaaaacagtaagtagattcaaaaattttattgccttctataaactttccaataaatacaacctatagtcttaactcagaatttatgtagcattctgaagcacatttacattaagctttggttaactggctattatagttctcattatgacagacaattcagaggatttttaaaatctttgtttttacaactctattatggtttctgaaaaaattatacaacttcagtttttaaggttctgttaaaaaaaaaaaaagtgttcatagccattatacttaggcactaagttattccagaatcacttttgtaacttcccctttgtctgtcaaatgattgttattgtgggaatgtgcacgtaaggttaggtgttgctttagatactgatattgctgctggtagttcttacatattcatttaatattcttcatattgtacaatttctgtaactgattcaatagcagtatactcagctgattcttcctttatagcattgcttatcctttaccaatatttggcacttagaatatgttatctacataggaagataatagctgtgtggaatgcttactaatgaccctgaatagctaattcttccaaagagctcagagtttggcctttttagcactgatacttatacaaaccacttgaatgtaagtataaaatgcctttcacacttttctgtttcttaagcagacttcagtgaacattattttggactcagggtcat

SEQ ID NO: 93676 - DNA, 1078 bp, Homo sapiens
gcacccaggcttcgctaagccacttgtatgggcgctgcatctgttccgctggccagctcgcttgtgcatctaacctatcaccacgtccctgggaaccaccagcagtttgctttgactctgtgatactctgcctcgttgagccccattagaccagggtcgtcttcacccacgaagaacctgcgtatttgttttgcattgtgtctctccttctcctgatatttattcaaccataattcatcagtatctagaagctggaaatagggtttgttatctcactgggtcacccagatcagtgtactctattaaacttgagaacgtggaccctcttgggctaaatgtggttccagaaacaaattgtatggttagatacttacctacaggtacggtatcaaaacaaagtacagatttagctagctgtatttctaagtaacaagttctttatcaaaattttctcttaggtttttccatgacaaggaaacctttgagagaaacctttctttaggaaaaaacaccttgaggattcccaaagtctgcctatttgaataatttactaccctagtagaaatttttaggaacgaagtagtcttgcttatcatctgtctttgtcacagtgaaatactattgttcttttcttggaaacttgctctgaatttttataaatattccagactttagggggcttctttctttcattagggcatatgttaaagtcattcagcaaaatagtctctttagttgacatctcagactgaatcgcttgttcacacatgaaaccattcattcattaggacttttttaggaacagtttctttgtggcagtgttaggcccttagagtacaaggtgaggtggaagaggggttcacaggatactgggaaaatatgctgtgaggagccctgaggagggtccctttactgggaaaggaaatgaaatcctagaagcttctttctggaataaatgacactatagtactgtagtggaatgagtggaatgaaaggaagggggtagaccttattaaatgtagtctttctgcatggatagtggtcacttaagaattggccacggatgctgtttcttccc

SEQ ID NO: 93677 - DNA, 1031 bp, Homo sapiens
ctcgttggggagccaatgttagtgcgtgttggctttaatccctgcccgcttgcgtcggccttcagggtgcctggtctggtttggggtctagagcgaggcagtgagttattttgatgtggctaacgggggcacggttcggtaagcatcagttaaaagtgggatccctgctctggctgacgttgggctgatgatgctgttccgggggcatcctggcgagtgagcagagcgcacgcagcagcctcgtttctggggaggcggcgaggagggacaggcgccctctgcccggcgtgccttcctcactactcacagccagcaccgtccagggaacggtttattccgaagcatctttgtgtgtgtttgtttagtatgctgggatactgaaaaaggaggtgacagccttaaggataacaatggacctattaaaaggcttcagtgctgtgattctctctaaatacgcacagacacacacataggtacttatttatacctgaatagtttggggtttggacagttcaggaaaataggggagggttttctggtttggaagctagtgggcagtgatgagtgaagggaactcttctcagaggggagggacttgctcttgctttgctgcacacgtaagacattgggttagaagagatcatttgcctgaagtacaaaaaagcctctcacctggtattgtccccttttataacttgtttttatgccttacctcaagaaaaatggccatgagattaacttctgataccattgtatgtgttttgactttgggaattctgaatgacctagactaaaagatgcatctttgaaccctgccgcttcaagtgtataacttaatccggcctctcgtaaatctgaaaagaacaggcgacatgaaacacagttaaatgcagtggaaactgctgtgttccaagaaggacttttgcaggttctgaagattctaacccttgttttgtttcttcttagtctgtttctggtgaaggaagtgctcagggaacatttacagtaatcgagtgttgtggcagcaatat

SEQ ID NO: 93678 - DNA, 1932 bp, Homo sapiens
ggcacttcctttaaaaaaaaaaatactgaaaacagcagtcaacttgcattctaaatctgtgaaaccaaagtaaggacagtgttacctggcatgatataatggttggatttagacagatattttcaatcgtgtgtttacaatttcagtgttttcacttaacgacaagatttatggaaagcatgggataagtgataccccaaccgccccccgcctgccatttttaaaaaaagaattagaggagccttcagatgtcagcagttacctagaaggtattgattatctcttgtttttctgtgagtttacaagaaatttcggaatggccagtgtttccctcagtttccatttttattcagaaattcacgtggtgaagcatggttatcataactaacatgaataggaatcaatatattttattcatgttgaagtctcttttgctgcaatttttgcactaaaatgacccctactggttgtatctgttaatgaaaactcttgaaaacttatttaattggctacgttgtaaaaacatattgcatgttatagaaatattatcatgactaatctccctgctttcgatgacataatttaaatacaaattatattctctgtttgccaacttgcagtaatttttagcagtgtttactctcatactggctttgtaggggaaaaaaattacgtttttaactgcagttcacaaaatgagttagataaatcatgggcagaaatgggcccctttcagcttgtggctcacagccttaggtttttaaggcatgctggtctagttggctctcagtaaaagtacattgaacaaacggaagaacaatcctatccatagaaagaatgctgaaggaaaaaaaatattttctgaatgattaaataatgtgatgagttgtgtcctgtgcaccatgtgagatgtgcacttggatttcttttccgcattgtttagattgttattaaataaattctaattgaattattccttttgtggtgggggctgggggtggtaagtgcatttgaaaaaatgagcatggagcctgatacctaaaagtttttcctactttctgtcagtctagaaagtgctttttggaacttaggagagtgcaggtctttttcctctttccattcgtctgctaagacctcctgttgctctttgcagcatcctaactggcctgttttcttggccaggctgcctgcctccaggaaaatcacctagaagccagagaaacaagtgtggatcctgaacccctgagaaagaaatctggatggaagacatctttggaggatcgaaggcagagtttagaaaaattaatgaagtgagattttctagaaagaagattttgattggacagtgagaattatgttttgagctaaggggttgagagccatttcttctcccatgtgtcatagcgctttatgcttctataaggagtgaggcaaggtgagagagcatgaccagcctctctgggcagttaaagggcagatggtgacttgctttggcagtttgtacagacagagtgatgaggaaccaggtggagactacttgagtcactgttccgaggactctgttgtattagattcaggtgatagctagatcagataagcaccaatttttttcttggtgactatttactcagtagcttcatattttggaacttagcattccatctttttcaccattgctatctaaaaacgacctctttcagaacgcaatcctccttttatttcccccaggaattttaactgttccttttacccatttttcattgggcagtgtgtaagagaactatgtatacatagtggggtacttacagcaaaaaacagaattttgtttcctgaaacttgccatgcaaagtttctttgcttatccctggaagacagtcagtgaagatgatggctgcttggaagaaaatgtatgcgggatctgctccagaaagc

SEQ ID NO: 93679 - DNA, 1040 bp, Homo sapiens
caaaaatcaggcacttttatttcagccctgacaacagtgcggccttcccaaagtatgagaagagcagcgtgcagaggtaatgtgcagtcttccgaacagagcactgaactggtttttaatgaagggtaatatgtacttggggtccaaactctagttaattccggaaaacatatcctctcactagtgttgggtcttagtaaatgagtgttctgtgttgaatccttgcttgagaggaaggaggtcataattggtcagggattctatttctttctttctctcttttttttttttttttttttttaaagaaaagcaattgcttagaatgagatgaatctatatcagggtatgtttttgtaggatcatattaatcatcttacccacagactgactttgtggtcaaactttactcataaggatttattaaaagcaatggtttggttaaaaaaaaaaaaaaaaggtatgtttatgggaggaatgtagacatttagttgaagtacagttgatagactttgaccactcagggatattttctccatggactgtcttacagaggcagagcctaactgcatatgcttcttatgactctgatgcatgaatggcagccctaaatgggctcctcttcacttattccttctccccaatctccccagcactgtgttctgtttccttccctgcaagagtctgcgtttatcagtcaggtactcctgtcctcagagtgccaggccagctctgcatccttctccacaagaccaggctgaagtctgcctgttcacctgttgatgctacacagtttgagctcaagctccttattctttgccggcttcccttttttgagttccagtggagtggtactcttgtgtcagagggattcagcactgcccactatgtcatggtactctgcgctgctcctcttgggtctggatggggccacagttgtccagtcccatcatgctgcagccctaagctccagagggtgaccttgataggatgcacatcctggagcttaatttcataagccttgggggcctgcaagcaggagg

SEQ ID NO: 93680 - DNA, 1064 bp, Homo sapiens
ttacataggatatggatttgatcagagcatcctttgggagttgtctgcatttggtatttccttttatatcctgaaagctgttagttcttgaaaggtgtattgaacctaataaaatagtaattagaggtatttccacaaattgtgagctttgtcatttggatagtgtttttgagacttcttttccactctaaataccaactttaaatagaataatatgacagaattatgatcttgaaaaatttatctacttaactgcatgtgggaatacatatttctgtagcatgtggaaaaaggactgagtgatgcatacctgttatatttacattttcttttggaagcaaattattttctacatgtgtatgtttatgcctacatgtgttctaatttgaaatgtaaaaatctataaaaaatttttccttgactgctatgttttaaaatatctgaaagttacctgcttcctagtccttggaaggcctgaattattataaagtttatttctttgcatctcaatcattcccaaaagattttaaatatgaatgcataagtagtgaataaacaaacctgaaagtttgatacctacagaacatttttaaagctgcttctttttttccatgcagtattgttagtagagtataatactagttatgtcgtagagcagtcacttactcatttatttacttcagcaagtggatattggggcctgctgtgtgttcagcacagagtgagtatagaaatgagggaagcagtttctgctctcaagaagctcagcaatgccttaggataagggaagtgctgggggcgggtgtgctggaaagagagagggatgggtggaagaaaattgaaaatcagacttctttgaagaaaagatacttaagctgggcacactatggtagtagcagctttctaggtagaccggaggaaaaaaaagtgttcctaagcagagaaatgggatccgtaaaggcccattggagtgaacatgcatagtatactcagggaatcagttgattgagtaaatatttatggaggccctactatgtgctgagccctgttccaggtgcagaaga

SEQ ID NO: 93681 - DNA, 1039 bp, Homo sapiens
ctaagatgcataaagtttaccaggtgcttatgtggtgggtgtgtttccgagacgctatggaatggcggtgctgtggtggtgtgagcagggccctctgtgccagccctcctaggccacctctgcataatggatgatttcacaagcggtgtgcttgagatcagcatctgttgtcaccaggtccattctgtttgatttaccgtaggatggtgctccatgaggagtctgctaattagaaatgcggctcatctggcatgaaagagttatctctttagcagaaatgggagaattatgcagtgatgattgaaggcttaggttggttttgctggagggcaggaatcacatagggcgtggagggatcattaggctcttcacctctggagataagtcagaaattgcattcaagtaacaagaaaattatactgatatggctcataacttttgtacattcatacatacaaccaagaaaaaacttcaagaaattgaatatatgactcatcaccacagtaatcttgagtgaagtacccagagcttggtgccatggctcatagccaaaaggggtaaagcctgggtttgggtctcagctctgccgctaaccagcattaaactctcgtagccccagtttcttcttgagggaaaaaagtactgaaagaggcattcttaaatatacctcttatctctaaaatgatgtcgttgtaagatggagtgattggtaatataataccaaggattcttaaagtccaaaaatcaagcttataagggcagtaaagcaggactgaagttttggaaatgtacttagtttccaagttatattaaatggtaaggaagaagaaatttgcagtagcctacaaaataacatttctctttgtatttaccagtgctcctgaatcattagaaaagaatagagtagaaaacaatagaaataacatttgcgaattgcagaggatcctagagaacatttagtccagtccttgaacttgaacactgggaaactgagtttccacgcatttgatgagtatcagtgctagtactaatcacacca

SEQ ID NO: 93682 - DNA, 1046 bp, Homo sapiens
accgtatctgattgaatttctttacttgttattttccaacttattatttcagatggcttctatgtaatccaaatgtggaattagttgaggtcatttaaggttaatgtatcttctacaaacagtgctttgttattcaaaataaagtaccaggcagtatgtgagatcttgtaagaagtcaggattaggggatttcccttttctgagaaggaattttgaaggaaaaagcatacttatattcaggtatatattgtatatgaaagaattagtgatgaaatcatacttaataaatagtcacgtcgttaatagtgacagagacttggaatgctataggacctcaatgccaagaaagtatgatttggaattgtgtgataaggtatcatggagggtagactgaacgatttagaatagtgatgatgatagatttcagaagtgaggccaacatggacgaaagaagaaaatgtggaagtgggaatctgcatgacttacatggaatacacttgggaaactggtctgaaagagcagagttttatgttggtggacaataggaaataaagattggagggaggataggaccagattatgaaatgtcttaaacattgtgcaacaagcttaagccgggtaatatgagcaatcagaaatcattataggtttatgaacagacagaatcagaaagaagatggtgaagtcaacattaggcagactttggttgtggtggaatgcaaactggattagcagagggagataatggcagtcaagaggctcgttggagagcttttcagctgtttagatgtgttaccacaagaaactggactagagtggcagcaggaaaacagcaaagaagagatggatatgcaccattttgatggaagaacctacggtatctgctagcaggaaagggaaggatgaaaattacacaaagatgattctagggtttctaacctgaaatagaatgatagtgcaagtaatagaagtaggaagacttttgaggagtctcgtgataaaatggtactgaaaataggggtaattattttagggcaatgtagagg

SEQ ID NO: 93683 - DNA, 1043 bp, Homo sapiens
aagcctttaaaagtatctgactatagtagagctggtcagacccacacctggaattagggctagttcagagtagaagcactgaaatgattaagtaattggatagagaggtcaagaaataggattatagtcatagactctttcagtccagaaggtactcagcattctctacaagtaccttccgaggcgaccgctttcagtttagagctgctttaattgttgattcattcatgcatttattcatgtattcattcaaaaagaatgtattgagcacatgccatgtgccactacacctcagattcactagggcaaatttagtttgcttttacctgaggactattttctaaatgacctaaattgcaacacattttcaatatactatgggagcttgctttgtttttttgtttttatattttgattttacattgtatggctatgttctctgaaatgaaactaatttttacacaaagacttctgttttatagccttttttcttttcatttttaaaagcgcagataacagttgcctcagatcattaacttaattatcctgtactctaaatttactatttcagtgctacctaaggaaatggtaatatcatgagttttttattccatttttagttttttacatttcacttatttcacttcctttttttctttacacaagtaaagcgtacgtgctaaattttattctcgattgttacctcgtccttggtctagaggctgtagtacaaccctgtgctgtgtgtggcctaataaaatgttgtaaatcttatgtcatctgtaatgtttgtcagtaaacaaatctttagtatttagaaagaaatattatgccattttttatttatataactttttttctcaaaagcattttgggtattttttatgtgcgtgggagaaaatgctcacagaaaacacccaagtaaatgtgatctggtggagctgggagtattagcattcatgccgcctttgaaatagtgcaacagaatttcctcttaatgttcctgccactagaaccgcttcatggagacacttttcagctgt

SEQ ID NO: 93684 - DNA, 1017 bp, Homo sapiens
acagaccttttataaatatcagagttgtggttttgcaacagtgtacatgaaaagacacttgtttcagtgtttgagttcatggcagggtgcattaacgtggcgtctgcaagtatccttgaagccacattgaggagggaacttgggacttgttccatggtggtcctgctctgacctcagaggaccttgcttgctgacttttttaaggcatgaaacaaattctcatattctcagtcgtgtctgacgcagatctgggtactagtcagggttctaaactgcctaaataaatatcttgcatataacatctaaagtgacatttatctctgtggtactaaaaagaaaatactattccacttacatgttcttggtgccctttggcattttgattgctaattacaataggaccttcagattgccttctgattgagacctaacttatttctgtttcatctggaatttttcaaatacaattattatgtggtgttaacacttcattgcagcatggaactcccaaaaatgttgtgtatatattctttcatgcctctcagcctggcttcatgtctgtctaggtacaggtcttattataatgttgcccttgggggtccttttgatatatcaagaactaaacctctttagtcaggagagtgtattctgtatggatttataataaatagtctgtgttcatatgcataggaaataatgcattttctgaaaaaaattatgcatgtcacttgtattttttgtactttatgtgccggaagaacattgtatacaaatatgtcccatgtgcatgtatgaatttatatagctacatgtatataagcacatatacatccatgatgatatcataggtaatatgtggaaataagtgcaaccatgtgattatttttatcttattctttgtgtgtgtgtgtgtgtgtgtgtacagttacctgtgtgctattaaatgtgacagtgccgataatagtgttacattctctggttaagtgtttcctgagaattttggtcttccttaatggt

SEQ ID NO: 93685 - DNA, 1048 bp, Homo sapiens
tactggcatttgggagggactcaggctgtcaggaaaatgaaccaatctgtattaatataaagcgctagaaatataaataaatcatgtttgaaagcgataccaggattttccttgaatgctgctgaataaattctgcttgttaaatgtcagtgaaatgtatgtcacctgcatgcataaagtgagagggccacaaaaaacatccacttaccactttgaaatatgtaagccctttaatgttcctttgaccttcagttaaaggacatagtctcatagcagaggaaatgcctcaaattctagcatctgggtttgtttctttatacttttttggcatagttacaacagtagggcttttctgtcctttaatttttttcacagtacagtcaacacaggcttttcacacaagcgggaaaggacggttgtgaggccaaaagcaatatgtttcttctctgtgctccacggcagagcctaattgaatggcttgttgtttcagagagagcccagaaccaacaagcagacaaacagaatcccacacaaatacaaattgcgtataaaattagatacctacacacgtgcgtatcaatggatatgtactaaaaatgcagtcagcgatctcttattttgagctcattggcttagtcaccgtgttccaattctttcatctttgcagtttttggattttcatctgaattttcagctggctaaagatgtttcttctacagctgaaaagagaacctagtttcattacatacacttgtaaagtgtatgtatttggatgggggtgctctatttcagccctattcatatgtcaaccatattgtcatttatcattagcaaaaggtcacttttaagctttgcagaatgaaacggtgagatccgattttccattaattaaaaaatatacatcataacagtatgctggagacatcttcatatatttgtgttttccctgctttacatccaataggtttctgtgtatgagcttctcctgagactgaataatagcagcacaccctaatgcaccttttttaatgggaattcagttgggtac

SEQ ID NO: 93686 - DNA, 1075 bp, Homo sapiens
agagagaaagcagctgtttttagggggaggagagaagatggtggagcttacaagagactgatgtttgcaagtggatatggtataaagtagtagttctcaaagcacggtgcctagacagcagcatcaggagcctgtgaatttgttagaagcacacatcctgaggcttcacccaagaccaggggataagatttggcaatctgtgcttaaaaaagcgtttgccttgctcacttctgagaaccagtggtctaaagagtgttgggaagcctgacagtggtagttacaagggtgtaccctgatgggagtcctgggatcaaaaagacttgaactagaagtaagggaccaggtgagggagcattcccttcagagagagttgttaaaataagccggggttctcatgatgctgctgaaaggagtgtaagtactgtacctcctgtgtttgggaccaagggtgtatctagccttaggcttccattccagcacatcccgtcagccagatgtgcaaaagttcctccgtatacacactgtactgcttaaattgctggtattttgaaatagaaaaaggtgcttataaacccatactgactgtgatgaacagggagtactttttccacctacctctgcttgggaggctgaaccccatcttgccctggaagatggctttgagccagaagccaagccctttaatggctatgaaggggggaaaaagtatgatttccatgtaagggctaccaagaatataagtacctatttaataaattatttgttgaaatgccttttctattttggtagttgaagtttgaaaaatgtttggagtactataattatcatttctgggaaaaaaatacacattgcagtatttttgtttttgctacaggtcaagttgtagttcaggatggaaagtaaacacatccctttgctcagctgcagctcacatatttgtagtctctgggtgccctcttggcagtcgtggtggatacccaaaggacacaaacagggcatagaaacgcggggctccatcaggggcttgccccagtgcaagtctgattaggaagtttgctggagccgaaggaatggc

SEQ ID NO: 93687 - DNA, 1035 bp, Homo sapiens
ctttaagtaacaaatctctaatctaaagcatcattatgaatgcaattccataacatcgtttgggaagaaaagatgtgtggttcaggagattcctagaggcacggtggggccgatatatgccttagacctggtggcaggcagagatctggagggctcagtgcttctttggcacttggccagctgtggcttgccagggtgttggaacatgcccttggcgaagctgtactgtcaatagggagcttcattgtaaagattctctgtttgcttggagtaaggcagtggttctcaggcccaattgcacaatagaatcaccctgggagctatttaaacaagtactaatgcccaggctcctcccccagaatttctgatttaattggtttgaggtgggatccagacagtggtatttttaaaatctttgtgagtgattttaatgcacagccagggttgagaaccactgaattaagaaatcacgttacagtcttacagatcacttttttccctttatatttggctaagttatactgcacagtgatgcaaactagctttattaggtagtcaaaaacaatttaatatggcatttttgacaaaccaccaagaaaagactctgcaaagattccgtcgctgttaaatcctaaattcggagtcttaagatagtgctgggaaagtgcagtgggtgtttctgaacgagcttgaaatatgaaatatttctgggactgtatcaacaagtctaattttttccccttggggttatgattgtgcggaacaagtcttcacagcaaagcttgccaaaaaaggttatgataaaatcatggaatgtgtatgaaaagaattcacagtgtaactttaaaggagtcagtctctaaatttaaaaacttagggatgacatacgtattacatttgtaataaaagttttaagaacaaagtaatgctgaatataagaaagttcctccttttatcacatgatatctctaaggccaaggaacaagtgaaatagaacagccagcaagaaagtaatgaggatacgctaaagacact

SEQ ID NO: 93688 - DNA, 1059 bp, Homo sapiens
aatttctttccctaccgtcctctttggctacttaaatagatcatcaggactgtttgttcttctgttgaaagtgccccacactgccctgggcataagctaaattctttctctcccttttagaagagaagccagattgctccaaggcccgctgtgaagtccagttctctccacgttgtcctgaagattctgttctgatcgagggttatgctcctcctggggagtgctgtcccttacccagccgctgcgtgtgcaaccccgcaggctgtctgcgcaaagtctgccagccgggaaacctgaacatactagtgtcaaaagcctcagggaagccgggagagtgctgtgacctctatgagtgcaaaccaggtatgcacgagctctgtctcagcagccttgttcctttgcatcagagggtagcagatccctcctcagccacccctggcctctcctttcacacgaagatgggccttctcaccggtgtcctgtgaatctgccactttgggctaatggcagcttgacttctggccttctagtcagagaaccagagtgatcatccactggtacataagcgccttcggagagcgagcgtgtcttttcctcttttcttctttttttccttcaaagtatgcttgactggggaggtagggttaaaatttatggtactatggcaatctgcttcatttccccagagaaggtcagagaccttatttgcagctatatctgccactttgaattattacatttaaaaacaatcatcatacgtaaaacagaaagttatttttagatgaatacatgcatcaaaacgccagaagtttcataatgcaacactcagccccaatctttctctttgccaattcccccgcatctgccctctttactttatagcatgtgccaagtcatctttgactgtttactcaccctctttgccaacatttgatgtactgttgtatcccagctgtttcttgctttatattatttctaacatccttgctcttgtggcagcatttccgatgtggtctgtgaacacttctgagttatagcgatttcctctttgcaagtttc

SEQ ID NO: 93689 - DNA, 1033 bp, Homo sapiens
ccatgagaaacctagtcctttcctgtttctctggaagaaatcactgaactgtttgcattacttggtatttatatgtatctttcctcagatcaaaaccaggtgtcatcaggttaagtcgttaaaccttatagattctttctgtaagggtgcctgtacacttttgagggctgggacctatataagcaaatatgcccctctgtatatagatagggaggcaggcagtgaggtgtctatcaagagtagacacatcatttgatcctctgcagtgaatcttgtaggtgcttaaacaacatgttcaatgtgatgaaacattgggacccttgatgtttggaatcacacatctacccagacccatttcttgctgaggtcaagaggagtcttaattcttacaatgctttctggaataacaaacacatctctctttggcttgactgcggggaagagccactgtcattttaaccctagtagcagggcatgcacttagccccctagaactagtttttctctagaacatgaggatctccgggtcctgtcctttttagtctacaaagcaccaccatagagctgtccctccttcgtacttggctttggggaagactgttcttggaaatgtagggtttacagtctgttttcccccgactactcacccctcttctctgccatgacctcccttccatcttttgcaggtcaacaagccatctttatgactaagtcatttcatgtttttcagctttcgttctgcgtttaataggatgagttaaaactgtgccttatttaactcaatttccaacctcttcttcctcagtcccagtgctaggcatttagcttctgggtttgttgcatgagtacctgtgattatgcaaatggttggataagataggagtagatgtggtccataggtaaggtaagtatcagttatctgtccgtaattgaagagacatccagaatttgttctgataattactttttccttctttcttctcataaaataagttaaatccttggcatctcctagcctttgttctgtcaaacc

SEQ ID NO: 93690 - DNA, 1117 bp, Homo sapiens
gacagagctccttggagctggatagatttctttccgtctggatggccacctgcccggaatgcttacaagaattgtattaggttggaaaggaggttgaactagctgccttccattttatcctcaagcttctgtgagtctagaaaataaaacttgaagatgattattactgtgttgacataattttgacttcagcattcaaaaatgaagaatggccagagttaaatttgcctctaatgaagacattgaaaacatagagaaggaagtcattcaacatcccactgtaaattatttgcagagaagggataggttctcacagctctttagtttcctgtatgtcagatcatcagtgacccatactcatcccctgctcatttgttcgctttgaacagggtctcctcctccagctctctcacgagtcctgtgcctttgcagttgccactacctcttcccggactcccttctgcatacatataggcagcttctacctctccttcaagactgcatttcctgctctttgaagtgttgtcactcttcggcccctgaagatgacttaagtgtccctctctgctcccttgtcatccatcccctgtgtatctttttatcatagcacttttcataacacattgaacatactgatgtttttttgtctgtctctcctgtcctgtgtgattgtcaaggaaagggagtattttgtagcctcttgtacctaaatataatgtgtcagcccacatctgttggtgaatgaatggatgaacaaacaggccctctcttagccaagatgatttatatgttgaagaaaagaaaaagaatgaatatttttagtttctagttaccttcctgccattgggttgtaatactactccctgtctcattttcaaatccttgcacttttcccccagtccccactttatggtgcggtactcctcaatcctgtagaaaccctccattccaagcacagcagtcatctctcacagcatgggatgcctttcactctccattccatctcttttcatattgctcatccagcaggactctaattaatttctcctctgtccacgtggtcttcatgcttcaaccaacaggtcccactgcctagaaacttcccacataatccttt

SEQ ID NO: 93691 - DNA, 1096 bp, Homo sapiens
ggtgaggcacgaggaaaactgtgagcctaaggaactttcatagggaggagtgctgttttccataagaagggttggaccctcagataggaaacctgtttctttttggatattttatttgcagcctttaaaaaaaaaaaaacttacacattcctggaaagagtaagaaatttaatcagtagaaagatagtacatcgaatttaattaaagttgcagctactttttatagaatagcactgtgttttatatgtcattataatttccattcccgacaagctatttcattaacacactgtgtagaatcctagtaacacaagggctttgccctttttgctcctcatttatccttgtttcctgactaaagggcgacctcccacccacctgtaagtagtttttaatttataggcggtcatgtctccacttttgaaggcctcaagcactcacttccggtgtgtagtagatccagtattgaaagaaatcttttccagaagacctcactgacttgttttcctctaggatacgggcagaggaagatcagagtctgctggggaagatgaggaatatgatggcttgctgcttccgagctgcctcctctgcagaaggagcctactatggggaatgttaggataacatcagcacccacaccaggaggatacctctggggtgacggggcgaggcagaggttgaggggcattcctgttctttgctgaaagggctgtgggaggggcaaacaggactcctagccctgtggcctcctccaggaatctcctgtaggttatcttcctttaaggtttttctggtcattgtagtaaaacaaactgttgacccttgcgcttagttatgtagggtctgaaacatgcctagtggtagggagacaacagcatctagcatgttgtttcttttccggccttgcttagagttctttagtagggaaaaaaaagttatataattattatgcccccacgaaaaacaaaacgtcaccagtgcaaaggccctatcttgagctgggcctgaaggttgaggtgcttggagaggaggaggatcaggggagtaagggacacaaggtgactgatgttcctgaaggacagggtgcaggtga

SEQ ID NO: 93692 - DNA, 1060 bp, Homo sapiens
ttggactagaactggaaattggggagagggcttcagaaatgaggggtaagtgttgaaatcagctcactgcagcttttctcatgaaatgctgtttgctctgccccttttgtgttctcctttcctttgcttgctccttatccagagatggggataaagggagggaaagattagggaggacaaaaagaattaaaatgaagagaaagaatgtggtgaggacggtacaggttgcatgcgtcagttcttctgtagttcagcatttcctgttcatgactcagtagaggaaaatctagtctcttctagtggaaaacacagagaacaggaaaccctatttaaaatcaggtcacttgactaagctgtgtaactcctgttcccatcggtgaaagggaagaatacctcctgcagtgtgtgttaaccagagaatctagaataatcttactgaagaattttttaaaactacatgggactcatatcatttgtagatataacagacttcctgggcaaatatgggtcatgatggggtccccttttgttacctgacagagtgaatgtaaacatacctgttaaaagataactcatgtgagttgtattatgttgaaaataaggaattgctatttgaccatttcgaactgcaaaactggcagtttcagtaaggttttaacctaatagatagctacccaatagatatctgacctaagcccagatttttaccttttgtggttctttcatcagctctttcttgattaagatgctaatttcacgttcaggggaagctgtgaaaagtcaaaagatggcaacaggtagatcagaaggctttgcagggaaggaaacaaggagacaggagctggggtcacaccagctagcaaaaccaggatctttattatgcagtcagtttagttgtaaagattcagcataaaacattttcctttcctaggtgggttaataggtggttgggtgcaacttcagctcttctgtagcctgctggagacaacttgtaagggactttaaaaaaaaaataggaatatttaaatgttaggaagacgtaatgcatataatgtttact

SEQ ID NO: 93693 - DNA, 1020 bp, Homo sapiens
aggtgagattctgtgaatacttgtaccactggagacagaaatagtcactgcttccctgggttcccagcatctcagatatgcttcatccagtgctcatcacttggaaaagacttaacgctcatgcctgtctctcactccaaaatgtgaactgctggaggacaggagtctgtcacattcatccttgtgtctgtagttgttagcctattatctgcctcacagaggacacccagattttgttgcatgagccagtgaatgatctaattcgtatcatcttagttccctctagaggtgtctgttaaatgtcagcccataaatgggttactttgtaggaatcctccatctatttactgccctacactttaatcttaagtcatttgtcccctgaaaatatcatctctagtagaaagatttgctggtgtttcctatgggtgaggaaccggagtgcccttcttctctccttgcttcttggttctagatacccatgggtcattcctttcttatcagaacatagactttatgtcttgctccagtctgatgtgtctcaaactactaatagccgtacctccaccttagcaaccttgggatcagtctgcagggcctgtcctcatttattgccacttattatagagccctgacttctggaataggatttgccatctgtcctgagaagatgttgagtggacaaaacacagtcactacatctctggtcgttgcttctttcttgccaccataaacttgttgagtgatctttgctttcttcctaatcctgtggaactgtgtctattgatatatcagtcattcacctgtagaggagactaggaactaatactgtgaagattcataatcctacagaatattgttaagaacattgtctcaaagcctgcatttttcttcttttgatatatacattcatactcatacacacacatatatattgatagatgaatgtgtctgtgtatgtatatataaatatacttaccacctagtgtcctggaaaaatctgttgttgtaaggtcacca

SEQ ID NO: 93694 - DNA, 1028 bp, Homo sapiens
ttttaagattgttttggcaattctgggtcccttgcattttcatatgaattttatgatcagcttatcaatttctacaaaagagccagctaggagtttgatagagattgcattgaacatgtagatcaatttggggaatatttccatttaaacaatgttgtctttcaatccatgaacacgggatgtcccgtttacttaggcctttttagttttttgaaaatgttttgttattttcaaaatacaagtttgtacttatgttattacatttattcctaagtattgtatactttttgatgctattgtgattggaattgttttcttcattttctgattgttcattgctagggtatacaaacacaatttggggagttgcaattgtactctgcaaccttgttgaacttgtttatacattctgatagttttttagtggatcccttaaaactgtttacatacaagatcatgtcatctgcaattagagatagttttacttcttcctttccaatctggatgcttttaatttatttatttttcctaattgctctggctagaattttcattactatgtcgaattgaagtggtgagaacacacctcattgtcttgttcctgatcttagggggaaagcacttggacttttgccattaagtatgaggttagctgtaggacttttgaggatgccatttatcaagttgaggaagttccgttctattcctagttggttgagcatttttatcatgaaagaatattagattctgtcagatgccaaaaactgtgtctatcgaatgatcatgttgctttttttccttattgtgtgacatatcgtattaacattaatattttggatgttaaaccaaccttgcattcttggaataagtctcacttggtcatggtgtataattttgtttatatgttgctggatgtggtctgctagtaattttttttaagatttttgtgtctacatttataatatactgatctgtagttgtgttttcttgtcttggtgggagttattttaaatcaactaaaattaaag

SEQ ID NO: 93695 - DNA, 1095 bp, Homo sapiens
tgaacagcattttggcataagaatatagcctctaaaagtgagtacttttatcaataacacttatttgtaagtataactcctggtgtgtttataaaaaaaatcaattcacctactacatagtatttttatgacttctagggattagaggcatgtatttaaatggtcatatactgtattacaacgtttttctgaaattgcaggtgttctattccaacatttttttcaaatacattagactaaaataatttgcctacagaaacaggtcaaaataggttgcgattctaatataatttatttttagtattttagttatccaattccacttctagttataccatactgtttcctggtatagtcttaagtatatcctataaaaacagaatgatttcacattgcttaatatatgagggttagcactgaagatagtgaaaaatccagtgagtcactgttaaacccccattagaacttttctgtgttgtatctatctgattattgaagatacagtgtcacacaagcatataaaccatctgttgcaatactattttaaaatcgtaggacaggttcaaagaggggaaatgtccattaaagaacgcctcttgcgcatgtgtgggtctccccatcacaggtggctgatgaggtggcaggagcagcatcatacccacctatcagcctcttaatttgagagccccaaatactcccctgcatgagctcccagaatgcagattgggaaatctgttgccaggggactcagcaaagccagatcttggtccaggggtcataccatcagtttaatctaaatttgatgtgctttgagcaatacgggacatgtaacatgtttctgaaatttgccagaaagcatgcattttgttttataaatattttgagtttaagttgatcagcagtttgaccaaatttttatttaccatttatatctacagaatacctgtttacacctcagtggagtttaactttcgcatctgagagattagctggatttatctggtttgtttgaaacagcctagttcaggtatatggaccatttgagatcacagaatttaatgctagctgccagtaaaaagatgcagtcccaggctc

SEQ ID NO: 93696 - DNA, 1079 bp, Homo sapiens
caaaatgattttttgcttcttgcatgctacagcgttgaggcttggaaggtatcccatgggacttgttttacctgaaatatttaacacacacattgtaagaccagcacatactgaacggccctttatgcaattttatttgttcaagtgaacaaaacctgttatgctgaatattttaggaaaacatattgaacatatttcctctcctggagaaatgtgtgttagatgtacatctgtgactgtgtacctaactgttgaagccatttggatagattggcttctgtgactgatacggggctgcccaagtcagcattgtggttctgatcctcaaataacccagtccatttgttcctttcactttctagccacagatcacaaccttaatcgcatgttaatctaatatattttttaaaaaacagcacatacatcactattgagagcaaatatcatttagaggtagaagatcatctttgtaaaagttggacgatggattctctaagcaaatccctaaaattcactgctgctaaaattccatactaccctatgatatgatgattatacatttttcaaggtcagtttaatcttcagtatatacttttccatagtatgttttctgaaggcaaaattttctcataaatttcacatattaaatgtcagtaaagaatagaagattttggtatgtgtagatatgcttaagacatttctttacccataagctgtccaggaaagcagtgtgcctagagttcagaattcttccctcaactttggcctaatcgctctagaacatagaagtcctttctcactgggataacctgtggtgggtttacttaaacctgatacttgccttctacgctctctcatatttgtggttagagtaattttgacaaaacattggcagtcttgggactgaagactggaatagaatcattatttggggtagctaagaaaagtagtgataaaagaaagactaataggtttgagaactaaagatgtttgcagtaaattttaagagaatggaggggagcagcaatacgctaactcaggatgtcttaaaacaactaaactttagttattttttgatg

SEQ ID NO: 93697 - DNA, 1015 bp, Homo sapiens
tgctgaacatagctgcttacagtagtcctaagcatttataccttgagtagagttatttagctgacaacatatatctccacaagaaatcttgaaagacacttcgcccgtatcttgtctgaagtcaaaatatattgcaaaatacatcagagcattcctttgctggaaaccctatttttaaaatgagctgaagttataggggcctggcttatttttccagaatctgtactggctcctggtagtcagtgctttattcccctaaatgtcacaaatcatatatttaacaattatttctgaagaattttcagttgtgaatgtcaatttatgtagtttttagaacactttgtcccttttgaattgacatttggcctattttcttaaatctctttccattctcttcgatctctctcacacacagtactggttctgtaataagcgggctttctgtgggcctgtggttgtaattaccatggctcagagacttggacttaacgtagacagatgctcactttctgatttatcagttatctcaggctttaacataccacttaaccttaattatttgtcactattttaaaaatatttttgaagaagatacaaaataggagttaagccattctgcttcctcagttacatgtgaccatcacactatctacagtggcgttagtgctaaaactgagtttataaaacgcctgttggccaggcgtggtggctcacacctataatcccagcactttgggaggctaaggtggatggattgcttgacctcaggagttcgaaaccagcctgggcaacatggcaaaaccccatctctacaaaaaaaaatacaaaagctagccaggcatgatagcaagggcctgtagttccagctactcaagagtctaaggtggggcgatctcttgagctcgggaagtcgaggccgcagctagctgtgattgtgccactgcactccagcctgggtgacagagcaagaccctttttcaaaaaactaacaaacaaaaaaaaaactcttgttgag

SEQ ID NO: 93698 - DNA, 1050 bp, Homo sapiens
gcagcctcgacctcctgggttcaagtaatcctcttgcctcagcctcccaagtagctgggattacattcactcaccaccacacccagctaatgttttattttctggcagaggcaaggtctcactatgttgcacaggctggtctcaaactcttggcctcaagcaattctcccacctcagcttcccaaagtgctgggattacaggttccagccagccgcagtcagtctcctctttatttaaatgtttgctatgatgatgcatttctcttaagaaaacttcataattgacatatgtggatttaggactaccttccagtttttaatgttgtctatttctgaactagaagatggtattttgagatgttttggcaagtgctagtatttcaggaaaatttcaatgttatcagagtaagttattttcatgctgtcatttctctgataatatagcagtcttgatgacagtggaggagtaggtaacaagaacattgattgatgcatttagttagcaaatgttgttgaatacccactctgtaccaaataccatggttgtccctatacagtgtgtgcctaaagatactagggcctgggcctagagctccctctattgggaagctgaatgtagatgggccagagcataacatgcaggagaatggtcccaattcagggcagcactagagcatcccactcctaggaggcatagccagtctccttctaatgaatgtcctgtatttttatttaaatgtaccagcctttgtttgaaattccattccattgcaaagcagaggtagattacagactagtttttatcacattgtttaaacttgaatggagacacaacagttttctttaaaggtgaagcacattcaagatcaaggtctgtggaaaaactccttctttattgcaggaccagaaaaataaaggcaccaaggtgctcaggctccaaaattgcagggaatttaatcccaagggatgttgactgactctgggaggttttcagggtgtttttaattcatctgtttcccaacataattcatttgtagccatgacctaagc

SEQ ID NO: 93699 - DNA, 1087 bp, Homo sapiens
ctgttgacagacttaaaccacttgaacctcacgtcctaatattagctcttttgccattgtcttctgtttccatgcatggaatattttcttcactattctcttaataagaatagagcgagatgctcttcacagttcatctcttctatcccttaaagcaaacagcaccaggctttcaagagttggaaagattgcagatgaataatgtgttctgattttgtgtcatttcccagatgactttgtggtgcagaagccagagctcagtactccctccatttgccacgcccctggaggagaatactttgtggaaggagaaacgtggaacattgactcctgtactcagtgcacctgccacagcggacgggtgctgtgtgagacagaggtgtgcccaccgctgctctgccagaacccctcacgcacccaggattcctgctgcccacagtgtacaggtaagcgacaccatgccttgtgggtgcttggtggggaaggatgcagctctgggtgttgtcattctgtgggacccacagggcaggatcagccccatatgggagtgtgccaaacccagtatcccatcaggaacagctggcagcctgcttcctgcatgtattctctttatcaaccacctatttatgcagtcagcatgcctcacacctgagatgactgtgaaacaaaaaaggagactgttgctcttgccaatttttttccttaaccctgcatctcaaactcgaggcgtatacctaagtagagaaagtcccaccgcaccaaattaaccaaacgattctgttactgtgaaaagtcatctttatgtaacaaatgagaagaatagttatttataaataatgtaaacaaaattctttgtaaataaaattctttgaaatataagggtggcgaagagactttgaaatatgcataatgccaccccctccaagttgggatgattagtaagttaatgccaaaaagcattaagtgactagcactgcacatgtataaggagtgctattattttctactttttatttctcagataatctgaccttagcaggtaaatgtatggccatgaaacttgttagaaggaaatttgtcaagatgt

SEQ ID NO: 93700 - DNA, 1055 bp, Homo sapiens
tacagatctctaaaaacctcaaactcacaattaagggacctcttttattagtggtcaaaaaaaaagtatgcatgtgaagtatccttttttcctactgtaagaaaaatgaaaagtggtgattctaccaaaaatagttttctgattacaagtatttgtgttccttgtgtcaaattgtcaagtcactaatgagcaatgataatgcttctcttttgatgttcgagggcctcatattatgtgtgctaatttaataggatatgtaatatagacataattaataggattgatgattaattttgaaaagtgaacagctttgtctagtttcttataatatccatcattagggaattcattgttctactagaaagaaactaagtagtaattacccattcactttaatggaacatcttctgattccctaatttttttttgtactctggttttctaagtaaatacattcaaacttagattttattttcataagctgactataatgaagggttaaaggatgaagaacaagaatcaaaagttgacaagtatgacgcaggtggagataaaaggtctggtgggaattctgatgggtgaaaagagatttcatatgtggttccttgtaaacagcaaatgcctctgttatgacctacttagccatgcaagagtgtactcgtttctaaagcatcccatggccatttcactgatgacatgctacatgcctttctcaaaccttgccagagcaaaaattatttcagtgctttcagtgaagtctttatttcatgacttcaaggaggatagcagagaagtaaattagcagccctcataccacaccactcatatgcctgtggggatactcatatccccatatgagccctgaccacatcaaccttgctctaatgttcgtgttggtgatgcttctgcccatactgagtgccagactctggcagcttctggaggggggaccgtgagtctttcagtggatcctccctgtgtccaggggtcagtcattcctggtcagatattaaaaagaaaaagtactactttgatcgtaacgtctatcttaggtt

SEQ ID NO: 93701 - DNA, 1035 bp, Homo sapiens
tgaggtttcaaaagacggaagacgactaaatctgctctaaaaagtaaactagaatttgtgcacttgcttagtggattgtattggattgtgacttgatgtacagcgctaagaccttactgggatgggctctgtctacagcaatgtgcagaacaagcattcccacttttcctcaagataactgaccaagtgttttcttagaaccaaagtttttaaagttgctaagatatatttgcctgtaagatagctgtagagatatttggggtggggacagtgagtttggatggggaaatgggtgggagggtggtgttgggaagaaaaattggtcagcttggctcggggagaaacctggtaacataaaagcagttcagtggcccagaggttatttttttcctattgctctgaagactgcactggttgctgcaaagctcaggcctgaatgagcaggaaacaaaaaaggccttgcgacccagctgccataaccaccttagaactaccagacgagcacatcagaaccctttgacagccatcccaggtctaaagccacaagtttcttttctatacagtcacaactgcagtaggcagtgaggaagccagagaaatgcgatagcggcatttctctaaagcgggttattaaggatatatacagttacactttttgctgcttttattttcttccaagccaatcaatcagccagttcctagcagagtcagcacatgaacaagatctaagtcatttcttgatgtgagcactggagcttttttttttttacaacgtgacaggaagaggagggagagggtgacgaacaccaggcatttccaggggctatatttcactgtttgttgttgctttgttctgttatattgttggttgttcatagtttttgttgaagctctagcttaagaagaaactttttttaaaaagactgtttggggattctttttccttattatatactgattctacaaaatagaaactacttcattttaattgtatattattcaagcacctttgttgaagctcaaaaaaaatgatgc

SEQ ID NO: 93702 - DNA, 1032 bp, Homo sapiens
aagacacagatacccagtatgcttaacgtgaaaagaaaatgtgttctgttttgtaaaggaactttcaagtattgttgtaaatacttggacagaggttgctgaactttaaaaaaaattaatttattattataatgacctaatttattaatctgaagattaaccatttttttgtcttagaatatcaaaaagaaaaagaaaaaggtgttctagctgtttgcatcaaaggaaaaaaagatttattatcaaggggcaatatttttatcttttccaaaataaatttgttaatgatacattacaaaaatagattgacatcagcctgattagtataaattttgttggtaattaatccattcctggcataaaaagtctttatcaaaaaaaattgtagatgcttgctttttgttttttcaatcatggccatattatgaaaatactaacaggatataggacaaggtgtaaatttttttattattattttaaagatatgatttatcctgagtgctgtatctattactcttttactttggttcctgttgtgctcttgtaaaagaaaaatataatttcctgaagaataaaatagatatatggcacttggagtgcatcatagttctacagtttgtttttgttttcttcaaaaaagctgtaagagaattatctgcaacttgattcttggcaggaaataaacattttgagttgaaatcacacagtgtaacttgcaaaaagattccatctctgagatccgaaagacttttaaggttatcagtccaatgaacccctggtgtaacaagaagtcccgtgcttttgtcattaggcgggtctttcccaaggtatccttgcaaaaagaaaagtgtctcccagagtacagagaatagcgatgctgtttttagggagacaagaaacctacctgctgtcagaaacgtgctcatagctggtatcaaaattaacttgctacgcacaggaggactgtggtgggaaatcctacagtggttcgatgctgaagaagaaagactttaccgagcacgatcaggggaa

SEQ ID NO: 93703 - DNA, 1798 bp, Homo sapiens
gcagctcatcaatgagctccatgaagggatgtttgagtttttgttttcattccgttgcctctcacctctctcaacctcaaaagaagacaaggaatcttccagactgtcagtggagcagggaggcctgaagatgcagccaggtagccagagagcgggccagggtgcagccgcctggtgcctctccaggttgcctcacacatgcagagtgaagccaggaggacatcatttctggccttttgttgttgttgttctttacaaagaaacattcgattatacaattgggcatcacctgcaagaagtctacgtcaaaaagacggtgggacacttaacgtgtctcagagattgaactatgcagttttaccacttttctggacttagggatccagttactgtaaagcagctttctttatcctgtttttcagttatgggcaggataagatcactcagtgaggattagccacagagctgagatttagggcacgaggttaaataatgggtggagctaagagattccaggtaaaaaccactggctttctatatgagcatatgtgaaatgcacggaactatttttttggtgggatggtaagaacaggaaaatctggacaatcatttatggattatgctttcatgggattagttaaaagacatggcgctgttacttgtgagcctttacaagtagtgaactaggaagtttatctcaatttcagacattaattttcattattcatttccccttaggccattctctactttaacttttctcctttaatgcctaaaaacgtttacaatgacttacccaataatttaaaataatagtaacgcatttctaaaacgatttaagtgtgtctttgttagcttctgaaagaagctagtgtgtgtttttcaaagttgtcatgttatatatgtggaccatttgttcaaccagaataaaaatggtctgaaacagaattattttgctgttggaaattactttattgtgcagaactgttaaaactatgtttttagtttaaattgctatttttaaaatgtgttgaaaaatatgcaagtagaatgtgagataatacttcactttaaaaatgaacaaattgagtaaaccatcctcagacttagtcctatgaaattttcaataactgaaatgcaaaaaggtggttgtttctgttgacattaggtttgtatgaagcaaatagaggtgggcaaaaaaaaatgagctccatctgagatagtaagataactttattcccatacaatacctgtgttttcattaccaaagtagcttgtgttttatattatcagatagaccttctagtaacagtatcaaattttttgcagataaggtaattccgatttaagtgacactttttttttttaaacttggcagtatttgactacagtcattccttatgagaaaaaaaacggaccaccgtctgttgaagatcttcaaatattaacaaaaagtgagcaaagacaaaatgaaactattacctgatttccttttgctgattggtaaacacctgactttagttggctgattttgttgttagtgttttgtcagtttaggatgtaaatgatgcatataattgtttatttttataagaatgaagccaaaaatggctgtgacattaaatacaacagtaactctagtgttgatttgtactttttctgtttttcttaccttgtgaaatatttatgagctaaaattttgggaaaaagcataacctaaatctccatcatctcttacatgtttaagaacatatccatttatcataaataaaattccttatggatcttatatatctat

SEQ ID NO: 93704 - DNA, 1076 bp, Homo sapiens
gcataattatctttgtatgttctgcaggatctagccagtgctttgcacgtgagaggtaaaatatttgaggaatgaacttcggtaccacctaaacatttcccattgactctggctgttattctggttggcaagttaggaaaggagcaggttaccttggggaaaacgactttcggggcgtaatctgatattaggtcgtaagtttaaagaagtcctttattttagccacatttaggccaagttgctaataagggaagctaacagggaagttattcctaaatgatagagaatataggaagtgactcaaggcagttaaggtcttggctttctagtagcaccgcgttcaactccaggaagactcaggccaccggagacccagggttgggacagcctgggatctgtcagcacggtagcgggcgggggcggggcttcgggccggggcggggccgggctgggcgggctgggccggcctgggcggggcgcgcgactgctccgggcggcgatggcggcggacggggactggcaggatttctatgagttccaggagccggcccggagcctcctggaccaggagaactgtaacgcgagccccgagcctggggcggaggcgggggccgaggcgggtgggggcgccgacggtttcccggccccggcctgcagcttggaggagaagctgagcctgtgcttccgcccctcggatccgggcgccgagcccccgaggacggccgtgcggcccatcacggagcgcagcctcctgcagggggacgagtgagtgcggggccccggccgggagtgggcgggagcctcccctacccctcgcccgaccggcagccctacggccgcagctcctccctgcgccctccttccgcccggacgcgggagtccccgccctctcgcctccttcctccggccgtcggcctcggctcgcccagcaatttaaatcccctgccccccgccgccacgagccctgaaaacctccgcctcggtacctcccgccctccttcctgcaaaccaaaccctcgtttgtattagaagggaatcgcccatgcagagcccatagttagagacggcacctcctg

SEQ ID NO: 93705 - DNA, 2614 bp, Homo sapiens
ctaaaatgtatgtatattttataaatatatattatatatattgtaagaatatatataatatataaactatatatatatatatatatatatatatatatatatatatataaaccataggtgcattttactgttttgtattttcatttttggaggtagtatacacagcagataatgatgagtatgatgagtgttgtgctgtttgcttttgcagtataatatatagttctaagtgtttaaattactgtatatacaatattcattataggctagcatgcttgttttaaagactgtcattctagtgtattaaaatctgaatgtaagaaaacctggctattcaaatgtgaattgaaaaatattttattctcagtactgaactatttccattgaacattcagactttttaacaaaaacaaatatcatcaagaaggcaatagctagaaaatgagaggtgcctttaaaaaaaaaaatgcagccttacagtgaggatgaagattgagtttggggagggggtgggagggggggcacagagagagagagagagttagtgtgtgtgtgtgtgtgtgtgtgtgtgtgtgtgtgtgcatgcatgcgtgtgtgtgtgtgtgtgtgtgtttaccaatctgtgaaggtcctgatttgtgaccatcaatgtctttttaatgtatctgctcaacttctaggacttcaggggacatttcatgcgctttgtgctcttctgagcaccatatatactttccaagaattttgaatgtgaattcctagaaatttcagtagagaaaacaatagctattctttaattatagtaaagttcaggtagaaggagaaattatttgttcaccaaaattatgggatctcattaatgttggctaagtaaatgtaattttttaaaggctcactttttaatacttcatatatttccctcttacaaaacagcatgtcatgaagttcttatgtggtaaagattcaactagtaaatatttttaggttaaatacctgaactagttaaaattccacctaagaatagtcttaaaatatttaaaaagcatctctcatatctacctctttgtcattgctgccattttaactgaagcaaatctttatgacatctgaaatgatggttggatgcaattaaaaaaaaatctatgttggtgcttttctcaggctttgtcatttaagttatattgtattaagatgtcacaaatcagactgaaaggcttagaattaattttgtttttctttgaaagaattgcttaaaattaaccatcaatgtttttagcgagtggagataatgaatctttggttggtgtctgtctgtgtgatgttttcaaccaatagccaaataattattgaacttacatgaaaaagagtgctaagtataattttatttagattactttattctttgaaagtgactacaaggctattaagtacataatcattcattttatttactcagaagttgcctctccattactgttaacttgtttagtaatttatataattgcagtacttttaagtgttggacactgggattcaggttgtatacaaagtagtagctgacgaaaaatatgtatatttttgtgaaatgtatcaagccctaaagttcattttagagaaaggcccagaaaaacgtatctgtgtttaaaaacaaaggacaggtcattcgtcaatttgaatcatttttacttttgccactacaaactttttaattggcaatatccatcatccaactggatcttcatgtcagtgtcagggatgccaggttgacaaagtatttaacagatcctttcagtttttgttttgtttttttaattctaaaaaaaacaaatgttaggccaaacagatccctagatcccactcattgattctggcggtattcctaaagtggtgcttagggggtcagaattttctggatctttgctaatccaagctttagatttaatttaaccaggaccacatgcttgtcatctctctgatgcaaattttcaaaatcattttaatttagattctaatgtctgcctgggtttttaacaggctgtgaaccagtgagtgccttgttaatgtagaatgatttttcccccctgggtgggtgttagttagctcctctctgaaaatgtctcagagaatggtattttaattgacttgtagagagctgctaaatttgttattatcagcaatcagaaagtctttggtctaccacacatctccctccctactatctcttcattgtttggctgaagtttgcctcttgtgagaaaacaatacaactccccttctccacacactttttttccagcccagattaataggtatcccctaccctaatcccaactctatgatctaataccttttttaggaggaaccacttctttttaatattgaaatctgctggttactttatgttttctcaagttcagttgactagagctgaccacagggtgtcatcaattcagattcctaaataaccctttctctccacacccagtcctccagctggtgagccctgggccagattgtttgatcttcaggtattttaaattttagttacatcaattaatgtaaattaatccaaatgctaatttttgtggtgcaagaagtttcttatgtaaattca

SEQ ID NO: 93706 - DNA, 1028 bp, Homo sapiens
atgacagagaccaatctagaaattggaaataaattattaacgtccaactttccaccaaaaaacatataaataggctcttagattttaaaaatattaaatctatagatattttaaccaattaaaacaatttctacatattccattccccacattttccatcgtcataacaatgatgcttctcatgatacgtacatctactccttgaaaaagtattctggtggtggtgtggctaatgattgacaaatatttctgtaaaatttctgcctgtttgcctctagaattctgcattatacaggcaaattttctttaaagctagagacttgtgctaaatttgcctgattttcatacagatatgctgtagtaatacagctaccttttcatttcatctttgtgctttggttaacaagcaggctcaagagactgctttgtgtaattaaatgaattgacctaaacatgagctgtcaggtgaatacttaatatttccatgcagatacagaattccatattgtgttcagtaaatttcttttggttcttcacagtgaagaaagaatgtttctaacctaacatttgtagaaggatactggaaaattccttccaggaaggaaggaaggaagatgccattacttggtgtatttatgatggatgaccacaaagctattgttctaccagttattaattaccttctaagatcttcagttactgctttattaatgtcactgaaattctaaaaaccaggacattcttcccccgttcattttatgcttcatggttgaaatttttctgtcagtgagtggaaaataaccatgagatacatagactgtagcgcaaatggaactgttgaaagttccttagaaagccagtgctgtggcattggagactacggagagagtcttctctaccagcactgcatgatctcagcctagaaatgagccaaagctgtcttccaaccagagtagcatatacatgtgtctgacttttcccctagcctgttgaacattcaatgaaaattcacagaatgaacaaattca

SEQ ID NO: 93707 - DNA, 1111 bp, Homo sapiens
cattaataaggagtaacaatctctttttccaaaggcaaactgatccactcgatggtagcccacctagaagctgttacaagtttagcagttgatcccaatggcctttacttgatgtctggcagtaagtacctcaactatggattatttatttgtccttaccattttcatgttaatgtaatttttccttttaattttttttttggatataggtcatgactgttcaatacgtttatggaatctagaaagtaagacgtgtatccaagaattcacagctcatcgaaaaaagtttgaagaatcgattcatgatgtagctttccacccatccaaatgctatatagccagtgctggagctgacgcactggctaaagtctttgtatgacgcaatgcatcatcttcaccttctagctgtttataagtaatcaactgcacacaagagatacagaagacgagggcaagaatcatctcgtcctgcccttttgttctgctgaaggagcacagagaacatttgttgaagtatagttttgcaattcatatactgttttctaaaactaaggtttgttcaggttgctgcaagctcagctgaatctgtgagcctgaggtctgtttcaaatttctccccaataggcgcctttatttctgaggtggttctaattcgctaggcaggcctgagcgaatacaagtttagcttgtccctgttgagtaagtagggcatgctacaatggataatttaaaagcttgatagctgggactgaatagaagaaaacgggaaacttagaccaagttctcccctgagaaatcttgttaaaacacattaagtagtcaaaatagtaatctttatcatatctgccatattaacccctttgtgtataatgaccaggcagtgttaaactgagtttttaatttgactctcctttcagctgttcacataaagcacctggcaaagcattttacctgttagggggagaaaaatgcaataatatgttaaatatattattattcagaaatgctagacaaatagtttgcaagcagatttctatattgtattacagttttgaaaacagatttggtatcattctaaagtttagctatcaagcactcaccattgtgaaga

SEQ ID NO: 93708 - DNA, 1302 bp, Homo sapiens
gtcatacatagggtagatgaaatacttgatttatcagtctgcttcagatagctcaaccagatgttgctaaaaccagatggactttcacatagattaggtgttttcagaagagaaaaatagtttactggttatacattgtgagataacatgtctatgcgtaactgcgatacagtgtagaaaacagtaagtacgtgactttaaatccagtttccatcaaagtcatagccagtattagggtatagtgtacctataataatggtgttctgagtaatgaataaactgataatttggacagtctcttcagtatgaaggatagacatattatccttattggaaaggcaaggaaataaaagtaccatttgctgatatcctactatgtgcatgattgtgtcctggggtgttttttaaattgtagaatcctatttaatcctgtgattatttggtgttattcccatttttctgttttgttttaaacggagtaatctgaagttcagaaagattaaataatttgcttaaagttagccaattagtgacagaactggaaattgagttcagaaatttatctcttcaaagctcatgctttttctcttgaatgaagctgtctttccctttagtcaaatagattatgacagggctaaaaatactgtaacatgatattattactaaacaagaatcttgtttcttgatgccatgaaagtataattggtgttaagtaagctttcttacgtatcgtgtagttgagaatggtatattcccataatgtttgtatttttaaagacaattttatgacatatgtttaattatactgtttactgacacttagaatggtaaagtcatctctctctgatttaggagcacttctcttgatgtagaacctatctatacattcagagcccataagtaagtatatgttttttctttattttaaaccgatatctctgtaaaatagcctggttaggatattttattttctttcacttactaggtattctttgtatttaggagtgtttttttaatgtaaaagaatttgacagataatataatgctaaaacgaagttcatcattgccaagtagggatttgtgcttaaattagattttatttacatggtgtttaagtgaggtacgtatttatatctttaaactagagccaactaggtttaaatattagaaattccagctttttttcctcatataatttggattaaaatattcaagtgcctcctttggtagtagataccctacaattggaaagatacagagattagcaaggcctcagtacaaggatgacacagattcacgaag

SEQ ID NO: 93709 - DNA, 1456 bp, Homo sapiens
tattttaaagttgcgaaagactggaaaggtatgctttttctttttctctctctgtagtgatgctaaagcttattaaagaccagtcattcctgttaggacattcttttaaactttattacttaaaagcatttaaacctttatttaaaatattttagaaattacaagcgtttagcttgatttgataaaaagtcagtgtctgttattgatgttaaaccattacataatgagagatgatgttgtaatgctatctcaagatagattaaatcagaatgagaaagattaatattaaaacataagcacatttcataccttttcgccaaatatacttactgatagacaatttaatcttaacaagcatagggagatgatttgtcttggcttttgagagtcatgacaaaaaaccagttaaactgaaattttgaggaaaatttgaatgtcatatgtgagaaataatttccagattaacttaatgttgatatttttctttaggtcattatgctacaaaaatgaatgtcttgaaatacaaaagatcctttagttggaaaggtaaccaggacttaggcacaatccatctacttttccattggttattcagttcttgtcaaatatcaaggcattgctgtagttggaatttaactgaaactgcaccatttgactggaacaatattcctactaatagaagcaattggatttcttaaatcgggggattaaaatgtgttcagacatctagcacatggtttttttttagtatggtgaagaaaaatgacactgtaagggagaaattttaacatctttcattgaagagagagggactacacatttcagcacattttgtttaatgtcttcagttcatgttatcttgataaaatagcaatctaggaacaagtaaagacttaggataaaaatagaactgaagccatgctttgaattgatatataaagcattgagttataaaccaccataaattttttttttttaattgaactagtactcattggaaaagtttgagtcttttcaatgtggtctagtagagatatttccagtcaaatcctgtactccaatcataccatcttgaaatacatttctaggcattagtaaaaattgcttaaaaatagttgtattctttgctggtataggaacaaaccataacagactttgggtaagattttcccattcttaattaaacttgtaacaggaaaaactactgaagatctgtttcagcctctatcctatataaaacagtcaaaacagggatgtgggagaatgaagaatcaaagtttaggtaagtaatcggtagggcatgagacttcacctcgggtaccatagcttcaggatgtaaggcaattaatgcaacttaatttaaacaaacagggatgttactgtttaattcagtgcacagtaggctcacaatctgtatctggctgcatttagagcaatattcagtggctaaagaatg

SEQ ID NO: 93710 - DNA, 1050 bp, Homo sapiens
catctctactgaaaatacaaaaattagcagggtgtggtggctcactcctgtaatcccagctgcttgggaggctgaaactggagaattgcatgaacctgggaggcggagactggagtgagttagatcatgctactgcactctaccgtgggtgacagagcccggagactttgtctccaggtagataggtaggtaggtaggcaggcaagtagatagataggattacaaagtacttaaagagtatccacttcttgtattgctttttaaatttgtgagagtgtaattgataagaatcaatgtagataatgtgatttgggatttatagttaccatataaatagaagttgatgtaacatatcatgggttacttcttatgtcgaagttaaaaagattaactaagcaggatatacatgttttacaccagaaaatctgagttaacagattctgcctccgtgctggataatttcaaattccttgaaagtgcagctgcagatttcagtgatgaagatgaagatgatgatgttgatggaagagagaaaagcgtcattgatacttcaacagtgagttagataactcatacaatataaatatttttagggactataatacatactgtataatgcataaaagaatccatgttctttaatcttaacccgtagctttttctttttcatgaatttggagacatttatgagagtttgtaatactgatttcaagttgagaatatttttaatatagtagctttctcttgaaattcctcactgtttgactttttgttcattcattgaacaggacaacttttctatggggcagatgaatatagtaaatattgtgtgttataacaatgcagggttattggttgttacaagagaatagaattgacagacacatcatggtgcctgatggcagctagcatcagctctaatatatgcagtttttgtctcttgtcaggattgttttggtaggcaaactttcagaactcttccattagagttcttcaaaattgtttagggttcttctcaagttttgttcagatgttgataagcttattgac

SEQ ID NO: 93711 - DNA, 1075 bp, Homo sapiens
gagcttcaattctgtagagtgactcgagaaataactaccttgtgtgtaatgaaggagacgatatatgctaggaacattctgtctagatcacaaacagttgatccatgacaaatttaaaaaaactaccggaataactattataaaatactgatttggtagtctagctccaatccagcctaaagaaaagaatgtgctattagatatattaaagaccagcttcttcttatggtaaatgtaatgaatggtgtattgtatagttctctcatttttctcagtgactgtagaggctggtactgcaagagacagctccatctgcagctggaagattatttattaacaagtcttactagcatagtactgtactgttaagtcttatgcaggcaatgagtttaaataaatacttttatttacatattaaattatagaatactgattccagtatgactgaactctaaggattctcttcacacaggtatctacaggaggtgggttatacagatactattctagatgtgaaatctaaacgagtgcgagctttgttgggcttttcaagtgatgtcacggacagggaagatgacaaaaatcaggactcagttgtaaatggcacagaggctgaagttaaagagacagcaatgattgcgtaagtattttgtctggaaagtgttttagctattattagttcttattaaatatttttggttttatggacattacttgtacttttaggtagtgacatagaaataatttataacttaataaaaattctaacattttatttggttagaaggtaacaaggattggagttatttatgactattttaattcaagaatattatttgtgatatttatttaatacagatatttaatagattttagtatattgacttaatcagtaaataaaacttcagaaaagattttatttggaaattcagtacaaatctgtaagaatgacgtttcatgattggtgatccagaagtcgtaaaaatacctcaaattctgtagaagtaacactgttttttaaccacttttgtttatctattaatgttgtaatttatctttgatataaaatatctat

SEQ ID NO: 93712 - DNA, 1553 bp, Homo sapiens
caggctaaggtgattctcccacctaagcctccctagtagctgggaccacagctgcgtgccactatgcccagataattttttttgtagagacagggtttactccatgttgcccaggctggtctcaaactcctgggttctagagatccacctgccttggcctcccaaattgctgggattataggcgtgagccaccatgcccagttattatttatttttaatttttaatttctgtgggtacatggtgtatatatttatggggtacatgagatgttttgatagaggcatgcaatgtgtactagtcacatcatggaaaatggggtatccatcccctgaagcatttatcctttgtgttacaaataatccagttatacccttagttatttttaaatgttcaattattgttattattggcttgttctagttctgatgtgctactttataatacttttatttggctctcattgtgtgacttgatgggataagtctttgttctggagaaaaattcttagtctagttaaagacagggaaaatgtatttattttagttctgctactcttagggaaatccagtagcaataatttatattagagttttgttatagaaattacagttaaaaaacagaacttacattatcctaacacataccttacagttgcagttttacatattcttaatcttataaatgtttattggacgttattaatgaattaagatgccctctaatacgtaaaacaagtcagttttattatgacttaatgttttctagatgaaggtaatgaaacagaagtgcagccacaacaaaacagccagttaatgtggaaacaaggtcgacaactactcagacagtaagtgtctcatggtgaaacttataaatggctgaagacaagaaacagttttatgaagttatttttactgtgtattttcaagtcagatgaatattttatctcatacagatgctgtgaaaaagcttaattgaattactgttcctttttcatattaaatactttttctgtgtggtagaacttacgtagttaaaagaattttataactttaaagttattcttttcattgcatattttatgtatgaatatataacattttaatatatgtgcaattggccaggcgcagtagctcacacctgtaatcccagcactttgggaggtcaaggtggatggatcacttgaagtcaggagtttgagaccagcctcaccaacatggtgaaactccatctctactaaaaacacaaaattagccgggcgtggtggcacatgcctgtaatcccagcttcttgggaggctgaggcaggagaattgcttgaacccgggaggtggagtttgcagtgagccgagatcgcgccattgcactccagcctgggcaacaagagcgaaacttcatctcaaaaaaaaaaaaaaaaagtgcaattggtgtttacatgcaattttgttatgttttaaaacttttaaataattggagaactttttgaattctccaaatttgcaaatattgcctaacatatatttcattcattcattcattcattcattcagtcattc

SEQ ID NO: 93713 - DNA, 1195 bp, Homo sapiens
atggtgaaacctcatctctactaaaaatacaaacattagctgggcgtgatggcgcgtgcctgtaatcccagctactcaggaggctgaggcaggagaatcacttgaacttgagagacggaggttgcggtgagccgagatcaagccactgcactccagtctgggtgatagagtgagactcagtctcaaaaaaaaaaaaaaaaaaaacaaaaccaaaccaaccaaccagtaacaacaaaagaaacccctttctcagctcccttatctattagtattgccatcctgtccctcattctccttcattttactctgaatttctctgaacgaccacatttactaccttcagttttttttactagtctcatctctctctctgttcctttgttgtctttctctttttctgcttttggttactcatttctcagtctcttgtgatcttgcttctgatctctattcagataattgattaccaaattatatatttttttcagcagttactctgactgaagtcctctcactctacctaattccttttctttggatgatttacaaaattatctctaactagtcttgatacttttttgcagttaaaattgtacatgtccagtttttgctaatgtcttcacctggatgacctactataacttgaaactcgatcatcctttctaaaatccttttcccaaacccagttgacccttttcctcagatctagcccccagtttaccctttctagaaacctagcctcagctttcactcaacctttcactttcttatagtcactcttctagccatgcattaggtttgtaaaatacgtagtttaaaatccatttttaatcatttaattactagtactacttcttccctggttacctcatcacctcatatctgggtgactaaagtagaagtcttccctaatatttcacttctggtttctcccttggccaaagtagtttacatagtattgcctcccaggcttctaaaaattgatttgtttaacacattctttttattttttatttttgcctgttataggttttaaatctctgcacgattagactgtttatatttcctacatattagagcacagtcatgaattacttaacaacagggatatgttctgagaaatacctaacgagacaatttcattgttgtgtgaacatgtagagtgtacttacacaaccctagatggtatagcctg

SEQ ID NO: 93714 - DNA, 1007 bp, Homo sapiens
gtatccatggccctagtaattcaacccagtactttatcttttgtttcttctttctgttctttatctgccaacattaataatagtttcatttattgagcattttctgtgtgccaggtacaatgctaagtgctttatatctacaatctattttaatccttgtaaaactgtatgtggtagatattaatcattcccaaatgcataggtgagaaatttgggaagaaaggttaaataatttgctgtagaaaaaggctgagtgatgggtctgggcatggtaagtagaagcaaatattttggcttttttttttttttttttctctcgtgcttcagggtcactgtgcagggctgaaatgttttcttctcccttgtttgcctggtgaatttctaatcatctttcaagattccattaattctgggaaacctgtctgacttccaggcacaaggaagcttcgtgcttccctaacagcttgtattacaaagcagaagcattgttatccagcaccatccagactggtggttgatcagttaatccgaaaagatgttaaaatggtatcttaaaaaatttgtttcaggttaatagtatatagatgtatatagtcctttcccaatgtaagacaggcctacccacccttcacatttttgtttcttagaatgctaattcgagttttgtattgtcattcttgaataagccacaattgtgtgtgtgtgtgcgtgcgtgtgtattttcgggacgaaattgttccacctcacatcatcaggcgttagattcttgggagtgccgcacaacctagatccttcgcatgggctgttcacagtaggatccgtgctcctatgagaatcagcgttgcctctgatctgacaggaagcggagctcagcgggtaatgctggcttgcctgctgctcacctcctgctatgccacccagttcctaacaggccatggacccatatcggtcagtggcccaggggttgagaacccgtcctatctcatacttggtatatatttgtttcc

SEQ ID NO: 93715 - DNA, 1110 bp, Homo sapiens
gggatctagctaaatgtgaggtatatcacctattagactgtccactctggaggggtagggtgtttgatttttgctccttgagtcctgcaaggctgtttgttgtgattggtcaatatcctaagggcaaaaatggctttttgttcctttacctcactgggttcccattttcccttttattttggccagataattccttcctatttttgtgttgcttttaagaaaattgtgaaaatattttgtccagaatttttggctgcgttcagtagaagaattgttgtggggcaccataactggaaactgaattctcttattttactttcaaaatctgacaaataagaatggccctactaatttttgggggagaaataatgttgacagacagcacttctttatcaagagatgtgcctatttagtcctgaactttatttcaaatctacttttctttgaatggtaaagggagacctacagtttttctccaaaatcttgataactgaagcagagtttaaaacaaacaaaaccctttgctatgcagtcaatgaaaggtgtttgaaagttcagataatctggatagagtcccctttgcccacctgctatctccttgatgtcagctatacttttgatttgctaatgtgtgtagcatccaggtttcaattctgggccattagaaataaaattgtccttggatctttggcgtttcttgcctcggtggccaatctgacaaaacaatctgttgaccatcataattggacagttgaaagtatgggcctcagagtcagacatctctatcactttcattttacaatttttctaggcctcatttttgtaaatgtgggtgataatatccctactaagcaggatcgctgtaaggtttaaaaaagataaatatgcaaaatatgtgatatatgatgggtgtccagtaagtggtttgcttttttgttggttgagatttctatggacagaaggcattagatttattatttatataagtcctattgtagaagccaagaaccagtttcagtgatccgtttatcatagtagctacttacattctctttgtcctgtaagtacaggttgagcatccctaatccaaaaaccccaaattcaaaatgc

SEQ ID NO: 93716 - DNA, 1064 bp, Homo sapiens
ttgtttaccctccccacgcctgttcgtccgccccatcccactcttaactcccagactcatttcaactctctggccatcctgcatctcagggctgccctctcggtttactaattgggctggcagtagttttgagagacgcggagcaaatcgtccgctgccctggtgtgccccttcctaggtctagagacagtctccgcagaacgtgccggctttggcccctctcttcaaggaaggtgatcaagaagacaacagaagttgtgtcaggccttgagtcgaggcgagaagttgacgttgggcaaaagtgttattcatatatcagatccctttttttatatatgtaaatgtctgttctccactttcttccgaccccccggccccctcccacgtttcttttaggtatttccaattaatgcattttgaatgaaggacctagatgatcgcagtcagagagaatggttaagaggtggttcctgttctcagaatctgaaacttcccaagggttaattttatgttcagtgttttgggagattttcttgtgctttaaaaggaactaaagggactttgaagttagttacattgccttgcataatctgcaagataaagtatatccagggaggagataactgtgggctctgaaaagaatgaaagtgaggctgatactttacaagccattcagaattggtgaataggttttcagtggttgttcttaaaacttccagggcatacacaccaatttcaaaaggaacttaaagaactatgaatagttgtgcctttctgttttacgggctaagcctgtatacttatgaaatttgagtatagttttagttggcaaaacacttgagtttaaaatgctacccagtgtgtcactttttttggtaacatgtatttggcgcttaagaaaaaaaagaagaggagaaatctgttaaatagaatcatgtgctggaacaggctctggtgtagtggaagtggctgtggaaagagcgaacacacaaggctgtagtagacaaggttatagtaagggctgtgtttgttgctagctctgtgaccttgaggaaatcctttaa

SEQ ID NO: 93717 - DNA, 1132 bp, Homo sapiens
tatactttcttcttttttttttttttttttttttttgagacagagtctcactttgtcaccaggctggagtgcagcagcgcgatctcggctcactgcaacctccgcctccctggttcaagcgattcccctgcctcagcctctggagtagctaggactacaggtgcctgccaccatgcccggctaatttttgtatttttcgtagagacagggtttcactatgttggccaggatggtctcaatctcttgacctcatgatctacccgccttggcctcccaaagtcctgggattacaggtgtgagccaccgcacccagccaaagtgtatactttctaatatctatacccagttatctttgatgatttaactgtatttttataataacgtaaaatatcttatttttttatcttatgccttactattttgtcctcataaatatcatattaggtatatgtggtcgctatgaatattaaaaaggaagcagagtcaaaaccaaaaagagcaattaaaaatactgacgatgatgatgacgactgtggtaccatcgatgaactgccaccagatagtttaataacactggtacaacctgaactaccaacactcagtcgcctgtggttagcagcattaaaagattatgcactcttgactttaccagccgaattttctagtcagcttcctccagatggtgagtattacattctgagttttacttttatggagttcaaagtagtagttaaacaaaatagagacggtatagactagcaacaacagttgctatagtaacagtttaaatttctgtggcttaagtttgatgttgtctcagttagaatatgtactctatattgaatttgtagatagaagatatagagcttttttgttggctgaagcaaacatattagcaagcactgttacaataatagctgtatgagctagggtattctaaatagctatgggtaacaagtcattatgcataaccatagatgtatattgctgtactgttcaatgtttgtattttcatattctatttcagattcctagtgtgccaataaattatgttcctaaagtgctttgcaaattgtactttagttttcttatcaaaatcagtgtagaaatcgtcaacatttttttctgttta

SEQ ID NO: 93718 - DNA, 1059 bp, Homo sapiens
tcttgaaagaatataatatctttgctattttcaaagttgtgaaatatgtggattgtgttttttatcaaaaatttatttcatttcatatttttatgttattacacttatttttggaaaagttttcatttttgcattctatttttatttttagatgacctcttggtacttcatctctctgacctcattcgcatggcattcatggctgcaactgatcatagcaaccagctgcgaatggctgggctccaggcgcttgaagacattatcaagaagtttgcgtctgtgcctgagccagaatttccaggtcatgtgatactggagcagtatcaggctaatgtgagattttctatttatttaagaacttaaaattgatcttttgaaagattgctgaagaagtgcagacttcctggaggactgcatttggaactgcaatctgtttatttctgtagaatgcatctctttatctccattgtctgttacctagttttagtcaccccacaaatgaagaaataagtgtcaagctgttgtcactatttttaagttgtgataacatattagtgataaaactagaatagaaattccagctcagctttccagtcttgtgtttagatatttagctctgccctttaagagataaaaggaaccttcaaaagagtgttgtggatttgctgccgttatttttatatggcaaaccttcataagcatttttagaaatagatagcagttgccccttgtataatgaaggataaattaactcttaataacaacagttaaaggtattactgaggccgggcatggtggttcacgcctgtaatcccagcactttgggaggccgaggtgggtggatcatttgaggtcaggcgttcaagaccagccaggccaacatggtgaaaccctgtctctactaaaaatacaaaaattagcctggcagtagtggtgcatgcctataatcccagctacttcggaggctgagggaggagaatcgcttgagcctacgaggcagaggttgcaatgagccgagatcgcaccactgcactccagcctgggtgatagagtaagacc

SEQ ID NO: 93719 - DNA, 1055 bp, Homo sapiens
ctggagaagcagtacctggtcccctccctctcggagtctcagtcattgatgcttctgtggccctttttggtgtagtgtttcctcatgtttcttataaacaccggttagtataaagtcaatcaggtaatttttgttaaatatatattatgttaaacgaaaagtagattttctcatcccagttaactctgcaataaagtgagttattataatacttaaaacagtactcttacagatttactaatgtaagtgacagatacatgataaaaaaattgcatgcaaattgcacataatttgagactttatgtaagatttgaccctgtgtactagcatctgatatctgttgtattgtggactgtattttataacaaaattttcattatatatgctagaatgacaactgttggcaaaaaaaaaaatgcattataatagtttgtttgatagttcatacataggttttgactatatcttaaattaaggacatcagtttgctaagcctgttgactttgttgttgaggaagtaaatggatgaaaattccaatcactaataacgtttgtgagatggttcaagtctagaacttggaaactaacataattggttctttttgtaatagaagcattttggtttggtatattctgtatccacagacactattcctagctttagtaggcagtttgtatattgtgattttcccaaaaggaaaacagaaatgaattaatacaagaccatcacagataacttaaaagctttacaaaattaaaatgccttaaaagtattgttgggtctggtgtggtggcttatgtctgcaatcccagcgctttgggaggctaaggcaagagaattgcttgaggcaaggagtttcagaccagcctgggaaacatagtgagacactcatctctacaaaaattacaaaataaaaaatgtctttaatatgtaggttgcttgattaattgctttttaatttgaggagaaaaaagtttaaatatgaaactttacccaaatatctttaagaacatttggttgccacataaatgttaaatgatgttaaaggtggaag

SEQ ID NO: 93720 - DNA, 1083 bp, Homo sapiens
tgtgctgtggttcattgtacattattgggcaataaataataataatcatatcacatttaatatatttaaaataaagtatctttgtttgtgtgtgtctttcagacagggtcttgctgtgttgcagaggtttgtctcaatctcttgggctcaagcaatcctcctgcctcagcctgctgagtagctgggactacaagcatgctatggcacccgcctctctttcctctatttgagttttttggttattttaaataatttgggctaaaagacacaatacaatatatgaaaggaagtaccattattgtatattaaaaccagcatttaaatatagattttttttaaagaagagaacagagacttaattattttattcctgttgaacatgttgcagctctttgtgggcaatgattataattttcacaaaaattattctttttaatctgatctgaagttctgttttttaggatcttttaatgcacttcttagagaactggtagcggaattcactttgactgacaactcagccaacacaactacttccctcctcagatccctctgccattatgatgatagtgttcttcttggttcttggcttcaggaaactgatcataaatcaattgaagaccaggtaataaacatagaggaaaatgaaatactaacttaatctgaaacaatggtcctattacacattgtcacttaaaaagaaaatagtgtatagaaaggtttaatccccatttagtgttcttagacacttaaagatggcatcctggtggtagatagtgaaaaaagttaaacaggaagagtgagaatttggcaaattgtctttatttaatattctgtgtatttagataccttgtggtggctgtgataaagatcagttttaactggctttttggttattggtattttgttttgttttagtttgttttgttttgtgacaggttggagaggaatgagttagtaggttgaagatttagaacttttgcccactgaatacattatttcttatgtactttttaaagagtgattaaagccccatttaaaataattgtgggattaagatcttgtgtatattgttcacgcaat

SEQ ID NO: 93721 - DNA, 1033 bp, Homo sapiens
tctttcagcttttagaaataaaagttcacattgctatatattcaaagatgtcaggataatacgctattgtaatatttagcattttgataatgtttagtaaaaattgagtggttttaataaatcatggccgggcatgatggctcatacctgtaatcccagcactttgagaggccgaggcaggtggatcatttgagatcaggagtttgacaccagcctggttaacatggtgaaaccttgtctctactaaaaatacagaaaaattagccgggcattgtggcccatgcctgtaatcccagctacttgggaggctgaggcaggagaatcacttgaacccaggaggcggaggttgcagtgagctgaggttgcaccactgcattccagcctgggtgacagagaaagactccgtctcaaaaaataaaataaaataaaaaatatgagtagcttttttttctcctttctttctgttgtatactactatcatggttttcttctcagtaatcttaagtgtttatataaatattatttgaaactttacataggcagattggggctagagttttaaattttgattttttttctgggacattaagcccatgtccattcatagcagttgcatagctaccgatgaaatccagacttccctctcactttgtcatatcgttgcttcctcattctcatcttcctcagactttccatcttccccacacgtcccatcttcctcataccactttcatattttacatttgcccagagacccttagggactacccagtactcagagagtaaaatataatctcctttgtctggtaaactggtatcttataatttgacttcattccgccgttcattcaaatttcctgttgctctaattagactagttatcttccttccttccctggcctttttcagcttcgaagcctttgctctgctaacctcttagagtttcatctcccctcttattcagctgcaccaaatttaagtctatactagccattctgtgtggatgttaatacagcaaagtaccgagaacagt

SEQ ID NO: 93722 - DNA, 1079 bp, Homo sapiens
gaagcccgtcgaaaagaagaaaagcaacaggaagccaatttgaaaaacaggcagaagagtttaaaagaagaagaacaagaaagacgtgacattgggttgaagaatgcactaggctgtgaaaacaaagggtttgccttgctccaaaagatgggctataaaagtggtcaggcacttggcaagagtggtaagtcacatgtggaaataaacaggtattccttaccacctaattgtgacttatggataaggaccaaagctgatgctttaatctttatctacacagaaattataacaacttaggctttttagtctattatgtattaacaagccttatggagagcttttcatcatcccacatccattttagataccacatgtgccatcaagagctgcttatcagcccagcttagctgaaggcactaacaacctagatggatgtggcttacaacagaagaagcaaagaatggtgataagtgatgggttgagaagtgcaatggctaaatacattgaaacaacactgaggatgatggcaagactttgccctgcttgctctgtacctgtggcagccatctgaatgaccgtccagttggagaggctcaattctcacctctctttttaggaagtgaaactgcttattaagctagagaggctatatatttatagtaacctctgtaaaccgtttttctttcctttatcgtaattgctttgctttcacttaaggctgtcaccgtcttgcaccaataatatcagtgttgttccttcttaaaactccaccttcaggtggcataggaggctgtgaatcagcctttttgatgagtaggtatttgaagacaaggtagataattgattatatatagaatatatatagatgttcagatttcaattttgaatatcattgaaacaggagggcatatgcatagagcattgtaaagttgcatacttatactgttctgtagtttgaggaaaattttctaaaatagtttgtattcattctctttaagggggtggtattgttgaaccaattcctctcaatatcaaaacaggtacgtaattattttggagcatatttgccaataataata

SEQ ID NO: 93723 - DNA, 1003 bp, Homo sapiens
tttctgatttgaaaaattgtttataatattactataagatgagattaacaatctttgtaaaaatcagattatgttttgggcttaaaaaaaaccctagtgttttctactattagtgtactcaaatgatttgtgagtgatagtactcaaatgagaattgcatttaatttgtacatagttaaatcgtcttgttttgaagcacaaagtcaggatgtttctcatcagaattttctgtttgaatagggaaaagtggcattggtcatgaggcatcattaaaacggaaagcagaggaaaaattggaaagctacagaaaaaagattcacatgaaaaaccaagctgaagaaaaagctgcagaacagtttcggtaaaactatttttgagctggttttggttctatttcctctttattgtggtatgttctctggtacttgggcatataaaatggttaaagataacgtagacctttagtttacaattttttctttcaattagaatgcgacttaaaaataagcaagatgaaatgaagctagaaggagatctcagaagaagccagcgagcctgtcaacaactggatgtccagaaagtaagccttttaccagctttcagtttagtaaagtgttttggcaccccctgtgatttcccgtttatttattatatatatatatattttatatatgtattatatatatttatatatgtattatatgtttatatatgtattacatatatttatatgtatcatatatatttatatattttttacatatgtcttatatattatatatattttatgtatttatatatataatatatatattatatatatatataaaactaagaactccaagcccggtttatctactcattaaagctttcatgtaatgtgcacttctgatctgtgacaattgatataaaaatggcttattatttactatagtaacctgagttgtctgggttactataaaacccagggttttatagtaactatagttttatagttttatac

SEQ ID NO: 93724 - DNA, 1071 bp, Homo sapiens
tattttgattcaaatttgtttattatatttagatttctattttgtgacatgttttggggttctttttttttctttttttttttttttttgtgagacggaatctcgctctgtcacccaggctggagtgcagtggcgtgatctcggctcactgcaagctccgcctaccgggttcacgccattctcttgcctcagcctccccggagtagctgggactacaggcgcccgccaccacgcctggctaattttttgtatttttagtagagacggggtttcaccgtggtctcgatctcctgacctcgtgatccgcccgcctcggcctcccaaagtgtttttggggttcttaagaagataaggtataagcttttaaaaagttatgaaaaactttaaaaagttataaaaaattttttataaatttatatttattgttacttttaacatactgtgaattttatacccaggtcaaagactaagtgccttttcatccaaatggaattctgtgataaagggaccttggaacaatggattgaaaaaagaagaggcgagaaactagacaaagttttggctttggaactctttgaacaaataacaaaaggggtggattatatacattcaaaaaaattaattcatagagatcttaaggtaagtggaaaatgtactttattaattgatatatatataatatagtaattttaaaatatatcttctcagctgggcacagtggctcacgcctataatctcaacactttgggaggctgaggcaggcagatcatctgaggtcatgagttcgaaaccagtctggccaacatggtgaaaccgtgtctctactaaaaatacaaaaattagctgggcatggtggcgtgcgcctgtaatcccagctactcgggaggctgaggcaggagattcgcttgaacctgggaggtggaggttgcagtgagccaagattgtgccactgcactccagcctaggtgaagagtgagacttgtctcaaaaaaaaaaattatatatatatataaaataagatagatagatatatatttttttctctagttttagaatagtggttgattgata

SEQ ID NO: 93725 - DNA, 1034 bp, Homo sapiens
tgcaacctctgcctcccagattcaagcaattctcctgcctcagccttccaagtagctgggattacaggcactcgccaccacacctggctaatttttgtatttttagtagagacggggtttcaccatgttggccaggctggtcttgaactcctgacttcaggtgatccacctgccttggcctcctgaagtgctggtattacgggcatgagccatggcacctggacttatcatgacttttgaaaagccaggagttgactgtgactgcctggggtgatatgttacgttagacttgccctgggaggagtgagaggactactctttgtgagtcaagagtttctgccaagtggatctttcttattcagaaggagagaatcaaatttgttttattgtccatttcacaagtgacattaaagggaaaggagtggggaggcgggggggtgggggttgagcatgaaatgtcaaaataacagtggtttttatctttaaggtttggcatggattttaaagaaatagaattaattggctcaggtggatttggccaagttttcaaagcaaaacacagaattgacggaaagacttacgttattaaacgtgttaaatataataacgagtaagtagtaaatgtttacatttttttgaatggcaaggtacgctgaatctgcactattcttttttatgcttctctcttctttattagggtatcatttatttctttctgatcctcattaaacatttcattctaccaagaggagtttggcttactccgagatgatctcactttactgtggttatttcaataaaaatggatataccattgatcatccttttggtgctatcttcagaactgaagctatagagtcatttgctttaaagtgacatgcaaattcatgaaatgctccgtattttaaaaaccgtggcaccagatagaacctatcattacccacaaaataggtgatctttgagatgttctagtcttaccttcttattttatagatgaggaaactaagatccagagatgtgaagtgattttgtct

SEQ ID NO: 93726 - DNA, 1835 bp, Homo sapiens
tggaagcacagagcagagttaaagagaaggaccccctttcactgaccagttgagttttttttctttcctttattttttaaaacaatttcaaaattgagatggggtttcgccatgttgcccaggctggtctcgaactcctgagctcaggtgatccgcccaccttggctgggattataggcgtgagccaccacacctggccaagttgagtttttaaagtagaaaattttggagaaattaactttattgtgcagtgaatgagaaagaaagaacggttttgaaagaaagtctctgcatttatgtgagactgagatgagtcctataaaggggagtctccccaacccctctgtctcctaaactgcattgggaaactcagattaaatatgttctgtgagcatcactcattcaaatgtctcttccattgtaggatacgggaagaagaaatggctggtgatctttcagcaggtttcttcatggaggaacttaatacataccgtcagaagcagggagtagtacttaaatatcaagaactgcctaattcaggacctccacatgataggaggtaggttgctataaaaaatgatatggcagccataaaaaatgatgagttcatgtcctttgtagggacatggatgaagctggaaaccattattctcagcaaactatcgcaaggacaaaaaaaccaaacaccgcatgttctcactcataggtgagaactgagcaatgagaacacatggacacaggaaggggaacatcacacaccagggactgttgtggggtggggggaggggggagggatagcattaggagatatacctaatgctaaatgacgagttaatgggtgcagcacaccaacatggcacatgtatacatatgtaacctgcacgttgtgcacatgtaccctaaaacttaaagtataataataataaaattaaaaaaaaaagaaaaaagatatgaccttataaatgtaagctgggggaatggcaactctggcacaactttgaggtcaacactttagttttgtgagagtgctcttggcataaagtgggaaccatggtggagccacagttgactccagagagaaaagagggtagaaacctttccatgcttcaacaagacatgctgctttactgtttgaggtgactgcttaaatgctatattgaatgtaggttcaaaccctcaaaggtagtcataggaggtagtgatgactagagtacttgtttttagatagtgcatgagttgtataatattttatgaatattctctttgtaatcaggtttacatttcaagttataatagatggaagagaatttccagaaggtgaaggtagatcaaagaaggaagcaaaaaatgccgcagccaaattagctgttgagatacttaataaggaaaagaaggtgagtgattgccttttttcctaataaatgggaacttgcaaatacattttctgtttctctctgtgagaaaatactttcatacagagtaaagccattcacacgttcccttacattcaagagtttggttaagtcattcaccctatcttcatttctatgaaaccctgagtgagagccacacctaggacaccatgggcaaagctggataatagttatttagagtgtcagcagcagttaaatactctaaagttgaacaaatatggaaaggtgagaagtgttcagtgggaaatgagctgacaggttctgggaggagtcccctccacctaaatgaggaagtacagtaaaaaaggaaaaagagatgaaagtgattgtagggagaataatgtacagtggtcactcactctctgtggggaattggtaccaggactccctgtggatgccaaa

SEQ ID NO: 93727 - DNA, 3116 bp, Homo sapiens
gcggctgcagggaaggcggagtccaaggggaaaacgaaactgagaaccagctctcccgaagccgcgggtctccggccggcggcggcggcggcggcggcggcggcgcaggtgagcagggcagggggcagccgagggagcgcggggagcgggggccggggggccacgtacgaggggctgcaggcccagccggggcgggactcgccaatcctgcgtccccagctcaggacgcggacgctgatccgaagcccctggccccggctgggtcagcactgggagagcaggcccaggtccgcagcccgggtgtggggccctccccaaatccagggaaaggatcgtggagcggggtggggactgaaagccatttccttcccgtgaagaatttttatcagtgcaagtaacaaatatttcccaggcagcagttgtggggcggggtctagtggaagacgaataggcctagtggcttgacacatggaaaatacggaggcctgaaatactcatagactggctgaacaatctttggctaaaaatctcttccgtggagagttgcagtagtttcccaattgcctggccgcagttcctgttcccactccgtatcctcacccctgaacctccaccccctacctcttctccacacctcagcatctggaatgttcctttaagtaagaaccagactctcccctgctccgaccttccccgtagctttcctgtctcatcagaatcctataaacatttattaaggctcacaggcaaggcccctcgcaccccctactccggccacgctggcttccttgctgttcctggtgcacagccaagcatcctccagcctctaggcctttgcactgcttgtttcttctttctggaaagcttcttccccagataactgcatggggaaatccctcccttatcctgcactgcttcccatgccagcttatcagagcagccttcctcaaacaacctgcctatacaagaaaccccgctctgcccttgctgttcccccttccactacttcggttgtcaacatagtagttatcacctggtgacattttctttcttttcttttctttttttttttttttgagacagattctcactctgtcgccaggctggaatgcagtggcacgatctgggctcactgcaacctctgcctctcaggttcaagcgattttccttcctcagcctcccaggtagctgggactacaggtgcccgccagcacagccaactaatttttttatttttagtagagacagggtttcaccgtgttggccaggctgtatgtagtctgctggaaaggaagtggaggcatagccaaaataatttctgggcattagtaagatggacaaatattattttttagtgattatgatggaggtttcttccagatgagtgaataagatgtagaatctgctccccaaagagctcactaattagtttaaaaagcagtcagggctgtgttgaaggttgggcaaggtggagtggcaagcccatactagctgaccctccagcatcaaagaaggctgtgttgatcctgatagatgagtggatattggtgggtacagagagaatgcagatattgcactataaatgtagagaaaagcaggtgacaagtcctggatggggtatctggagatattttggtactcactcattcattattgagcctggtcccttacctgtagtaattcatgctctattttggaaaatagttaaataagcaattttaataaaggggatgagcactgtggaagagcctgtgaaggagtgtctgggattttgagctgaaatctgtaggaagtagaaattgaccaggccaagacagcagaaggaatagagtcaagggcattttaggagggagcaggttggacagaggcagttgggagttcaggagagagtccatggtggaagcgtgcttttgagaaccatcattgtgtccgtggaatttaaagccacaaacctggaggtgatcaccaggggagtgagtccaagtagaaaagagcaagtctaaggaccgggcccagtgatgctagaatatctagaaaagaggaagttagaaccatagaaaaggttaaaaaaaaaaaaatagaagaaaagaagttgaagatgaaccaggaaaggagacagaaaaggagtagcttgtcagaacagaagaaaaccaggcccaggtgccatggctcatgcctgtaatcgcagcactttgggaggccaaggtgggtggatcacctgaggtcaggagtttgagaccagcctggccaacatggggaaaccccgtctctactaaaaatataaaaaattagccgggcgtggtggtgggcgcctgtaatcccagctactcggaatgctgaggcaggagaatcgcttgaacccgggaggcagaggttgcagcgagccgagatgccaccatcacactccagcctgggcaacaagagcgaaactctgtctcaaaagaagaaaactaggagagtgggtgtcttaaaagtccaagctaagacagggagaggagggcgaagaggatgcgcaaccccatcaaatgctggttgtaagtcaagtagagaaggactaagaactgactactggatttagtgatagggaagccattggtaacctcgacaaaaacaatttcagtggcttgtggagactgcatgattgaattgatgtttttttgtttgtttgttttgtttttgtttttttttttgagacggagtttcgctcttgttgcccaggctggagtgcaatggcacgatctcagctcaccgcaacctccacctcctgggttcaagcgattctccttcctcagcatcccgagtagctgggattacaggcatgtgccaccaccccggctaattttgtatttttagtagagatggggtttctccatgttggtcaggctggtcttgaagtcccgacctcaggtgatctgcccgccttggcctcccaaagtgctgggattacaggtgtgagccaccgcgcctggccactgaattgatgttttaaaaagatcatgatgtggctgtattaaaaaagaaaacagataataacaagtgatggtgaggatgtggagaaattagaaccctcgtgcattgctggtggaaatgtaacatgggtgtaaccactgtggaaa

SEQ ID NO: 93728 - DNA, 1069 bp, Homo sapiens
tactaaaaatacattagccgggtgtggtggcgggcgccggtaatcccagctactcggtaggctaaggcagggagaattgcttgaagatcgcaccacggcactccagcctgggcaacagagcgagacaccgtctgaaaaaaactaaataaagagtgtaaagcttttttccatgtgtccattttaacatatcagagtgaaatattgcactgaaaatggtaaaatcatgaagaaatattctaacagatatctgggtctactgttttttgtgtgttgtaggtgaagttggtgattggaaaaatttgttcagtgaaattcagaaccaggaaatggatgaaaaattcaaagagtgcttagcaggcacctccctcggagcaaagttgaagtatgaatcatattgccagggttgattccagtcaattcagcaggcctagatttattttccttaataataattaagtgtaaataattaaatgataattcaatcaaataatcaaataataattaaacaatattgaaatctaaataatacaatacaaaataataatacaatttaataataatgataacatcggacatttttgagcacaaatataagtttgttcactttttcaagaaaggatatttcagcagtcccaaagggacactattattaatacatcacactggagttttaacttattttgtgctctaggttcacgtaagagggtaaggagatactatcagagacatacctaaagctgtgtttggccatagatgacacaggcctccaaatggtgcacaattttctgtactttgctcgtaatataactcctttcttactatggataaaagcacttggggtggctatctcagacaatgttgggggagagttaattccaactctgcaataaattccattctaatttggttcaagaaaaatgcattgctaatctgctccatgtatgccattgcagtaggccttaggaaggccccttctcaagggaccttatatttctacttaatatgacctttaattcaaagctaaaggtaagagattgtgttattttaccgtaaagactttttctttttc

SEQ ID NO: 93729 - DNA, 1028 bp, Homo sapiens
gggcagcagagaaagaccctgtctaaaaaaaaaaaaaaaattcttcaagtttttatgattctaaaaattagactttcttaatggaattaaacattagctataaatagaattcagaaaaaaagagaattcaaatgagcacataggaatacattaatttcttcagctggtctaagttggtactttttaatgcaatgatatcatcctagataaaattataacctgtgaattaatgttactgtcattatttacatgctaaaaactattatctggtaagttcaacaagagtcataaattgaaactacaaagtataatcaatacagaatatcttacagagatatctcaatatttacataagaagatgaaagtactctaagtttaaagtgggggatgagatgaactagggagttaggctgaataactctgatgactaaaaagtctgtctcagctcagagaacaatttccataggaagaaatttatctttaagaaaatttttttacagaatctggctgctggaataaaacagattgctgagttcttgggattctttctaactggggagcaaattcaaactatctcagtccagagcaccttccaagccatgcgtgcgaagtctcaggacacacacggtgctgtcggcccattccttttccgcaaaggtaaagtcgcattggtttctgggattgttatcagttagggactgactttgcacacaacaggtaatccaaataacttcatcttaagtcagatagggttttatttttctccgcctcagtaagaggtctggacacaggctctccagagctgtaactggcagccccataccatcttttttggtttatttgtttgttttgagacggagtctcgctctgttgcccaggctggagtgcagtggctcaatctcagctcactgcaacctccgcctcctgggttcaagcgattctcctgcctcagcctcccgagtagctgggactaacaggcgcgtgccaccacacccagttaatttttttgtatttttagtaaaggcagg

SEQ ID NO: 93730 - DNA, 1583 bp, Homo sapiens
taagtggagtaaaacattaaaattaatttcatttgtttcttttgttttttaaaattacgtatatggctagcattacatttttattgaacaacgatggtctagaaaatgtctttttcatcatttctttctggcattgtctctgtcggatttcatgtgtcattcactatttctgaatttttttaatccacctaaatattcatgaatgtcttatagtttttataaatcatttttgtaacttgcttaattttgtgttatttatgaaaaatgttccaaaaggtaagaaaataaatagaaatttagacaatgggactgatttatatcagctttttggtggcagggatttataataacataaagatatctcgagcatatacacatatgtatagtttatattttatagcataaattaatgatcattttaacctcagttatttgacatttcttaaagtcttcccccctgtgtttttagtttcttggggaaggtattttgattttgcaatcaattggaacaaacatcttgatggcgacaatgttaagttcatattatatgaagacctgaaagaggtgagattattattgatattttagagcaaaatttattgtaaactacaacgtagagcacttacttataatgtctgtttgtataaacaaatatggtgttcaatttttaaaaatattccagatatatggtacagtgctggaaaagaaaattcaaaccatgcatacatgcttaggttgtttatttaacagaaataaaataacgcttagcaacttattactaaaagtgactgctttattttccctttatgatggatagttcaaattggtaataaaaaaaaataggtaggtctgagttgatttaattgaacatacacttggttgtgaactaatttatccagtcattttttaaaaattgtttattgatgtaacaaatatctagtgagtgattgctcaccaattaggccctggtgttacatcagtgaacagacaaggcaaagatcgctgccctgtagtaacttacatgccagttggagaaggtggaaagaaagaatgatacataataaacacaataatttttaaaatgtatatagtatgtgagaaaaaaagaaacagcatagctggtgaaggaaaattaaaaatgctggggggccaggcacggggaaggattggacaaattccagtgtaaaatatgatgtttaggctggtgtggtggttcatgcctacaatcccaacactttgagaggctgaggcagggggatcacttcaggccaggagttcgagaccaccctgggcacatttttaaaaattaggcatgtacctgtagtaccagctactcaggaagctgagacaggaggatcacttgagcctaagaggtagaggctgcagtgaaccatgattaggccaccacactccagcctgggtgacagagtgagatcctgtatcaaaaaaaaaaaaaaaaaaaaaaaaagaataggaagattaggagagaccttactgaggggatgtgatttgagcaaagatctgagggaagtgggggagtgagccaagtaggtaactggggaagagcatttctggcagaggga

SEQ ID NO: 93731 - DNA, 1635 bp, Homo sapiens
ttacattcttactttttctgtaggagaaatcataagctactccacctactaatctaaaaccatgttgaaaaaatccaggtgttagctgacttgttcttagagggtccatgttgccccctgttggttacagtttcctcttttatgtggccccaaatcttgtttttagtcaattctagacttctcccaaatgaaagtgaatatcacaaatctgcactttgcaaaatccacatctttcccctttctgaaaatgaaatgacttctgcctgttctagttgtctggcctcacatgttttcagattcctcggaattcaggaacatgctggatcatgtgtcctccagtttcctcagttcttgaaatagaaggcttcaggccagaaggctgaactcagagcagacgtgtgatcctctgcaatcttttggttctctggggtttcagtttgttctttacgatgtttatttcatgctactcatccaaaggaacactttcctcatcaaagaaggcagatataggaattcagacgttctgtgtcatgtactcacccataaacatcatacccagagagtgggctttgccattctttaatcttctcctaccaactctaaaacattatttttgtcgtccttaacattatttgcaatttttatttgaggatttaagctttcaggtcatactcttgtgattatcctagtgagcttggtctttttttcctttttacatcttctgtgcatcttattgcctaaattcatttgcaagaatcctttgcaacaatatcaatctttttcttcttctttctctcctttccccagatttccccatcagccacctcctgttcctcagtttcctactgtcattctttctctatatattaacacaattatgtaatatacgagtggacatgatgatattgctcacccttttaattttccaaatttcaaaacatagacccaaataaattaactcaatttttgctccctagatattggtgatatttcgaaaccctaaagatacagcagtatcttttttgcatttccacaacgatgtccccgatattccaagctatggctcttgggatgaattcttcagacagttcatgaaaggacaaggtatggctgttggtaaaagaattattcttacttgatcagatgaccacataaatgtgaaaacccaaatgtgttttagggtaaaggaagaagatttaggtagatctgggaaccaaaaagtttcatttaaatgaacggtcatagcaccattagttctgtgcatccaacaattaaatgcattgctgttttaaaaacgaatttggggccaggtgtggtggctcacgcctgtaatcccagcactttgggaggccgaggcgggcagatcacaaggtcaggagatcaagactgtcctggctaacacggtgaaaccccatctctactaaaaatacaaaaaattagcctggcgtggtggcacgcacctgtagtcccagctactcgggaagctgaagcaggaaaattgcttatacccagaaggcagggattgcagtgagctgagatggcgccactgcactccagcttggcaaagcgagactctgtctcaaaaaaacaaacaaacaaacaaacaaaaaactaatttggacaagtcgtatgttg

SEQ ID NO: 93732 - DNA, 1192 bp, Homo sapiens
tcaggaaaagtttatatattcagtactacagataagttttttttttaaaggagaacctttttcgctgttataaacaacttcatttatagcataataaacatactttcagtcaatttctttacaatctaaagacccctgaactaaattttatgttgtgtcttaagtatttcaaaacccatccatgtcaaactgataattttactattgcttgatactatgttatttcccttatgggtaaaacttcgatcagtggccaaatctgaaaagcaagaagacactcttgtcatctgaacagttctattaggatgttgttagctttttgaaaatattatatactaactcttaaattatatttaaatgccagctacccaatggtgccagaagattattgcaattgtttttacccaagtataatttttaaaataaaatcatgttgcattgcatttttctaaaatcattagatttataattgaataatgtagacttacaattttttttagggccaagaaaaaagaaaagaaacttaaatgattccagcctatttgtatctgctgaagaggtaaggctaatgtactgttttaacaagctagctattctacattatttttagttttctaataaatttatcgtttttgtttaaaagtttggccatctattggatgaaaatatgggatccaagtttgataacattggcatgaatgccatggctaacaaagataatgcaagtaagtaacttaaatttttttattgatgttttaaaaatagctttggcttggaacttcagaagataggaaattttcgttattttatttattcttttttttttttttttttttttttttttttttttttttttttttttttgagacagcgtctcactcccttgcccaggttggaatgcagtggcatgatcttggctcactgcaacctccatctcccatgttcaagtaattctcctaccttagcctcccaagtagctgggattacaggcatgcaccaccacgcccagctaatttttgtatttttagtagaaacagggtttcaccatgttggccaggctggtctcgaactcctgacctcaagtgacccgcctgcctcggcctcccaaagtgctgagattactggtgtgagccaccatgcctggctgataggaatatttttgaaagaccttttcatggtactttacaacctg

SEQ ID NO: 93733 - DNA, 2017 bp, Homo sapiens
ttgttttggtgttcacttgtcataaacagcagaatcatgacttagaataattgattcagatacaagatatatgtcaagcttgtcattctttgttgtatctcacatttctgtattgtctggcagacacatttgaagatgataactgtttcagctctggaaaggatgatatggattttgctgggtaacatacttctatcttctccttcctatttttctagcatttcccaaattgttgtccctcagaacagtagaccacagaactatatgataaaggggaaatgtagtcaagtaagtttgggaagtggatacagtactttcatctttgacatttataaagcacgttattatttactctgagcagtctgcaaagctttctccttctgagtcatttaatagcctactgccctagtagtcagcaaaacactactttagaaaatactgcctcctcttgtattacaagttgtgtttttttccagaaacgtgaaaaagagaacaaaaggagctaaggataacacattagatgaagattcagaaggtagtgatgatgaacttggtaacctggatgacgatgaagtttctttaggaagtatggatgatgaagaatttgctgaagttgatgaagatggaggaacattcatggatgtgttagatgatgaaagtgagagcgttccaggtaagcattttttaaaataagacataaactgtgtcttcctcacttccttagccttaagtttgtttttctgctaaaggtttttaatatagccctgtattcaaattaatactcatgtcagccagaaacttaaaaggaccttttcccttctcgtttggagctgaagggtttttattgtgtgttatgtgtgttttcttttaagcagctttttgagctttggacttttactttaaccagcagctagcttctctgtacaatacatgttgagctgaaatgctgccattttttgatagtaattagcagtttataaaagttaatcagtattcatcatagcccagcatagatgaaggtgaatattttatcttgtaaattagcaaggaacacccagaattgtctctagactgttgtctgacctttctgtcctttcacatacctccagcatgcacatgcctgcccaacattcttcttacttattctgaaccacagcagaagtttcttgttttaaggggttttatattatttggtcttattaatgaagctatttagaaaattttgtacttgcacaaaatattagaactgtgccaattcttagagtctttttctcagtctgtcctcaagcctatgctagtggaattacaaaacccacatggaatagcagtatagtgccttaccatcagaataaagattttagcatatcttggagtaatattttccagtcttattgtttttaaattgcttattagcaaattttttcgtgtaacagaacttgaagtccactccaaagtcagtactaagaaaagcaagagaaaaggtacagatgattttgactttgctggctcatttcaaggtaagaaaatacatttaatatcttttaaaagcagtgtccatgtgaaaggtgtcattatcattttgggaaatgaactctcctaaatttgattaataaaattcaggggtggggggggttctttttaagaaagatgttaagtggaaattattttccacattttgaattgtttctcgcattcagatatctctggatcatcttttcattcactttttaaaaatttgttatcattatttcagttgtttttggggaacaggtagggtgtttggttacataggtaagttctttagtagtgatttctgagattttggtgcacccatcactcaagcagtacactgcacccaatgtgtactcttatcccccactgcctcccactcttccccccaagtccccagagtccattatatcattcttaagcctttgcatcctcattgcttagctcccatttataactgagaacatagaatgtttggttttccattcctgaattacttcgcttagaa

SEQ ID NO: 93734 - DNA, 1518 bp, Homo sapiens
gattcagtgcactgttatagaaataagtcctaaaccaactagtatcataacctaatgccttagggtagtaaagtacctcttatctcatctggttgactggttaattaggtttgatttggcttgttttttaaaatcatttagaatgaataattttgagggtttgattacatctgtaaatggctaagttttgctgtattctaatataagaatagggctgataaaatattatctttgaaatgtattacacttaaaagattccagctactttttattgagttaaactattttttgtatattagatacaaatttcagtcatttatttccaattgagtatacttaagattttacagttgtggtttgccactggtcataggtgctttgatgatatatagtaagattagacctttaataaaattgtcaaatatataacatgaatattataggtattataaaaaagttgctgttaaagagaaacaaaaacgggatgcagatgaagaaagtatagaagacgtggatgatgaagaatttgaagagctgattggtaatttgttttgttgactctttgtaaaataatctactactatgtgttaatagaccatggaacattagtgggagaagtggccttagttttaaaaaatcacttagctaagaatatcatgcaaatcacagtggaagattaagaaatatttggggccaggcgctgtggctcacacctgtaatcccagcactttggcaggccgaggcaggaagattgtttgaggtcaggagttcgagaccagcctggccaatatggtgaaaccctgtctctactaaaaaccccaaaaaatgagctgggcatggtggcacgcacctgtagtcccagctactcgagaagcagaggcacgagaatcgcttgaatccaggagtcagaggttgccgtgagccaagattacggcactgcactctagcctgggtgacagagtgaaatcctgtctcaaaaaaaaaacaaaagaaacaaatatttttatgatatatggtaattcacccacatttgcaccagaaaaatacatgatttgtgctttggatagtctatataagaaaacatttatatttgcttaagtctattcaattgttacagccaaatctcatgtgaaaaagaaatcctttttactattcataatctattatagtatatcagtactaattgatagcaatagtctactgtttgatcttttttatctttaatccacagagctacagaaattttgattgaaacttaatagacttaaacaaaaaacatggtaaattggaaagacttacactgatttcacgttacatatttttttgttgttgttttttggggggtttgtttgtttgttttgagacaggctctctctgtctcccaggctggagtgcagtggcacaatcccaactcactgcagccctgcagcctagaccttctgggctcaggcgattttcctgcctcagccccacgggtagctgggactacaggtacatgccatgatgtccggctcgttt

SEQ ID NO: 93735 - DNA, 1637 bp, Homo sapiens
ttttcatccctccgtggccctttttgcaaagaccatccttcaggtgagtctaaaataaatccaaagatgagaaataagaaaaaaagtatcattttagataatcaataattggtcatacagtgttttctctaacagagagaatcttgtacattttactgctcgtataaagaagcagtgacttgtttcatacagagtagcagataacttttcccactctgagatgagtggaagcaataagacattgaaagccacgcagttatttatttattaccttctagctcctctcctggagaaatactgcctcactttcccatttgctgtgtttgccacttcagggtttggttcctgattaatggttagatggcctgcattattaatattagtctatccatcaaatcaacattacatcctagaatatgtatgtatatgtatctgtgtgtttaattttttaagtataatgtgcatgagagagatatttgaagagtcatttattgcatatttgtatcttcaatacagtgtaatagaaattatctttttcttcctttttcttacttggattcatagacataatttgaattaagtttttaaatccccgctccacttttcagggaaactatattcagtattcaggggacccactgcaggatttcactctaatgagatttttggatcgatttgtataccgaaatccaaagccccataaaggcaaaggtatgcttctatttagtgaattatttggctttcatttttaatacataataaacaatatgagcttataactaggttttgcattatactgtcataattttacatttcagaaaacacagatagtgttgtgatgcagccgaaaagaaaacattttattaaggatattcgtcatcttcctggtaagtataaaccttagacagttgaaactgaaaagacaatataagacaaagatgcataaattgtattattctttgttctaatttatcagaataaaacctgagcatcaaagacattatccatcttttttcccaagaataggtattcttaaatctactgtatctgactgggcctttttttttttttttttaactttattacagcaaatttgaaacatatccaaaataaacaaaatagtatgatgaaccccctccccattaccatcacccagctttgacagttgtcaccattttatcatccgtagcttcatccacaacccctatgtatataattattattgcttacaattcagaccatcttaaagctctctaatatcagcttagcagcacaaaaacccacagctggttttgtcacagagcatcattttaaacttaataacctacttctatatttgctagccatcttctggatctgagtctgttgttgtattcaaagcagacatttctttgcataccagatctcatctcccttttgttcagagaccaggattaaattagaccttatagatcatttaatttccagtgacttacttcacagaggtccagagatgtaaaaggacttacccacagttagtaagttagaattaaaagccaaatctccttttactcaggatgagtcagcaatttttattctgaagaggtaaaactgatttcttgtagttccttatttcttagttttcctcagtataaagg

SEQ ID NO: 93736 - DNA, 2540 bp, Homo sapiens
cacaagcttaagtatttttcatttctagtgttagtaggaaaaaattaatggaaatgcttaaaacaaaggaagtaatgattccaggtgttaatagagctaatctggaggattgtgttaattctgggtgtcctaatatctgcaggtctagaccggttggggacatgtgtaggattcagcacctaggatagagaatttttaaagtatcatgagatcaaagtagagcagcctacagaagacagacattagggagagacaagcacataatagctaaataggttcaagtatttggaaaactgtcatgtaaaggtattaactgccaggcactggggttacaacagtgaataacaggcataatccctatttcattggacctttagagaagagggaaaggcaggaaaatcaagtttgtgaaactatgaagaacacaaacatgggactgagagactaatagaagaaccaattttggatactgtggacatgcagagagttggagagaagcactctgggcagtgaaaatagcgtgtatgagaggaatgttacacagctagtacattggactagagattctctgaagtccttagaatttaattttctgctgttcatcgatggtcttcactaaaatcatgaagaggcggcctctggtccccctgctagtaggtagttatacaaggacaaaaacccaaatcttctaatgttctgctttcatgggtcagttttcactatctggttttagattagcttttctggtggggttctgtaaatactgttagggctgtgccctgttgatatagaaaacagaaaaacacttggaaaagacaagaaaaccacacactcaaaaatgcctattcctgtgtctgttgctgttggtttttcctggtgccatcatcatccttttctggtcattgacttccatcttacctcttagggcagggtctcttgttctaaaataagcagcaaagttatccctaactaagatgaggttagtagctatttctaatatgtgaccattggttgtggagatggttttatacataaatatttgaccttggttttgttttgcaggaagatgttggatccagggttgatgacgtgttccaagcaagctatgtttcttaaccttgtctacaaatctctgaaagctgacattgtgttgcgccgggtgaaggcttttgtgaagaggttacttcaagttacttgtcaacagatgccaccatttatatgtggagctttatatcttgtgtctgagatccttaaagcaaaaccaggtttaagaagccaactagatgatcatccggtatattttacaactgctttttaaattgagtgggtgctgaaatatattggtttttgttttgtttttctttgcttcaaatgacagtaacctagttctctggagcatatgagtgtgagttctggaataggacaaacctagattttagtaccagctgtacagtttactaggtgggcatgttgctcaactcttctacttgcaataaactgtactatactagaagctaccattatatgagatttggaagactataaaacttagtagacctcttaagtcttcttccttaacaatgaaatggaaataatagtacctacctcatagggttatttacaagtcagaaatttacttgagggctaattgttttcaagtattagagtccttaaggctcaggggttcttagctcaaaacttaactgtgttatgtttagaaataaggatgtaatctcctctcttgtttaaataccattgatagccatcattttactttattagaactttcacgtttcaccagagttgcaataagtaaaactctgcatcacataatggagcacagactttattgcaacttccagttgatttatgtagatttatgaaactatacttttgttaggagtctgatgatgaagaaaattttattgatgcaaatgatgatgaagacatggaaaaattcactgatgcagacaaagaaacagagatagtgaaaaaacttgagacagaggaaacagttcctgaaactgatgtagaaaccaaaaaaccagaggttgcttcctgggtgcactttgataatttgaaaggtgagtttttttcatctttattctctagggagtttgtttctctttgattttcatagaaaatagcattctaccattttatttacttatttatttatttagacagagtctcactctgttgcccaggctggaatgcagaggcgtgatctcggctcactgcaacctccgcctcccaggttcaagtgattctcctgcctcaacctcccaagtagctgggattacaggcatgtgccaccacacctggctaatttttgtatttttagtagaggtggagtttcaccatgttcgccaggctggtctcaaactcctgacctcaggtgatctgcctgcctcagcctcccaaagtgctgggattacaggcgtgagccactgtacctggcccacagtttcttaaagtaatgttttagggatagaaaactttctgttcaagatagaaacgttaagtggttttctatacac

SEQ ID NO: 93737 - DNA, 1050 bp, Homo sapiens
ggaccctgagttttatgtcaaatttgaaaggatttttccagttccgaaattatttttaaaattatgttgtgtttcctattattttatggttttatttttcacatttgtaatgtatttttaacttatgtttttaatgcagcaagattaccttatgctggctactttggatgagaatgaggaagtgatagatggaggcaaaaaaggagcaatcgatgaccttcagcaaggtgaattggaagcatttattcaaaatcttaatttggcgaagtatacaaaagcttccttagttgaagaagatgaaccagctgaaaaagaaaattccagcaaaaaagaagtaaaaatacctaaaataaataataaaaatacagcagaaagtcaaaggacatcagttaataaggtgaaaaataagaataggccagaaccacattctgatgagaatggcagtaccacaccgaaagtaaagaaagataaacagaacatctttgaattttttgagagacagactttgttacttaggcctggaggcaaatggtatgatctggagtacagcaatgaatattctttgaaaccccagcctcaggatgttgtatctaagtacaaaacccttgctcagaagctgtatcagcatgaaatcaacttattcaaaagtaagacgaatagtcaaaagggagcctcttctacctggatgaaggcaattgtgtcatcggggacactaggtgacaggatggcagccatgattcttcttattcaggatgatgccgttcacacacttcagtttgtagaaactcttgtgaaccttgttaaaaagaagggcagcaaacagcagtgccttatggccttggatactttcaaagagttgcttatcacagaccttttgccagacaatcggaagctgaggattttcagccagcgtccttttgacaaactggaacagttgtccagtggcaacaaggactcaagagatagaagactgatattatggtattttgaacaccagctgaaacacttagtggctgaatttgtgcaggtcttagaaactttaagtcatga

SEQ ID NO: 93738 - DNA, 1060 bp, Homo sapiens
tcatcatctcaaagatgagattacttcctagacctagagatgttatcaaatcaaggctgtgtacattttatttccttggtctttttttagactccataatctgaatcattgtttttatcagatgccaaatcttttattttcatttgttaatcataatttatcattaggaaaccaaattgtgcattgttcatttcttatttagattatgcttaataactagtaggttaggattcttatagactgctggagagtggcttgggtaaggaacacatctctctgaaatattacctctattgtgacatgactaaatcattgatgtaaatgattaggaaacttaaaacctacttaacacattgtatttttttttcttcttttggtatttaggtgttcactcaacttggatctgtgctgaaaaattgtgacatttcagtacatctggtagaggtaagccaaaaattaagtgagattcaagcattgacactgactaaagagaaggtcccgttagagcgaaatgctggatccccagtgtatatgaaaggtgtcactaagtctgggattccaatttcctggtaccgagatctgcacgatgttccaaaaggtaattacctttatgtggattaatgaaagaattttgatcacaaccctcacagtattgatgggactgtaactttttacagcaatataatagattgagttactgctgccaagtcccttatccatagagagtagcctacttttttctagaaaagagcatcttaatagaaaataaagttgcctgacattaagtagtagtttatttcatgaagctttgtaaaatcccaaacaaaatgtaaatctcctttgtacttttgagtatttccctatagctagggttgtaccgatgacggagcagcccaaggcagctggggctgatggaagcagtgttagtaggtgggtttagttcagttatagagtcttttaaaaaatccttacttgcctaaagacaagcaaggtgtgggggaaaatccctgtactagtcaggaatactgactagtattgactagtttgagtcttgactcaa

SEQ ID NO: 93739 - DNA, 1041 bp, Homo sapiens
gagcatgggttaaaatcatttcttaagtgtgtgaccttaacgtcatgtagtaagagaaagtaagtaaccgcttactcagccaagtctcttactttcactgcttatctcagtttcatgtcaaatggtaatggtattgtccacaggaagagtttacatctgtgaaagcaatgtagtacagactatagtaaattaacaataacagctaacgtttgttgagtactttgtgttactctgttttctcatttaattctcaaagcaactatattaggtaggttctattattatccttctttgggctacagcatggcttttatcccatgcttccacacagatctcagtttgattcggccagaatggtagaattactactgctttctgttgatctcaaggaatcattgcaagagcctgtctattgtggcttgtttaaaggtacaaaaaaatccctgtacttctcaggaacgtccaggcttcagactgcctctttttttttaatcctttttttccagctcagaagatgatttttactttctggaccttaactgagaacttcttacttagaaattatcagttttaaaagcacaagagcttttaaacttaaatgtatgaattaagttttgttaagtataaatttaaatgtcagactgaacacttatgaacacctgttttttcatagtatagcaatctaagtttacctgaatgacatattcatagaactaccaagaactaacctcctggccctgggagttcatttagttcttgacctaattagtattcacttaggaagggagggagcgaatattctctttcacttgaatgagatgcgtggtaatacatgtcatcttgaagagtagcctaagatagaatgtcagcatgatcagcgtgtccactgatgcctgatgaggctgacttcatggtttttatagttaagccacagtaatttgattgcactattagctaaatggttagttatatttaatcctcacaataaacctacaatatctataaggaagaaaacaactcagaaagtttaagtaacttgtc

SEQ ID NO: 93740 - DNA, 1041 bp, Homo sapiens
agacttccaaatagtgtttttgtttgttaagaaaactgcgtttatgggtatgaattttctaactgttcttctgagaacacctaaaccttactgtagatcaaaccccctgaggatatttgttaaaaatgcaaatccttaggtttgtttcacaccaatctacatttttaataagtactctatgattctcaggcaggtaatcagaagtcacattttgagtgctgttttattggaatatttgagagtcattagtattgctgcatgtaactaggaatcctgtcttctggttatttttgctaagaatttttttcttttcaggttcttttagataaatcaaatgagccatcagtgaggcagcagttacttcaaggatatgatatgttaatgaatccaaagaagatgggagagagatttaacttttttgccttgctacctcatcagagacttcaaggtggaagatatcagaggaatgcacgtcagtcaaaaccctttgcatccgttgtagctgggtttagtgaacttgcttggcagtgatatttcagcttggacattttacccttcagtcggcccaagaaatcaaaataaaggaaacacatttcatatactgcaggtaacaaaagtcaaagtattttatcttttcacagcaagaacagtccatgttgtatataatacaaccaacattatagaacttttagggttgtgactggctttggtgcaaatgtgtgctcaagctaataagttattgtgaaactgagtttcctttaacttacaaagctagttgccatatttctattttattttaaaaagtaaacatgcggctgggcgtggtggctcatgcctgtaatcccagcactttgggaggctgaggtgggcatatcacctgaggtcagcagttaaagaccagcctgaccaaaatggagaaaccccatctctactaaaaatacaaaactagccgggtatggtggtacatgcctgtaatcccagctactcaggaggctgagacaggagaatcacttgaacctgggaggtggaggttgcggtgag

SEQ ID NO: 93741 - DNA, 1549 bp, Homo sapiens
gtttgaaaaatttctttaaattgctcatttaaaatatcacaagtagaacttagtacatagtagatacttatgagtagcgcctgtcaattatttgactagggcactaaacaacaacaaaaaaaaacacaaaacaaaaaccaggttgacagtattttgtttcttttgtttcatcattacaatttcattttctcctaggactatcagacttggcttgaccttagagaatttgaaactcgcattggagaacgttacattacacatgaaagtgatgatgctcgctgggaaatacatgcatacacacataaccttgtatacccaaagcacttcattatggctcctaatccagatgatatggaagaagatccttaatcactgagctaacctaaataaggaaggatttcattttatggactgatattttgctgtgtaacttgttctttgtagattgtcatctgcagtgctgcaaagatatgaagaaatatgataacgaataagtgacaccagtactgtagttcataatgagtaggtacaggcgggaaactgaataataagaagtcataatggaatcaaggtgaagctttttataaacttttttagcctaagcaataactggttttgtattttttcttaatccttcactttaatacaataggctcacttaatttgtcttcccatttctctttatatatatatatataaatataaatatatgtttgtttgtttttttaatgaaaaacaagtcaagctagcatccagttactatatagcttggctaaattatacaagacttacaagattgattactcgacaggcttgtatttaagaggtaactgtgaggttaccattatgtgatgttactataaggacttttaacattggtttaacaaaccatagaggcattgaagggtttttcttagatgcctagaaaaagcgcactgggctgttttacctttcttttttaggtcaatcaagactccaaaatagtgattcctaacctttttggagttgctctgctactctgaatatgttctatacagcataaggattgtcaccttctgtgtgttgcaacagcttctaagataattagggacaaatgatgttacaaaaggaagagtactgctggtctaagtgctgagttgtatgtctttgcatagctccactctgctgctaaatatgcatgttctgactgacaccatcttgatgccagtactggattccagcattcagcaggtgcagatctcggctttacacaatttatctttacctagggttcagtcagtaatttctgctttttagcagggccagtgcagggtcagttaatgctacagttactgtatagcaaacagtatccttttttctccttcccctagcctattgggctttgcagatatctggagtgttttaaagtcaattattttaagcagtttgaggggatgtgtaggagtggagcatgaaacagtttataaggctggggctgtattatcagcacagcaaattaaagaatgaaagaagtacttctttttacatttcagctccagcagccagctat

SEQ ID NO: 93742 - DNA, 1039 bp, Homo sapiens
agatataaatgaccaaatccaaaatgctgcatttatgtacccaccaaatccatggagagaaatttctggtgaaggtaaaaaaaaaaaaaaaaaaaaaaaaaaaaaaattttggctatgtgttttaagcctaaacatctttctcatcccaaatcagtctgtctcttgcaacttatctttttagtacatctcccattcatcttccaaattcaactagttaccagttttttgagcactcttctttttatacttttatctgtgtcttctgtatagttcccaggcatagcacttacataggccccagtggcctcattgtcaaaccactaaaatatctttttaactgtcttacctgttaaactcttttctggtccttcctagtcactactgccaaatctatcttcaggaaacattactttcatttatggtgctcccaaacacttctctttaaccaccttacaggcatagttatctgtgatatggtccatgcttaccttctagcctcatctcccactactccctacacaaacctagttgtttactcttctgaactgttttctgcaatttgcttgggactgtttttcccttgtctacaatccttcctattaaaattcgaggaccccttaatttgtggctcatctataaagttccctgactactcctctacactgcagaatttacttaggctaaaaaacatttgggcttttttattatctttttttatttttattgagacggggtctccctctgtcacccaggctgaagtgtgcacaaacacagctcactgcagcctcgacttcctgggctcaagtgatcctcccacctcagcctcctgactaggtgggatgatgggtatgcaccatgggccacccacacctggctaatttttaaattttttgtagagatggggtcccactatgttgcccaggctggtgtcaaactcttgcactcaattgatcttcccaacttgacctcccaaagtgctgggattacaggcatgagccactgcacccagccccatttttttcttaagtattcattctt

SEQ ID NO: 93743 - DNA, 1058 bp, Homo sapiens
aagaatcaagacttagataaataactaccttagaaataaaactcttaagcaaataccatcacaaatacagcccccaagagtcaaaggtttctgtgtaattgactaaaaatttatgggcagttggtgcctattcagggaaagcatgaaattagagcagtgtcagatttttcaagtgagaaggaaggaaaagtagtagtaatggacaagagtgattatataatcaaattaggagaacattctatcccctcagtgcggctactctccagtacacaacttggagaattaaaacctaagatccttttcattgattgtaatttttattttgtttgctttgtttacttctctaggctttctttctgtgccatttcagacaatcatagcacatctagatattagtaaaactgtttctctgcttaagttgctcatgtatcttgcaacctctcttcagaatttgcaccatcctgggattgtaaacctggaatgtatgtttgaaaccccagaacgagtctttgtagtaatggaaaagctgcatggagatatgttggaaatgattctatccagtgagaaaagtcggcttccagaacgaattactaaattcatggtcacacaggtattttaactcctttttttttttaaactagcgattaaaaactaatttttttttttttaagacaagagtcttactctgtcacctgggctggagtgcagtggtgcaatctggctcactgcaacctctgcctcctggattcaagtgattctcatgcctcagcctcccaagtatctaggattgcagatgtgtgccaccacgcctggctaatttttgtatttttagtagagctggggtttcaccgtgttggccaggctggtctcgaactccttgcctcaagtgatccacctgcctaggtctcccaaagtgctgggattacaggcatgagccactgtatccagctaaaaactaaaataattaaatagcagtacttttacatgttgggtgattgtgggaattgttaaccttaaggagcagaataacacacttttagctaagtcttgatgaacta

SEQ ID NO: 93744 - DNA, 1781 bp, Homo sapiens
ggattacaggcatgcaccatctcacctggctaatcttgtatttttagtagagatggggtttctccttgttggtcaggctggtctggaacacacaacctcaggtgatccacctgcctcagcctcccaaagtgctgggattacaggcgtgagccaccacgccaggcctaaatacaagatttttaaaatgcaaagcatttttttcctgaaagtcttgcacaatacattatacttgcacataaaatttgggcttaacctcttattagaacatagaaagcctgtgttttcataaaatagtttgcactttatggaaattagctgcttctaacataaaaatgtattgaagtatttggatgaagaaagtcagagatgttgacattgtattatagaaataaataatactaactccttactttatcctaccaggatatcagtactgtttaccagatctttgcagatgaggtgcttggttcaggccagtttggcatcgtttatggaggtaagcaactacagccgtttgcatattgtacacattattttaaaaactggaaaatgtaaaacatctgccagctgttttgtcatctcatagttttgtccagtgccttttttttaaaggctgacttgttatctttcagctaaatccttctcactgtaatttgagtattcttcccttaatgtcattgcaaactttaaaaattaacagaatcagaaaattttacagtgtgttttatctcttcttgtagctcacacatacagatgtttgtcggaggcagggggggagatggtttgaagtttatgttgggctgagtgggcttattcattgaagtatattccctactagttttccaacacaaatggcaccatttgtctactgttggcatgattgttctattaagtctgaaaacctgaacctgaaatccaactttgcgatttaggatattgatgaagtcatttaaccttactgtgcgttagcatcttcaactgtttaatggaactaataaaacctgacctgtgtagctcatagggcttaaatattaattaaacttaatatatgtaaaggtactaagaaagaaatgttaaacccttgttatcccttgctaagacttggtacagtagtttcctagttggctgttctgcctccattcttaccttcttttcatacaactcttagagtcaatctttcagaaaattcacatctgatattagtattacctcacatagaacccttaagtggttcacagtcatctacagattcatagccagttttcttagcagaggatttcaaggctgctgtaatttatccctgcttctctagcctcagatctaattgcagcttcctctttgctttctatctttcagtcctgtttacatgcctccataccctttgcctctctgctccttctccatccctttgtctcttctagtgcacattttttcatacttcagggctcaactaaagggctttctctgtggaaatttcttgtccccgtacctatttctccatcaaataaaaacatggttcccctttggtactcctgctacccaacatacttctctcacaatatctattaccctttgggtttacattattgtcttcccactgaactttattggagcgttggctgtgagatgtctggatcttctttgtattcctagcacctagtattgtgacataaagcagtcgcctagaaaatgtgttgactctgcatgcatatataatatctatggtttgcaacttcagatttgtcagttttaagagtagttacatctctggaggacttcct

SEQ ID NO: 93745 - DNA, 1023 bp, Homo sapiens
gagaattattttacaaattcaagaataaaagatcaataaattcaatctcattaaaaaatgatatgtggcaaaatccaaaagcaaagacaaatgagaaactggaaaaaatattttcagctcattctaaacaagggttaattccataagatgtgaagaatgccaacaaattgataagaaaaagaacataacgcaataggaaaatggacaaagaatatgaacagagagtttcacaggaaatacaaatgactcttacacataagaacttgatttcatttataataaaaggaatatcactttaacctttcactgaaataccagtgtttatttttcagtatagcaaagatcaaaaagttattaacatactgcattaatgagggtgtgagtaactagggactctcatacgttgctgaagagactataaattgggtcaaatcttgtgtagaataatataacactatcaggcaaaattacatgtgcacatgtctgttgacccagcaaatcaacttctagaaatatagcctataggtaaattacatatttttatgtgtgtgtgtgtatgtgtcatatatatatatgtattcatgtgtgcatgtatgaaattctctacaaggattcccagaaacctgataacatgctttgcctggagtaagggtgaggagtggggatgagtgatggtggaagtgatacttttcaccatacatcctttttatatcttgagaattttgaacctcatgaatcttaaagttattcaaaaatacaaatttatgaatgtaaatgaagggaaaagttaggtacaagcactttggaggaatcatttttgaacctcacagttttccaatcttcattttatagagaaagaggcattattggagacttgacagcaaatgtctaacattatttcagaatgaatctggatcaaagtattataaggtaaggattttacactttaaaaaatataagcattaagatagtgtatgtttttttcagataatattcattaactgttatatttgaatatatatg

SEQ ID NO: 93746 - DNA, 1307 bp, Homo sapiens
gtggccctccagaaaacattcatgacaagtaaataggatttaaaatattagcttaaaatagaatcttttatgtatcatcataacaggattaatttttcttcagccattgtttattttactaagatattttgaaaaattttagctcagttgtctttaaaaaggcttcatgttcctacagtatttatatgattttttaaaaatctacacaaacttacaaattttaaatattttttagtccatcaacaagcaataatattccgctaatgagggttgtacaatccatcaagcacacaaagaggaagagcagcacaatggtgaaggaagggtggatggtccattacaccagcagggataacctggtcagtaatcaaatacatttgaatatgctagtaagactttgttatgagtttcattctgtgcattttttaaatcaaaatgatgatgagatacatattaagacattatatacaccacagcaatttgtaaaagatgcactggaattatagttaaatttgtaaggaatttttaacaggcagaatatttaatgtattgtctttacaaactggtagagcagtcaatattcaaaaaggatctgggattgttccacaataaaaaataattaactcgaaacacagtggagccacaaatagagatagaaggaactaagacttcatctaaaaagtcatcttattaccaaagataggaaggaagcatgtttggttttatgtagactttaacttagtgtaaatgtgcaacgtttttttttagatccagcaaagacgaggaatgatgacattctagtagaaagacaatagatttgaagaatcagcgtagtgtaataactaagaacacagactttggagctagactgcctaagtctctgtaacttactataaaactatatgaacttgggaaagttacttagtttctttatgcttttgtttccttgtgtaaaattggcataataatggtaaccacctaataaatccaaatcagttaatatatgagaagatcttggaacagtgtctggcatacagaaacactcaataaatgttagtagctagtattttatttttaaagtctgctgagtagattattgaaacaagctttctaataaaccttttaagaataaaatgaagtacccaatacatttagctggcctaaagttttgtatgataacaacagtatagactgcagtgtgtatgtgttttatttatagttcatatccttgcgaatgtaacttgaagtggtgtgcctacctttgcgaatttaatggtatatcaaaggtgcttttacatcaaattaat

SEQ ID NO: 93747 - DNA, 1024 bp, Homo sapiens
caggagttcgagaccagcctggccaacatggcgaaaccccatctctactaaagatacaaaaattagctgggcatggtggtgggcgcctgtaatcccagctactgaggaggctgaggctagagaatcgcttgaacccaggaggtagaggttgcagtgagccgagatcacactccagcctgggtgacaagagtgaaactctatctcaaaaaaaaaaaaaaagagaaatactttacttaactcataaagatattttcttacattttaagactcttaagacttttttcacatttaatggacttcctctattaatataaaactctgaaattcatttaaaattttcccagaaccttccagtctgggaacagatacagatataccaatggatattgacaataatgacataaatagtgatagtagtcggggtttggatgacacagaagagccatcacccccagaagataagatgttcttcttggatccatctgatctcgatgtggaaagagatgaagaagccgttaaaacaatcaggtaatatatatacatattacaagctacttccagatgcaaggtcagttcaggatctcattaagaaaaagccacgtctctttaagtgggaccttaaaagtaatttaaaatctaaataaattgtggctaattcttttacatgcaatgtagtatttctgaaataaattatatcacccttgccatccactcaagatggggaggtatgagaatccttgttttttttttttcgttttttgttttttgttcttaaagaaaaatgctttaagtgtggtctagatgtaaaacctagttgtggaacagccactgcaaggtgtcagtattgaactttcagttaaagcaacctgtttttcacacaggcagctttaactggtagtagaaatggcaataaagaatatactcatgaagatgttgcacaaggataatggtgatgaagtttagggcagttttcatattgccacagttaatccgactattagcattttgtaaaaatactattaga

SEQ ID NO: 93748 - DNA, 1828 bp, Homo sapiens
ctcataaatgtttgttggatctcagtctctttcctgcatatacattaggtcctgattcttaggaattgaaagtatgtatctgacatatgttggataggaatttaatcagcttgagaaactctcatgggagatgtggaaagatgaatatgacataagagaaggaaatatggagctgccagtacatttcggcggtgttgtacacatggtattagcctcattatacaaatgaagaaaatgatgggggggtgcagaggggtgctaaagtgacttgtaggtggttattattttaatatcatcattactaataatattctgtttgtgagtgatttaaagaaagtctaaccatatctgatactgcttgacttttacataaattaatatgctgaatattttcattttagattgcaaattcaactgccataaacgctgtgcatcaaaagtaccaagagactgccttggagaggttactttcaatggaggtaaaattatttttcttaatttttgtgaaagatcagaaaaggccatgattctttggtgtattatctttggataaggttctgttttcctgatttattttgtttcttaaagattttcttctgatttaataatcaaacaaaatacacagaccactgacagtatacatttattagtaatcacgccttcccgtctttcctctggccacctgttactttgtagtctaatatagccagtggtactccatatcctctttcatttttagacataaaagaacttgttttaaaaccctgctcttgtctctattctttcatagttctaatatgtactaactgcttgctataccaggcactgttctaaactctttaaatatattgacatttcaacctaagaacaaccctttgaggtaggtactaagagatgagtaaactgaggcacaaatacatgaaataacttgccccagaaatatagccagtaggtggcagagctggaagttaaacccatatggtctggttccttagtccctagtgattagaacacactatactgcctcactgtccctttctctgtcaaataatcgttgtccattttccctttggggtctttttttttcttttcaagataatactaagcaaggcagttacctttttttggaaggaagcagtaaggactctagactttcagcataattttcctttaacaatttacatgactggtaaaaattttatgtaagtagttctgtaaaaggaaaagcataaaaggaatgaaaattctcttggggagagtttaattaacattttctcttgtggcttgttttctgtggttcttggttgtcttagtctgtttgtgctgctataacaaaataccataggctaggtagcatataaacaacagaagtttatttttcatagttctggagactgggaagtccagggcactggcagattctgtgtctggtgaggggggtccgtttcctggttgatggcaccttgtagttgcattctcacatggtggaatgggagaaggaactcctgtggacatattttataagggcacccatcccaaagataccaccttccaaagacccaccactacctaatacccttgccttgggagttaagatttttaaggggaacaaacattcataccatagcactgattaacaccttgacagagcatgattggttttctctttcggttaatctgaattagtatagtttgtctatgactaaagtcttttataaatttatacttcatgtatttgtgttttcgtgtttttctaccttataacaaatggatacgaaacaccatttatatttatcttaatgtgcatttgattactagtgagatgttc

SEQ ID NO: 93749 - DNA, 1108 bp, Homo sapiens
ttcagtaatgcaaaatgagcagcaataatactttcttcatttatttgttttaaagtttgtgtatttgatttgtaaagtgctgaaatgtgcctggcaaataatcatcagtgaatatatacctgagaattaacatatcttagatgtttttaagcataaatattagcaaaaagaatctgcatttttctcattcaaagattggtaaattaaacattgcaaaggaaactgctgagaacaacatttttagagttttttggctttagtgtttgaaataaatgattcttgtggttaagctctgctcccactactctgtttttaatattgacttacacttatgaaaattacttatgttatagtcacatgtccaccaggaaccaagtaagagaattccttcttggagtggtcgcccaatctggatggaaaagatggtaatgtgcagagtgaaagttccacacacatttgctgttcactcttacacccgtcccacgatatgtcagtactgcaagcggttactgaaaggcctctttcgccaaggaatgcagtgtaaaggtaggattaggtgttttccctaattaaaatttatgtctgtttttgttattatatataggcttaaaatatttatatttcagaagcattagccaaagaaattattctcataattgttatataaaggaaagagaaatataaacaaaatataaatgtgtgtgtaaactactattactactatctgcagtgtgtgttaggtgccaggcactatagtagaacagtaaacctttacatgctcagtcttcaaagcaattgtatgtgaattatgcttttgttaatatactagtagtaataggagttactattactattaactactaatagtaataggagtactagtaataggagttagtagtaataggagtcatatttcattttatagacatagattaggtaacttgcttaagatcatgtagctagtaaacagaaaaactagaatgtggatctctgaggatggcttcttcacctgtatgcttatcacttcccaatacagaatagctagtaggcagcaaagctgatacttgaggttttatgtctttttgattccagagccagacactaaaca

SEQ ID NO: 93750 - DNA, 1051 bp, Homo sapiens
tatctttttccacagaaacgtttccataaattgaagttaagttccatagtagtttttactttagtgttctatttcccactgtgtaagttaagcagtttttaattggttaaagtaacctaatgtctgtttgtaatcttgtcattatgagaaaatgctgttggagttccaaataactaacctatgacctacttctggagctcaaatgatgagaagtaaatggacttgctaaactagagtttgaaatcacaatattaaataatttacttttatggtccagtgcaactttcagagaaaaaatgattctgtgtactttgacataagtgaatgtgtgagcattcttaatctcatcgcagtacaaatacaacgtgtattgtaatacttttcttttttaaagctttagccacagtagaagacttccagattcgtccacatactctctatgtacattcttacaaagctcctactttctgtgattactgtggtgagatgctctggggattggtacgtcaaggactgaaatgtgaaggtgtgtgttctaaaatttttgtggtcatttgaaataagattccacatttgcattttttattatcagtgaaaaagcaagatgacgagctgttgactagggtggtaacgaggatttagaattggagagatcaggactctcattttatctctgccacctacttcatattcttgggcaaattactaaacctcttaagattaatttctcgtaaaatacattctgccccactggtttcataaagagtaaacggttaaatcaggtaatagggttaaatatttagtacaaaataatggctccataaatattcatgttgttttttgtttttaaaagttttcttggccaggcacggtggctcacacctgtaatcctagcactttgggatgccgaggctggtggatcacctgaggtcaggagtttgagaccagcctggccaacatggcgaaaccctgtctctactaaagatacaaaaacttagccgggcgtggtggcggatgcctgtaatcccagctactcgggaggctggggcag

SEQ ID NO: 93751 - DNA, 1560 bp, Homo sapiens
gagatgaaactaggttagtgtttgcacctaaaacacatcccataagatccaagactgatggtaaaattgggctacaaatttggctgtgctttttccatttggcaaagcaaacaggaaaacatgttaacttacgtgagcaaattgttcatgttataaaatcaactagataaagttattttgtgggtgggtcttcacaaagaagggctacagtatgaaataggtaaacgatatcagcagcagcgtctctgtgacaaatgcatttagtttagtgaaactgattcatattagaccatttgatgcaggcaggtgacatggtgtcatttattaaaggatattctatgaggagcccaaataagtcagtgagcatttataattctgagatctactgaagaattttgaaatatttagagcagcatgtcctaaggcgctggaacgactgcttatctttcaggctaagagtggagtagcagtaagtttaagattatattctccatcagtaactgaatatagaaatcctgtatttgtaagagacatgtattttaaaatcatcaatgattatttatttgtaagtttacttttctatttttcttgaactttaaaattaaccaggatgcttgagtacgtggatcaccttttaggtatcaatagaattgttagcaaatagtgttaggttaaaaacactatgttttaaattctttgataaaattgaaacgtttacttataaaaatagaaaactgtggtcatactgatataggactattatccctcagtttccagagtgtggattctttggcatgtatgacaaaattcttctctttcgccatgacatgaactcagaaaacattttgcagctgattacctcagcagatgaaatacatgaaggagacctagtggaagtggttctttcaggtaagtaagtggctttttagagtgattgccttttcccctcaaagagcctaattttctgtactaaatgctgcaattcgattatatttagtctttgtattattgttacttaatttctttcatctctaataatggtcaccatatgatttttcctttcaggcatgttatatcaccattaagaaagaaaaatacctggcaacggtggctcacacctgtaagcccagcactttgggaagctgaggcgggaggattgcttatctcaggagtttgagaccagcctgagcagcatacctcgtctctactaaaaatttaaaaaaaaaaaattagccaggcatggtcacatgcaactgtagtcttagctacttgggaggataaggtgggaggattgcctgatcctgggaggttgaggctgcagtgggccatgatcacactactgcacttccgcctggacaacagagcgagactcgtctctttaaaaaagcaaaagaaaggcctggcgcggtggctcacgcctgtaatcccagcactttgggaggccgaggcgggcggatcacgaggtcaggagatcaagaccatcctggctaacaagatgaaaccccgtctgtactaaaaatacaaaaaaaatttggccaggcgtggtggtgggcgcctagt

SEQ ID NO: 93752 - DNA, 1029 bp, Homo sapiens
cattgttaaagtgcaaaaattatgtttgaccaagtgaaataacttggaagcttcctaccttgcctgacattttactgacagcattttaacgacatgaacttgaaacggttcaccttaaattactttcaaaataagtgttgcttaaaataattttgtttgcaactattggaaccttttacttaaaaatgttaagtaatgctgtaaaaaataacgtctaaaatggttatagaaagattattttttaaaattatcgaagtcatctttaatacaaaagcaaagaatgaagtgagcagagtgcatgagggtggaaatttaataactgatattctgttgcattcccatatggactgggaaaatacttcattttgcacagtcaagaggggtcatcggcacagtttgtagtaagcaaatccagaaaagctcgggggatgggggaacagttggaaagaggccaaattaaagggccattttgcttctaccatgctgtatcattagttatttctttaatttcctctttcttttaatcaaggatgaggtaggccaggtaaggaattatggacttgtctggttttcaaaaggttgccaacttcttccacatttcctagcctctttattctcttgactcttttattccctaaagcaggatttctcagcttcagcactattgacattttgggtgggataattcttgtgggggctgccctctgtgttctacagtgctctacccactgaatgccactagctcaagttgtgaaaaccaaagatgtctcaggacattgtcatatagcttctgtgggcaaaatcatctcagctgaggatcattgccctagaggaataaactaaataatagccagtgacaattcctgacaattacttaaacatgtcatcacctctgctgcttttctgaacttcttccctctcaggagaatagaatgtttagaagggatatatatacaccattttactgggcaagaattgtattttgaagaatatagagacaacagcattagtacaggtttctgcccccgc

SEQ ID NO: 93753 - DNA, 1016 bp, Homo sapiens
aactagccaaaaattgctacccattaggatttattagtgaattataagcatatgaccaaaaattgtcatttaaaaaagttatgttcttatttttaaattaatgtcgaatgaatataaagtattaaaaacctttaaaaaatttccttccaggctaactatatgtcagaaagcatcagcttttctcgatggacccattcatctaatgaaatatgcctgtactattttaaaaagctttgtatttcgtcatagaaaagttcatccccccagaatgaaaatgaggacatttgagaaggtgatttaaggtgtggacatttgagaaggtgtcctatcaaattagtaaaccaaaggaaaagtactgaatagattaatccaaaacacttactgttttttaaacgaagaggatttcaccttgacagaaaaacaacttttattcaatatgtatttcctgaaattaaagagacaagtacagactgaaaggaaaatagattcgtaaataagctacgtcaactctatcctgctgaggatagctcagtgatgttaaatcctttacaaatccctggttgtcttcctacagacaagactgctttttgatgggactgatattaagagaaataggacctttggggcattcaactccttgataaaacttaaaagtatcggcatgagtggcttaacagaggaaataaagaagttttcaactaaatccaaaagtgcggtcattttctttactgctgttattttaaaaacctcttcataaccattgaaaaagaatcgacaactattttaaaagattaaagaaaggcagatgtctgcaaataattcccctccatcagcccagaagtctgtattacccacagctattcctgctgtgcttccagctgcttctccgtgttcaagtcctaagacgggactctctgcccgactctctaatggaagcttcagtgcaccatcactcaccaactccagaggctcagtgcatacagtttcatttctactgcaaattggcctcacacggg

SEQ ID NO: 93754 - DNA, 1030 bp, Homo sapiens
ggcattagctttgcattagctcttttagtcacccattatattagcagtttgaattaatctttttcgttgataaatacctctcatataaactgcttacaagtaagcatttccccatttctgtattgcacattttggggaaactaaatgcaaagctttacacttacctttaagtttcagtttaattttagtttatttctcccagatttcttcaacctgaggattttataagcatattctttatgcctttattatctaataaatagtgaaaaatgatataaggctgaggacagtgtttcaaggcagttccgtaaagactttcctcatctaaggtgacacagagcagcaaacttaactacactaacatccaacccacactccagtaacattcttgcaaaggtagcatggacaatcatcttggatactatttttgtcagaataaactatcttttttttctggctttgctgattttgtggtcttgggcaagtactttaatctctaaacctttgttttctcaaccatataatgagttgctgtgaggattaatgaggtaatatgtataaagtgcttagaacagtatctgacagatagtaagagcttaataaatgtaagctattgttatttttttccagctaagaagcctaataatcattattttccaagatgtaaatgtggttgacttctagtgatcattatattcttctctagttattcacaaaccatttgcttcattattttttatgtttgtaatttctgaaatttgctttcctgcttctccagccgccagaacttgaaaccgctctacaaatctccaggccatgattatatctgtctttttgagctctttctccaagattgcaggagtcagctttgtgattacatttgtgaattgctttagtagtatggaatggactgcatctggacccagagactcaaactcatgtaaagttgttatagtcttagtcatttgtctcaggtttcagttctcaatgcctttctgcagttttagtttaaaactgtggagaagataag

SEQ ID NO: 93755 - DNA, 1008 bp, Homo sapiens
gaattgatgttctcatcctgtgaaccttctcccactttaacctaatttatctttacttgtttaaagataaggaaacccaagatgtactttatttgcaaactcaaagcaaatggcgagccacctgtgacccagtaaccagaaaagaaaccatgccatttgtataagtagagacacttcttgttgaggtaggcaaggctcttgtgagcgatttttttcccctagtgagacctaacaaaagacaagctatatcatttctgcctgaaattatctgcttgaaaagatcaaaatatcaggatacttagctcttcacaaatatgaagtcattatcacatttcactgagccagaaatcactgttaacagcacacacaaaagactacactggttgaacagcaaagagaaacccgggtctccagaatcacagtttagtccttctatattactgcaagtgacctgttttttctgaaggctccccgcaaatgaagtcctggaatggaaaaaatccataagtccataaattaacttgataaatattttagaacagacaaaagaaaatattgagtgatgtagttctaatcctcctaatatggaacctggcaagactgaatcattttactgtgaaatatataaacacaatagaatgagccaacatgatggtttctctccagtaagagtttttcttttggaaatgaggttaacctagccccaaatctagcaattctcataaaatccgattttagaattagcctcccagattaatctgaatgattgacttattttttcttaggcaagtcagtaagccacccactagacagccatatccagcaaaataagagaagtttccagatgccaaatgataagccaccatcaacccagcggggaagccttctggttggtttggctgtatgagattcaggaaggccagaatacccaaaattattcacacgacgttaacttattggtactggctaagcaatacatgtatttcctaaaggaggagatggtctttt

SEQ ID NO: 93756 - DNA, 1048 bp, Homo sapiens
gggtcagggtggtggtctcatcagaggctcaactggggaaaagatctacttccaagctccccaacattgttggcagatttcatttccataggcccttgcacagtgtaactgctcacctctccacagccagcaaagggagtcagggagtcttctcccttgtcagctcagatgaaatctcctataatgtaacctaatcagggacctattgcctttgccacattcccttgtttagaagccagtcacaggttctactcacaaaggcattaacaccaggaggcagatcatgggggctcccttcgaattctgcctactgcatggaggatatagccttatcagtaatgtttcagaagtgttcccaagtgaaggcccagcctgtaatagagattcacaatgttttctctttgaagtgaagcagttttgttcatttcctcccatctcagaatgacttcaaatcctgacatcctcgacagcccaatactttgccacaacctgattacaactctagctctcttatttactggctatatgttattgagaaaaggtaactttctaggggaagggcttatcctgaatctccgttttcttatctgtaagaatgtattccactaacatttttaggacagtagcatataatagttattgtcacttattaaataattccagcacctttcctttaggactgttcattttattgcattaacttatgtacatatggaactcaacaatgaaatattagtgttgctagtatgcacatcaaagcaaaaggaaaatgtattttaaaacaaatccagttgtatttaaggagctgaaatcactgatcctatgcttacagcaattcttagaggaaaatgactaaaaccatagacatgtccagaagatgtgcccatggctatgtctaaaaagtactggtgtcatagatatggggtttttaggtctttctctttcctgttttctctaagatgaaaatttttatccacttactggagggaaacaataagttcagcattagttgaaactggccctgccattatttacaggctcttgtgaa

SEQ ID NO: 93757 - DNA, 1039 bp, Homo sapiens
gattgacatgagcgtccacattgtagtaatattttagtgtttctgatcccaaagattggctggtcatttctatattagtaagaagactgccgtgttcaaagagaaagcttcttcaagggaaagtccgtgtgcgtttttctatggaaaagtgacatgggactacaaggaaattggcagtgatcgtgttcccatacaggaaactcagaataaatgggaacgtgaacacctcccttcacgcactgtcagggaggcgcagggtaaccgccctcccctctgtgagagcttcatcccatggccatacttgctgtcccctccccaccccagcccattccatcttttgagaaacctgagctgttacttggaggagccaaaatctttccttgtagtttctgcttggtagctctagggcctcccagaacaagttaattccttttcattacaattaaatgaatccttcagatcccttaagattagttttctctttctatgagttctctttaagctgctctattccttcagcctcttctcacatgtcctaatcgagctccttcacttcctcccatttgcctccctctgaacatgcggggacatgttccaggtagcctttatcccttctaaatgtggagcctaggatcatgttctgggcgcttggcacagtggaattattatcttctggttggcagcagagagacatagcccacagatggttgggggtagggaggcggcggagggtacttggccgagtcatcatcctcccctaggactgttggttccaacatgcaggaggagtcgctggatactctggcatggggctcagatggtgcagtagtgcagtggtgccgtgactggccgcatagtgcgactgtgctgaggcaaagcgaaaagtgatcagaagctggaatgtccctgaaggatgtgacaaccgagccagaaaggggaagtcggatgcaggctcacttcctgcaaggaggagaaaagaacagagccgcaggtccctgggggcagtagcacccctcaacccacctgcccatttttatac

SEQ ID NO: 93758 - DNA, 1462 bp, Homo sapiens
cctagaggtggtatgtgattgccgggggaattgttgaggagtgggggatgggcagcagccatccaaccctatgaaaatgccaacatttaagacaggggttcagacttcttctgtaagggctcagttaatactttgggctttgagagcaacatacagtctctgtcacaggctactcaactctgacctgatagagcaaaagcacctttactgggatttctcaacttcagcactactgagatttgaggccagataattctttgctttggggagttgtcctgtacactgtaggatgtttagcagcattcctggcttctacccactagatgccaggagcacaccacccccagtcacgaaaacccacaatattcccagacattgccaaatatcgcatagggaacaaatatcaccctcagttgagaaccccactgagctgtagacagtacataaatgaataggcataggtgtgttctaataaaactttatctataaaaacaggcagggggccggatttggccggcctgtagcttgtagacccttgacttaagggatggtcagaaagaaaactagaagagcttattcagtaagatttgagggccttctgtgtccccagctcaagaggaggctctgtaagtgattcagcataaaaaggaggagagttttcccaacaggaacactcatgtatagcccttttgcttactttattctttttgagctcaccagccacctggaaatatcaggcattaaaaccacaaaacaggaaaacaacaaatcacataatacaagccctccacaacccctaagaaaacccctaagcaaagcagtagcaaggttggattacgtgaggtgcattcgagtagacttcctccaggaaggaagtgcatctggagcaggtctcagaggatgttgtgaatagaggctgatggtaagaaggtgggagagctttccatgtagggaacacaaggttcttagtttcaggttaggagggaaatgaagtgtcagttaggaagctagggagctattgtccccagtgaaagcctgtgattgttcactgtcgcatgcaatgggcttcctctgggaaaagaatgaacagcacttaacacgattttctaagaacaggatgtttgtttttctcctcgaggatggcggggggcggggggtggggggggggctttgttactttacaattcaaatcttttgacgtttaccacaagtcaaattccttttgagattcttgttgacaatagcaaaaatactgaaaagtcctagtgagttagagatggagggaccagtgtctaggacccttcttctcatttttggcttctgacaaggtcaggttagcatctccacctctcatccgtgttgcgctcttggtgtgtcatttcctcttggtgctgtcagacttcaagatacatagtcttcaggttggcagtccttgagttatcaaatcggcagtggctacaga

SEQ ID NO: 93759 - DNA, 1015 bp, Homo sapiens
ctccagcctttcctttaatgtggtgttttgttttatgtccaacatgctcacaaaagctgtgcttttttcatgtataaagttcctggtattcaacagtgttggggataaaattgctttcacctgtatcacccaaagatttttttttttttttttttttagccaggccatagatttttcacaaattctttgaccattaactgtaacatttatccagtgggtggaatataattcgtaacctaaaaacctccaagaagactgctctgatcgtattattattattattattgttattcagattcttgctttcagtcagattttatctaggcccagtctcatttcttactaaccagaatcctgtgaacctgtatttcttttcattgattgaatgagaaatctatttttaaatgcagtatgtttgccagagaacaaggatagccatttgaaaatactggattcagccagccacaaaatcttgtgtgcctcaccaagccatagaagaccaagaattttcctaatatattgcattgttcattactttggatgttaaaagcacttcctaagtggagcccgtcctatgtgtcaagcactcttctcagccttttgtcttgattatcttacttgtttctagcaatcatctaatgaaagaaccgttgtatccccattttgctggtgtagagactgaggatagaccagttatataacttacccaaagttgtgcagtaagcaaaacctaaacatgcgtgtgcagtttaacaacacaatatgtgcaggcatgagtggctaatcctatgtgaaagtcagcagctctttgggttaaggggatgggaaaaaaaactgaacttctgaagcctccgagtcaggctgcctgggcacatgtcctagttctggcacttaacacctgtgtgactttgggcaagttacctcacctttacctcagtttatcctttgtaaaatggagataatattatttccctgaggattaaaggagttaaaaaagattatgtactcagaacag

SEQ ID NO: 93760 - DNA, 1020 bp, Homo sapiens
gttaccagatagtataattaccttaaaaaaaaaagagggttgcaattcattaaattgatttttatggtcacaaaatcagggcagtctgaagtaaaataatctcagcgcactccacagcagatgacattggcccataatcagcactggcttctggcttggccgatggcactggtgggtccagaccgttccctgccattgactcttgagctcattccaatcatcttccccttggagcactgaagcaaatctgataactcagtgcctgcatttccttcacatggggaggatgtaagaggacacttgtccttaatgcccactccttggtgttgcctccttcaggaaggcttccctgactactcacttgttcctaaagaataaccagagaacaaacaggctcttggaactaacatacttttcaacaatgcctttaaatataatttaaaatggcctgatgattctttaattttatgtgcaccaaaggactccacactgattcttttaagcacttaatggaacttctcctggaacattttctacactatgtctagcctttgagtcaaagttttattatatctgattgaaaaagatttccaccctcatcccagtggggttgctgagaaaagcaggcagcctcgtgttctgtttggggggatctcccatcccctggtgttgtgctgtgtacccagcatgctttcctggctgtctctaactttattgtttaaccccacagcccttggccattatctaggccattggaccccacaagtcaggtcatatcagctttgagagcaccactcagctcccagacccacaatactgaaagctgctggtgtccactggatctggtggatgtttgtgaatcccaggatgctctgagcttgtctttcctgcacctcccctgtcactctccctgctcacattcagaaggccaaagggccacctctgttctcttactgcacatcccagcaatcagtatttaaatttgagactcttattctgcaattcccacagcccgcaagc

SEQ ID NO: 93761 - DNA, 1090 bp, Homo sapiens
gaaaggaaaagaaaacaaaaaacgaatgaaaataactgaatttggaggctggagtaatcagattactgctttaatcagaaaccctcattgtgtttctaccggagagagaatgtatttgctgacaaccattaaagtcagaagttttactccaggttattgcaataaagtataatgtttattaaatgcttcatttgtatgtcaaagctttgactctataagcaaattgcttttttccaaaacaaaaagatgtctcaggtttgttttgtgaattttctaaaagctttcatgtcccagaacttagcctttacctgtgaagtgttactacagccttaatattttcctagtagatctatattagatcaaatagttgcatagcagtatatgttaatttgtgtgtttttagctgtgacacaactgtgtgattaaaaggtatactttagtagacatttataactcaaggataccttcttatttaatcttttcttatttttgtactttatcatgaatgcttttagtgtgtgcataatagctacagtgcatagttgtagacaaagtacattctggggaaacaacatttatatgtagcctttactgtttgatataccaaattaaaaaaaaattgtatctcattacttatactgggacaccattaccaaaataataaaaatcactttcataatcttgttatgaagttttatgttgtagcaaatatagtctaatgtatcactttatttcaactattactatggattattcaattaaaatattgcactgtaaacattttatttgtccattctacatttcaggccgaggccacatgcttttttttcccgtaggttttcatcaaccaaatttctaatctctatatttttgaatttctaagaaccaacacggaggttacatttcaatcaaacaatcaagccaaatgagaattaatttgcaatgttgaaagattgaatagattgcgactttaagttgctgatcgatttctgcttcatctaaagaatgcagtacacatttttcttcctcagcctcataccagtcctttctctgagtattttcttctttcatttttttaaaggtacatgtg

SEQ ID NO: 93762 - DNA, 1060 bp, Homo sapiens
tagcctagttgtagatggggattgttaatttctttctctctctttttttttttttggtggtatatgtaaggctagcattttttcagtacttttgtggtcttctttgtgaacaccgattaaagtacctagttttgtttgtttcttttttgagacggagtctctctctgtcacccaggctggagtgcagtggtgcgatcttggctcactgcaacctccacctcctgggttcaagtgattctcccgcctcagcctcctgagtagctgggactacaggtgcgtgccaccattcccggctaatgttttctattttaagtagagatggggtttcaccgttttagccaggatggtctcaatcgcctgaccttgtgatccgcctgccttggcctcccaaagtgttgggattacaggcgtgagccaccgcgcccggcccttagtttgctttttaagcgaagagaatgcaggtgttgagttgcatgtgtgaaaactctgaatttactttggttgatacatcttcgctcccactcccattcagattctgtttttatatggattgtatttgttttcatctgtattaaattgctaacttatctgttcttaaagaatccacctgaaaagtgtctttttatttcttctgccaccctgttttatgaatgctgtggactgttttttatgaatgaaaaaataatttgttgtataatagcagattttctgaaattaaagacagcttacttttaaaaagttataaaatctagaccattggctttcttacatttcttgtcagaaaagagtgctttactcaaagaagacaattctctacaggatttaagtccatttcacacttttaagctttagcctaaacattcatgtcctggattccctcctttcctctaacttgaccagaatggatctgcgcatctcaggttttttccattcgtgtgatagtcgtggagtgaggatgaaaattagcttgagttgctgtgcatctggtagccatcttctcacttggccagagattactcatcaaatgactattgtacttggattctgttgggagcctctg

SEQ ID NO: 93763 - DNA, 1258 bp, Homo sapiens
ggtgagaaacctacagtctcaaattcttgtagtcttaaactctttagcttcgaggcactctgattcattctcctaacaaatcacttcatgttttaggtgttttccaaactgtttgaagttactagacgtcgaatggttcaccgtgctctttcatcagcacagcgacagagactgtcatccaacaataacaagaagaaaaattagacagtatttttaacctttttctctatctgaagtgttcacacttacacatgtaggacaataagcaggaccgtctgggccggtctgcataaatgctgtatacataccagatttgatgctgcatatagggtatggaattgcacatccatctcataggaattgtaaatggtttgaataagaggaaagtaatttttgttgcattataaaatgtctagtagcatcataagtttttttgagagaagcatctttttatttcccatattcctggttattttcatcattgctttgaattgaatttttatatctatttttatatgtaactctttttttacctcatgtttttgtttgttttgcacatttctcataccacaggtattgaagcccctgggtgataatttgatggaggaaaacataaggcagtctgtaacaaactctatcaaagcaggcctgactgaccaggtgtctcatcatgccagattaaagacagactgacagttcatctcctcacggactccactctctttttttttcatgcttgctgtacaatgagaactcaaataaaaataaaccaaagtttacaatcaactgtagaagtagtttagtgtaactggcttcacagatggctgccacagagtgtgaagattgtttgttagttttaagcattcttttaatggctcctaagacatgcagatggactgaggagcattggttaatcatgcacctttgtgccatgtttaactcttttatttctttttacttaatctaatgttagtgaatttgtcttatgtaaaaggatatttcagggaaatattttcagaaatctatttagagtctctttaacacagtgtcccattgaaattttaatttttagagaatttatgaatcactgtttcaagaaccagattggaaagacaatgaagcctttattgagccactacattaaaagtatatattgctttactgccttcaataccagtattacatcaatgcatgtatcagaaacttcacagaaattacatggcaactcttgtagctaagaaagtaattctgaggtgta

SEQ ID NO: 93764 - DNA, 1047 bp, Homo sapiens
agtttccgttagtcatatttggaaaatgattttgcttgagtaggttcaacatataaacaataactagattatgataacctgtgaggtattgtaagtgagtttaaaactgactcaatcatgtaagtggtttgactttctgagactaaaaactatgaacaggaacttctttcaagtgttaattatttctagcatgtaatactgtaattctgtctgtccaggtatgtggaggggacaagccttacattgcaccttcagatctggagcgaaaacacttggatctcaaggaagtggcgataaaacaatttcgttcagtaaaaaagatgggtggagatgagttctgccgtcgttatcaggaccagcttgaagctgaaattgaagaaacctatgcaaattttataaagcacaatgatggcaaaaatatcttctatgctgctcgtaccccagccacactgtttgcggtcatgtttgctatgtatataatctcaggactgactggcttcattggcctaaactctatagctgtcttgtgtaaccttgtcatggggttagcactgatatttctttgtacttgggcatatgttaaatactctggggagttcagagaaattggaacagtgattgatcagattgctgaaacactatgggaacaggttggtatctatcttttggttttttagtgactaatcttattttcctgtgactttccatcctttgcagtatttgtactccgactttgccttcatgtgaggaatgtcaaaaggatgtcttctgttttgttcagatgtagaatctttatgaattgaagattttttctttaaagttataattttaatgtactttggttagcctaaatctgtactatcctctggatagattcttagttgtaggcctgattgtatcagacggtgggcagggtcagagtctgtaatgatttttttctttgaggaaagaaaatataaacaatgaatgattttcaaggtaaggaaaagaagtttggaagtggtgctttcggaaagcaaaagaagtttcttcctaatattggcaagc

SEQ ID NO: 93765 - DNA, 2039 bp, Homo sapiens
gtggtttaagaaaatgtggggttggctgggtgcggtggctcatgcctgtaatcccagcactttgggaggccgaggcgggtggattacctgaggttggaagttcaagatcagcctgaccaaccctgtctctactaaaaatacaaaattagccgggcatggtggtgcacgcctgtaatcccagctactcgggaggctgaggcaggagaatcacttgaacctgggaggcggaggttgcggtgagccgagattgcaccattgcactccagcctgggcaacaagagcgaaactctgtctttaaaaaaaaaaaaaaaaaaaaaaaagtggggtcttaacaaagtggtcagaaatgggccttcataattttttgtattgtcaaaaaagactccttaggagtaccatctgagttaagtgtgcatagtgtgcatgcgagtctgtgtgcattttctttaaaaaaattttctttcttctgtttacaatttcacctgtctctctccgccctcaggtaaaacaaaatcaacatgaagagcttcagaatgtaaggaagcacatacacaattgtttctcaaatcttggttgcttccttttgccacatcctggtcttaaagttgcaactaatcctagttttgatgggagattgaaaggtgggaattcccattcttgctaaaatctgaacttatttattagaggtggaaagttttttaagaaaatacatgacgccttaaatgtcctgtcttatactggagaatgtttggatgcattgttcatgttgtggttgtaatgctctgtgttgtttctctagcattccattgatttgtttgcagctgtctagcatattgattaacctattttataatgtctgttgctcagcagtgatgtcctgaaaattctgaaggctgagagcatttcttttcaattgattgcagtctgctaaaaggctttatcattttattatattgatgaaatcagatataagtgtctgtttcaggagtgatagtacagtttatgtatgttgtaggattattttgagtgtgttggcaaaacatttggggattgacaaaacttttacagtatggctggtaaaacataatctagtagtaaaatttaatacaattttatgaattgtttgcctcttgaaaaggacattttcgttaatactaaatgtgaaatttgtcttggtagtccacaaatttattgatgttttatttgttatttgaactggcagtgttactagggggttggggaaaatgggctagtagagtaagggggattatattttttcctatgagatatggcatgttggatgagcttttttttaaaaaatgaatccacttcagtaatagatactatgtattcttatttcataaaacagaattttatgaaatcgtaccagtggggacctaattttttttggactaatatgttgctcaattttttgttttctagatattgatgaagactttaaacgagagcttcgaaatctggttccattgctgcttgcccctgaaaatttggtagaaaaagagataagtggatctaaagtcacttgtagagatcttgtagaatattttaaggtaggtgagctcttaaacagttttgtctaagatagaaatgtagttgacttaaaactcatctgtatgtataagaaatttcttgtctttattttaaaacaaaaaagagtaagatttgtgatttatctttctgccttgaattagatgtatctgtatttaaggatatttaaaagattatagcagatttctgtctcctagacagtgatttaatttatttacagaattatcttactttttctccatctcagatatggagagaacaagccattcatcatactctaatactactctgtcattagtgaatgataataggaatggaaagcataattttacatcctaagttctcacaaaaacactccctcagagttctgaggacttgataagaacagctgaaagtatttatattggttcaagtaaagtactcttaggttttttttttttccctctgttcttctctagtctttatagctt

SEQ ID NO: 93766 - DNA, 1074 bp, Homo sapiens
tgcctcttggtatctagcatatagaggccagaaatatggttcaacgttctacaatacacaggacagccacacacaactaagaattaactgacccaaaatgtcagcagtgctgacccaaaatgtcagcatttgagaaatctaaccctatatgagtaaaaacatcctctgtgagtgaaaatgtccttattgaccccagatctataatcagtctagatagccatctagaattagttggtcttgtagttacacaaccatgatttaaaattatgatccgtgtgtcctgatacacccatttttcatttttaaagtcctgtattactgcttgtggtgactctttctttatatttagtgaagttcttcagtggcagcgattgcttggtatagggcctgagaatgttgtttaagtgggtccttgatataaccatgaccagtactgaccatttagttactataacttttgataaggattgtttaggagagtaagagaggcttcaattgttaagagttgtgattttttcgtaaattttctttattgtaaaataaacaatttttattttttctgtgtatagacattaatgtttttgattcgagattggagctatccttatgaacattcatatggtttggaaggtggaaagcaatttcttgaaaagagattacaggtaagaccctaatgcttaaagaggagaacataagcaccaagctaggcaaacgggtgggctgtccggactgctggtcacattaccagtatttacgtgtcgttggaataaagtattccaggttagcccaagtgactctgtttgtaattgatgaaaagtaaagtggttgcattcctaccaaagaagacagtgtccttgaatcaaaattaaggatcatgatcctttattcctaaaggtagccccccatggaagtacttgtgtattagtctgttctcacacagcataaagaactacttgagactgggtaatttatgaagaaaagaggtttaattgactcacagttccacaggcttaacaggaagcatgactgggaggcctcaggaaacttacaatcatggcggatggtgaagggaaa

SEQ ID NO: 93767 - DNA, 2683 bp, Homo sapiens
agtataaataaccaagaagattaagattatgattattttcttccttgcctttgggtggggggggtagttttctttccttatgtaagatatctggctgatagataaatgataatttgatcttcttgtcatttattccttcaacaaatacatactgagcacctgttacatacaagacagtatgctaagtactaatgatctaagttaaataaatctctttctctgtttgctgtttgcaacctggccctgacaatgaaaggatccagacctattttctaaaagcagaggcccacataggttggtcatggtgtcagggtttatgttaaaatctaaagtttaatcacctcagtcatcaattactttttaaatccttgtttggaattagtagctaagaatatcattttaggtttgctggcctaaattgactatattcttgacctccaagtggtttagccagagtatcacttatttgctcctagaacagattgttctctcttcggagtcaccctggttcctaagatgtaagttatttcttagcagaggtgatatttgttgatggccacttttctcctgtggcagtgtagattactgtctaaagatctgtcttagaattaatggatgaaaatccccgtttcctgaggatacttagaccctcctttatcaactctagtctcctccaaaaaattctggaaagggcaagagtgccacctactgttacttttattagcttccacaggccagtaaaattgtcatgttgagtgtaagtgaaaactgatgagtaagtaaactgaggagtgtgagtaaaaagagaaccacactagagtcagtagtagtggaggtacccctgagtaactgtatactctgattgtaccagggaagaatttatctttgtaaactgttgccccttatattcactaatttagaaaaatgatggtggaaataacctacactctttaaaaaatgatcgtatcttaacattaaagagcttagagaaggagtacaagaaacctactagataccacacttgttcttctaccacttttaggccatgagtatacatatattcatgctttttgcatattttaccaccactgcttcttccttaatattctatcttgactattgttaggaaaaaagagaaaatccttttcacatgtcagttgtcaagatagtagttaaatgattcctttgcgctgagatacaaaataaccttttttccacaagtaaagttatacagaagctgggtattcagaacaaaacactaataaaaaacaaaataaattttgtttcaacaggtatataatctgtctcagaatattcaagaagatgatcttcaacatttgcaagtacgtatttctttttttaatttttattttttgagatggagtttcgctcttgttccccagactagagtacggtggcacaatcttggttcactgcaacctccccctcccaagttcaagggattctcctgcctcagcctcccaagtagctggcattacaggcatgtgccaccatgcctggctaattttgtatttttagtggagatgaagtttcaccatgttggtcaggctggtcttgaacttctaaccttgggtgatccgcccgcctcggcctcccaaagtgctgggattacccggcgtgagccgctgcgcccgtctgcgagcacatatttcttaaagaaaatgtgccaactattgaaatttaattctcactttattatgaatttacacttggaagcctataatactggtaacacgattgaatgttatatgggtttaaactggtgtatgacttcttaactggaagaaattttgtacatacctagtgtgttagaaaattaaatgtttggctttgaaatgattttaaaggttctggtacctggagctttggtgtggaacaggtttacacatgtcttctttcaatctctttagaggcattattttaactaactctatttaatagttatttacagagtatggaagacttgcgatggaagaaatctaccagaaaccatttcaggtaaaaaagttattctaacattttaaagattagcctatgagaagttgtgaagccacctcagtttgtaattttggagacaccaggatattacaatagactcattgctagcaacagattcagtgcaatcgaaactaacctttggtagtatcatcagcatacttatcagtaggcgaacaggataaatagaataaatgaatctaggctaattcttaatgctttcacttagattaaggggagtaatgtttctcttaacagatgttattctaaacttaagacaataggaaatatatgacagtcatgccattttttttttatacgtggtaactacagaatgttacaggtttcttttttgtggtttactacaagttgaaattagttctgttactctttattttggtttcatatagaaaagttccagatagtttattttttgaagcaagtgtaatttgtaagttgccattaatactgtttggtgagctgcagttacagtaggagagcatgactctaccatgtttgctcctaagtgtgtgaagcctttccggtatgacagcattgctactgattgttaatcttaatgggtttacattgattctgcctcactcttgtctggctagtatggtcacttttattaagtagttgagcagatgatgccttcgtttttgga

SEQ ID NO: 93768 - DNA, 1301 bp, Homo sapiens
gcagtgctgttttgacagtcattctacctggaacttagttttgcttatctgtgtaacaacatgttaaaataattggtgccgagttttttatgatttttaacattttaggaaatatttctctgtctctctctctctctctcttttttttttttgtttttgaggcaggatctcactctgtcacccaggctggagtatagtggcacaatctcagctcactgtagcctcaacctcccaggttcaggtgatcctcctacctcagcctgctgagtagccgggactacaggagtgtgccgccacgcctggctaatttttgtactttttgtaaagatggcgttttgccacgttggccaggctggtctcaaattcctggcctcaagtgatatgcccacttcagcctcccaaagtgctgggattacaggcatgagctgtcatgcccagccaggatatctttcagaaaagggggaaagtgagtataaccccacttatttagaagcctagagagtagtagtgtgagctgatttgagaagattcgagtttggaggagaccacgtctctataagaaaaagaaccccacatgggatttaaggactgctttgtaactacttgtttgttacacagtgttttttttgtctttccgggtttagcttccccatctgtaaaataaagaatgggtgattttttggtttcttttatttcttaattgtgttgtattttacatttatccttgactttaacaggattctcaaagttggattggtggaaacaatgaaccattgacaggctttacatggcgaggtggctgtgaaagagaaacaacaggcatacaagtttggaatgaagtatttgtgattgacagacctaatggaactaaagtaaaattctgtttatacttttctaccctgtattctttcttgggctattttccagtattaaaaatcaaaacaacacagaactattaatgtttgataactttaacatacggattattatgtcaaatgtatgagatataagtacttttcttgatttaattactgcttttcaaatttatcatttgattttttttatagtcatttttggcaactgttttactaaatattttaaactctcaaattcctaggttgctgtgctgcttatggatacccagggtgcctttgatagccagtcaactatcaaagactgtgcaacggtgtttgctctgagcactatgactagctctgtccaggtgagacacaagattaagtggtgcgatcagttcacgtaatcatttggccccttttttttttcttttttgagacagagtt

SEQ ID NO: 93769 - DNA, 1074 bp, Homo sapiens
caagtgatccacctgcctcagcctctcaaagtgctgggattacaggcgtgagccactgtgcctggctgacactgttttgtttttgtttttgtttttgccactgtgtgtctgcttttcataaattgcttcatccctcattggtcctgtcttaaccatctctccactcctaattcacgctttgtaatttgttttagactagatatccaagcttattagaagtatttctgaaacaaaggcgtttttcctgtggggtacattgagtaaaggctatgtgggctttaagtatactaaactttagggatcttgacgtctgtcaaaggtattcatttattatgtcccacatttaattttctagaaaaattaccttatatgttaacttttgtattatttcataataacaatttagccctgtggttctagttaaaaacttttattatggaaaattttaaacataccctaaaataaagagaattgtataatgaactccaatgtatttgtcaacattttgctggtcttgttttatctgttctcttttttccttacctcccggaatattttaaagcaaatgccaggcatatcctttcactgcagatacttgagtatctaatagataaggactcttttttttcctaaccacagtatcattagcacaccaaacaatcttccttaccctaatttaacaccatctaatgagataaccagtttgggttcatattttcctgttggtttaaaaaagacgttttaaatagatggtttgtttaaatcaggctccaaacaagtcttggggttattttttaaattgattttttttgtttttgtttttgagacgcagtttcgctcttttggccaggctggagtgcagtggcgcgatctctgctcactgcaacctctgcccacgggttcaagtgattctcttgcctgagcctcctgagtagctgggattataggcatatgccacaacacctggctaatttttgtatttttagtagagatggagtttcgccatgttggccaggctggtctcgaactcctgacctcaggtgagccacctgcctcgtcctcccaaagtgctag

SEQ ID NO: 93770 - DNA, 1574 bp, Homo sapiens
cactttgttgctagggagtatacctttcctttggtaaaatatgaatttgtttcttactgtttagaataggtaaggtttcttaattgctgataattatattatgtagaacgtctttttggcaagggctgtatttattcactatttgattatacttaaacttcaggctgggcatggtggctcatgcttgtaatcccagcactttgagaggctgaggtgctgaggtgggaggattgcttgagctcaagagttcaagaccggcctgggcaacatagcaagtgagaccccatctcaaaaaaaaaaaaaaaaaaaaaaaaaacttctggtgatttcagattgccttttgcagttgagttttattctataaatacttctttttttcctatttactttatatgtctggtggaataggattacttttgcatttctgagttttgaggcttttgtctccatagtagtaaatagtatcagattagtgtttttgagtttttaggtttgcttttagtaaattatcacagcaaatagggtctgttatcagcaaggctgcctttagctcccactaaaattctctttgtgggcaggaatgtttattcttgttcactgctgtatccctagaaaaatggctggcacatggtagaggttccacaaatatttaatgaatgaatgactgtattttatgaaagctgtcagtgttcactatgttagagaaattatacacttttacacgttttaaagaatctgattagttctctgatttattttttcatctttgttgttgttgttaaatagaggcagggtctctcactctgtcatccaggctggagtgtggtggcatcatcatagctcactgcagccttgaacttttgggctcaagtgatcctcctgccttggcctcccaaagtgctgggattacaggtgtagccaccacactcagcttctttcatccttttgctgactaatcagtttagtatttttttttaaacatttccattacaaggtaacctaggaagagatgatacatagtagatttttatgagacaccaattctttttaaagtttctttggaagagggggctggcaaacatataagcctatgatttcagtcatctatacttataaaaatttatttttactgtctttttatgattgtattgtttctaggaataataacaaagatcatatttcttctggatttattacccatgctcaaaagggagtacattgaagcttataagtaaacttttttgtttgtttaagaaatacttagagtaccaactacaagccaggcacacttctctgtgatgggaatacttgtaagaatgaaacaaacaaaacttttgtgaaacttaccttcttgtagaggagatagaaataagtaaaatgtagagtaaaaccagagttctcttagaggaattatttgtgtagcctgtaacttttacaaataataaattcattaagtaccagatttttttttttttgacattgtgggggaatgagattctccatgtcagaacttacaacagtgcaaggcactttgataggagcagtttggtgaacaaagatgattgtttgtagcc

SEQ ID NO: 93771 - DNA, 2208 bp, Homo sapiens
aatatattatttaggattcttctgttgggaagaggtgtatcttctccctatttatttatttattcattccatcctttatatcagtgtgggctcatttatacttgagttacaatccaaagtgtttactttaaaaaaataattttaacttttattttagaatcaggggctatatgtgcaggtttgttactagggtgtgtttcctaatgctgatgtttggggtacaattgatcttgtcacccaggtattgagcgtagtaaccaatagtttttcaacccttgccctcttcctccctctcccctctagtactccccgttgtctgttgttgccatctttgtgtacgtgagtacccttgtttagcttctacttttaagtaaaatcgtggtatttggttttctgttcctgcattaatttgcttaggctaatggcctccagcagcatccatgttgctgcaaagaacataatttcatccttttttatggctgcatgattttaaaccttttcaaagtgaaatagattattccagtgtctgtaggaactgttagaaaaatgctgattagattgtcacgtctcgctgttgtagtttgaaatctaggaatcagtttacaatggtcaaaacttaatttagtagaattatataatatacatgaaactaaacacagtgcttacgatattgatgctaagtaatggtgatagctattattactaaattctcctagataaggattcttaattctctatggagttgcttctacttttataccatttcctgttttttctttgtaaaactttattatgaagaattttattaataaatacatgtaaaagtaggcaataatataataaatgcccatatactaaacaatttttagcacttatcaattccaatctcatttcatctataatctaactcagtctacaccttatatattattttgaagtaaatccctgtgatcaattaatttataaatattacagtatgtgtctcttaaaaataaggacttttttgaacattacaataatatagaaataataatcccttaatattaatgtcttttaagtgttcaattttcaagttgcctcaactgcctttttttttttttttttttttttttttttttggagacagagtcttgttctgtcgccaaggttggagtgcagtgatgtgatctcagctcactgcaacctctgcctcctgggttcaagcaattctcctgcctcagcctctcaagtagctgggtttacaggtgcgcaccacgacacctggctaatttttgtatttttaatagagataggggtttcaccatgttggttaggctggtatggaactcctgacctctaatgatcctcccacctcagcctcccaaagtgttgggattacaggtgtgagccaccatgcctggccacctcaactgcttttcgtttttgtttttgttttttttaatagtccacattgtgattggttgtcttcaaagtgttttaatgcattttaggtttccctccctccctctctttttcttggcaatttatttgttgaagatactgattgttggttatagggtttcccactctggatttgcagattacatcccgttggtgtagttttacatgttctgcattctgtgaatcttctgtaagttgttagttgaatctagagacttcatcagactcaagtttgacgctcttttggcaagagtacttcatagatgatgacgtattcttccattaggaagcacatactattttgtgatgtaacggtttttgaatctttactgaattcttggtattttgattactaagcatttagcaggcattatcttacttagtattcagaaataaccctgtgcagtgataattatatttcaacttggtagttgaagaaacgagactcaaagtaagtggcaagacttaaattcgagactaggcaatttgatgccagagcctttattctaaaaactattatgtaaaattatgtttggtcattttcccatatatctacaataagtaaagtacaggttactttataggatatacctacactaaattattcttttataaatatttactttggtttacttcagagttgaactagactgatgggaggatatgtgtgagtacaaatgtaacttttcttgctatgcactggtatctaagctcaataaataaaggatccttgctgtatttgctactcaagagttttgactccttcta

SEQ ID NO: 93772 - DNA, 1125 bp, Homo sapiens
aaagatggggttctcactatgttgtccaggctggtcttgaactcctggcctcaagtgattctcccacctcagcgtcccaacgtgttgggattacaggtatgagccaccatgctcagctaaagttttcctatttagacttgatctagaattttacatctgaaatagagaaatgtttaagtagtggcatattttttaaaaaaactgtacatttaaagatgataaaggatttctatattttgaggtcctcttaagtccttaagttagcttgtgtatattgtatctatctgtgtctaagctgtttagtgcaaatgtattttgttccaagtaggtcacagacagtagaaagttagaaggggagggaagcttagatcacttatctaggaatgacagataagtttcacctcaggtgccatttctgtttccatctctgatcagttagtagtggctgttcagagtggagtagcagccccccattgccgtgtatttgcaatctctgcacaaacggaactctcttttcctgggggagttgcagaagccatgcaaaggttatgatggcttgagtgaggttatacatctagttagtggcttctaagctgaaatgtctttattggctttcatttatagtattgccctatagaattcctgatataaatcaccttattctgtcaatcaaaaattgcatttaaatggtatctgatttttggataatgtgcctccacttaaactgatcatgtggtgggtcatgcttttcctatgagatgaaagtaaagaaggagaaataatggggtagttggatttattttattaacctgtatgcctgcacaggtgggatgctagctgaaagaagtagagtagtgacatactgacagtttaagttttcagtgttgacttgagtcaatgtatgtaagtatgcagttgatgaaagtagtgagtagttttataagaggagattaaaatctgtaatcaaagacagaattggtgggtatggttatggtgtgggggatgttggctttcccctcctaaataaatgttacactcaagtattctatgccctgccccccccacttctaattcttatttgcttatttaggggtgtgctttagataaatgtatcttttccttaaa

SEQ ID NO: 93773 - DNA, 1207 bp, Homo sapiens
ggtgtatgagtccattttcatgctggtaataaagacatacttgagactgggcaatttacaaaagaaagaggtttaatggaatcaaagtttcacgtggctggggaggtctcacaatcatggcggaaggtgaaaggcacatctcacatggtggcagatgagaagagagcttgtgcagggaaacctcttataaaatcatcaaatttcgtgagacttattcactatcatgagaacagcacaggagagagcctcccccatgattcagttacctcccactgggtccttcccacaacatgtggaaattgtgggagctacaattcaagatgagatttgggtggggacacagccaaccatatcaagtgggaaatcttatcagcattctttgtcctgtcacagagggagtgagaaatccaaaggaacattataatgatctataatggggggagggggcaattacttacttgaaattttgctttagttgtggtccttaatgaaagttcgtaatatagggattaaagtaaccagtttctttctttttaaattctaggtgagaattatgaagatgatgacctagtaaattctgatgaggttatgaagaaaccatgtccagtacagattgttcttgctcatgaagatgaccataactttgaacttgatgaagaagctttggagcagatattgctacaggagcacatacgagatcttaacatagtagtggtatctgtggcaggagcttttcgtaaagggaagtcatttctactggacttcatgcttagatacatgtataacaaggtgaatagtcttttaaattgaacccaattaaaaagaaaaaagtaccaaccatgcctgttaaaaaaatagacaaaaaccagaactatatctttttttttttttttttttttttttttttaatttaagtggtctcactctgttacccaggatggagtgcagtggtgtgatcacggctcactgcagcctcaacctcccaatctcaagcaatcctcccacctcagcctcccgagaagctaggactacaggcgtgtgccaccatgcccaactcttaaaaaaacttttttttttttttttgtagctatgggggtctcactttgttgtccaggctgacagaactgcatttttaattctatagaaatataattctttataggacttcctggtcaatacagtaatgtaagtttgagctcttgattct

SEQ ID NO: 93774 - DNA, 1163 bp, Homo sapiens
gatttttttggctaggtgaggtggctcacgcctgtaatcccagcactttgggaggcggaggcgggtggatcgcctgaggtcagcagtctgagaccagcctgatcaaggtgaaaccccatctctagtaaaaatacaaaagaattagccaggcgtggtggcaggtgcctgttgtcccagctactctggaggctgtgacagaagaattgcttgaacctgggaggtggaggttgtagtgagccgagatcgtgccactgcactccagcctgggcaacagagcaaaactctgtctcaaaaaaaaaaaaaaattaaatatatatatgtataatttttttagagtgtaaatgtgttttttaggctgcataatatgtcagtatatggctaaaataactgttcggccactttccagttttgaggtacgcaacattaatttttgccaccagaataaaattagtgtccttatttccttataataaatccctagaaatatatttaaccatcgtataacctctttaaggctcttaaaaaatatgtgctagaataaacttgaatacttagatactgttttcacttgggtatgaaatataaatgttgaggttcaagtactaggcactaacacgttacttagcttttgtgggataactaatttttttataagtagactgaatagactgaatcaaggttactttccatgaaaatttgtttcaagtttttgtttggaatgtgaataataaaatatacttttcattccttttgaaaggtgaattattctttgttctctttttataagtttagttttgggttgatgtaatctaacattaatgctacattttattataatgaagatttgtagcacttttttattatcttagtttataattaagcttgaaatttgctgaggatctaggtcagccctgaagtgtaaattttgctgttggaatacatgctgagtgtctgaatttggcagatttaagataatgtgtgattagacaacaaaaagacaggtgtcttatttaaatagacttttttggtttttttttttagagcaattttagcttcacagcaatatgaagcgaaattgtagttcacgtactccctgccactccatatacacactgtcccccgccatcagcgtttcacccacagtggtgcttttgttaaaatca

SEQ ID NO: 93775 - DNA, 1047 bp, Homo sapiens
caagtttgtgtctttgtcagtacttgtaatacttgtatcccaggctgcaatagtcttgtgggggagacccagcactgttataaaagctcacccaggtgattggatgagctagactaatagtttaatagagctaaactagctgatagttttcaatcctagccgtatatcatgttaacgttttaaaataattttttttttttttcagacggagtctcgctctgtcgcccaggctggggtgcagtggcacggtctcggctcactgcaagctccgcctcttgggtccacgccattctccggcctcagcctcctgagtatctgggactacaggcgcctgccaccgtgtccggcttactttttttgtatttttaatagagacggggtttccctgtggtctcgatctcctgacctcgtgatccgcccgccttggcctcccaaagtgctgggattacaggtgtgagccaccgcgcccagccattttaaaataatttctatagctttttccttttttaagtagagattgttttatgtacctcgacttttttgaactttggtatatcaaacccttgatagcaaccctggagtggttagttgtatcacagtattagcagtctcccaggaaaaatagagcattacagtttagcttgaaaactttttttcttccttgaaaattttattttaatattgttagaaactacatgaaatagaattaaatgaatgacacttacatcctaaacacttgtgaaatagagtgacccttgttagtccatatatcctgaggaccagcaattttggcatcatcttggattgataataatgcagtttcaagctcaatcccagttttattgaatcaggatatgcattttaacaagatactcaggtgatgtgtattcatgttaagcttgactagcactgctgtggaggaaataacactaaataagacctggccttgatttccccccaaacagtggtttaattgtatgtttttcttatttttaaaatgagtaaattgggctgcataatctataaagcctgtgggagtgatgtaat

SEQ ID NO: 93776 - DNA, 1283 bp, Homo sapiens
gaaagtaccaacctgaaaatatgatggcaataggataatacttggtagatattatagaaagaagtagaacaattagtaaaggaagtagaacaattctgtttgttatggtcatggagaagcatgaagtattcagaagtgcaaagccaaaataacttttacagatgattttccaagttatggaacgtgtctctgtgtgcttgggtatatacacatattgctaaacttggatacagttttttaaaaatgtgtgtatttaagtagccaccttcactacctactctgagacaaatggctgtgtggtgtatggtcggatgatagttactagaaacaacttttaagtcataaaagactaacatcctctgttttcccaaggagataatatgtacttttgattgaccttggatttggtcttcggaccagtacaagtagaatgtaggggattcccttgctaagctactagcttaataaaaagtattcatacaactcctgttcatacaactttatgattggtccccaaacaaccacttagaggctagctggatatcctgctggccagtaactctaataacttgttggagaagtatgtaactggtgaagaatacttatctaggttctctagtaacattttatcttttattgcaaagatgctctgattgtggcggcaatgcttctttaatcatagggaggataatgtagtgggaaaagaatgaggaatcaaatgagtgatttcacttaagctctcagagcctggagccctcatataaggtagtgataatccgtaacaaggctgtcgtgggaaacagatgatagggtgcaagtgttttgtagtactttaaagtttgtaaaactgtcttaaggcacagtaacatatatgtaagaatgtaccagtgtgactacttgtgttattatgctattatatataatgtgtatatttgcaataaaaagttataattttttcctgtggacagagatttagtttgggcaagggtggtaggcaagttttaaattttagctgtaaaatgctgataatatgttcatgatagggttattgtaagtatcaaatgtgttaaaagtgcttaacccactgccaaatattctgtcggaggtggttattaccataatgggtggttatttaagatgagactttgaactaaaaagtaattttcaaaataggcaacttggaaggtgtttgttcagttattaacataagatgtgatcattcatgcttcttagctatcttcattttaataaatgtgcattttagacaatcctgtggcaaagta

SEQ ID NO: 93777 - DNA, 2120 bp, Homo sapiens
gagcgatgggcggggcgggggcggagggagggcgaggagatacaggcggagggcgaggagatacaggcggagggcgaggagatacaggcggagagcggcgctaggacccgccggccaccccgccggctcccgggaggttgataaagcggcggcggcgtttgacgtcagtggggagttaattttaaatcggtacaagatggcggagggggacgaggcagcgcgagggcagcaaccgcaccaggggctgtggcgccggcgacggaccagcgacccaagcgccgcggttaaccacgtctcgtccacgacctccctaggtacgggccagcgaggcagaggccgcggggccctgatggggagagacgctcgctgctcgggctcgcgggcaccggccgcaggcggcggggtcggagtccgcggctggttcaggtctcctcccgccgccgcgcctgcccgccgggcctagcctcagccgcgccccgcgctcccgcagcgcgcggcctgaaagggcggctcgtgggccgcggctccagtagctgctgggagaaccagtggcgcgcgcgtctgcgaccggcccggccccctgcccgccagcccgccgcgtggctgccgccgtgtccgccccgaccttagggggcggccttgagccgtggccgcctgcccggggcgcggggaggtcggctgcggctccgctccgtccggcgagctccggacgcggcggggcgacccgttagctggtgggcgttcgctgtcccttacgcggacagggaggaaggggtggccagggcatgatgggccccgcggaggaggaggtcgcgcggggagcagacaccttgctgccgggtccgaaagctccttagacacccttcctggagggaaccgcagtccgcaggccagggctctgtccccgggctcgcgtttcggggctcctcggctcccgaacccattcgcgcgggttgtgcgtggctagggtgcaagtctagattttcgtgtcaaactggggttatgagccgtttacgagtcacttggacgatagtaaggcctgatcactctgaaagtgtctgtagtgtgaagtcacctgatccttggctccctggttttgctgaatgtgagctcctactgtacgtgtaccaggagcgcccctgccccctcgaagacgcagttgcgttggcagcgcagtgtatccctctcactcataacacccctatttataggagtttagcgtttgatctctcactgtggtgcgaattgatcgcatgaaatcctgattgaaaattttgatggtacttaagaaaggcataaagttttttcaaaggcttataaatagtaaaagcctacgatttggtaagtacggccaagataagagtttattattaaatacagatacgagctcgtgtcttaagatttctttttttacggtgtgtaaaggttttgctggataaaatgtaaagcattttggtatgatgttaaccacaaggactcactttaataggaaagtttatttgaaatatacttcatcattcctggtagttcttggcgcatgtcagaggtgatgacagactggagttttgctaagggaagaagaaaaggaaataaagcttattttattattgtctgccaaccaaaacgcttgactgtttgtacagtggtagcactctgtagaataaaaaactaccaaagaagcagcttcgccttagatgtgtgctggttggatttcttaagtaattaattgttttggaatgcggatggattaatttcgctcttttggttggaccctaggggaagaagtgtgtgttcttttctttctttctctttctttctttcctttttttgaggtaagagttttagatgcagtttcaaaatattctatgtatttaccttattagaagaaacataaatttatacttcagttatggttgtgaacgttgttgtgctgtggtatcttgagaagagatgatactcttcagattgttgttgaaatagggcccaccatttattatttaataaatgcttttgtctgctactcataggtttttgtcctttgttttttaggacggatcagcaagaccttcacttgatagccattcctagcaaatgattgcctaaaacagtccctgtacctg

SEQ ID NO: 93778 - DNA, 1942 bp, Homo sapiens
tgaggccacctaggcttttgaggaacatgaaccaatatcttttctttttgtttaagtcaatttgagttgttatctgcaagaaaaacagatagaggaaggttatcaaagactcactttgattattttcttgaacatgcaggcggtggtcactggcttactgagatcagtcctccagctccttaaaagttaactactcacgggctggacacgatggctcatgcctgtaatcccagcacgttgggaggctgaagcgggaggatcacgaggtcaggagatcgagaccatcctggctaacacagtgaaaccctgtctctactaaaaatacaaaaaatcagctgggcatggtggcgggcgcctatagtcccagctactcgggagaatggtgtgaacccgggaggcggagcttgcagtgagccgagattgcgccactgcactccagcctgggtgacagagcgggactccatctcaaaaataaatagcttctctcgccaggcatcctcgtggaagtgacatcgtctttaaaccctgcgtggcaatccctgacgcaccgccgtgatgcccagggaagacagggcgacctggaagtccaactacttccttaagatcatccaactattggatgattatccaaaatgtttcatcgtgggagcagacaatgtgggctccaagcagatgcagcagatccgcatgtcccttcgcgggaaggtcgtggtgctgatgggcaagaacaccatgatgcgcaaggccatccgagggcacctggaaaacaacccagctctggagaaactgctgcctcatatctgggggaatgtgggctttgtgttcaccaaggaggacctcactgagatcagggacatgttgctggccaataaggtgccagctgctgcccgtgctggtgccattgccccatgtgaagtcactgtgccagcccagaacactggtctcgggcccgagaagacctcctttttccaggctttaggtatcaccactaaaatctccaggggcaccattgaaatcctgagtgatgtgcagctgatcaagactggagacaaagtgggagccagcgaagccacgctgctgaacatgctcaacatctcccccttctcctttgggctggtcatccagcaggtattcgacaatggcagcatctacaaccctgaagtgcttgataaaacagaggaaactctgcattctcgcttcctggagggtgtccgcaatgttgccagtgtctgtctgcagactggctacccaactgttgcatcagtaccccattctatcatcaacgggtacaaacgagtcctggccttgtctgtggagacggattacaccttcccacttgctgaaaatgtcaaggccttcttggctgatccatctgcctttgtggctgctgcccctgtggctgctgacaccacagctgctcctgctgctgctgcagccccagctaaggttgaagccaaggaagagtcggaggagtcggacgaggatatgggatttggtctctttgactaatcaccaaaaagcaaccaacttagccagctttatttgcaaaacaaggaaataaaggcttacttctttaaaaaataaataaataaataaataaataaataataaataaataaataaataaataaatagataaataaataaaaagttttctactcacactgaagtgacgaagtccagagaaggtggagagctgtgagcagccagagcgagggctgcaggatggtcagcggcagcctctgctttcctccactccacagacactactcctgtctcttaacttgcccatgggctggagctgtgctaattttgctcttaaatattattagaggtcttaacatcttcctcggggatcccactgaaaagtaataacatcagaacacattattacagtttcagatacatcttaaaatatatactgtatctaaaattttacatt

SEQ ID NO: 93779 - DNA, 1030 bp, Homo sapiens
tctgatgttattacttttcagtgggatccccgaggaagatgttaagacctctaataatatttaagagcaaaattagcacagctccagcccatgggcaagttaagagacaggagtagtgtctgtggagtggaggaaagcagaggctgccgctgaccatcctgcagccctcgctctggctgctcacagctctccaccttctctggacttcgtcacttcagtgtgagtagaaaactttttatttatttatctatttatttatttatttatttatttattatttatttatttatttatttatttattttttaaagaagtaagcctttatttccttgttttgcaaataaagctggctaagttggttgctttttggtgattagtcaaagagaccaaatcccatatcctcgtccgactcctccgactcttccttggcttcaaccttagctggggctgcagcagcagcaggagcagctgtggtgtcagcagccacaggggcagcagccacaaaggcagatggatcagccaagaaggccttgacattttcagcaagtgggaaggtgtaatccgtctccacagacaaggccaggactcgtttgtacccgttgatgatagaatggggtactgatgcaacagttgggtagccagtctgcagacagacactggcaacattgcggacaccctccaggaagcgagaatgcagagtttcctctgttttatcaagcacttcagggttgtagatgctgccattgtcgaatacctgctggatgaccagcccaaaggagaagggggagatgttgagcatgttcagcagcgtggcttcgctggctcccactttgtctccagtcttgatcagctgcacatcactcaggatttcaatggtgcccctggagattttagtggtgatacctaaagcctggaaaaaggaggtcttctcgggcccgagaccagtgttctgggctggcacagtgacttcacatggggcaatggcaccagcacgggcagcagctggcaccttattggccagcaacatgtc

SEQ ID NO: 93780 - DNA, 1049 bp, Homo sapiens
ccagggatggtgtgggaatgcaagtaaagaggggcattcacaactctgttggctgctggatgcagagaaaaccacaagctggataaagagcagcctctggggaaaaacaagctgtagacctgaggtccagcagcaagagttccttcttcaaacaggtggttagcaagtggcacccatcagctacctgttaagtctttgagaaaaattaacgacctactttataatttatacaaacaaaaatactgtcgcctatgtgctgcgccccagccattccccagccctggtgcggctgtgtcctgtagtggagacagccctggataggttccagccttggctcctctgctaggtagctaagttatgaatgcttagctttgttcatctttaaaatgagtgtgttgtattaggcagtctcactctgaaacttaaatcattttatggtatgggggtagagtttatatgatttctgtagagatacaagagtagtgctgtgggaaagtatgacgcacctgttgggaaggaggttgacatatggagaaaaatcagaccatatgggattatgaaatttaaaaaattatctcctcctgctcagtaaacgtgccaaatataagcctatcatcctaagaactgtcttccttttaacaaatgagaagaaattatgtgcatttccaaaattaaagggatattcacgtcatgttaaatgtgtgacatatgtaggcaacgacgaagttctgagaagtaagtttgtgtttacggtatggcctttgttatttaggagattacaattaaaacaggactagcccagatgaaacaattaacaaagctgatgagctataaccaaaacccatgattagtgatgggttcattgaatacattctagtacatctgttctatggaataccatgcaatcaatcatcaagtagaatgaaccacatttatatgtattgacttgggaaggtgtagaagacatattaagtaaacataaacaagtggtaaattataatgaaaaatatgaccatgtttttgttaaaagcataaatgagacctcaaca

SEQ ID NO: 93781 - DNA, 1491 bp, Homo sapiens
acggagtctcactctgtcacccaggctagagtgcacaatcttggcttgctgcaacctccacctcccaggttcatgcagttctcctgcctcagcctcctgagtagctgggactacaggcgtgcaccaccacacccagctaatttttgtatttttagtagaggcggggtttcacttcattagccaggctggtctcgaactcctgacttcaggtgagccaccgcatctggccaattttacttctttatattcctgctttatattcaccatatttcttatatttagtataaaaaggtgaagtaatttactctgatacttcaaggtgatcttgaaagtttgatgaagtgaaatattaactgttttttactttttacagatggttccaatccctatacattgaagctttgcttttctacatcatcccatttataagaagagaagagcatgttagaatttatgttcacctttattacaatttcaaagctacacttcattaaaaaaaaatctaaaatggttgatctcatgttgccttgcttactttaagatcctgttctgtaataaacatattttgccttgagtaaatttgttgtaagcttaaatattgaattgttttcattttaagatagaatatcataatgtagactatctacagcttcattgtagattatacagatatatgatttctaaccttattactggaatttttcttccacagtaaaaatatatttgcattcttaatgctaattatctgcaagtattttttcattgtgtaagagattaatgcaggtgaaagtattgcattttaatatagaattcctattatatgtttagatgtttaagtatgttgcagttactcatattaaacataacttgtatatttattattttaatgaagtttgagaataacgttacatatgttgaattttaagtactacagatttaactgattttatatttctgaaaggctaacagacatggatacacgtgtacagtatgcattcaaacttatttaaattggtgtatttttttttaagtcactgtccatttgtattgacatgcctctgtttctagtccagtttggagattttataaagttataacaatgagttaatgtgttcattttcatttgttgcatgtgacttaaatacagctagtatttggcattgagattttaatagaggttataattaacagttcctcttatagataataatctgggatccatgggtgggcttcagagaatctgtgtaccccctaaaattgtatgtagaattttggatatttacatttttattttttaactcttggatccatcagtaatatgtatttttctatatggtacaagatttaaggatctaattttatttttattccaaacagatagctatttgtctcaataccatttattaaacattctttctcccactggatctgttttttttttctttttaagataatagattttatacataggcaagtaagatttaaggacca

SEQ ID NO: 93782 - DNA, 1126 bp, Homo sapiens
tttagtgaatgtgtaccttgattatttttcttagttattcctgtaacagagtaaacattaaacatggttgtatgggtagttctgatcctgcagtaaaaaacattgggtgttttttgcactttgataatggagggttacaaaaaatttgccattacaagtttgtagtatagttgtagagtcatggcagtcagctgaaggctaaaaactggttaaatattttgccaaagtggattagaaaaatctgtgaaagaataaatgaaggacaaggaactctgctgtagtagtgtggaaacagatttttttcttagtgtaagtctgccttcctttataaaatattttaccgaaaaatagtataaacaaaagctgttatataccctgccaaaattttttatttttaaaaagcctattgtgaaattctttgatagttgtggtgggattatgtaggggggtatccattctgagctatgtccattaagatatttaatctgaggttaatttgttccacttttctagggaagtaagcagaattggggtataggaggaaagagagcgaataaagaggcagagaagagaagtaagatgagtaataggggaaaaagcaaagatgggggatgtgtgctagtgatattgagcctttttacaaatattgcaaatcacaaatgtatcccttcagatcagcgcttcagcaaaacaggtttacttgcattttgggatcaccttatagatgacctttccttttcctatgtgacgactataagaaagggaatagaaagagttaattatggttcaggacccatagattccatcagattaagtttattcattggtttattatagcagtatgaaatctatgtgaatcatcacaattctttacctcttttaatttgggaagcccagacttaatgatatgaactggtagaagctttcatagttgaaccatggcagaaattgatacatagatttatttgctgtaagctcaagaagagtttgtgtattaatttgtagcatctttggatatggtttgtagacgaaagattttaaagcttgaaagatgaaaaatgccttcaagatgttaatataccatttatgtagcatttttccatgtcagttttttaaatatttgaag

SEQ ID NO: 93783 - DNA, 1050 bp, Homo sapiens
ggtcagataaggatttgtatttagtgtttgatggcgtatgcttaagcagaggaacattaacagaatggattagtaggctagattggctcaaaaggagtgagacttgcgtgatgagagacgttagaagccatgtggtagaaggaactgtgaatgttaggattgaagaagaaatgactttggggaaatggggtcggggggacagtcataataacttcttgagcatttagaagaggttttggccaacgactaagtctgtaaggccctaaatggggtagaatatgggtagaggatcaatttctatacaatataaaaattcattttctcacaatttagggctatctggaaatcttattattggttttgggtaagcagaagctaaatggtcccaacttacagagatgatgtaaagagaatttttacattgagtaaaagttaaactagatggcctcagtccctttcaatgccacaataacttggaataggtgattaaaactctacttctctagactgaagtgaaaattaaagtatttctcatctcccataaacctcatttgtttaggtgactaaggatataggtaaaggctctctgaattttcaaggattagaatgaccagagtcttgagatacatatttttaaaaatcttattgggcactgtaatttcatcagcaaactttctaaaagtattgtataatgatttttaaaatttactaacataggaggtgctattttagaaacttataaataatttttttgttgatgtctctaattagatttgggaaaattggcatgccttttctgaaaacgtagctagaataaaaattatcctttagagtattgtagtattctcatccaataatgtagcccccttggttagctttatcttggcatctttaaagtttggggttgctcatagtcctacctggtgttatggtcaatagacaatgacctattcatgatataatatgagtcagtgatgtgaacattttcagctctcaagtcaggtgtttgtaaatatgtgcatatacttataaaatactctgtgtttactg

SEQ ID NO: 93784 - DNA, 1177 bp, Homo sapiens
aaaaataaaaggattagaaaggtgcacacttgctgcattgtttactttttaaattttttgtttttttctcaattgtggtcactgaacagaaattctaacataatgaaaaggtgcattatatgtgaaagacgttcttctgtgtggtttgatttttgtaaagtggctgtttataagttgtcactttttgtaacaatttaaggttatcactgtcaatttgtgtaactagaaattttgacatttcaaatgtaggtgaaagtaacatgtctgttcaagatagaatatctttaaacttgataaatctgaaaataagagcatttcatttgggatgcatcttcacctataagtgctagatttcgtgaggataaatttgactgataaaattgttcaactaactgtgtggcaattctggaatatacaaattaaaatgtggatcttgtaaaaacaagggggctgcagtattggctacatcttaactacaatatcagtgtttgaactacagggtggaaaagctcaagatgagtatgtctgtaaaagtcagtaactagaaaaaaattttatggcatacaaaataccttggggagtgggtactctatagtgcatgtactctagcaaaaagaaaaagacaatgtgatgattgatcttttgcatgtttgcatatttaggacttttagatgattggctcctttaactctcaattcccaggaaatcatcttgccttatgcatgaaattgcaaataggtttgttttgtaatgcagctttggctagaccccatgtttttcactacttatggaaatctgcctggccttgggttggtacagttgatgtcagtattagaaagcacatccttagcactgaaacaaccggacaagtggttgatgagaaatgtctcacttctgtcaatttacagttattgaccactcggttttgtttttttaaaaaaatctcatttgaaatagttgtggttacatttttctcaggggctctttaaacaggtgtagataagcttattttaatagtgtttacatctattcttttaaagggtctgatgtttacacaaagccagctgaggttagttcttcatataattctagtcagataagtttagaaatgtataaggtatatatgtgaatagtgaaatataattaaagcacgtaaaacgtttttagtttatgcttt

SEQ ID NO: 93785 - DNA, 1030 bp, Homo sapiens
ctaacttgtgaattgcgatttggtttgggattaaaaaaaatgtttactttttaagcaggtttgaatttactgaaagatgcaattcaacttagacttaaattttttttgttttttttgagatggagtctcactctgtcgcccaggctggagtgcagtggcgcgatcttggctcactgcagcctccacctcccggattcaagccgttcttctgcctcagcctccagagtagctgggattacagacacgtgccaccatgcctggctaatttttctatttttagtagagatggggtttcaccatgttggccaggctggtctcgaactcctgacctcaaatgaccctcccactttgacctcccaaagtgcagggattacaggcgtgagccaccgcgttcggccttagacttaaaatttttttaactagaaattattttctcttgctaggaggcaggtggaagtcatcataaagtttctgtttcacccgtcgtccatgttcgaggactctgtgaatctgtggtggaagcagacctcgtggaagcgctggaaaaatttgggacaatatggtaaggatgatagggacttcatgtagattgaaaactgtggtagaataatccttgcttgcttgttacaagccttgatgtttagcatagtaaatattgtttgtatatataaacaaagtagtatctattgtttgcctatgactgtatttctttggaacgttttaagcctactatttttaaccttcctgggtgatgcatgagtgtatttttgtggagctatgatcacttctcactccccagcaaagttgtataaagaaattatgtgtgcttttcatctgattttcaaatgagtccgtgagtcctgttcaaacactctttaaaccattgagttgattacatgcttcatcttcagagtttcaagtagtgatgcttaaatattgatttttttgttgttcttgattttggaatatttaggaattaattggcaactaaaagtaagcagattaagggtaggcattatttgtttaggtg

SEQ ID NO: 93786 - DNA, 1049 bp, Homo sapiens
tgccttaacctcccaagtagctggaattacaggtgggcaccaccacacccggctaatttttgtatttttagtagagacggggtttcaccatattggtcagggctggtctcaaactcctgacctcaagtgatccacctacctcagcctcctaaagtgctgggattacaggtgtgagccaccacgcccagcctaaaaatatttttcatcggcatgtcccacctacagtcattatgatttctttcaaagcctgtgctgaaaatatttgcttataagccacaggtataaacaacctacccatacaatcattgaaacgccttccttttcatgtttcccccagttgccaccaaagacctggctattaactgccatgagaggcattaaggaaaaaatagaaaaagtaaatttagtgcctttagaaaacctgggttcagaagcagggatgaggaaaaaaaaggatcaggttagaggctgcagtttattgtcgctcacgcccaggagcaccctggtgggagcattgaaaattcctggtttaaagttctgcttccttccttaaagctgtgcgaccccgggcaatttacttaaactctccagacctattttctcacgtgaaacaaatggattgtgatgatttaatgagccatgggctgtgatatgtgtctaaccatatctgaccacatatttgatacgtctctgatcagagggagcaactaatcatttttatcccctttctttcctttgcccccaaataccatctctgactctactagaactttttatttcacttaattaacactgcaaaaaatggcatggagattcaactaggacagcaagcagccactaaaaagtatataaattatctgagattactaaagtgcttattaattaaattgttttcttcatataaccaaaggataagtcattctgtgaatgggggttttgattgagagtggtgagtaattttatttcagactttagtgcactctggctaattttgggctgtccaaattgggtgtcacagtgtggtccttgggttgttagaggagtggaaa

SEQ ID NO: 93787 - DNA, 1050 bp, Homo sapiens
gctcactgcaagctccacctcctggttcaagcaattcttctgcctcagcctccagagtagctgggactacaggcacacaccaccatgcccagctaatttttgtatttttagtaaagacagggtttcaccatgttggccagactggtcttgaactcctggcctcaagtgatctgtccatctcggcctcccaaagtgctgggattacagacatgagccaccatgcctggccaattctgtgattctcaaataaaacattgagagattcatctctatattttatttgactttgacaaatcctgtaattatgtcataatatgatgaacgttttgagaaaagtctattctaagtataatgagaacaaagaaaaaaaagattggtcctggctatagaggttagaatatttcacaagaagaaattatgttagagaatattcttgaacgatcaattggactttgccagactgtggtgggcataggggacccagaaggaacattcattctagttatgagaaagggcccagagacatggcgaatctgggggacaaattccacattttccatatacttgatcattaagcacatgaccaagtgtgtcagtgcatgaggatggacaagatagattggagccttcactgtttttttcttctcatttaccaaaaatttcatcattttagaattgtcccagttttctaattttaagtcagggcttctttgtcatgcttaaagtcttaccctctgtgccctctgctctgtgttctatatggtagcctgaaatttggccctgttatatatatttatttatgccagactcctgaaggtgttcaagcataccatttatcaaatatttccatgtaatgtggcagctaataacagcttcgttttacagagggaagagctgaagcaaacactgatttgtagattgcttggtaacaggaaagagacctgatgtatgccctctgtctttccttcacaaaaattttgtagctttctttgtttcttcaagccttctacctgtagttatactttaagggagataattataagcaatttt

SEQ ID NO: 93788 - DNA, 4146 bp, Homo sapiens
atctctttagataaatttaaaagatagatatgtcagtctgatttggtttgtctgacagattgatggctctcaaacataacttgatccaggaataaagccttacaaatggggggcggctttcttttcgtctggccttatcacctgaattagtctcagttcaggggtctggttattttcatcctgccttagcctcctgagtagctgggactgccattgtgtaccacagtgcccagctgagggatctgtgccttaagtgaggttagttttgcttccttcataccagtctcatcaaatgaaaaccatgtatttcccttggatattacacagtgtttgagaatgttatacctgtacagaaactaaccaattgagtgatagaaacaagtaattgaaatgggggttccttatgtctggtaacactttgtttgacagtgtgttagacagaataaggcaagtgttgcatcttgtttagttttagcttctttatgcctgaccaacctaatacagtgttgagtagttaaggaaattcctttggactgattgatataattgtgtttttcactttttttattaagatccccgtcgaggtcaagatcaagatccaggtctatttcacgaccaagaagcaggtagggtaaaaatttgattatgcttttctagttatatggcaccaatatccaaagagttcaaagtgtttttaattgttgaaattttaagtgttaactctaaacttaggttttagtgggaacacagtaccttatttgtgtatgtcctatttattactggctgactttccctgaacaagggaatgtaaaactatagtgagaaagaagcttatgacttgggggattatattaaagaggcccttgttagaactgataggtgcatggagaagcatcctgaaatcgatgtgcttaaagcagaatgtaaaagattaatcatgatgtagtaattgagtcattttttgaaaaacagttgttgaaagattggcttttgttagcaacaactggtaggatgtttttcagtttaagtgcagtctgacattttaagcttaggacatttgggggttttacggtattggtgactacaagaaagggattggttagtactctttctttaatagaatttctcatgttttgacagccgatcaaagtccagatctccatctccaaaaagaaggtaagctaaatgttttgttgccaaatcttgcctgtcaagtgtggcctctgcagaatttgtttgcttactgctttgcagtctttgagctctttggagaattggtgctatatagattaaaatactatgctaagtttctgaaatactttttttttttgattcagtaacattagtttatacttttgctggaaatacttagtcataaaatgttagggtgattattaagatgtgattggtcctgtgagtacttggtagaaattttggtaagatagatgccttttccccacatgtacaatagatacaaagtgtggagaaaagtcttggaaatagttacctgcctagtgcttctttatgaccagaaaacttcaaatagttgtcatatttatctagtgcttcttaatgaccagaagacttcaaatagttgtcatatttaactgcaggttgaccttgcaattttgacaaggaggatagcctaatttttttttttttctgggatggagttttcgctctgtccccaggcttggagtgcagtggctcaatcttggctcactgcagcctccgattcccgggttcaagcaattatcctgtctcagcctcttgagcagttgggattacaggcacccaccgccaagcctggctaattttttgtatttctagtagagacggagtttcaccatgttggcgaggttggtcttaaactcctgatcttaggtgatcacctgcctcggcctctcccaaagtgctggggttacaggcgtgagccaccgtgcctggccagggtagcctaatcttaagccagggacaaaagatgaatatatgtaagtttcatgtcatttttaggtctttgctataggaaattagtaccttaggccacctttgaagttattgaaagttagtacatgtacatgagagtttcaattgacactaattggatccaaacctaatgtttttctttttagtcgttccccatcaggaagtcctcgcagaagtgcaagtcctgaaagaatggactgaagctctcaagttcaccctttagggaaaagttattttgtttacattattataagggatttgtgatgtctgtaaagtgtaacctaggaaagataattcaaccatctaatcaaaatggatctggattactatgtaaattcacagcagtaagataatataaattttgttgaatgtattaacatcatatggtctgaaaatgtgggtttttatttggcacatttaaataaaatgtttctaactagatttttgatttgtgttcaatattaacacttcttaatttgatatatttgagagtcagacattataattgttaaccttattcatacatacctacattcagaattgaaaggtgttggttaagtcttgaacatcactattctatgcataaaacttggccaggatcttaagggactttgaaaattccatcttacccttgtagctctgggtaagatgacctgagtcccttatgatacagcctgaatgcatcatgacagatccttaagttagctaatccgtttgaagttggtgttagtaggtattgtatgatcagtggtgaagcaagtaggaccactgatgtgtctaaatgagcatgacaggaactaaacgaaactgattaaatgtatgagaaatagaaacatttctggatgatctttatactaattgcagctttcaggctactaggtggcatagtgttaattaggactccccaagatatggggagttctactctcaatggtcttgtttctttgctttctacattagttaaccagttttataccaaaaaatgcatgtttgaggaattgtctgaaattgggacaaaacaccttcatgtaaaccagctttgcaaaattttccagcccagatactcttcatctattcaaatggattgtcttattctgagcaaagacctgttgttaatcttcaagctaggttttgcagttcccaaccacaacattcttctattttgccaggctggtgcaaagtaattaaagatgtcaatcagaaatgtcaatgagactaaagtggttttgtaaatctcagctatatttagcaacactccatgtagctaatattttttggtagcatctggtagaccttagaatgttacatagccagtaggttctttattcaaattttaagtatcttaagaatagtagggcagtaacagttacttttgagagttttctggtcaagcttttaccaggcattctctagccttggtacaaaaaaaaaaaaacctgctggttgcgcagatacctaggcttgtccattttatgcatttcagcaaagtcattggatactattgcaacttgggaatactggtctgcatcaagtttattcggtagtttgaccgctagtatgttggaagttatttggattgtttttggaattttgactggctgaattatggttggtataaagttatgtgtataactggcaggcttatttatctgttgcacttggttagctttaattgttctgtattatttaaagataagtttactcaacaataaatctgcagagattgaacaaataatcctgatacttaatttttggaagtgggagctctcagccaaaagtaggaggcattaatcctgtagctttaggatgggcagctagtagcgtcctagaaatgagtatagaaaggataaaaaggtgtggaggaggggtaggggcaaaaatggttttaaacaaattccagccttgtggggaaaagggctgtttgggccaatacctcttaggtcatgtgcaacttggcacccgttactgatagatgcatttcaaaataagctttggtgcatccccccacttgttttctgtgattgggattgccaaattgattgtcactgattggaagtgctgctccagactcattccttctaaactagcctagcactgatgagtaatcagtcagtttttatttttaatttttaaaatttttttgcttggtgcggtggctcg

SEQ ID NO: 93789 - DNA, 4177 bp, Homo sapiens
gcggttaaattgtacagcctttcataggccggtctaatgcatccgtactaagattgttaaggctgagggtccctagcctggggaaaaacgaaaggaggcagagggtagggagacgggaaagaagacaaggagggtgtagaaaacggggagaggagggggcgggacagcatggggaaggcctcaggtttactggagagatcgtggcgttcccatagaaacgtatccctccgcccatgacccgcgtgttagtctcttcagttccttccgcgtcgtttcttggctgtttccgcccagctcctttgtgccgcgcagaacaacgagatgacgcatgcgcaaagcgcagcggccgcatatataaacgcgaacccgggctcttcctcgtagtgccgccgggactcttggcgggtgaaggtgtgtgtcagcttttgcgtcactcgagccctgggcgctgcttgctaaagagccgagcacgcgggtctgtcatcatgtcgcgttacgggcggtacggaggaggtaagaagctggagtccggtgagggacgttggtgtgggtgtagtgagcactgcgaggccgtagggttgtcgcggaggttgggagacggttattccgcgtgcgtaatggcggcttaggagcacgccagacgaagccggaggcagcggaggcggggtgctgaagggagacgggatggcgggtgtacatctctgccgagttccgtactcttgggcatttttgtggcccaatccagcctaaagcagggttgagatgacggttttcgcgttgcctttctcggagctgcccgccggcccccctccccccccgccctcggcggcggctgccattttgcgcacattgaggaccgtggtggcgcatttcctcagcgctttcccgccacttcagcggacagatctggccgcagctgtaagatcgtggttgtgtttgagatagaacgaaattggcagctgtgagctgcatgttctcgtcaaacaatcggttaaattgcggaatgggaatggggacgtaatctgcgactggcggctgggttttttttagttatttccagcgcggtttatggctctggggcggggagctggagtcttgggcgagcctgtgcctgggacgtttgccgcggaggacgagagccggcgcagccctgctctcctggcccggcccctaccgaggccctcccgccgccgacgccgctgccgctgcgggcccgcgcgctcccggtgcgcccggggctgccgggactcatgggtggggccgggccaggttccgccccacgcctcggtgtatcctaccacgcgtttctgcttgtgttcgggagggtcaccccgcattatttagaacgttaagaattttgtcaaaagtctagtttctcagggatttgcggactttcaccagttttacgactaagttttgtcttggatagagggcattaaatgtgctttacccaatcttgaggatggcccgttttaaggcaaataagtaattgaaacttgggccagattttgcgtaacgtgcattcttctatttgcgtttttaaacagaaaccaaggtgtatgttggtaacctgggaactggcgctggcaaaggagagttagaaagggctttcagttattatggtcctttaagaactgtatggattgcgagaaatcctccaggatttgcctttgtggaattcgaagatcctagagatgcagaagatgcagtacgaggactggatggaaagtaagtaagatgttatgaatcttctgttcattaaaatatactgtggctagataatgaacttagtgctaaatttggattctgaagtctggaagagaccttaaatagctggtcatagtgttaaatgctaaaggcacacgaaggttaaagaagatagcggagatggagttagggcttggtaaagaccgccaaagtttgttgggggggaaggagtggttggaaagagtgagtggttggaaagagttctttttaaatctataagtcctgaatatatttttaactttagaattttgttaatttgcttttattagggtgatttgtggctcccgagtgagggttgaactatcgacaggcatgcctcggagatcacgttttgatagaccacctgcccgacgtccctttgatccaaatgatagatgctatgagtgtggcgaaaagggacattatgcttatgattgtcatcgttacagccggcgaagaagaagcaggtatttattttaataaaggaatggttggtattctagttaatcaagtaattcttttattagcaaggcagaaactagtgtttttctataaacttgaatgttaattgtacaggtgtattttacaatttttgtttaattaaaaaaatgttactatattaataatcaacctggtcaaaacctttcaggtttcttcgtttgagtcagtcgccttgattcagaatgtcacgagccttatgatatcatgctgaggcgccttgcaaatccgacaattaagatcctcctagaccttgaggtgatcagcataagaggccagatcccctcgagtcatctacacctagcttcaccttattctttaaagggcagaaaatttgagacggtgatcgccgtaacagtaaatttggcttacaattggggcccccctccggtttagaaagaggaacaccagattgaccacattcccaactagaaaaatcttcttgcgtcaatcaagcctcacctggctcatttggctgtcagtttgatcgtcgttagattgaagaaaacatctagatgcagcgatcggctatagatacttctagatcgtctagatctactagaccatgggccaaagagggtcgacctgcaaacttgcaaggtttattttaaatacacattacagtgttttatattatgtaatgctaagttgtaattcagcttttaacaaatctttttttaggtagtaaaaaaaaaaatactcaacaactaataggcccagagtttatttccaaatgagacactaaatttaaatagttttgagatttgatttcagcagaggcacacaaactcttaaaaacgagttattgtctgacattttgttttttctctaacttgaaaaataggtcacggtctagatcacattctcgatccagaggaaggcgatactctcgctcacgcagcaggagcaggggacgaaggtgagatcttgtttaactgaagtctttctgtattattattaaattcactggtagtccaacacagaaaaagctcattattttttttggagacagggtcttgctctgtcacccgggctggagtacaggggcataaccacgactcactgctgccttgatgatctcttgggtttaagcagttctcctacctcagcctcccgagtagctgggactgtaggcactgccaccatacccagctaatttttatttttgtagaaatggtcttgcactgtttcccaggctggtctcaagctcctgggctcaaacgatcctcccgcagtgctgggattatgggcatgagccactgcaccgttccccagttgaagtcttaacaggccaaaaaaaaaaaaaactgtggagatggacttaaagttctttattttaggtcaaggtcagcatctcctcgacgatcaagatctatctctcttcgtagatcaagatcagcttcactcagaagatctaggtctggttctataaaaggatcgaggtatttccagtatgtaacactttttttccttacttgtgtttggattgttcacatcttatcagtagagtgtcttaaggacataattcaaatggattgcttcagggaatatttgagatgtaaaagtttggaatttatgtgtaacttgtaacataaatattaacctagttttacagatgaagaaaagggctactagagattttaaggcttgttaggccgtgtggtagacaagggtcccaagcaatacagttctactcaacactctgggtaggcatgttgctataaacttttctggcttcagattggatgatactagctctgaaagatggtaattgattttcccgacaaaaaggcctattagcaccaggaaaagagatcagaagcaagtagaaacatttctcatttttggaatgatggggttgatttgagacactggaaagttgactagggcagtagtgtgtacacagaaatgaatgtggatttttttttttaga

SEQ ID NO: 93790 - DNA, 1101 bp, Homo sapiens
gctgggcaaaaagtttacctatttaggatccttagtgaatgtttgttgaataaatggaagcattcattggtgacaggattaatttcaaacagagtagagtgtcatctattattttagtgacctacttgggttgatgatgcctctaaacttacttttcctccaaagtattgtccttgtgaacttccttgaagatggcagcatgtctgtgaccggaattatgggacatgctgtgcagactgttgaaactatgaatgaaggggaccatagagtgagggagaagctgatgcatttgttcacgtctggagactgcaaagcatacagcccagaggatctggaagagagaaagaacagcctaaagaaatggcttgagaagaaccacatccccatcactgaacagggagacgctccaaggactctctgtgtggctggggtcctgactatagacccaccatatggtccagaaaattgcagcagctctaatgagattattctgtcgcgtgttcaggatcttattgaaggacatcttacagcttcccaatgagaggccaggaagtgtgaacatactgatagaaaaagactatattttatccctcataaaatgttttaaatgtaaatgtacatgactgtgtgtgtgtatgtgtgtgtgtgtataattctttgttgttttggtaaaatcagaggagtgggttataagtgctaatttccttgggaaattaatgaactagggcaagtatagcatcccatgcataaaattagcacagggacatcagaattgtatgggtcttcttttttctttttttcttttttttttgagatggagtctcgctctgttgccaggtttgagtgcagtggcgcaatctcagctcagtgcaacctccgcctcccaggttcaaccgattcccctgcctcagcctctcgagtagctgggactacaggtgcacgccaccactcccagctaattttttgtattttagtagagatggggtttcacctgtatgggtcttttcttgtgatggggttacacccccatttttgttaggcaagaaaagcatttggaaaaaaatgtaacatgttagattcaatataaaatattatggtaag

SEQ ID NO: 93791 - DNA, 1958 bp, Homo sapiens
ctgagtaaggaactgagaggacaggagcaaaaatgcaagtaggaaaagctaggtagtagacagtgccgcagcacttggagttggaattccagtcaaaacaaacagcattttttgctgtcctaagaatttcgtggaaaatcaggcctacccaaaatccaatgagagtgtttaaaattgtaatctagagttaaataaatgatccttggatttattgaatttttgcatttctgcataaccgtttcagtttgcctgccagtttgcgtaagtgaaagctgcttcttggaaatgaccagacaagatcctcttcatacctgaggaatgaatccacttgagcctcattgctaccccctgaaataatgcatttttataatcactcatttttgtaagacttaacactttgttatgctgatgcccttgcttaaaggtttttccacttctttcaggaaatggccagcctcaaacgacaattcacggaactgttatcggatatagggtttgcaagggaagggctcagagcaagggaaattgagaaaagggcccaaggaggagatggtgtcttagatgccacaggagaagaggtaaagaatgtggagttggttctcatttctctttaattagcacctaaatacaatcttaacctgggaacacttgtagacattcttcttcacttaagcctttgagcagtgggttaatggcattcttgattttctgcttcgcacaaataaatatcagctgatctggcacggtggctcgtgcctataatcccaacactttgggaggctgaggcaggtggattgcttgagctcaggagttcgagaccagccagagcaacatggtgaaatccctcatctctctacaaaaaaattagccaggcatggtggtgtaccacctgtcttcccagctatgtgggagggtgaggtgggagaatgatgtgatcccaggaagcagaggttgcagtgggctaagattgagacactgcactctagcctgggcaacagagccaaaccctgtctcaaaaaaaaaaaaagtataaaaaaatttttttaagtgtcagctaacactcataagaatagagggggctgggcacggtggctcatgcctgtaatcccagcactttgggaggccaaggtgggcagatcactcaaggtcaggagctcgagaccagcctgcccaacatggagaaaccctgtctttactaaaaatacacaattatccaggcatggtagcacatgcctgtaatcccagctactcgggaggctgaggcaggagaatcgcttgaacccgggaggtggaagttgcggtgagccgagatcgcgccattgcactccagcctgggcagcaagagcgaaactctgtctcaaaaaaaaaaacagggttttctgctcattgttgctgttgtttttggtttttaaatttcatgctgcttcttgataaattcataagagatagaatagacttccagtagaattttctcaaatcaggccagcattttttctaacaaaagacagctttttctataactataggaagagcacttctgtaagatgaacctgatgctcctgtgttccgagtgcagttagcactttctggagattctgaacatctcatgaaccataatttttttctccatttatactcaggaacactggctttgtaacgctttgcaaaggtctagaaagtcattgtaggctccttggagtgggtccaatgtgactgtggtccagtagatttgtttttttacttagaaataatttttctagcaaagagatagaaattaggtgctcttttttttgctttaagatagagatcaaatataataaaacggtaaatcctacagcacagacagaaatagccatattagagccagacgcagtggctcacgcctgtaatctcagtactttgagaggctgaggtgggcagattgcttgaggtccagagttggagaccagcctggccaa

SEQ ID NO: 93792 - DNA, 1039 bp, Homo sapiens
gtattccgtcttgtggtgatgtaagagaggggctaaaaatgcttcatttagggagacaccgttgttagtggctaatgctattaagctacacggattactgtatgaaaaaatactttgtgaaaactgtacgtggatgtgtgaatgattgtgtagccaggaccatggaccttaacatcaaatggggatgaaaagtaatgaattgctttttctctctttttgtcatgtgattttatatgtgcttgtatgaaaaggggttgaataaagaaactgtgtagtttgggaaactctgcacttgatgccacttaaatcagcactagctgctcctaccaggggctcaactatcccagaatatacagggcactgtgtccctctacaggaggaagctggttcatctattctgtccatagcaagcagtcttggccatgtttttataaaatgactcaatttatattttctttttctttatagatatgatgccagcaaagggatggaaagtctagaggacacctttgtatctcaagctaatgctctacaaaggaaaggccgagcaggccgtgttgcatctggggtctgcttccatttattcactagccatcactacaatcaccagcttttaaaacaacagctaccagaaatacaaagagtgccattggaacagctgtgtctaaggtgacatctggttttttgtgttttgcttccaaaaggtctaaatgtttctcactctattaagttccatgttttccttttacttctagaagatatttggctaagaatgaccaccaataatctcatttatttgtgaagaaagatatccttagtgttgcctttaccattccttttaaatttctgcacataaagatctcttacattgcagagcatggccctaaaacagagcttaagagtacatatgtagggccgggcatggaggctcatgcttataatcccagcactttgggagactgaggcaggtggatcacctgaggtcaggagttcgagaccagcttggccaacatagcaaaactccatctctactaaaaat

SEQ ID NO: 93793 - DNA, 1031 bp, Homo sapiens
gcggatcacctgaggtcaggagttcgagaccagcctggccaacatggagaaacaccatctctactaaaaatacaaaaattagctgggcatggtggcgggtacctgtaatcccagctacacaggaggctgaggcaggagaatctcttgaacccaggaggcggaggttgcagtgagccaagatcgcgccaccgcactccagcctgggctacaagagcaagactccacctcaaaaaaaaataaaagaattcattttcattgtagcacttaacactgtctgaaattggagttttgcatacttcagtaggatataagctccttaagagtagagatttcggccaggcacagtggctcaccaccaagcaacaacagcaaaactccgtctcagaaaaaaaaaaaaaaaaaaaaagaatagacatttcttgttcaccactgtatttctcagaccctagaacagtgcctacagcatttaggtaccgagtaaatatttgttgcatgaataaatgaatgtaatgattaaatggaataatagatcaaaaaattactttatgttggttgggcatggtagctcatgcctgaaatgccagcactttgggaggccgaggtgggtggatcacctaaagtcaggagttcgagaccagcctagccaacatggcaaaaccccatctctactaaaaattagccagacatggtgatgggcacctgtaatcccagctacttgggaggctgaggcaggagagttgcttgaacccaggatgtggagattgcagtgaaccaagattgcgccacttcactccaacctgggtaacagagcaagactctgtctctaaaaaaaaaaatatatatatatatatatattaatctatgtgatcataaagaacttaagagaaatgagaatggctgctctcttctgcttacactttaatcattatgtggttttcttttcttttttttgagacagagtctctgtcacccaggcaatggaggtgcagtggcgcaatctcggctctgcaacttccgcctcctgggttcaa

SEQ ID NO: 93794 - DNA, 2015 bp, Homo sapiens
taccttctagtttatctttttaacctcagcctaatcatagctaaattaatacctataaaatattttgataatcataagctaatactccttttctttggggttcatgtgtagagtttacgttcctagaagcatttacagaccttaatttaatgtctgttcaatagtcccaattttacaaatgttactaaactattatttgattgtccttttgattggagtgcaaattcctagaatttcccacctcttggtaataagtcaggaggttgttttagaaaatacctgaaactgaacaacttttattctaattagctttatcacttttctcattccatatgattgcttctttagttaactagcccttgaaaacttcattttaggacttatttgttttaatgtacagatgtgggaaaaccacacaaattccgcagtttattctggatgattctctgaatggaccacctgagaaggtagccaacatcatctgtacccaaccccgacgaatctctgcaatctctgttgctgaacgcgttgctaaagaaagagcagagagggtgggtctgaccgtgggataccagattcggttagaaagtgtcaaggtttgtatgctctgcttatttcctggtaacagaaatttatggtttttaggtataaaaagttttgggggttaggagattcatgggcaatttgggatatatactttcaggttatttttaaattaatgattacctttggtaatcatttatttaaatatttagaaatatttagaaatattttggtataagaactcttatggccaggcgcggtggctcacacctgtaatcccagcactttgagaggccaaggcaggtggatcacctgaggtcgggagttcgagaccagcctgaccaacatggagaaaccccatctctactaaaaatacaaaaattagccaagtgtggtggcacacgcctgtaatcccagctactcgggagtctgaggcaggagaatcccttgaacctgggagacggaagttgcaatgagccgagattgcgccattgcactccagcctgggcaaaaagagcaaaattctgtctcaaaaaaaaaaaaaaaaaaaaaactcttatttggttgtactaaatttcctctgtaaagctttttattttttattggcagaagtcatctagtaaagactgttttgctcttgaacttgggacataatccatttaaccaaataaggagcagacagattgagaactgttttcattattcactgttttttaatgctttttatgaaaatcttaacattgtgatatgaagtagaaaggcttttattactgtccctggcaagaaactatgtttagtatggtttcctattaaatggaactgctggtgtttccaatattttttatcactatccattcaaaatggctttccagtaatgtttcctttttttgaaaattttattaatgatttatattgccctttcatgtgtaagtcctcagccaccagactgttatactgcaccacgggagtgctgctgagaaggctagaaggagatacagctctacaaggagtttcccatatcattgttgatgaagttcatgagaggacagaagaaaggtaaaacaaagactttcccagggaacacacactcacctgaattgaaggcatggcagaaaaaattgttttctagttccaattcagtttcatgcagctagtaatggtaatttgccacaaggaaggcctatgttagagaagagcaactgctttcttgatctccagggtctgtaacactaaaaaggacagcacatgctcatcacttattagatggagtcatcctgttaggttagaaggtatacttcacaccatcctgggcattatgctaagttgaataccgtacttagtagaaataacagatgtcatgcatgctgtggctgaatgtatcttcttccttgtttatttggccattcagtcctgacattgattcatgtatttattgagcctgcattaaatgccaagtgatatattagttgctg

SEQ ID NO: 93795 - DNA, 1019 bp, Homo sapiens
agtaaagttatttataagggaacatgatgactttattcaatatttttcttctttgaaacatctcattactaacttttaagattatttcataatcccttatacatgagccaatgaaatattttgagctctacttaagaagcatgaagtctatattataaatctaaacaacaaaagcacttgtaacttgtttagtaaattccatgccttattttccatttttgacaccgtaaagtgcattttctgtcgactgtgagcaaatttcccttttgcctttaatgaaaatagtgcattaagtagccaattgctgcagaattataaagcaaattagctaacagtgggtcacattggactaccactcaaagaaacaagatgcataacagatgatggaaggtacatgtggtgtggcttagggagagcgcacctgtgccagatgcatgccactttcagtagctgccaaatgtgcctttaattaagaacatctctaatttttttcttcagatcaagtcagcatttggggtcgggatttgggcagggaactttggggtgcaaatatctggtgaaaccaccagagaatttgtttgtcaaagtgacatgtataattttagttgagacgtgtttgtgtatatatgtgtatttgcctttgtttagtagcacggttatttgctaaaataattgtcaaaaaattgctctgtcggtcggtctttgatgtaagaacaaagtgtggtctatacatctaatatggcctttgtacctaaccatgttcataggtaatctttgtactctgtgtgcagcagtatttggtttgcatttaaagtgaaaataacggctgttatttttctggcattactaagataaactgaaaaataataaagaaaaatgccttacatagcccacaagtgtattatttttgcatgtatttattttagagggcagtatttttgaaatcattagtgattctcatttagctcatatatgccatatagaaatattttgcatttttattgtggtctttctttgga

SEQ ID NO: 93796 - DNA, 2555 bp, Homo sapiens
cctgagttcctctgtactgggatgtatattttcctagccccaaatccattgctggcaatggatgcactgaatgtgccagcactgaggagttaaaatgagaactccaaacactaacgactcttcttcaagatgcagtataagacaatgaattttaacctagatgtaattatacaatggaaatggtattccagtttagaatatggaaagaccgacctagaggaattggacaactgattgcacctgaaaatcataaagggactttttctggccaataggcaggagtcctctttttgtgaagtgatcttttgtgaagtgatcattaaagggatggaaaacacagtctagtgtccagcaggcccacatgacagtttttgtaattcaaattatgcacttttaaaaaaaaaaacttaaacagggatcttaatatcttcctttgttttcctttgctttactcttctactttagaatattttcttaaaaatcactcaaaggactgtgaggaaaggctgtggtacctgaccttgttgaaatcaaggcccggcactgtactacaggcctgtttacagattattacggtgaactgaatgggtaccgaggcttcaccaaagaggtacttttttgttgttgttgttgttttaggaataattgtaccaattttaagagcattccccccacctgtccccacacacccaaacaaaatgtggtggtgttgccttcaaaaaagagaagttttgtgtcattaacatgacagaagaactttttaaaaaaaaataactgtcaactattctatttgcatttaggagactgttcatctatgctagattgtcattttccctccttctcccacagaagtttactggtagtccatgtcatggctcgtagctatccctctaaccataccatggaaatgcaggcacccaatgtgaaaaggagcacttgctgggcatcactgacaccgctcatgttttacacatagttgagtaatcagcatatctagaattatcttgcattgcctaaatcatatgtatatagtgaatgttatataatatacctggcaggtctgttttaatttaattgaataaagatacaaatactttgtttggctggcatatattaaattattatatgaagaaaatggttgattcttatttcttttagttgaaaaacacacaaaaacactaaacataaaagcacgttttgtggtacgccttggtttctagttctggatatatgtattaatcttaaagaatgatctaaagtcacagcttggcatataggaagatacttggttagaataggatgggtatcttttaagcagaactttgtaagtaagttttaagttcctaagcaacaagtatacagtttgttaaggtttatattgaacattctaccttgcttgaggttttctgctttatcaaaactattcataatagaacatctacctgcatcattactatcataatatggattattcataaagcgtatgtactgttcttctgagtctaacaaatactgtgactgaaatgcatgcaccttgttgaagagaaaacattttattaatctccactataatgtctgtgaaatgtgcagtattccatccttagagagtttatctggttcatcagcatctgcatgtatcctctgaataatgaagcaacatttcagcaattctgttaaccacaccattagagacatttttagaagtgctgcaacatggtgggaacctagtactttaataatttcctatgatatttattagagcataaaatgtacatcacgatagtacagtatgtagtcctttaagaccagaaggtatgttaactgcaccatcattaagcagtctatcctattttcttatttatttgttagaattgaatcctttctcaatatctgtaccattcctatgatggtagccattcttctctttataaaatatttcctctttgaaaagcgtcctaaaacattaatttcaaatcccctcttggatgcaaagtgtccctaagaccatccattcaacagtatttatgtgagccaacttactagagccgctacaactaatcatgatagacagtccagaatctccctggactttatactgggccagcctcattgtccctaagatttctctttttatgtctcatggattacttctctttttaattgccccaggcacattccaaatgagaacctggtaaaagtcacattggacccccttcagtatgtcttcggctaatgtgttagccttcaataaggtgataaccccttttcaacctatctagtctataaagaggaaaaattcagatttggagttctaatcctatttctcccaaagggaactattcttctaccccatggttctaggagaccacttcactgtgcaacagttttacatgcattgtggatggaggatatttttattctgaactgttacatttaggtaaaaatattttctgcagtggtaactgattagaaaaatgccaattggatgcccttaggtggaggtgagaaaatggcatccttgccttcttctcaatatgaaacattaactagttgac

SEQ ID NO: 93797 - DNA, 1033 bp, Homo sapiens
taatcactaaaatcttgcaattagatgaagaatagaacacaacagaattcttgaattctactagaatacacccacatcacaaagacctcacaaagacctccatacattccacaagatagtggcctcaccagttaattctgatgctaatagaggatgcaccaaatatagtaggaaaatgattgtttgactgtaccagtctagaagacgggaaagagcagtatgcctgactggaggcactgccttccttctatcagtcaccctgaatgtgtcttctctatagtagttatactatcgccacccccctactctctacattattttatttactaaattctttaagctataactttattggaaaaactctaaaacctttagttcactttttttttattcccagatgtattgtagaaactgaaaatttagaagaaagagtagctgtggtgagtcgaattattgagattctacaagtctttcaagagttgaacaactttaatggtgtccttgaggttgtcagtgctatgaattcatcacctgtttacagactagaccacacatttgaggtaggtttctacatgtgtttttaaaatgaactttcattccctattagaaaaattagatttttaacaattattatctttaatttttaaatgtctcatttgtcttttcagtagtagattaaaagactgaattatctaagttttgtaatgaattggttgctttttaaaatttaagcattcctattaaaatgtattcacaggtcccagcctaagctagaagaaaaaactttcggcacttaatttgtaagataatgtacagttaaatgttcacataattgtgtaaggaatgacatgataaactagatctctctcacacacacacatactttaagtttatactgaggtctatgaagataatttatttgaagcaatatttgaagcaatgttacagtcataaaatcaaattgatactgttgtatttgggcgtttctgttagcctagtattttttttgacaagacctttgattccttttgta

SEQ ID NO: 93798 - DNA, 1674 bp, Homo sapiens
atcatcctcttagcccattaaagctttgctctcacccaccttctttgtgtattattggcaacatattacaaatatattacatttctatgtcaataaattcaacaatgtttatattattttatacagttgtttaagtcagttatgagaagaaatgagaaaaaaatacgcatttacaaaatgtctttaataattacacaattacctttactgatggtctttgtgtggattcgaattaccatctgggatcacttgcttttcagcctgaagaacttcctttagtatttcttctggagggtgggctagcaacaaattctctcagtttttgtttatctgggaaaatctttattttaccttcgtttttgaacaatggctctatcttcaagttaatattttttttttcagttcaaatatactattgagcttatccagtaagttttttatttcagttattgtactttttaattccagaatttccctttggttcctttttatagtttctatctctttaatgatatcctctcttcgatgcacattgtcatcaataccttcctttccttctttttcatgctttcctttaattccgtgaccgtattcataatggctacttagaaatcttttttgttactgttgttaaatctgacatttggttgctctcacaggcagtttctgttccttccaccccctccgccccacccccaccccttgtaagagtcatactttcctattggtttgcatacctcatctgtttttgctggaaacctgacatttcagataatatagtgtagcaactctgagtactgctcctccttccccagccccctttccagggcttcttattgcatggcagtggtactggaaagactcatccactccttacctgaccacacacacccagctatgaaactccacaatttgccagctgattgctctgatgttttcaacaattttctggtggcataaatgctatacaaaataatgcaatcaaattgtggctcctttgaaggaatggtttctgagatttctgtttgatacttgttctgaccccaggagggctcctctcagccgtcttatttcctagttgtctcctgcaaactactctgcctacagtctagggtgtatcttcattagatccacaaatctcttccccattgcctttcaccacaatttccactgttcctaagggcaccattaaatttaaactactttatactttgttgcaaatgacaagaaattaggagctatctgtttgaaacagggctctggggctgggcaacaatggcaagcttttctctgagtgacacttctgccctaggagctaagtgcttggttgagcaggtagagtggcagacggatgctactgcagcctgaggtcttcttacccgcctcttctggcatggaaccacgccctcaggaaccagaggaagggctcttttctcagtatgctcaaaacatcacacccaaggtagcgtctccattccataagtggaagttgggcaaaaaagggtattcctacttctcagctgcactcaactgggacttggcctcagcaacaggcagcagggacaggatgagaaaactgaagtcctgctcctgcacctcaccgggagctaggtgttcttgactgcaggaatctggagtagatgctcagttcaccctcactgagctgggagaaag

SEQ ID NO: 93799 - DNA, 3142 bp, Homo sapiens
taagggtttctttaatccagggaggttatacgatatgatagaaaagagcactaaatcaggaatcacatgatctaggttctgggtccatctctgccactctacagtatgaccttagataagtctagttacatctcttccagccctgctcacctcacataaatcatatgaaataagttatgtcaaagttctttgagaatgttacataatagaccaagaattggtgtgatcccatttgactgtggcactgagacacatcatggctttcccagcattataatcaattactaaagaactgaaatggccagaagttttggcttaagaagatgaaaagtctgtttagaaatagcttgcctttaaacatagccacagttttcttaaaacatactttaagtcacttagaacttggcttttattctgtttttcaacttaaaattcctcttgatgtccctcaactttttagcctgattttcatggcatttgagaaaatatggaggtgagtgttgattttagatttttagactgaaataaacttttcctttaaaaagggagagggcaccctaaatttggaacacaggtcaaggatgcttggagtactctgtactgcgggtatgggctctctccagcagtgacaactcagcatctctctagtggccactgcttttgcttcctaaacatgctgttttgagtagcctcaccttacaaatagatttgcagaacaggaagaagattcttgaaagggaagattgtgatgaaaccgataaaaatctctgtattaaaatcttgtacagccttctgttttaatatcttttcttctggatgagacattagtctttaacttttgaggaactctgtaactgaagacaaacaataaaataccaacagagaggaaattattaaaggattatatgtatttaaattacttttatcagtaacccactctagcctcagaaggtataaagctaacggagaaggggacatttaaaaccaatgtatttttattctgtaaatctttaacttaaaatagtattttgaattcaaggttgtctgatatttaaatcagttattatctcgatgaccacatatcaatagattggaagtatatttctgttttgtgataaatccatgaatttgctttttggggaaaaagctattataaacatgttattttaaggctaaacctaggatgggtcttagtgagaatcagcctaaatgaaaattttccaaacaaatacattctgcttttgctaaatcctatgctaataaaagacattgtgcttcttataaaactttgacccacattatgtagcctaacagaaataaaggcatctgctaccctctatgaatttactattggagtctaccagtccctaatacaaataggaaaagaatgctcccaataaaagactcaagttactgaactttcccctccttaaaaaaaaaaaaaaaaaaaaaaaagatttacaattaaatgtgggccttgataaaatttgagttatagaagtgagtgatttctcccccctattatgggagatgtctttccccctctttatgcagaagacaacagcccaagtctcttgtgctggtgagagcagcctttctccacaacttaggataatactgttaaggagagacgggagtaggtcaggcctaggggagtgatcacactcagcctcttgttttacttcatggagatgtgaatgaaaagtaggtcctttcatggaagggattggagactcctatatttatgattgacctctcattgtgactacttgaaataaaggcaattaaaggttggaataggaccaaaccaacatattctatcacatttaatagttttaatagcttataagtatttgtaagcatctttaagtagttgtgagatttttagcaaataatttaaaaactgtatttaactttagctactactttataagttccaatttccagttgcatgctctgttaacatgatttaaagaaagctagataagtcatcctagataaactcatcttgatgtaaggaaaagtaatgggttattgctgtggcctttctctttataagggggataaaccaactggtgatactttgagatcctggtagcaggtgggaggggagcctggttccctgctttacctttgcttttctttcttgctcattcctgtggccgatgagtttaagatcatcttgtcagtgtgcagagggcaagaaataagttgatgtaaagttttaatatcaccactaatttaggaggcactaagctagcagtgcattaccaagtccaaagccttctacttggcaaaacattttggaacttttaaacttgactatttgatctattttgaaaatgtacataacagttttaatcattttgaatcatagagtttaataagatatttttcctttttcttcttagatcccaattttgttcggacatttcttacaacatacagatccttttgcaaacctcaagaactactgagtcttataatagaaaggtctgtccatttaaaaaatatttaaattcattattttttgttaaaaaagagattgagctaagatccttttcagaaatgttagatgagctttaaaatatacttcacaagcactttttcaataaataaaatctcttagatgaacatttattttataataatgttagcttttattatttcaatacaaaaatattcttttttgtatgtgaaaactcagtatttgaaatttcaaatttacagaactaaagacctatataaaatttatagagtcaagaaattcaaattctgatgagttagatgttctaagtaagttttcaaacatacttcatgttgagtaaaatggaacttgtcagtgaacaaatactgtgatggaaggaaaatatttcatgtacccaaacaaagagcagtcagtttttctggaattacccttaacagtgattatgtcacctgatttagagtaattccacagaccaaaaatgaatatcagtcccgtaactttatagtcacatttatttttagaatttgcatgtattctttattttgtttgtagttagttttatctatattggcaagtactaatttcttttaaaaattttaaaataattttattagcctttaatactataggagtctcacttgtttacactgatat

SEQ ID NO: 93800 - DNA, 1759 bp, Homo sapiens
ttaagtccccttagaggactcatagaatttttataacatgagcattctaaactttatcatttcatcctaagtacttttgtttggggttcctagactcatttggagtaaaattaatctttagatttttctctgtgtttgtaagaaagaagttttaattttttttttttttttttttttcctgtagagcattgtaagaagacttactactagtgtttactgtcacaagtcagtgatacttgggcaggaaaacattttcaaattacaaaatttttaattgtttctgtaagacttgattgagtgatagaagttttctctaaattgctatatttcacaaagttaatttatgattattaataagcagctgaagaatggttacaactattgtctggggaactgtcccttttatttatttttttaaatgaggacactttaaagcaaaattaactggaacaagctgatacttgttttgtagtcctgaaagtcttctttccttaatgtgtacaatgttaggtaaagtccgtggacatggtacttttgtaatgatgttttattagttatttctgtctgatacttcttttctatatcaatttttagctttggtatagagtaatattttgagtgcttttacttataatgaatataaaacacttaaatttcaagatttatagaactttgccaaagttaagtgtattgaaaatttaagttgatgagattattttacttaaaaaaaatgtttttaaaaaattccttccaataattttttgagaaataaaaggccagtgttgtggctaagttttttgatatttttcttttctgtcttcttttgaagcttaactgaatattttaatttatgtcataaatatattactggtgaaactggagtctacaagcagctttcgtgagttgtggtttacagtacacacacattagtgttaactgttagcttatttgggctattctgtaaggtctgttactgaagttattactggcaacatagaatggtttttaatagaccatctgtgaacttgtaaaactgaaatggacttttaaggcctcactacaatggtaacagatcaagttaccatttgtttttaagaactactggtctgctcttctcctctcatctttcttcagcctccccaaagagaaaagggatttgtgatttggttagtaggtatgtttattggagaacatgcagtacaggttgtggcttacactgaaacaaagctaacatttaacttacacatttttattttattatatagaattgtaataaaagacattggatataatacatgagaaaatttaatgaatactataagacacgacttacagacatcttttagattattatagtttggttagacattgtcataaaaacagaagagaaactggtttaaccttactttattcagacttcactgtggtgtcagccaactttatccctcaaatattttaacagtaatgtacaaaatggagctatagatctctaatgctagaagagatgcccaagccttcactttgtagacaaatcccaaggcccctgaagattatatgatttcccagaagttctattacgagttaattccagaacaagtcaagaattaggtttcttgactctaaatagagtatattttctaccatgttacattgactcatataaggtgattgttttcatgaatagaatatgttgtaattttttaattatatgtgttaataattaagtaaaaggatctggtacagatgtgagctcaaaaaa

SEQ ID NO: 93801 - DNA, 2594 bp, Homo sapiens
aatttgatcctagattttgtaattgagattccttctactatattgcatcgttctctgtatatttatcttccttatcatctcaatattatataacaataatataggggtcagaaacctaagaccaaattccacacttaaaaaaaaaaaaacctcgtctacatgcttagtggtatgctaactctatgataattcagtagatcgattatgctccccatttcttttcagtggtatgcaccttgaaaaactacatattactgcctgtcacaagatataacccatcttaacactgctaatcttggtcttttaatgtagaaaacttggttgtgtattaatagtaacacacaagaaaaacacttttaaaaagaatatttgatgacacatttaaaatttttattgtgacagttgaataaatgttatttttatccttaaatgagtttattattattttatccaaaaatgtactactggttcagatttgtcattttggctttacagcagttagaagaaaaaagtgaagatcaagaagacaaggaatgtttaaaacaagcaataacagctttgcttaatgttcagagtggtatggaaaaaatatgttctaaaagtcttgcaaaacgaagactgaggtgaatatttttactttttaaaatatccttttttccctgaatattgtggtgtaaattcagggatcccagttccctcctcaagtaaacaatgaagaaaatagttttagtgacaagcctggtcttttagaggaagtgacatcaaagccaagagaattgttattgtttgaaaaacctttcatatttgtgcattttccttgcatactcccagacaagacctcctgagagtcaactggtaagctgaaggagagacagagtaaaatgtatcgggtagatttatgttggcatcgttattctgtcaaagtaaaattattagtgtcctttattttagggattatataacttgaggcattaattcagataacattgcttccactttcctgattataatatgtgctacatgtttttagctttgggtcttgtccatttaaactcttctaaataatttattttaatctttcagattacttttttttactgtattgggctactttttattagttgtcattctaaatatttagtagccaagatagaaataatcattttgtagttacatttaaggagaattttgtcagcaatcattgtgctttttagaacactgaaaaaaatttctaggttgctttaattttcaaaattgtgtaattttgtaattctaatctatttggggaattagtgaataccttctcagtgagacttgtaaaaatctacttttacactttcccttacttacatgagctctaggttttctgtcatctatgtactaataatgtctttttctttattccagtgaatctgcatgtcggttttatagtcagcaaatgaaggggaaacaactagcaatcaagaagatgaacgagattcagaagaatattgatggttgggagggaaaagacattggacagtgttgtaatgaatttataatggaaggaactcttacacgtgtaggagccaaacatgagagacacatatttctctttgatggcttaatgatttgctgtaaatcaaatcatgggcagccaagacttcctggtgctagcaatgcagaatatcgtcttaaagaaaagttttttatgcgaaaggtacaaattaatgataaagatgacaccaatgaatacaagcatgcttttgaaataattttaaaagatgaaaatagtgttatattttctgccaagtcagctgaagagaaaaacaattggatggcagcattgatatctttacagtaccggagtacactggaaaggatgcttgatgtaacaatgctacaggaagagaaagaggagcagatgaggctgcctagtgctgatgtttatagatttgcagagcctgactctgaagagaatattatatttgaagagaacatgcagcccaaggctggaattccaattatcaaagcaggaactgttattaaacttatagagaggcttacgtaccatatgtacgcaggtaagaattatgcagttgcctgtcacttttgttttcctgcttcaaactgattttctttcctgcatgggtttattgtgcctaaaatagaaaagaaactaacaaccaaagacctcttttctttgactaaaaataccccactttatatttctttggaatgttttactttttctactacacttaaatacttttttttaaccttaccatcagttatagatgagaaaatgaggtcacttggctaaatttatccagttagaaagtgacagaaacaagactaaagttagtagtaaatcatcattattgggatctaaaaagttttttactcctttatcttttttttctttcttctttttccatttctgagattataaataaaaattttaatataacaaaattgtgctggtagtacaaatatacacggcattgctttctctcagtttccactcctaaacctgattatttaataataaatgttgcaatcctggaagccaaggattccagttttattataatttttcacctagaaatgtctat

SEQ ID NO: 93802 - DNA, 1043 bp, Homo sapiens
taaaaacatgtctggcttcagtattctaaatgtttataccttacctagttgtacatatctatattctttgttgttgtcaagttaagatttgttttctagaaccaaaagtctgcccactcttatggccatgtttgttgataatactctactggaaacctttaatgagagctgttataacatataaggattttattattcatcagaaagaactgatttactctcttacttgagaatattgggatctcttctattaaaattataattagtagtcatataatttttgcttagagactttcaaagacatacataattgtgctcgcatagtcgtgccccataattaaatctttctgtgtttgtaatggtaaattatttatgttttaccttctttattttctaaggaactggcatttgatccatatgaatcgtatgctcgagatattttgcgacctggttttcatgatcgtttccttagtcagttatcaaagcctggggcagcactttatttgcaggtatagtaatttttaaatgaagatgtacaatgtctgaaaagtaaacttaaaaaaaaaattaaatcacttttttttccagtcaataggcgaaggtttcaaagaagctgttcaatatgttttacccaggctgcttctggcccctgtttaccactgtctccattactttgaacttttgaaggtaagaaaactctttattgttatttgtaacatattcaagtgtgaatttttttttttgctacttcatttgtaaattattgtgtgagtaccctgcacattagtgtgtttctgttttctttttccagtcaagaagcaaatggaaatcagtctgcaaaagagtagcatattttctcgtcttagtagtgaattttatttttgttgttttttaatttttttgttttttgttttttcttttttttatttttggttttttagtgaatgttaaagcaattgtcagatatttttgtcttgtacctttactttttgtttacatggctgattctttgaaaacaaccttggatttatgcatcgcagttt

SEQ ID NO: 93803 - DNA, 1027 bp, Homo sapiens
gttcaagcgattctcctgtctcagcctccccagtagctgggattataggtgggcaccaccgcacctggctaatttttgtatttttagtacacacggggtttcactgtgttgctcaggcttgtctcaaactcgtgatctcaggtgatccacccacctcggcctcccaaagtgctgggattacaggcgtaggccaccgcgcccagcccaggctggtcttaaattttatttcttgatgaaagatttttgccttgttttttaacctcagagtgataagcacctaaagcatcaaacattgactaaagaattgtaacactaagaaagagatttgattattccgatctttattacgttttatctcaaattctgtctttatatttttaaataaaagtaacagatctgagctcaagacatgacagagcataatttagaagcttttccaattctccagaaagccattagctagcaagggatatgaaagattcatcagaattcaacagagtattttctggcagtttacccaaggggttcttgaatacacttggagaactcatgtatcaaacaactaggaatcgatatacacctaaatccctttgccttttcagactccacaaaacctggcaataatagccaataaagttgcttcagaatctgctggaacttactagagacaaaatgaactgtcaagatagaatcaagtagtccttaaggaaggtttataattcaagagttttcatctttaattgaatatagtgattactccttaaaagaacagttactataaaattcttattaaggctgttgttaattatttagtaaagtatttgcattaattgtacttaaattactttaagaaaatataaagaagtatatgaaattttctgtgtcagtaaacataagtataaaatgtaatgttttttgaaaactattaggttggtgcaaaagtaattgatgttttgccattaaatggcaaaaccgggaaaacccacatagtttagtcccaatttgaaatgcttatttataattgctc

SEQ ID NO: 93804 - DNA, 1024 bp, Homo sapiens
tacagtttttccccatttcaggtgggtaatttgttcccaaaaaacccctgtatttaaaagaaaaaaaaaaggatgccttaaggtgaattcttaaaagtcagaaattaattttcattgaaattaatggtacacaatttacttcagtagctaatcatataaactttgcattcatattcaatgtttatgtaattaaatacttaatatgcaaaaccacaaacagaacagtaagacaaaagaaaacaattcaagtaacaccccaaatttttactctatgaactggtgaaccaggagtacttgaggcaaaccagcagtaagttcgtgaatagtccaaccatgtggccacgaagatgactccttgttggttttccttgctagtctgggctacctcacaggcagaaaggcgcaaaccagtgaatgaaattcctcagaatgtcaaattctggtaacttcctgttggagttgggagtggagatatacatgggaaaataagtaatttaaagatttggttttatggaccctgaattactcagatgttttgtttttttttttgtttttttttttgagacggagtctcgctctgtcgcccaggctggagtgcagtggcgggatctcggctcactgcaagctccgcctcccgggttcacgccattctcctgcctcagcctcccaagtagctgggacgacaggcgcccgccactacgcccggctaatttttttgtatttttagtagagacggggtttcaccgttttagccgggatggtctcgatctcctgacctcgtgatccgcccgcctcggcctcccaaagtgctgggattacaggcgtgagccaccgcgcccggccactcagatgttatttaagaaagttttttttttaaaactgtaacaggaagattacttgaggaacctttaatgctactttaatgcttcatgctgatttgtgtgtgtgtgtgtgtgtgtgtgtgtgtacagtagcacagtctcagctcactgcagcctccaccttctaggctcaagtgaacctc

SEQ ID NO: 93805 - DNA, 1133 bp, Homo sapiens
gtagctcaaaacctacgtttttacttgcctgctggacatttcatgtggatatctccatatcttgatttcttcctttgatttgttattgaattattcgtagatacatccgacttgtgttctcttactcttacctgaggctctttggatatgctagtcccttcatccttctttgcctggtccaacactactcatccttctagactcactcaacctgaactgtcaaatcatcagggctgagttggatattactcctttgttttctttttgcaccctgtcctagctctgtgaattttaagttcctatttacttgcctataactagattggatgctccttgagaacagggatgatatcttacccacattttattccccatacttatagtgcttgacatctggtaggcactcaatttgaataaataggtgaggggatatacaaactaaaactatcacttctctcctccacctgtcatttcagtttttcttctcgattaatggctttattgttacatttgactggtttaaaatgttggggtcatctctggcttctttgtattactgtgcacactcaggtagagcctgtatgttcatttccctttgacatgttcttctagtctattcctcctccgacttctctaattgagtctcctttgtcagactactgtgataacttcttaatggggttcactggcccccacctcaccttctgtttttcaaatctcaccagttataggacacttctgaacatgtcacactcagaattgttgatgtcttttgagttcaacctatgctaaagtgcactttttagcatagaattaacagcaattgatatttggcttcatcctgcttttctgactggattgtctaccataaccttttatctcctttttgctttagccagtccggactgctacttttcctgaatatggctggaatgtcccactgtatctgtttcaccgcatctatgagtctaagtcctatcttatctattgcacaaatatatcatgcctactatagaccaggtattgcccttgacactcaggctaaaaaggtaaatgacagggccgggcgcagtggctcacgcctgtaatccagcactttgggagagcaaggtgggcggatcacgaggtcagga

SEQ ID NO: 93806 - DNA, 1090 bp, Homo sapiens
gtttcccccgctcctccgattaacaggggctggtgcacatgctaccaatttcaggggggttttgttttgtttttgcagcgttcgagattcttggtgctgtcatttggcttgttaagaatttttagcctttgtatgtttaagtttgctacattgttacctgaagttacatacccccgatctgtgcttttaaatgttttagtataattaggaagtgttcttacgtttttaaagcttctaaagcagcagtgtgacaaccagactatttttgttttcttttcttcatttaccttttctgtaaagattgctttactcttctaatagtgtttctaaatcccagtttcttgctgctcaaagaatgtttcatgctaactgcttctactaagaatggagattatgttttaccttttatgctaaacattaaaaggtgtctgatatttctcaaaggccagtaacttttactttcccttttgccctgttctcctccggtccctcttgctgtcttacagtggaaactatttggtttttcaggagaatttgctcatatatttctggcttaaattacggacattttccccttcaagtgtctgactagtcacaaacatctatgtaattttttttaaaaaacagaagaaaagatgccatatatcttacatactttactccttagaaatcccttcaggctctcactccttacttttgctttacttgcaagtttgacttcttagcttgtaatggaaggggtgtaggaggtctctgtgatgctagaagctggtgtccggatagagtaaggggagacacggaaattgtttaaaaacgtgtaaaggaactcataaagcattgccaaataggggccattttgcttagaggcaaaagcagctcctttcccaggggaatcaccaaggtatcagctgaggatcctttgaagcagtggaaagaatattgtaggagttgacagacgttgtttaattctgccacactggtggcccttgctgaaatctgtccacaaaagcattttgtttggctggcatagtgttgttttatttttaaatgtaattagttgctaatatttgaaaatgggagatattacata

SEQ ID NO: 93807 - DNA, 1057 bp, Homo sapiens
tcttctaactgtaccatctttgcaaaggcagggatggaaacagagagggaggaagagggcgggggactcaaagtattagctaaaggtgagtaaagagtgggcatctagtgttcttctcagtcactattttctctggtgtgtttcctggagatacattttttggaggagaggaattgaaaggaggcattggaaagacagagggtgagggaaagacagagggtgaatatgttctggaggagagagtaccttaactgctgatggctgaaactgctgttccttctacctgttcggctctgaaggaatcagagccgaaaacaaaaaaaaaactttagagagaaggtagcatttgagctgagggcgcgcagggtggataagagttccagcgcgagcgtgtatctgggagctggggtggggctgtggtgggcggcattagagaaaaaaggcgacaggcattctgaatagcaggagacagagacagaagtgatgtgtttgtaggaggcaagagcagttcattttgagtgagagatacagctagaaagataagtagcggtccgattgtgcaaggccatggataccaggttaaggactttggaatttatcctgggacgccagtgtgagttcttgaacagaaaagtaagtagctgggtccgaagttcgcgtcagaaggatcactgtggctgcagcaaggcagagaaccaggtggccgcgtcctggccagcagggcaggcaaaggcgcggagcgttgcacttgcacctgcagggggcacactgaagggccaaacgcccacccccgcccccgtcctcgccgccctactccgatgcgccgcgctcggaactcggctagcccgcctggacgcgcccctctcggtcttcgcctattccgcccggacgcgcctcgtgcgtcacgtccgccgtggcgtgaggctccttagagctgaggagggaagcgaaaagaagcctctgcgcctgcgccagggcgcacccgtcggcggtaaaagctgaggggctggcgcgggggattggtgggcgacacttttacgtctacacgtgcctaccc

SEQ ID NO: 93808 - DNA, 1555 bp, Homo sapiens
tcgtggttttggaaagtaggccaactgataaccccacagcaaatagcaatttgtacatcctggcgggtcatgaaaacagttactgagaattgttgtgctttgacagttaactctagaaagaaagaacactaccactgcaacattaatggatgcttgaagctgtacaaaagctgcagtaacctgtcttcagttactttgtaatttattgtggcatgagataagatggggaaaattttgttttaagtggtatggatatatttagcatattgaaccacacaagtgcttaattcattgttatgtaatctttgtacatataggcagtattttttctgtgaaacttcatattgctgaagacatacactaagaatttatgtagataatgtacttttatgagatgtacaagtaagtgtcttatctgtacagatgtaaatgttgatgaaaatgcaattggggttaatattttaagaattctttagtatattcttgggtgtggctatattacaaaatgggatgctggcaatgaaacaatacatttaacactattgtatttttattatatgtaatttagtaatatgaatataaatcttgtaacttttaaaattgtaatggaggctgtaatcattttataatctttttaattttaatgcaagtacactggtgtttatatttgcacaaagtattgatatgtgatgtattaagtcacaaaagtaagctgtgacattgtctataagcatttggctccacaaatgtatttggattgttttctatgtgaagcaaaccaattataattaaccacatgttgtagtaactggtctttttatatttaagcagaatcctgtaagattgcttgtctttgcttaaaaacaatacctttgaacatttttgaatcacagaatagcggtaccatgatagaatactgcaattgtggtcagaattacagtatgcacaaagaattaattagcattattaaagagtcctcactaaacatttcatatgatcacactgaagaactgtaacattccatagagtgaagtggttcaaatttctcttggaatttttacttttgttggccttattttatgatccttttcatatttcttttgacttagagtattaatacatggccaaaataatttagttactacctcatacaaacaatataatggttactacacatcacaggaacttagttttggtttaagtcatttttgattgcttttttccaatggaatatgtatataccaggttttagcaaaatgcacacttttggctctttttggtatatgttctttatattttaatgtgagtatatacactaagaacaaactaaattgtgatttatgatcttcatttattttaatgataatggttttaaaatatgttcctgattgtacatattgtaaaataaacatgttttttaacatgctgttgtatagtagcttgtcatctggtttaatctgtatatagtaacactaaaatatattaagaggggaaagctttatttgttttgtagttaaattcttaagtattgaattttggtccctcaaatcatgat

SEQ ID NO: 93809 - DNA, 2009 bp, Homo sapiens
ttgagaactacatgtatttacaaatctcccactaatagaaaatttggtttttaaaagaagaaaagttgcattataggatattttaagtatgtttgttttctagtgcagtcggcattctgtatccatgtgttccgcattgccagtagtattgacaacagccaacatatgctctgttgagcacttacgttgtttagcacttgcatcagcatttaaacccactagcctggctcagtcactacatgtgtattacagaagacatatccgtttcaagtattgttatcctcagaattctttttcttcaatgtttccatgctttaagtatcacagtttctgtaggtttaccaaaatttgtttgtattgtagataccccacagacaaatgttactcatgtaacccaactggagagagataccatccttgtatgcttggactgtaagtttttatttatgaatgtcttactttaataagacttcttttatcttagtttctgagtgactttttttcctctaggttgtataaaaatagtaaatctccaaggaagattaaaatctagcaggaaattgtcatcagaactcacctttgatttccagattgaatcaataggtaagtcaaagttttataattctttgcattatgaactccttaaaataatttatctgctaattatccaaaattaaagattgatattattaagattctttttttaaaataaaggatatggctgggcatggtggctcatgcctgtaatcccagcactttgggaggccaaggtgggtggatcacttgaggccaggagttcaaaaccagcctggccaacatggtgaaaccccgtgtctactaaaaatacaaaaattatccaggtttgctggcacacgcctgtagtccgagctacttgggaagctgaggcatgagaatcacttgaacctgggaaggggaggttgcaatgagttgagatcgcaccattgcactccagcctgggtgaggaacgagactcttgtctcaaaaagtaaaataaaattagaggatataataaatatgaggtcactatcagccttcattcttacacattttctaaaatagtttaataactgtagtgtagataatgttatcttcctggtaagaagtaatatcatttcttttttttttttttttttgagatggagtgtctctgccacccaggctggagtgcaatggtgcagtctcagctcactgcaacctctgcctcccggattcaagtgattctcctgcctcagtctcccgagtagctgggattacaggcgcccgccaccacccccggctgatttttgtatttttagtagagacggggtttcactactttggccaggctggtctcgaactcttgacctcgtgatccacccgcctcggcctcccaaagtgctgggattacaggcgtgagccaccgcgcctggccttgaaataatatcatttcttataacatagttttgaattcccatttcctccagactcctgtagggtttttctataagtgctttaaaatttagtactcagtataccagattatgttttggctgttgtgtctgctgctcagagaattttaagtatatggaagttccttcttgtcattctcacattttgcttaataggagtatttttctggaaaaggatttctgacaatcaatacttttaaatgactacattcaggaaaaataaggtgaaaatcatcttatgtaggatagtgctgggaaaatgaatggtgattaatatttgactaggcacactttttctggtgttccttatcagtaaagatatttgcgtgtatgtgtattagcagacggtaaggctaaaggcagttagttcattgtcttattcctggttctgttttctacattctcccaactagaatgtcattcatccaacaaacaaatgattataataagtcagtttcgagggatatctgatcaagatgttaaaatggaatccgctttcaaagacatagccagggtcaaaaagcaagatcaacaacagaa

SEQ ID NO: 93810 - DNA, 1066 bp, Homo sapiens
gtagagatagggtttcaccatgttgcccatgctggtctggaactcctggcctcaagtgctgggattatagatatgagccaccccaccccagcgtcttttattcttaaaatcctcatgacgccgagcatggtggctcacgcctgtaatcccagcactttgtgaggccaaggcaggcagatcacctgaggtcaggagttcgagaccagcctggccaacatggtgaaaccctgtctctactaaaaaatataaaaattagctgggcatggtggcctgtgcctataatcccaactgcttcgaaggctgagacaggagagtcacttgaacccgggaggaggaggttacagtgagccgagattacgccattgcactccagcctgggcaacaaaagtgaaactccacctcaaaaaaaaaaccttctggagcatgttctaattaccagatactgaagacaggttaacaggactagtccatacccttgagaagctcatgatctaatagggaaaacaggtgtataaaccagtaactacagcactcaggattagatgtcatattaggaatgagtataagatattggccacagaggtggatgtcaccagcacctcctgtggggagatgagtagaggcatttgagatggaccttaaattatgatgaatagaagtttgtcacacagacaggataagcatgatggcatagagatgtgaaatagcatggcaagtttgggaacaatgactgggcatttgactggagtacagaatggtaacaatagatggagctgggtaggcaggcagaagccaaacaccagagcttggtgtactatgctgatggaacagacctgtgttttagaaatatctgtttgcagtacggtgagagatgagactagaaaccatggtcaaatggtaaaagagtgttaattcagggcaaaggtagagaacagaggggaaaagatatttttcaaaaacagttttatcgagatataattcacatatcatacagttcacccacttaaagggtacaattcagtggcttttagtacgttcacagcgttgtgcagccattacaccatca

SEQ ID NO: 93811 - DNA, 1044 bp, Homo sapiens
aatatgtttctttgtgctgttatcagtgtttgaggtgacacataacattaaaatttcactgtatagttaccatatcagtatagtgaagccatgtattctgagccaccctagtttcctccagaaatgtttctgctgctgctgcacagtagtctggtatctttttttattttttatttatagggaaaatgttttgctctgccacccaggctagagtacagtggcatgatcatggctcactataacctcaaacttctggccttatgcaatccccctgcctcagccacccgagtagctaggactggaggcacatgccaccattcctagctgtttttgttttttaattttttgtagagatgggagctgtctgtgttccccaggctggtctcgaagtcctgggctcaagcagttgtcgcctcagcctcccaaagtgctgagattacagacaggagccactggccagtagcttcatttttttcaaaacagccattatggaaggaatttagctaccaaggatccggggtttagtgaccactttagaggatctctgaccttaaaaggggccataatcacaacagttgtccttaggcaaccactaagaactgtctgtgtcctctcactgtatatctgattcttaatagctgtctatgtaagatacacatagaacatttatacgtgaacatttttatatacatacacatacactcattaaatatgctgagtacttttatgtcataggcaaggaaattggcactcagagaggttcattgtttatagccaattggtgctagaaagggtcagtttaaatccaatactgtctgaccacaaatcttatgccattaatctcccagtactaatcttaaattctgggcactttaggaatgctcttagcattctatactgttctcagcgtacttcagtttagcctagttagtctagaaaagttcttgacctgtattatcttaaaaacagatcgggcacttttcttcaagttgcctgcttggatctcttggaagtgttctttcctttctttcctgttctaaagtc

SEQ ID NO: 93812 - DNA, 1034 bp, Homo sapiens
gctgggcgtggtagcgcatgcctgtaatcccagctacttgggagactaaggcaggagaatcgcttgcttgaacctgggaggcggagtttgcactgagccaagatcacgccattgcactctagcctgggtgataagagcaaaactccttctcaaaaaaaaaaaagagcaactaaagtttcttggatgacataataataaatcaccccttttctaaaagtagttatgaattcagtatttggttttttaatgctaacaaatacatgcacttatacacaacctgaatttaaatttgcctaatatgccagaaatagaggtataaatagaagaacatatatataaatgacgtcttactttcatagtaaatattctgattgggtgatcccaaatgaataatgacactatgtcagagttaatattttttctttcctacttgataactttctgaataaaagttttcatgaagattaatcattttcaatgaatatatcttattgaaggaaatggaatgagctccttccagttaaatggtgaacgagatggctcattatgtcaacaacagaatgaacatagaggcacaaacctttcaagaaaagaaaagaaagatgtaccagtaggtattgatagtcataagttctacttgtatttgtttcctttttaactgttaagttagttttatgcttacaattagtgacactatagcactagtatattttacaattactatattgatattttagtatattaattataatggtgaatagattatttaaatcttgaaaaaagtaacttagctatggtaaacttgaatgatggctttttatcgtttacattatttagaccaatttgttatgtagtacgttataaaacatcttctttatacagataaatgcttagtattcttgtgattattcacaaaataactattattattctcattgaggataattgattcttgatagtttctcttacagtctcatgaagttacggaaagaaggacatagataaagaaagctgtagcttctaccccaggacaa

SEQ ID NO: 93813 - DNA, 1945 bp, Homo sapiens
tgagaagtctatcgagtctttatgctcgaagagtgtaatttaggaggtatgctgcatgaacttgcggtaaaaagaagtaagggaacttcaggaatgccatagttctctcttacattcctgaaaattaaagttttgtatactgctcctaatggtaaaatcctcgacctggtctgatacaggcttagtctcccaaaagtgtaaatgtgtttgcccgtgcaccactggagaacaaatccttcaggtaagtgagtgtcttccgtgaaagcaaagtgctactacattcatgtattcacatcacatgcatgcatgcttctgcagagagatccaacatggtgagtttcattttgtaggattgcctgagagcatgatgttattttgaagtgtgtcaccttccttattttaagaaaaagaaagtatatataatttcaggtgtcaggtataaaattccaggtaaaatttgaatcctggagactcctggctatgaccctgcaattattgttttgtcagtactgttgtgacattccatggtgagttgtcttctgtttgaattggtatttttcaataaatattaggatttattttgttcatttaaaatacatatataaagacattggcaacaggaaaatagaggtattttattaaatataacttgatgttttatggttgcagaggtgatcactagcaaattttcagtaaatggtaaaaaagtaatcattcaaaaaatgtatggttaaggttaaaatgataaaaacacattcgatattcctttgataatttattcacattattttttgtttttgttttttcttttaaggagtcttctcaagtctgttgaagaagaattgcatcagcggtaattttaatttttaatcttaaagtactttatgtcacagacaagtaaagtcagtttgccttcttctctgttatgtagcctatttgtttgcgttgtcttttttttctttaatagagatagggtctcgctctgttgcccaggctggattgcagtggtatgatcatagctcactgcagccttgaactcctgggctcaagcgatctttccacctcatcctccctagtaacggacatcacgatccaccgctcccagttccttgttttaattctgaatctatcctatcctataaagatgcagaaataaaattttatcttacagtagcttttcctgcattttctaaaatttcttcttactgttttggtaaaatccatttaataacaatgacattatcctttttatttagaggacacgtcgcacatttagaagatgatgaaggagatgatgatgaatctaaacagtaagttctgtctctgtttttggtaaaaagaaaaggtgtcatttgacctgatttcatcaatctggcagcttaatattgatggaaatttcaatatcagtaacacaatatcatgggttgtatctcagtttccttccttttttctattctagttacattaacttgggctgacataacaaaataccatagacttagacaacagaaatttatttctcacagttctggaggtgggaagttcaagatcaaggtaccaaccaacttggtgagggctgccttcttggcttgcagacagccgtcttctggccatgtcttcacgtggcctttcctcagtgtatgcacatggtgggatcaggggtaagagtgatctctctctctcgtaagatcaccaatccataggattaggatcccactgttacaacctcatttaagcttaattacttcctaaaaacccatctctaaatataatcacattgtgggttaatacttcaacatgtgaattttatagtgacacatttcagtccattttttccaaaggacaataattttttattgtagatttatcagtgattgatagctgctgtaattttactacaactacaaagaagcttattataaatttgattaaattttaatctgtt

SEQ ID NO: 93814 - DNA, 1594 bp, Homo sapiens
tttcgtagtgtatagttattttggctaggtaaaatgttaataatttgcccaaccttcattttttgatgaattggatccctgcttaaggaactgtattctatgtaacgaacccttggcaaggtaggttggccaaaagtttgctctttggctgtgtttcgtgtgtaggtatagacatacatgtgacatgagcatggatgtagcacttctcttgctgtattgatatgtctgctttattcttgtgattaggcagtgttttaaaaacgggatttcctgctttctccataggtgatcaggcagacagatttccattgacgggtttctacctattccagaccgtgcaggaactatctaattataattgttaacataggtcttttctttttctaacaggaagcatatgtactttgacttatacttgcttgtctccttttctttggaattctaatctcactaaggtcagcttttctgataatttatttaaaaccaacaaaatactatttttaaaagaaaacactaggccgggcatggtgactcacgcctgtaatcccagcacttttggaggccgaggcgagtagatcacctgaggtcaggagatcgagaccagcctggccaacatggtgaaaccccgtctctattaaaaatacaaaaattagctggacatggtggcacacgcctgaggtcccagctactcgggaggctgaggcaggggaatcgcttgaacccaggaggcggtggttgcagtgagccgagatcgtgccattgcactccagcctgggcgacaagagtgaaactctgtctcaaaaaaaaaaaagaaaagaaaacattaaattatttatgttttgttttaatttagggcaaaaatgttgaaggtaaattctcttctaataagtaatagttaaaagagtacattgaattacacaattcctggcacagttgagtatagtagtagtaaatgccagatggcttttcctataagctacatgactttgagaaatttacctctattattgctagtaaaatggataatataatagtacctgcctcatagggtgctaaggatgaaatggaataattgctataaagcatttagcacatttaggacttagtaaatacttattagttgcctttatttatggtagttattcagtaaataattgttgattgtatgaacaagtagtaatgtgagtgaataaaactgctgtttaattttagagaaatagggtttttgtttgtttgcttgttggtttgaaatgtaatcagagcagtacttacagattgggggcagttagacaatttttaaagatgttaataaccgcagcactgattctttagctaatgcaaatatgctgagtattttggtggtcattttagacctctgccatatctgtttgtacattgtttcatttttaaccttttcgtcaacatttcttactcattttagattgtcttagaattcagcatctgaaagcattgtttttgttttgttttgttatttactttataaaacttccataagagaagaattcaagtggactagtgaatagtgacattgtttattgtgtaacattcaatcttggtgaataaatcagtatca

SEQ ID NO: 93815 - DNA, 1061 bp, Homo sapiens
tttacttttaaaatagcacccaatttcatatctttaaaaaattgttacctgcgtgaaacagcagtagaaatatgtgaaagtgtttatatacgtaattattttagatactatatacaaagtaaaccaagatttttgtcacatattcacttctctgaacgtttttgcttcattataactggagaataaacaccttatttgagcttttttctttctaaaaactgatttttacaaaagttaattaaagtaacagtaaccaaaaatgaaactttgcatatattattcagaaaaattccaagaaaaacactcaaataataaaatacttaaatcaggactatgaactcgtgaaatccttctttttaagaatgtatagcaatacagatttatttgggggtctgggacttatcttttaaaaataatatgtattatatatattaatgtatcatggtgtgtcatatactactattgtgctaaatattttattttgtactattaggatctgcaactggaatatggacaaggacaccaaggtggttactttttaggtgcaaacaagtaagtaaagttcttttaaaacttaatttaaattcaagaattattaagttgcctttaatattatattttaatatttaaggtagaaaattgtattaggctggtagatatattttacaatatgcatttcacctttttccattgcttccttgctcattatttagttaatagttgtcctaatgggaagcatcaacataatttttttatatcaagctacattgctgatcttgtatgttagagaaaaccacatgtattgccactgaaggcagatacatgttttagcactttatttctaaaactgatctgtttatttcttataaaacttgctttggtacatctctaagatgggttggtcactaaaaacagctggaattattcatacaacttagaaatcttaactttttagctataaggtttttttaaagtaagatagcagttaaaatgtgtgtctgaattcttaaaagttaccaatctatgcagtaaataaattcaacagttatttaatgcctctt

SEQ ID NO: 93816 - DNA, 1289 bp, Homo sapiens
ctatttgagatgttaatattctatagaacaataaaaaaatgagacattggaaaatacaaaattctaaagaaattattttgccagagttccatatgatgtctgtttcatttttttatttgctatttaataatgagaagaaaataactgttaataagtactaaggattgaagtaggagctttcttcttcagtttaatgcttattttaactcacttgactgaagcatacaaagggtgtcattagcctttaccttatagttactctaattcagtgtaccagtgtggaggaataggatgttaaagaaaaagtcttaaaatgatcatattgtaataccaaagcctgacatttatgaagaggggtggagaaaattaagaaaaagtagtcatgatatttataaatgctaattgtgttttgttaaggcagtttgagtttattttttgtttccctttgtaagttggcattgcctgtatttaaattctgtactaatttagtaactgcattttagagcaaagttgttgcaatgttgcttttttagaagctgcctaatacagtttgactctccatttgccttaataaaattatattagcaggacttacttcatttgtgaaagtttccctttgtgaatttgtggcttttagtctaagcgtaaataacttgggtttcttggtctctgctaaacagcccgacagtgatggttttttggacagttcagaagaaatatactacactgcaagatctaatctggtatttctcatcttctgattttctttgtcagcattgttttagtcttaattgttttcttttaagatcaaacattttgtccaattaaagcattgttttataagttgctatcatttagcaaacttctatatattaagaattgtagcagttttttcccataacaagttacatatatatatctactcaaatataatgctgtagtaataaacatgcttgtattttttatgaaaaatgttaatatttaattttctcattcatatattagggttttttttttaagaaatggcatttccctgtaaaaatgtccagtttaatgatgtaacttgttttaatgaactagaaaccacccatccacatgtatatatataaacaattcatatgttatatggtacatatattcatatgcattacatatataatattcatatatcatggtacatatattattcagataatatatggtacatatataatttttaaagataatttattcctacattaacaatgaaatcattctcagatgaagttttaatttttcagcattactat

SEQ ID NO: 93817 - DNA, 1022 bp, Homo sapiens
ccaccgcacctggcctgaagaagttttttggtgttgatttgcttaattttatttttaagaaagttaagttttacaaactcttctagtcttatttagtatacaggcagtccttgatgtgcatggtagtatgggactgtaaaaatgactgcataagctaaaattctgcaaagtaatcttaataatcaggaaaaattataattgtttcatgacttttaaaattttttgttaaagcataaactctgttactgtcagttgtaattgtagaaatgtgaaaaaatagtaaaactattatttacagtgtattataaatattagaatcatcgagagttaatgtgtttcatttctttgttaatgaacttttcatgcactttttttacttatctagtagtctgcttattgagtagtttgccttttcatcatgtgtctgtgacacagagcaagtatcttttctatgccttggcaaattgtcatattgctttctaattttctttctaatcatgatcatgatgtgcatctgttatttacgtagtaatttgtgaactgaaaggctaccaataaagtttatactttatgcaatttcaattaatatacagtggtaactgttatttgaaccatgatgtagggaactagtgttatttaactaaattatggtaactgaaattggtgcataacaaagctgtaaaacaaggactgcctatatccttttcagtgcactaaatgctacatgattgtttcttacctcaccctatgtacttgtcatgtctttttaaaaatgtactcaaagaacagaaataataaaccaaatagagaagcaatctgtggaatgaagattcttctaaaactttctcatatagcagggaaagaaactcatctttcttatccagacattgttttggtattataattataaattgttacaaatctctatggtaagtaggtaaaataaaggaatttaattattccaggggtaggatgaggggaagctgttacattccctctcacagtagcttagaataatgttt

SEQ ID NO: 93818 - DNA, 1731 bp, Homo sapiens
taatgatttgttgatttttcagagcattatttctaatgacaaaaagcaattttcagcctcctaaactaaaggataaaatgaaatggtaagtatttttatgttatttacttttatggtgagatgagcaaaaaatgaattggaatgtaaaagtctaattttctaaatttcttaggtcaaatagttttcatcactttgtgaaaatggcacttaccaaaaatccgaaaaaaagacctactgctgaaaaattattacaggtattatttttgccctgaaatatatatatatatttcaaaagataaaatgttattcaatcagatttatagtaagtgttctgcattgtatttaatttttatagcatccttttgtaacacaacatttgacacggtctttggcaatcgagctgttggataaagtaaataatccagatcattccacttaccatgatttcgatgatgatgatcctgaggtaggaattgcttttaccagcgggcatatataacatgtatatgtgtatgtatatatgtgtgtctgtatgtacgtctcaaaatccatttttttaattttggggcctagtttaaataaaaaagctcttgagggaacaattaattctttgtctttgcctttcatggaaagtcaaatgctaggtttttcttactgactacttataggtgactatagtgtgaaaatggcaaaggcatatcatttaatccacttgttgaaatcactgtagttatttcaaaatagccatttttggtgaagttgccaaataatcattcactgtaaaagggaaagcaaatgggaagtgcctaaacaagacatttgaatattcaaaatttcccctcagtttgcttctcaaaaagaatcctcagtttggcctggtggctcatgtctgtaatcccatcactttgggaggctgaagcaagaggattacttgaggccaggagtttgaaacctgcctggtcaacatagcaagaccccgtttctatctttaaaaaaaaattcttatataatacttcataaattattagaggttagtaggaagtataggcttgactttgccagtgactaaaactcagctattcactatggaaatgttttaaaatgagccagtatagttgttaataaaataattctaatatgacagaagcattgatattaatggaagcttcacttctgtttgcatatgtaacattcctagcactgctaatagttgtggcaaccaagataaattcagtatatgtgacatggcagaattctgttattgggtctgtaacagaagtggataggctttaactctactggctttatgggaggcccttaaaaatattgtaaatttcattaatgactgaaggtgaagtgtttagaaagacggccacagattgtcttaagtcagagagaacctttctatcaattcagcattgtcccagcttgccatcttatgatagataagctatttgtccttttgtttaagggtctggaaaagagtttggagcttaaaaatgtaaggaatgtaaagtataattaatcttataattatactctgaagaagttttttttgttttgtttttgtttttttttgagatgagtcttactctattacccaggctggagtgcaatggcatgctctcagctcactgcagcctctgcctcctgggttcaaacgattctcctgcctcagcctcctgagtagctgggattacaggagcccaccaccatgcccagctaattttt

SEQ ID NO: 93819 - DNA, 1100 bp, Homo sapiens
aaggagggaggagagaaaggccataatgtacaagtgatgtgattataagctataacttaggaaagttagtctgagctgaagaaaggccaaactgaagcctctgacagaagtcttagatagctaggtactagatcaagttaaaatccctgctcctagtctctttcctttttctccttcccctactattccacagagctacagtagtatcagtgggtgggtgcagctcagcttcactggtgacatttggagtttaggagcctttttttttctccccaaccccctgtctcctgtgccagtcttttactgttttttcctcatgttggttgagagtaggagggttcccagtattttttccaccaaacccatacttacatgattgatggcaccttggaccaaagagcccacaatacctttgggatatagtattgctatctcttccaaaagctttgagcttattgaagatgaagtcatcattatctactttgagcttagatcaagaagcaaaagtggctaaaatgcaaccagatcatgcagaggggtgacattttaattttgtgggcctgtggctagttgtttatgtactggatgggcctaagcacttggtaaggcacattaggatagacaacctcatgtactaagcagcaaggtacagtctcacataccaaccctggttcaattgatggtgagttcctagaaagggaggttcttttaaaaacacacacacacacacacacacacacacacacacacacaaaaatgggaaacaataatcaagtttaaagtgtaatgtaaacagttgaaaatgcattgtacggttacattatagtgtggtgatagtgtttgatcaatgaggaaataacattttgatgaaaactaatatatcacttttatattaacattcatactatgttagtagcagcttttttgcaaggcagaacattttataaagatagtcaagttgcctaaaaagtggacagtagatttacctatgactctaatgatacgacattttaattaagcacactttaagtatttctaggtctaaggctgtgattattttaaatatgtatatttattatatatgtgctgtctgataaaat

SEQ ID NO: 93820 - DNA, 1267 bp, Homo sapiens
tattaattgtcttcttttacagtaactggacctctgtcagaactgcaaattgcatatgttagcagagaaacactgcaggtaaatcaagtgctaattcaaaaataacatttttcattaaactaaggctttacttactgtgcattacctgttcagcaaagtaagaactaaatattttagtttggtaaactcttaaaatgagttttaatacatttgaaaattgtgtaatgaactcaaattatatttacaaataaatactttaaagcataaatgtgatgatataacctaaaatttaagcactatgcatctgttattgtatattttcctcttaataccaaagaaaggcttgaaaattaagcactatcatgggaattcaaacactctgatactaattaggtatatactttttaaaagttatttcaaactatttgtagaattcactgaaaattttcttagaaaaattagtcattttcttgatctttttttaggatatctcattaaaatatgttaatgattagtactagatctcctgtaaagattaaataaaatacacagaatactacccatttgattacataaaatccaaaagagtgctctttgataaaatcttgtttatttttctgttttttgaaactccagggattatattatcttcacagtaaaggaaaaatgcacagagatataaaggtatacattatatttttaacataataaccctctcttcatttttaaatactctgatcaaattgttttgagcaaaattgttttatttgataaatgcatctgaaatgttaccataataaaaatgagtgatacttttaatagtttaattttttatagcagctttattgaggcacaattcacataccataaaattcacccttttaaagtatatcattcagtagattaatgttttaataactcattttagcttctttgtagttattgattagtaaaatgcagagtaagcttatagctttcatcaagttatagtttttagtaagttttatgctttgactatttcagtgagctttcgcagtcttaagtctaagtcttagtaatgcatcaaaatggataaattgacctttgacactttctcatagtcttttttttttttttttttttttttttttttgagatggagtctcgctctgttgcccaggctagagtgcagtggcacgatgtcggctcactgcaacctcccctcccgggttcaagtgattcccctgcctcagcctcccgagtagctgggattacagccacctgccac

SEQ ID NO: 93821 - DNA, 1047 bp, Homo sapiens
gtagcaaaatgccaaggccagaaatgtcagggcttaccacaatgaccttatacttatgatttgagcagtaattggggaagccttctgttttttactttgctactaatttacatttaatcaggctattcatagtatataatactttaaaagctgaattagtaatacaaagctacttttctttcagagtaagcacttccatttgttctctttctgcatagtctctggttcaccacatttgcattcactgcagttctgtttctctccatgacaagtgttcattcaggagccacagcatgtgacactgctataggattgccagatcttattttagagaatttggacaaggaggcagtaggagagagattatttgctaatagtctgaccaggctaaaatacagtcccattctgcattataacacagttggaacaaggcactcaaatacaggataagcctgtgaatgtgggccatctggtaatccagtactgcttgagtgtaggcctctcagctctacaaacagcctgtggagataaatttgacacacttggtgtataagggttcctgccctaacttagaaaagaattacttctttgtgctaaaattatattaaatgttacttggaaataaaggaaaaagtaatttacatttcctattgatggattataccgatgattatgtccaaggcataataataatagcaaatacttgtataaagcatactccatgccaggcactgttctaagcattttacatgtattggttcatttaacccttacaacattcctatgagataggctattattattttactgaggatggaattggcacagagaagtcaaataatttacccaaactcacaccgcttagtgtggaacagagttaggattttaatccagaaagtctgggaccagagttcatgcttttaagcactatgctatattttctctcaagtcaggactgaaattgtcattaaaagtaataccattaacttattggctatgttttatttataactcattaattatgttatacttattaatacgtataat

SEQ ID NO: 93822 - DNA, 1054 bp, Homo sapiens
tcagatttttgaattagggaaattcaacgtgtattggcaagagttaaacattccactctttcctggagaacctaagtcactttgacatagagaagcagtcttgatttacatcccagatggcagagcttcaggtaagagacagtgttcacatccatcgtaactttgttgcttataaggacaaagaaccttgggttcattttataatccaatcctgaagtctgcccctttacatacagctctcctttgctctaagcctatcaaaacaccacttcatttaaatttcacctcacttccattttattcaaaatattacaaaaactcttatcttttcttttggtgagatgccctaagatttctctggcgtgtagttttcctcattgcaatgggtcagtaaacctgaatttgtcagatgacgggtttgttcctgtggtctgtggctgatccggctagaacactgccaattcttgagacttatttgggaaaaaaaaattaaaaatggatcaagatgagagctatggcagagcttgctagtagaatagaatttatatatatattctttggggctttattttcaagttctgataaggtgttattatataaataagttatagatctggaatctttttgtgatttaaagtcagaatttaaaagttacttatactcatttgtggtattgtttgcagcactagttattataatatgatacaaatgcagatagataacagtgattcattaggtagcaactcataggaaaaactcttctaaatggggaaactcattccttttccaacacaatgaaaactactgaggttgataaacagagaaacttgtagtgagaaaatagggtattatgctttgtttccgtgagagcaacatgcgttaaattgtaaagctaaattttaaaagtgcaaaaaagtaccaataagaccttattccactattttttcatggacctccaaagttaaatgttatggaatattctctcctgccagcctttgacattagttttttctttcctgagaggtagtagaggtgctttctgcctccttatctt

SEQ ID NO: 93823 - DNA, 1165 bp, Homo sapiens
aaacttagaaatcttagaaaaaaaaatcataggaaaaaagtatttgtgaccttgggttaggcaaatggtttcttagctgcaacactaaaaacacaagaaacaaaaattagttaagttggacatcatcaaaatgaaaaggttttgtgtttcaaaggatacccataagaaaatgaaagcatgtagaatgggagaaaatacttgcaaatcatgtgactgataagggatttatatccagaatatatgtgaagaactcttacaattaacaatttaaaaagaatttaaaatggacaaagaattgaatagacagttctccaaagaagatattcaaatggaaaattgaaaacaggtccacacaaaaatgtgtacactgatgtttatagcaccattattcataacagctaaaaagtagaaacagcccaaatatggtatttccatacaatggaatactatttggcagtaacacataaatgagtttgagacatggatgagtctgaaagcattacaccaagtgcaagaaaccagagtcacaaaggaccatgtgttatttgatcccatttacatgaaatatttataatagtcaaatccatagagatggaaagtagattagtggttgccagggattgagagtcagaggaatatggagtgactgcgaatgggtctggggtttctttttgaggtgatgaaagtgttctaaaattagttagtatagttacataactctgaatatactaaacacaactgaatcatacaccatgaaagggtgtacttcatggtatgtggattctatcccaataaagctgttataaaaagtgctgtatttagtgaaagctttaaatactctgacagggaatttggatttttgtctttaaagcaatgatgtgttgtacccttgcagagttataagtcaagaacagcatgatgagaacatcattgtgggagcatttgaagaatggtggtcagatcagtgttgcagcagactagatctagctgcttagaatattttatcctgttttctgcccttcacaagtatgaacattttatgttacatattctgaattcaaaatttttaactttatacgtgctaatattttataatttctatcttgctctcctttttaaaaaataaactgctcaaggtgattgaaaaaaagaatagcagttgcag

SEQ ID NO: 93824 - DNA, 1076 bp, Homo sapiens
tttatatctagtctaacttatttccaaaagtgaaatcttggaaggtgtttacgcacattggggtctgagcacctttgggctagaaatgctgctgctattgcttctatagtgcaaagttggaattggttacctgatctcttatgctttcccaaactcagtgctactgttaagttttatccatattattagtgtggtctgccagttaccatttagaagtgttattgatatggaacaggtccatttttgaattccaaaattcagaattaaactttgaaatacaaattactgatatgttggaactgtctgtactcttttatcactcacagattattttccatgtctatatccaattattatctgctaagtgcattttttgaaagttaatgatagcctcaatctgtttttaaaatttttttttattaggaccaggtagtcctagaaatgtagatctttaattatctggttttaagaaacaaagagccattcaagttaacttaagaaaagagaggctattgtaaagatacatgatacacggaactggaagcttgtcaggaactcaaggcagcttggagatctgctcttttcttatggtcttgtaattttttctgtccatctgttgggttatttgctctttattgattgtctcttcattgcgtcttttctatttcttcaaaacttcactttatgcccaaagtcctgcatgctgtgacactggcacatagcatggtttcacagtgagttacattgcatggtggtgctatttctcagtatttccagtttcaaacattttagagttgtgctgtctaatgcagttatcactagccacgtgtgacttttaaaatcaaaattgaaattacgtataggatctgtatgctgataactgcaaagcactgatgaaagatatcaatatctaaataaacagagacacctgccagtagtgttcatggattggaagactccacatagtaaatatgtcagttctttccaaattgatctatagatttaatgtacttccaaataaaagtcccaacagcagatttttttttttaaacagacaagctggctcaaatttatat

SEQ ID NO: 93825 - DNA, 1101 bp, Homo sapiens
aagggtatagctgctttctgctactgtattttggccatatacctttcttttggaagctgaaaattactgtattactcattagttaaagaggaaattacagtgaaaattatacaatatctattttgatgaaaaacaattaaagctatagatataaataaagcaggacttccagtcataatttataataataaattcacttattaaaaaataaaaaataaaatgattagatatgaacaccaaggaattaaaaaaagagcagagtaaactcataggcactggaaatgtaaataataaggaggaacaggaactaaatgaaggggaagaaagagaggggggaacaataaaacctaagctcaacatttgacaagatatgtaaaaaagaaaaacctggtaagaacacccaagaaataaaagagaaggcataaatattatttgttaattattgttgcaaatataaagagcatacctactaatttagcagtactttaaaatattatgagcaacttatgctaataaatgtgaaagcttcgatgcaaggatggtagagtcaagactggagactgtagtattccagagaagagattatggtggcctgaactctagggcactagtaatagaaacagagaagttaaaaacatacaacagacatttataattctgtgaatggagggatggggagggttaaggtgttgggttatagcgttctcccttgggcagttgcgagatgttgggtggtatcactacacctaaagtatagcagggtttttggggggattaatttgaggtacatggatgtcggtagcattgtctagttggttatatgggtctgagctttgagcttactgaagtctggggaaattgtcttataaacttaccaacttgtttttctttttgtgagcatgcctttaaatgtttccagaaatataaaatatcctctttttaaaccacattaaaccctcccccatataaatattatgtacctggctagatcttagttagatatgagaacaaagatcctacttacagcagtctcttgtaataaacactaaaatgtatgcttgtaacaggagcccttaactttttggcatagtttctgtgtaa

SEQ ID NO: 93826 - DNA, 1069 bp, Homo sapiens
ttttgttcttttaaacagtttctcaaaggtgtatttaatgctaatgtagattatatggtgaagatatgtttctttgaaaagatgacatacaaaaacaattctaggatatcagtagcaaaaactatgacatatgtgcctttgatgtcattgtaccgtatatccttttgtatagctaaaatggctattctgtgcattttggtttaattgctatagtgaaaattacatttttgaagagctagaaaagcttttcaaaacttggaaatgttgttatccttcatattatgaaaagtactagttttagtcttccaccatgcaaagacctttttaaaaatgatcttttaaatattattttcatgataaataatttaccatttgtctgtggaagagaaatactgctttctgcacacacttgtgtatgtgttccaaaatcatgtaataagatttttggctgttagagtgacatgtgactgtaatggttttcagtagagtttgttattataatgtattagcaaagaaccaacatttataaagatagaaagctttacaagaaatgctaagatcttcataatattaccagttgctttgttatgattttattgctctaattttctaggattgtaaaattatgtctaattattgacatgggtacaggatgttgcgtgaatacagggaactccaaattcttgattgtggctatttgtggtatgtcctgccaatctataaagggttcagctgcctcttatgtgtagatgatgcagtggcctgttgctgaactagaaatcagctgttgctttaaatgacagattagcagctccctcctccacaatcccaaactaccatacccagacctaggtgtaagtagaaactaaaaagagattaaccaaagttacttcttcgctgtagtcagaaaaacgtaaaggatattgaaaaagcaaatgttgggcataatcatatgtagcattttatgtttcagtttgtggtaagaagtttttcaaagtaccttaacaatggaaatacctttctgctattttcattccatcattggaattagcacttagaaactatccct

SEQ ID NO: 93827 - DNA, 1975 bp, Homo sapiens
aggggacagtggttagaaaagagtaaatttctttaaatagtcaaacttgcagaaatggaactgtatactcactaaaggaaaataatgcttgctttcttctggttgaagagattgtgtctgtgaggaaaatagttcatgcttttaaaaatcttctggaataaaacatggccagcttttttttctgccctccttaaaccaatccatgatgattgccagattattttttccttctggtagaagcatgtggttctcaccctcttcacatatgtctcttgcacagaggggaaaggagtgggtcagaattgcagttagcaaaggcgttttattggctgccgatcaagtcaagaaccaaattagttgaaggaatttctttattaacatgccagaaacatcttatctatttggttttaccagagcctgtttagcatttggtttcattggtaagctcatgtagaaggcttagttattctgaagttttgttttcaaacaggacagccctcccaactccaccctcccagcatctgactgaaaatttttgacagtttaattgagatataattcatataccatacaatttaccatataattgaatgagttacccagttagtatgacttaaatttgagtcctaaaatcagaaacaagatagtgatagagggaatttattcttccaaatgttatttttatatatatatatatatatatatatttttttttttttttttttttttttttttgagacagagccttgctctctcgcccagactggagtgcaatggtgcgatctcgactcactgcaacctccacctcctaggttcaaacaattctccttcctcagcctcccaagtagctgggattacaggctcccaccaccatgcctggctaatattttgtatttttggtagagatggggtttcaccacgttggccaggctggtctcgaactcctgacctcaggtgatccacccacctcggccttccaaagtgctgtgattataggcgtgagccaccgtgcctggcctataattatttttatattaagtaccattaatgaacaccaaaagtgactattaatgcctgacattaatttataaggattggagagacataaataccacaggaacttgataaagtggcacagtgtgattgatcctcattgaagtaatacgtacggttatcttttcaccataatttcactttcctttcttttaattgactgtctcctttttcccactcaaatttaagggcatttaattccgtaagtctgtttctaagtaataattaaattgaaactagattgtacttacttacttgtgcaccaataagtgcaaaaggattttgcactgagaattcccattattttagtgcagaacttgtcaaattttcctttgttgcttaaacaaagtcatatcagtaagcataaaacatctgaaggaaattttaatacttctgatgcttgttcagttgtagtacatacttttaaaatgaagcccattcatttggaactgtttttgagagctataacatttaaataacatctaggagaagtttggacttttacaagtgtaggctgtcattttgcagaaaagaaaatctggttgtgaaccaaacccaacttagggatttggctcatggaattgcttataacctcttgaacttttcagttctctaaaaaattgttggtgataatatttaagattctctatgaagttggtggtttaattttggataaatgaattcccattttttacataatacttggctttcatacaaggttcaaagtattagattggtacatactcttttttttttttgagttggagtctcactgtgttgcccaggctggagtgcagtggcgtcatctcagctcactgcaacctctgactcccaggttcaagtgattctcctgccccagcaccccccgagtagctgggactacatgcatgtgccaccacgcccagctaattttttgtatttt

SEQ ID NO: 93828 - DNA, 1884 bp, Homo sapiens
ggcagcagagcgagactccgtctcaaaaaaaaaaattgatgaaccaatactgatacattattattatgttaattaaagttcatagtttacatacattaggcatcactctgtgttgcacattttctgtgcttttgacaaatgtttccatcagtatagtatcatacagaatagtttcactgccttaaaaattccattttctatctattcatcttccattctcctctgcccaactccaggcagccactgatctttttactgtctctatagttttgtcttttccagaatgtcatataattggaatcatacaatatgtagccttttcagactgtcttctttcccttagcaatatgcatttaagtttcttccataactttttgtggctcaatacctcattttttaaaaattactgaataatatctcattgtatgtttataccacagtttattcattcacctattgaagaacatcttggttgtttgcaggttttggcaattatgaataaagcagctataaatatccatgtgtaggtttttatatggacataaattttcagctcatttgggcaaataccaaagagtgtgattgctggattgtgtggtaagactgcttttagctctataagaaactgccaaaatgcctcccaaagtgactgtagcactttgcatttctaacagcaatgaatgagagttcctgttgctccacatccccaccagcatttggtggtgtagtgttttgaattttggctattctaataggtgtgtagtgctaccgcattgttttaatttgctgtccctaatggtatatgatgttggtcatcttttcctatgcatatttgctatctgtatatattttttggtaaggtgtctgttaagattttttccctttttaaaataggatttttttttattgttgaatttaaagagttctttgtatattttggatacatgtcctctatcagatatatgttatgcagtattttttcccagtgtgtggcttgtcttttcattctcttaacaatgtcttttgcagagcagaagtttttaattttaatgatgtccagcttatcagttttttctttcatgagtcatgcctttggtgttgtatctaaaaactcaatgctagaccatggtcacttagattttcttgtatgttatcttctagaagttttatgttttgcattttacatttatgtctgtgatccattttgaggtaatttttgtaaaagatgtgaggtccatgtctagatttttatattttattttattttgttttgcacgtcaatgtacagttgttccagtactatttgttgaaaagaccgtccttttcccattggatcacctttgcttctttgtgaaagattagttgaatatatttgtgtgggtctgtttctggactcttgtgttaatttgctatagcttctattagaaagtaccacagactaggtggcttatacagtggaaatttattttctcagttctggaggctagaagtctgagatcaaggtctcaatagatttggttcttctgaggcctcactctttggcttatagttggctgttttctcctggtgtctatacatggtctttcctctgtttccaaacatgaggagtttgggattgtaatttggagtcagatatatagcagagaactaggggagataaggactgggagaagactattgagtctagttaggagggtataattgctgttcagaaagagtagttggtaaagcatcctaattagaaatgattgagaaggcaggaggaaatggtgacattgtctgtggtctcttttcaaggagtttgatcatgctgctttcttctagtaccatagcatttctatcttagtgtttttctcaggagtatttattgagcacccatgctga

SEQ ID NO: 93829 - DNA, 1030 bp, Homo sapiens
ttgtagatggccttcttacagagagagagggcatactttctggtgtctcttctcataagggcacttatcccatcctgaggccttccctacctcaggaactcatctaaacccagttatctccaaaaagccccatctccagatgctgccacattgagggttaggtcttcaacatgtggattttagagggacacagttcagtccgtagcagattgcattgctttttacattttattaattatattcctagatatgtgttattctttttcaagtctttgtattcttgttgcatacttaattgttcttagtgctttcggattagtctataatttcaaattttgggggatttcatcttgcagtttgttgctttgttttatgctgactcatgcctgtgaatttctatgttaattttgaattcatctactttttttctgtaagaatctttgtggtttaaattgacagctgagtggaggggctgggggggtggtggggagtgggtgggagactgtggctgtccttccaaaacagttttgcttttgtttcttccagtaacctcatgagtctttttggtcttggatttttattttaatttctcagtttgggattccccacatcttatagataatacaaacttgaaccccaaatcaaaagagcaatgactcttggatttgaattcttggaggactgtttttcttctacccaaacacagactttgttgttatcctcttgtgcttgtaggtaacttttttttttttttttttttttttgagtcaggttataactctgtcacccaggctggtgtgcactggcacaatcaaggctcactgcagcctcaacctcctgggctcaagtgattctctcacctcagcttcccaaggtagctgggactacaggtgtccaccaccttgcccacctaatatttgtattttttgtatagacaaggtctcactatgttgccttggctggtatcaaactcctgggctcaggcaatcctcccacctcaacctcctaaagtgctgggattacaggcttg

SEQ ID NO: 93830 - DNA, 1640 bp, Homo sapiens
tgatctcagctcactgcaacctctgccttccgggttcaagcacttctcctgcctcagcctcccgagtagctgggattacaggcacccgtcaccacgcccagctaattttttgtattattttagtagagatggagtttcgccatgttggccaggctggtctcgaactcctgacctcaggtgatcacctgcctcagcctcccaaagtgctgggattacaggcgtgagccactgtgccggccccaaagattataacaaataccttataaaacttggtttacttttatatatgagatgtgtgtgtttctgtgtattttgcaaaactcacagcttttgagcttattaaaggaaaatacacttaaagtttacttcatccttaagtgaaaaataacactgctaggttgtttaggagatcctaaagaaaattcttaccctgaggaacttaaaccctgatataaggaaacaaaatctgcatgtatggaacatctaaggaacatgcctaaggcactattttaacaattagaagaaaacaataaaactatataaatactgtaggaattttaatttaagggaaaaataagttgacttcctgaaagagtgaatcttgacctgggacttgaagaaaaattgtatttgcgattgtggagaactgtgaagtcataccaaaagagtaaatatgggttaaaaatactgctgtagaacctaagtgggcaaagaagtaataagacaactattctaaggagacatattgggaaatgtggtagataatgtttcacatatataagatacagataaatgaatgccagttgaagaatttagaactcacttgacctacaatgtagtatttttcaaattcattagggccactcttttctctaacgtgcttgggtagctatttagatggtattcaataagttttatttcttccctttcatctctattgatttagaagttaaaagattttacttttatgcttttggtggttaccgttaaatttgcaacttgtgtaattagtctgaagttaactgatctttctctgttctctttctggtcagtatgtggattttagaaggcttaatttcattcactaccttactgttttgtgttgtctcttactttggttctactgttcttaaatgtcccagtttagtttttattattgttttatacagacagtgcttctttacatttacgtgtaggagttttcaatttctttgctcactgtttcttcttggccttatattccttcattctgggttcagatttctttaatcttgaagctgtatttggtaggattttttttctttcttttaacttttctttttaagtgaggaactgtataaggtaaactcagtcttcctcctccccctcctcattgtctttattttgtctttacttttaaatcatagtttagtggggtatagaactctaaattaacggttgtttttttctcagcactttgaagatcttttgttgtcttctggttacctgttgtgctgtggagaagtctgttgtcaatataattattgttgcttttagctaatcttactttttctttcctccctgtttgacttttaagatttttttctttgattctggtgtgtacagtttcacagtgttatgtgtggattttaataaaaata

SEQ ID NO: 93831 - DNA, 2173 bp, Homo sapiens
tatttattggtgaaacgtatctaatgcatcattttgtattaagaatgaatagtaagttctctcatgagagtacattgaacagccatcatacattgaacagctgtaatatgagaggaaatgtgttatgaactgtgagtagagtagcagaaatgacaaggcttggtacttggtatttacaggaacataaaatgtgtacctgctattagctgtcatagtttgagatcagaaccttttggtttcctcatttatatcatattaaatctcttgctggctgagagactctctagatactccataattgcacaaccgacctctgtagcacagcatagtgatttgagaacagggttctggagccaggctgcctagtttcaccacccactagctttgtccttaggccaattacttaatccctctctgtgtgtctcagtttcctcagctgtaaaatggagatgcttagaaaagtgcttgggacagtacctgacacaaaaaagtgtggtcattgttaattgctgttagtgtctagaagtatttattattatgtatttctcctcctactgtccttctaaccaactgcattcctcatgctttgcctcagggtttttagcttgctgtctctgcctaaaatccacccctccccaccaatatctgtttggcttgcttcttcgtttaaagtctcagctcaaatgtcatcttttaatgagcctgctcctttccaccctacaaaaaacagcacttctcccaccactttcagggatacagttcagggatggatccaggttttacgggacctgaagttgatgcagttttggggaccctcattaagaaaacaaaactagaattaaaaaaggtatgaaagtgaatctttagaatgagaaaagatatcccaacaaaatactgtaaccttaggtccctttcttctgagacttccttaggcatttaatcacaaatgctcacaaaaaaatgctttctgatgactccctggctccctgtctccacctggaatactctacatgtcccagcaactctcagcactcatagaggaccatgcaagtgaaggggcctgaactttaagttttgttagcttcacaaaaaattcagttggactctttacttaatttttaattatggcatgtatcaccacatgtttatttgtttatagcctgtctcttcccactagagtataaatccaggaaactggtgattttgctttgttcattgctgtatccccagagcctagaagagtagctgacccatattaggttcttaataaatatttatggaatgaataaatgaaccaacacgagaggaacaaaccatggctacatgagtttagaggaaggagatcattatttctgactgggagaaatcacagcaggccttgcagaggaggtggcattgggcttgacttagagttctggcaatagtgggtacagaatgagttaaatgtaatgggttattattaggtcttaaatctaatcagtagggttaatgtatctttggcatattaagcaatgttcataattgttatatgcatatgaagatactccgtcattttgaactaaatacccctagtgactgactagtgaatacagcagtaggctatcacatatgacttttattttgttttttttaaaatacgattaaattgggcttttaggaagaggactttgttcaccaatacaaaaaaaaccttcgattcaagagatgaaatcatgtttcttttttaatttttatttattttttcataccacctttatatgtacaaaaatcatatttcttttctgctttaggttttttttagtctttttttgttctggaagatgccacatttctgagttctaactgccttgacctgattataggtttggtttcctaatgtaataatgtactgcctaccttagcccttaaactctatagaataattttagatttgaccataaatttacatatgttgaaataagacacttattttgtttgtttaagctcttagaaatttgagattgtaaaaattctttctgtataaaggatcatctaccttaccttgctcaaagaatctcctcttcatcgcctgtatgctaacctacatacaccatgatagtaaggcctccccagccatgtggaactgtgagtcaattaaacctctttcctttataaattacccagtcttgtgtat

SEQ ID NO: 93832 - DNA, 1563 bp, Homo sapiens
ccttggtgaacaaagggccgaatgtttaaccccgagacctccccagcccttacctgagcccccccggtggacatgatttttgccacctcccttcttgcgcgcatttccagggaagggcagaacgagagcaggccacactgctcatccatagtgcagagaaggtctgggcgtttgttgcgttggcagggtcagcgcgacgaaccggacagcaggggtctggtgttgtcaaacctgcctgcttcacgccaacctggggtcgtccgctctaggttgggagctgctgcccaccaggcctcggtggtagttattatactatgctgagcgacctccatcttccatcgacagctctcagcctttagcgccttattcatccccctgtcagtttcttttaattttccagagtaatgacttttttttttttttggaaagagcaactttgttttctctaagtcgaattggactgcgatgccatttaaacttgttttttaaaaagtgacttgaatacttagggaaggtactggtttgacaaggttagaattcaaagtccagtagcggtacagcattcctgttgtagagggaccacttctaaatgtgggaagataaatcactcttccctggccaactcaactcttggcctcacagttactgccaagaagagaggaggttgttgccaaatgtggcagcagtcttgatttagttgtgtatcttcttactggtaactgaagttgaactcctccagtttcacataacacctgaggatgcacaaagaaacttaattttgcattggaaagttcagtcttaactttattttgcccatgtttaagcaggtttttactcttcagtgtaatgcctgtggtaacttacatatttaatacagtgcagccagtgttctgctttagtctgattttctggatgatctacttttcaccatcgtggatctcatcacttttcctactatgcaatatagatatattgagcccacctacaatgtatgagatacttggcaagtaagcactttgggttgtagcagtaaacgatagacttggttccaaatcttcctaagtgtttctatttttttggacaaggacagtattaaatagccatttaaataattattgccgtttaattttgtgatgcagaaaagagtattaggatcagggttatgagagcatgtaataggaggacctgatcctgtttagggtatcagacgctcatcgcctttcagctgagatctcagagatgattaggcgttgcttagggtactggggagaggggattacgccagataggggagcatgatatgtgaaggctctgaggcccgatgtgaaagaaggcctgtatagcctgagcagccagagcgggagggtggccctagatcttgcaggcctcttagttctcattaggagatcggacttgtttaggacaatggggaactattgcaggcttttaagcagaggagtgacattagatttaggtttttaaaagagctccctactacagcatgaagagtggaatggagcagttgggaggccactgtgatagtctaggtaagaataatggtgt

SEQ ID NO: 93833 - DNA, 1066 bp, Homo sapiens
tcctagtatgacaccctggtccagttactctctgatcctcagtatccttaaatataacatagacatattaataacacctacttcataaggctgtaggaaagatgaaataacattatgcacataaaggatttagttcaatgccctcaaatgttaccttgtagttttgatagtaggctaaagtcactctccattcaattagctaaaaagcctccctagtctgagtcacagaatgacgaaataaaaaacaaaatccattatgtcagtaattagtcttttgcggggggaagggggtctaaagtcacaaaaatcgagcattgcctttctctgtcctgagagccaaccaaaagccaaagtaatcaaggtttaagaagaaagacaaaaagcagagccatactgttgatctcctttcgtatgagggaagattggagtcgaataaatattgaatcacatattttgttttcatttttaaaagttagaactttactccaattcaataagaatggttagtgcccctttcaagttctaggaattatgataggaaataaagatgcaaaaagaagatatcctccttgctcttaagcaattgaaggtcttgaggctcccaaggagggaaagggcagggacctggccagggaatccttcccagaggagaaaaaggtattggtattgccaatgcactgcggaagtggaaaaaagaagaatggaagccactaattacttgcattatttaagtgactacagcaagatggtgctttgtctgaaattcactgctagtgtatttgttcattttgagctcgtcttagtccattcaggctgctataacagaatgccacaaactgggttgcttataaacaatggaaatttatttctcacagttctggaggctggaagtccaacatgagggtgccagtggttgagttctggtgagggccctctttcaggttgcagataccaacctctcactatcaccttacatggaagaaggggcaagctagctctctagggtctcttttataagggcactaatctcaatcataagagcttcacctatgaggtgaactaatga

SEQ ID NO: 93834 - DNA, 1056 bp, Homo sapiens
gctgaggaggatgtttctggcccacaactactccagccactgacttcaagatcaagtcagctgggtcctggaaaactcagtgtatccctaaggatttccatgaattgagaatctctaaatgaatgcttaagaggcatttgtgcacttactgattctaacccacacatacacaagcacatacacacaaacaaatatgcacacacaatacacatacacatacacacacagagatctcttctcaactcagggcagagatatagaaaaccctcagggagaaaccagtgcccttctattaggagatgacacatcaaacttcaacttcctaacaatagtgattattctgggatgctgggcaccccctagtgggagtaatggagagagaagacagactgttttggtgctgttctcagtaacccattccacccacaacttcctgccccttcgctgccttctctttccagcccatctcactgttcttggaatgattcattcttcccacgatgattgggccttttgccccataaaaccctccctctctttacagacataatggactaaaactaagcagaaggcaactcaggcagaacagcaggaaaaacttcctatggggagagcgattaaaatctgaaatgaccttacaaggcaaactaagtaagacctaactgcactgggcagaacaatagagaatatctcagaaagatattcttggagatgaagaggatgagggaaaagctatttccctgatttcatatattaatgcccccatccaacactctcagactgatttcatgacaatataaatgccctgtgctacatctaaccccttttaagaccaagagaacacccaacatttatacatttgaaataaacagatgaagcctgtcccagcagagtggcagctcatccatgaactgggcactatgtagtactgtgggacattctgaacatttgtgtactaatacccactcttttcaaggccactgccatagctccccacgacgggatgagtcctactatactgtaaacaataaagtgttttctgagtgtttacgttat

SEQ ID NO: 93835 - DNA, 1082 bp, Homo sapiens
cccaatctattctttccttttctgttttctaggaagaagaggatttatctgactcaactggagatggctcccttcccttatttattgttgcatcctgaagcttcccccatgctgggctcagtgtgaacaaacagcgcgggagaatgcaaccactgcagaggtacaagttcacagaggcagagccgcccctcgactgggccagaggcaaagacaaaccccaaactctttcttgtcattcattgaattttgctgaacctggaaaggaaataaattccaaaggcaggaagtgacccagagaccataacaatatgtgaaaagcttagccggtgcttccgcccctttgtttcaaactattctaatctgtgtcccaggaagcctagcccatggccagatggagatctgtttgcagatgcctcctggcatctgccactcccggctggtgacatttgcacatttcagaaggcaaacctgtcccaacatcttcaaacttccagagaggtgtagcaccaggaaagtccttgggtctctggctgtcagcaccaaccagctgatttgcttcatctgcagctgaactgctgctggactccagcctagaacactagtgcacaccgggtctgttcttgaagatttgcagattctgaaatcaaaatgccctgtgttgccagaaaaggctggctcccttgcctgcttcataatcccttctcaccaggctttcctaaagaaactcaatgagtcaggaaggaagaaaacatgtctgagggagatctggaggtgggccgttctctatcattgcttctgaaaattcccttctgttttgcaatgtgggtaatgtttagggatttgcttttagtttttctctgtttcttcctctgtcagctctcactttgagagacccttcatttaccactcatgaaattagctctgcaatcgcaggaggctctctgatggggaattagtcactgttgcaaaaaagtttagactttactttcatccccaggagcagggcaagaaattgttcccaccctgctctcagaaggaaccatcactcaactgctctgctctgctctggctctggggcctgt

SEQ ID NO: 93836 - DNA, 1712 bp, Homo sapiens
agggtagagtgtactgtgttactttctgataacgtaacttctgagaagaaaacattaagataaagcaatttagaattaatcagacacaataatttttagtgataatcattgtgttgattattgattatgtagccttttctctagtcttaggacttaatagatattcttaaccttccaaattctcttttaaaaatacaatgatagctatggatcctctccctcaaaaacaagtagatctaaacgtacagttttaaaatgggaaatgaaagttgtagaatataattttgtggaagatttttctaggcaatttagtggagctagcagctttctatacaagctatatatttagagaattgagttttctggctaatgtaaaattctgcttaacttacattttattgtatctgaaaaaccaattttcaacgaacagaatacaataactatcatttatcattagtgattgtgaaagcattttgggatcttgtaattactttaaaacaatattagcaaccctaaatgttaatctgttacgcaaaaataatcctgtgtacttcaattttctcattatttaagttgtaaatatttgaccctactgtaataggattctctgatttctatatttcagaattgccattgccttcagaaagtgttgatattattatttctgacattccatttgggaaaaagtttaagttaggaaaagacatcaaaagcattctacaagaaatggaaaggtaagttgttgaatttattttcataatttttttagctactgggcatttaaccgaaatacatcatagctcttcagttaaggtctgattgctttttagcaatttcccagagtttttgtagcttaattttctaaggttttaagtcagaagtttataattgaaataaatgttatccatatcatcttacactataaattttattcagaaaaatattaattttctattatgtactgagatttgaatgtatgaaatagtgacctatatttcagtcagtggtctgaagcaaaattttacatatttgcttccatccctcacaaaaaaaaaaaaaaacctgccttctctgtgttaatcccccacacttaacagatgagaatctggggcacagaaagattaactttcttatgatcactctgctactaaacaacagaacagaattctgttaaataaggaaccttccataacatagaatgggcaacaccttattatttattgttgtctttgtccattttctgttgctatgaaggaatactggaggctagagaatttgtaaagaaaagaggtttacttggctcatgattctgcagtctgtaaaagaagcacagtgccagcatctatctgctcagtttgtgatgagggccccaggctgcttctagtcatggcagaaggcaagcccggtgtgcagagatcacatggcaggagaggaagcaagagggagaagggggaggtgccaggctctttttaacaaccagctttccctggaactaatagagtgagaactcaattatcacccctcacagggagggcattaatctattcatgagatatctacccacataatccaaatacttcccattaggccccatctccaacactggggatcaaatttcaacatgaggtatagggggacaaacatccaaactatagcagctctgaaatgaaaatgtgaaagtattcatcttatggtttctaatgacctaaggg

SEQ ID NO: 93837 - DNA, 1033 bp, Homo sapiens
atttaactaatataactttatattaatgttttttaaaaggtatttgattatttaaaattattttaatgcttgctagaaacattcaagacgtcatgccatggcatttcaaataataattgatagtgtaccttgaagtttacaaataaaagatatgtatctgaaaattaagactgagaccttgaatgagcactagttgaaaatgaggttacaacagatgctctgtgtttagtcagtttgactacctcagtgtaggaaggaagcagtctcagtgatgagtgttggctaaaaagaacaatttaccgggacatgaaaagggagacatgaagacttgcacaacagatagcactggacaagagaagtgacagtggataacagaaactgcaacctggtgaccctaacaacagaagaaagtctgaaatgatgaaacaaagtagagagcaccatgaagttaaaggatcacataaaaatttgtcctaagttcctaaagacattgttcatatttgagttttactttctttaaaggaaaaaaccatttggatatcaatagccccatgaagcattaactgtatatagctgttgccactctgtacacatcacctactacagtatagcatagcagataagaactgtggacttgaattctatcttctccacaaattattataactctgcaagtttgggcaagttatcatatttctctgctataaaatcaggaaaataatagtacctactttatagcttcgtccttgggattaaatgagataacccacgtgaaaatctttcctgctgtttctaggatacagtaagcattgaataaatttcaacttttgaaacagttcaatccagtgttagcacagatctgtgataaatgcttgattagagttaggaaagagaaactaactctaattacggacctgtgagcagaaagataaaggattgtccctaagaggagacttgaaagcaataagaaagtgtatgccgcatggagaagagaaggaaagggtattacaggcaaggaatctctgtgcaaagg

SEQ ID NO: 93838 - DNA, 1998 bp, Homo sapiens
ctacgcccggctaattttttgtatttttagtagagacggggtttcaccgttttagccgggatggtctcgatctcctgacctcgtgatccgcccgcctcggcctcccaaagtgctgggattacaggcgtgagccaccgcgcccggccccctttccaattcttaatcatcttctctctggctttctcgtccccatctccctgagtccatctcattgtctcagaattgtttttctcatagattatctcataaataaatatagcaaattcaattcctatcagccatttaatgcaattaataatagctattatggatacaaataattaacacaaaattggcaacacaaaaatcacacgtagtaaaatttgtgactaaaaaattgacagaggaatcaaatctcaacaaatttccttctgcaaaattgataggaaaacatttatagtgggagaggctattcttaataacatttgatatatgaacatgtcgtatctttagaataaattgtcaatagaaaacaattctaataaatagttttgctaaaatgcataatatgtaaaattgggaagtttagctgtgatgtatcagttaatcaggtaattaaattgaccaaatggaatcactccaggtaagtcttttcttgatgaaattgatcaatattggaataattctgattaagctgttaatatttaaagttatcttggggtgcgagtatcagggaccagatattcttgaggttcataacagcatttaaaatattctgtaaaccttatcaggctacaaaagtaagattctagcttttaaaatttatgttggctactaattataatgtggggcgcttaaatactcttcatggcctaacagaagaaagaaaataaagaaagacagaaacttatagagaaaacagcacccttgctgccatatatttggcctaaacaaagttttctgttaccctgaaagtatttgcagcctctgatagtcctgtgtggcctcgcatcctatttgaggttaaaatgagggtggatttagaaaatcttctcaacgcaaaatactgaaaagcgtggtccacttatgataattcctagaatctctaggaagaaagttggttttgagttctttgtaacatgactctcctatataataaattgacctcagaatttttctatgaaatgtacttaaaatttagtttccttctgcttaagaaaaaaaaagattatagaacatttttctagatatgatgaataaggccttggagtttctttttaaaacatagatcatgtaagtttaaaatggaaatttcaaattgtcagtaatttggtaatgaagtttcttgttccattctaacttctgtgtttgttctttcagatctttatacatctaaatgacatttactctgtggtggggattcctgtgttcaggtagatattctaagcttccggtttgtcccataagacagatggttaaattaagaacttgtgttttttatttacagcatgaatgaagcattcatataacagagaaggctaaaggcaaagcatttgaattctttgcttaagacaataaagtattttcacggaacttagtggatatgatttgaactgaccagttagagctgggaaatatttggtcatggtaatctactgattacatgattaatactgaaaattatatctagttctattattaaatggttttcacagccctatacctatacctaaaaggcttctaggctgccctactccagtgcctttaatttgaacagttttgcctatatggtttttttaaattctttgacaattttaaagacagaaagggtggagaaaacgaaaagatggacatattttagcaattatattaagtataattattgatgatcaccaagacaaaagtaggaaacactagcaaaacaagcaaaatataaaatgtatatttttttaaatttataaagtagttaattttttttttaatactttgacccccaaaaagtgagcctaagtatctaaa

SEQ ID NO: 93839 - DNA, 1057 bp, Homo sapiens
gaggctggcgcccgattcttctgcactgcgggtcgcggcctggagccgttcgtaatgcgagaggtgcgggcgcggctggcggccacgcaggtgagttggcctcgctgcgcgcctggggaggtgggcggccctgtccctgccctgttgcccaccccagtcgtggacgcgggaaagcgtcgctggcgcccctctctgttccacgcgacggtcgccgacccccgaggttgactggcaggcgcttccgctccggccgagagaagccaccattcctttctttccttgtatagcaaatccagttcctcacttctcagggctcaagtttttaagagaggtgttgaggcaagttatttcctggattctttaaagtagtaagtagtgcctgtaattagaatctggcctgtcagagttagaacccttcgctctttaaatgcaaacataatctccaagttcagttacctgactttttgttagtttcttgacagtgattgtatttgactacataggattgttgtgagaattaaattatatagcgtatgcaaagtacactttaaacacgcagtaaatagcagccagaaaaataatatactcttgcaggcctcatagttatctgttattgatttctgtgaaatgaacaaggttttaagcatcggtttaggttttagaatgttgaaaactggtttcttgaaagtaggggatgaaggtataatagaaaaggtatcttgatggggtgtatgggacactgtgagtgatgtactcttggaaaaggagagcttcctaaatgaaattaacccctccaccctggcagctcctacagtgtgggaagcccacaaaaggagtttctgcagtgaaaggttggagtcgtgaagaattatgtcagttttgttagactacctgccacttgtgttttgggtcacagaatttaatagagtattgaatgtagctaatcttaaaaagcatcaatatataataactactgacatttattgaacatttaatatgtgtcaggcacatgttcttagatctttaccctatatttatttgcgtacttttcacaaca

SEQ ID NO: 93840 - DNA, 1028 bp, Homo sapiens
attaaacaactccccttttccccttctcccagcccctgataactaccattttgctttctattaattttactacttcagatacttcatatcatgcaatcatacttgcctttatgtgactactatgtttcacttagcacaatgtctccaaagttcaaccgtgtaccatgtgacagggatttcttccttttttaaggctgaataacattctgttatattggtgtgtgtgtgtgtatgtgtttgtgtgtgtgtgtgtgtgtgtgtgtatatcacattttctttagccagtcatctgtttatctgtttactgacacttgtttgctttcacctcttggctattgtggacagtgctgctatgaacatggatgagcaaatatttcttgaagacctttcttgtgaatattttggatatatgaatgctatatattgatttttttcaacttatggactaaaacagaacaagcctttactatagtaaatgcagtgatactcttcattaagcaaacaaaaaaaatcagagatttattctctgactcatcacaatattccttcagcatagattggtggaaagtattaccttccccattccctggataggaaaattggagcacaaatgttacttcacctggccaaccagccgtggagcctggccttgacttcagatctgctgatttctacttacgtgcagtaattgacattggggcttaattaagaaactgtgttccaaacgaaaagatttgccattatttgggcaaaggcttgttgactttggcacgagaaccaagtgtcacactttcctttggcaactgtgaatattcttgtccagttggtatatatttccaagaatgtttcccattggcctattttggattccatttataaaatgttaagggataataacatttaccaagtacatgtctgaaagtttgcactgaaatattccacgctatgcccccccccacaaccattcctttttttatttatccttaaatgcccttacaccttcagtattctcacagcccttttgttct

SEQ ID NO: 93841 - DNA, 1059 bp, Homo sapiens
gatgtctctgagcattgcttttacgtgaaacaaatggggtgagctgacaatggttagattgtaggcttagatcgaaatgcaggaccatgttgcttcctccatggctgacctctcagcactgcacacacagccttgagtaacagagggccttgggttcccacagctctgccacactgatcttatcagtccacctgggaagatattcccctcttctagcttactaatataccgtctgcccttagccttcaccttagatcgtgtgatggcccattttcctaccctcacttgtctgatagtgaaaagctgcagactttgatagctcaataacccatttagaagttttgaaattttctgacgtttatttattatacatccattatacaataaataagtaatcatgtttattatatatttaataatagaactattaaaatggcctggggaatcttctagcatcttggaaaaataactctgcattcatgaagaattacaaagtctaggaatccacaaagctccaagaacagtgatacattctattatttttacactgcctaacaaaaagaaaatgttctatagggagatcatattttgcataatctttggcatatatgtttaaatttttgagaaaatgcggaatttaaaacgcggagcctgtgtccatgtgcatttgaatgtgtgtatattttataaaggtgactgacaacaaatgaatccaatattaactgcatttttccactagtggaaacaatttgggagttcagtgctatagaaagaggatgttgtatgtatagaatacagtgatggaagacatattacataaaatgattttgtgaagattatagtagtctttgaagattcagctaacagatttttcaaagtcatgctaatcattttcaaaacagcaaatttatggaaatgtaagttagatttcagttagttactaacctgatttcaggtcaaagcttattcataccatcagaataatttacagctggagtgttgcatggattgcccggaataggaggacaagggaagaaagaatagccaaggaaaaaaata

SEQ ID NO: 93842 - DNA, 1022 bp, Homo sapiens
gggcaaccaggtgttgcagtatacttagcaattcacatattaataaaataccctaagatattttccagatatagttttttgattttatttttgcttttctatgcttacatatgagatatctggggtcctaggtattctgaagccttgtggtgacccttgaaaccaaggccacaccatttttccatgacaaatttcctgagataaagatgggcttaggaggatcgctaaacttggaaatttgagctctctgtcccctaccagctttgtgcctttcagccagttactgaggttctgagtcaactttctcacctgtaaaatgaggaagatggtcatggtgctgttggtgatggtgattttggatatattggtaatggtggtagtgatggttgtggttggaatggtggtggttctagatatgttggaggtggtagtgatggtgatgctgatggtgttggtggtgatagtgttggagatgatggcggtagtggtgattatttttggtgttggtggtggtggtggtgatgatggtgatggcactaagatttattaaacaacaagtttcatgctattcttaaagtatccgtatgacttaatctttgcaactatatcaagtagctactcttattagactcattttacagatgaagaagttgaagcttagagatttaactttctctgggtcacacagctaataaagggtggatccagaattcagcagcactgcttgactgtaattcccatagagtcttattcagggctgtttcttcctttgaatggctttcatacacaaggaggaatatgtatcaggctgtggtgcagtgacagtaacctcaacacatgctcaagctgctcagaagatgagaaactagagcagtcatttatcttttctgggattctagaacgtgtattaaccacattgcaccccgtgccccactctccattaacctagaaggccatgaatagctgagtttgagaggcaagggaatgcttaatgttttagtccctccgtgtagctgacctac

SEQ ID NO: 93843 - DNA, 1071 bp, Homo sapiens
atttttctctttgttaactagtccttgggtctctaggaatggttctgctttactttaatcctatggatattgagcagcttttgaggagtccttagccattgacaattagctattgtcacatcattttctcaagagttattgctctgtcaccatcttgtaaaatctgaatggattttacactaagttgtgaaatgggaagaggttttctttgctttctttccttaggacaccattaaccaagggaaggagatttaagtatacttaattcttttgagtagagcaaccttgagggtctaagacatacaaggggttatttgctgttattttgcttctctgtcagctaacaaagctgagatgtggaaaattgcctataggcaacattgtaatatcatgggaactattgaggttttcctataaaatatcttcatcatatttcctccatggctgaaatctgaccattggagatttactgtttggggtagaacatcgattagtcccttattacagtataaatgccatgaaactcagaagtttagccttgcaacagtagagttaaatggctctgggccaggtggcaggaaagggtgagaagatagctgaatgtactgtgggtaagtggcatatgagataatcttcgtaactgccttgggtgagcccgctgagggtcccagtggaaggtgctgagtgggcaggcaggactcaagctgctgtcttcccatagtgccttgcagttcctgccctggatttctggtgggaagtccagaaggccctgggagggaaagcagcaattaacaatatgggaagcattagaggaaatctcctccattgcctcctctcctggctcgacatgctgcctacataatacccatgtatttgccaaaggttgagccaagccagggccctttcttttcacagacttatacagctgtttcactatagagccaggctaaataaacaattctttttcatttcctgcctttctcctgaggacttggtgctgtagatgacagtttctttctttcctatagtgtcttcacagggctaaatatgggaataggcattgtgttcttt

SEQ ID NO: 93844 - DNA, 1037 bp, Homo sapiens
atccaagacgatttcaggtgggaagaattaggagattcgtggcttagtacaaaaatgtctgtttttctttttctccccccaactctttggtcacttaaacacacatggagttggttttgctcaaaagcacactgtcatatgagacttcccttttaacagttaaaagggaacatgttcattttctccacgtgctaaatgggcttaaaatacacacatgcgtgcacacacacacacacacacacaaactagaaagtgggtagcttgggaatcatgtttcaagagggtctgcctgcacatctgtgaaataagatgagagaatacgaatgggcctgaatctcccaaattctatggcacggtaattccctgtcatttatagtctttcactagcttccttggtgagctagcaggaggggagaggaggattattcattaaaatcctttacttttgtttcagtcttttttttttttttctgtctacagaaggtgtcccccttgtggttatagaaaaagctggactggcagtttatctcatcttgtgaaatttcacacatggacaaagacttttagtattctgtctatccaccttttagtagctcttgcttctaaaagggtaaacttttactcagatactcatttctatctgaaagttaatgctaaactcaaagccagatattcagtcagctggctttaaactttttaaccccacttatgattatttttaaaattctctttccctgtggctggtagtatcgtttttccatgaagtggtatcagagattaaatggtgttatctgtccatgaacaatttacttactggagcatgaaaaagtgattaagcatgtgtctgtttcaatgccatgactgaccattaagttctctcaagtatgcaacccagcttggccttttcagcagcagtgagaaaaccagtctgagtgagcaggttccgcaatgggcttctttcactcctgttcccctctcttggagtcacagtgaacactaaagtagtgggagtagacagttttggttattcttaagga

SEQ ID NO: 93845 - DNA, 1053 bp, Homo sapiens
agttacacagtccatgcactgtgaatgtgtcaccttccaagaacatcctgccacactttgcaacctgaagagattgagcctcttgcaccatttcctatactttgctagaaaatcatattattacattccgataaaaattcccacatatcctcttgctaacagctgttctgtgaatggagcaatactgagtagaatgaaatatcaattcttgtaaaataaagccgctttcctaatccaagaacaaactgcacttggtttgagaggccccatgaggaccaaaagaaatacttgagtaatgcatcttttttgcttgaactgtataactaaatttaagtttatatagatagcataccctaaaaagcttctttgtatgacataagttgtataacttacagaacaattgtcaagatgggaagtttgtttcagtttcgataacttatgcaagttagcatatgaagctaggacccccaccgaggtcaacagctggatttaaattttctctgaataacttacctcaaaacagttaagtttagagggacagggttgataacttagtgtcagcatagtaaaagaaggttcaaggggcagtgggagaactctgctctaaagcacagcccttgttaatatgtgttacaataaacagtgtggagaataatataaaagatatagaagggagtcttttaaaagttcatatggacaatgtgtattataaataaaaaactatgcatggatttgaaaagtactttgcaccaaaataaacttgtaaacatatttgaacaagatttaggttggggagaaactaagaaggataatgcatcagtttgaaaagagctcctatcagagcaaaacaaattctgctaaaattgaagcaaaacaaacatcaattttatcgtgaagcttgggtagaagaatggtgagatcattgatgctttaagagatgtttatggtgatgatgctccaaataaaatgacagtttacaaatggataactcattttaagaagggatgagatgatgttgaaatgaagtctgtagtagcagaccatacacatcaa

SEQ ID NO: 93846 - DNA, 1027 bp, Homo sapiens
agaccttatttttatcagatgcataccccttcgttgaatgcaaatttattgaactatgagaatgtaatcttctactaattaatgagttacaagtgattggaaatatggtatgatgatgaaacactgtgttcaaaatgcagattattctaaagaatcagagtaacaatgccttaatattattttaacaacagtgtctggaacataatcggtgttagacactttaccacattgcattatcaggcataaagtttagctatcatttcaggaaactgatgataactcaaaattaaacattaaaattgacatagtatctgatattgtaggctgattccaactataagataaaaagtgacttatttttgagaacttattgggcattttttttcccaatatgttgtttcatacaaggaagcaaataatctgagaattagtgacactatctgtggctatgtgttgatttgtccatttgaagtattcccaaggtttcatggaattgaatttttctagtgtttagcacatgctggttcctttctcttgcacaaataaagtcagccaaatcataaataaattattctctcccaaaccactcaagttcacctaaacataaagacacttctagtaggttgatagcatttgtgaggttgagttaggcataataaggtaattcagcaatgaccttaacaatattcgttaaaaaataaagcaactggcatttcagatgtttactatgtgacagataatgttctagatgttataaaatattacttataattctcatcccatgcaaatttagaattattatcctcattttatttatgtagggactgaagagtaaagaactggataaacttgcccaaagttatgccactatcttatgcaaccataatattcaaacacaatctttctgagtcaaatcctgtctctttttactataaacactcattgagcaataaccaaatgcaagatagttgttaagtattacaggaatcaaatatgcccctaattatttataaaataggagaaattt

SEQ ID NO: 93847 - DNA, 1223 bp, Homo sapiens
aagagaaccaaaaattatattctaggtaagaacataatactattcaaaagagaaatataatcaagagactcagattgcaaagaaacagaaggtatagtccttactctcaaaggagatcttggaaaagtatgactctaggattgctatccataagccatgaatgtggcagatgatgagtgcagactgatcttctgtcactgcaaaatgtgtgctccaaaaacactactgcagaaattgcctttctgcatcttcagatacttatgacttctgtaaacgaagtctgtagtagcagaccatgactgcctactcggcataccttaataaccttaaaaatttcacagggaaaagtcataggtgatacccctgtaactgtttgaaaggaacattttgaacaatgatgaatacatggaagctattagatgcagacaaaattatatcctccagaaaacaatggattggtttataatagctgtttccaagagtttaatcaacagaggaaagtctgactacaattctctgtccctcatgatttctactggcatcactcaatgctacttgctgggtgtgacctttcatcactatacattgttttatttggttggactcatttccaaaggtctgtttctataaggcctcttggaggcaggcacttcttcagggtgaggtatatcagatttggggaattctctaaaagtctcaggaaactaaggcagagctcattctgacatcaaaatacatgcatcattaattcactttcagttccaacagaccagcttttttctttttttattattattattattatactttaagttttagggtacatgtgcacaacgtgcaggttagttacatatgtattcctgtgctatgctggtgtgctgcacccattaactcgtcatttagtattagatatatctcctaatgctatccctcccccctccccccaccccacaacagtccccagagtgtgatgttccccttcctgtgtccatgtgttctcattgttcaattcccatctatgagtgagaacatgcagtgtttggttttttgtccttgcgatagtttactgagaatgatgatttccaatttcatccatgtccctacaaaggacatgaactcatcatttgttatggctgcatagtattccgtggtgtatatatgtcacattttcttaatccagtctatcactattggacatttggttccaagtctttgctattgtg

SEQ ID NO: 93848 - DNA, 1422 bp, Homo sapiens
tttcatgaacattgatgtctatgatgatacaatatttaaatttttggctggatagaaagaagctcagaagcaaaacaatttggcagcaaaaaacatatctctttgcaaaaaaaaaaaataataacatgagatgaaacctattactttgaaagagctagaaatatgaacaaaattattcttgagacagaggtctcaaatgagatttatttgttttcatggttcataaatattctgtataatttgtctttttggtcaagagaaaggatttttagcttattggatagtctctgaacattgaaaaaagtatttttaggttcacgtaagttgactcattgcttcatattaactaaatagggtttctttttaaaatgagactttttttctgattttatatttctgtttccctgggaagaagcttatactactgttttcacagttcataaaatatttcacattgtatgtggttcatctgagatacaaaatatagagtatttgcctcttttttttttaactctagctcttgttttggggtatttcttaaaactggtctttggctttttatttattttctttatatactctctttgtgatcccattgactactgaaaaatattaactctatacaaatgatttaaccagtatattttcaatattgcatttctcatttaataaaacaacaaagcacaattacccagtatatcccatgtgcaaaatactgataataacataaaaaatgtctgcttggattttctgcaatcatctgaaatcattagaccacctttccttctaagtcaggttttcctctttgctcctggtttctgtgaaagccagaatcattttcccagaaatgtttcagaaacataatacaatcttaaaatcatcttctacaaacttcatttaaaatcagtcactatgtgttcttaactgttacttcgtaatgagttttcaatatttcctttctaatgaaatttctttcctgttgaatgcatttcattcccactactttaattcaatacagactcccgtcacctcatccctcaaagattccaaatgcttttaattctccttgattttattctgttgtaattccaaccatgatggtaccagttatttggctctttgctcacagctctgtttgcagtgatttgagtgccctgtccagaccctcttgaatgggcagtgcacccatgccccacttactgtgagtgtggctgatgacccactatttaccccctttctggaaactcccctcagtcaagtggaaggtatcccaacacccacacaaacttcagtgagtgctggattggcagggacaaaaggtatgcccctggccttgagatgggcctaactgcacttcctgaacttttctatggattcagaggaaagccaggatacagctgtgaccatagtgttgcttaggta

SEQ ID NO: 93849 - DNA, 1032 bp, Homo sapiens
tgtgcatgcacatacacaaatacacacataacaaatatgggcaccatcatactgactttttttttttctttttttttttgtttttcaagagagagtttcactcttgtcacccaggctggagtgcaatggcgtgatcttggctcactgcaacctctgcctcctgggttcaagtgattttcctgcctcagcctcctgagtagctgggattacaggtacctgccacaatcccttgctaatttttgtgtttttagtagagatggggtttcaccatcttggccaggctggtctcgaacttctgacctcagatgatccacctacctcggccatactaactttaagatgcaatatcaaaccattatagcaagtcttgttatcattaagcctatgctaactccttataactgccaattctgccactaattgctcatgaaagctttgtttagctagtttattcagtatttttagttctgtcatccactatttttatctttttgaaaattgaaagaacattttctcacctgatttccatgatgacatctggagttcatctgtgatcacatcttcaatgtgtagtatctggaaggatttcaattctctaaagcctaaagacttaaattaattcaagggagcttctcactctcttttatcatcttcccaaactatatctactctacttccacaactttggttatattatacctcatttcattattttttattcactcatctttcagttcattgaattatgccataataattctagagcacagagatttctgaactactccagcattatttgttgtttattgttattgttgtttttgctctaaagagaggaagtcttgctatgttactcagatcgaatttgaactcatgttcaagagatcttcccatctcatgtccagagtagttgggactacaggcatgcatcactgcactcagctccattacttgtttataccacttattcagcagcataaataatataatgtgtaatattgtacattggcttctcccctatatgtcttatat

SEQ ID NO: 93850 - DNA, 1020 bp, Homo sapiens
cattcctgttcatagtcacagcagccctggcggcgaccatggctgagccacatctggggtgctgatggccacatctgcatccacccctctgggagctggttacttctattcttttatctgcatctgtggaatcgggaggggatctgggcatggtgggttcccagccctaagagctgtcaatttctacaggagggcttgggaagactccatgtcacaggccaccatctctttgcagacatggattcctggctcttaagtttcagacaaagacaaccagggagccattccatgagagcccctgcatctccctcttcaggtcttctccctcctctaggtctactctgcttcgcccactcacctctctcctccaggagccaattatacttattattattactgactccactttatgggtcccaaatgacaaatgaggatgagggcagaagaaaaggaatgctcaggttggatatgagagggagatgaatgtgggaggtaggaggaggaagaacaagatgggattggacgcaggtggattcaggaggtaaacccaggctgtcttggggtccccagcctggtttgggagaggctgtaagtcatgccaacatgcaacacatgggccaagggttgtgtgggcaagaagtccagtgcttgcaggccggtctccagtatccatgagggacttctgttggcttttaagccagagcgcttcgggccataggctaggtccctctgctggtctctggataggtttctttgcatccagggtgtcctggctggatcacattttccagactgatggagagtggtatgggtcggggctctgagcgtgtcttgatgtggtccttcatggttggacagatatcctggccataaaaaccctgactcaaagcctgacccaggaaggaatggaggactccagagagtagatgcctttcttctagtctggccagacctgctgatgtccatggattcttgcaggccagcatgcccctgagtgaggtcttctaggatgaaggaggt

SEQ ID NO: 93851 - DNA, 1047 bp, Homo sapiens
gtgtaagcctttaaaggatagaggcaggccctcctggagcagtaggggaaaaaagagggagacaggaagaggcacattgaagagaatcctcccctgtccccccataaagaaaaccacagactcaggagctaggaccagacacctatgaagtgtttctcggagactccagagggcgctggggggagagagaagaaatcaggagtgatggtttataaagggttaacaacaccctgggagtctgtggaattaaaataattatttgaaaagttccaaaaagcacaaaaaaggaataaaaattacacaaaatccctccattaaaagagattatctgcagtaaagtgtgcgaactacctcgtctgcccctccaaccccaaccccagaggtaacctctgttaaccatgtggtgtgtaaaggctctcttagatcccacacgcactcatcatctccttccctccaccaccgtcccatggtgattgttgtttctgtaccaccagcttcaagcttagacatcttggagtctctttgatgtttccaaactcaaattcaagtcctgtgctttaaaaaaatatctcttggatttcctccgtttttcctcattgccgtcctcccaagtcttggctcttcctctcacgtctgctctgttgattggtttcctaaatgttctcttcccacctcgaagcgtgtatgggcaccagattcatctgccaacgacattgcttccaacacatcattttcctgttctaaaatctttgatgattccccatcatttggaggataatttagcctggcatttaaagtccgttgcaacctacctcttcacttcttgtattcacaagtgcttcctgactctgttttgaagcctggctggttgccttactaatcttagagcaaactctgcaactcttgcctgacgatgacctttctccacctagccaaagcttgtccatccttcaaggcctatctcaaggctttctttttctttccttcttcttcttcttcttttttttgagatggagtctcactctgttgcccaggctggagtgcagt

SEQ ID NO: 93852 - DNA, 1409 bp, Homo sapiens
agcccggcgctttccccgcaagatggacggtttcgccggcagtctcggtgagtacggctggggagtcctgcgtcttctgcgaagggtaggaacttttttccttccgcacacagcccaggccctgccctcccgcctgcccctcggggtggcagcggctccactgcacatgttcccttcgaggctgccgcccctccgcggactccggtggactgagggcccctcccccatgtccaactctcctctgtgtcagaccctcctttcctcccggagcccctttcagtgcggggccctcgttcccccaaagtgggaaccccttccttctcaggccccccgatagctggcacacccctccccgtacactcacggctccctccacttaccccccttcagagttgggacatttcttcaaatccaggctcctcttcagggtacaaccttccaccacctttccacatacacgcctctctttcagggtggggatcgccttcacccgaacagaggctcctttttaggggagggaccctcattccctcttcaggaagggggcatcccccgcccccaagtcttcactttagatttgaaggcgactttccagtatccttcagagtagtaggcaacttccttttcaatccctccacttctctgagcattttgcagtggtggagagacctagaagcatcggagcatcatttgcttaatgcaggaaaggaagaggtgcatctgtgttgggggaccctctttaagagtgaaagcagaagtgttttctggttctgcatacatgctggggagaagtgattctgcccaatgaatcaataggaaagggggcctctatcagggaaggaaaggattctccatttttggaagatgttgtctttgtggaatggagaaagggaagaggttattaaataggctgaagtgccttttcagtgttcctttcaccagatgaaggtaatcttctggctaggaaaatcaaaactccaggctagtattcgctgccctagaagctgaatctggaattactattcttcgaggccattgaaatctagtaaaagattaagttcaactgttagaatggtgagagaaacagtttcagctttggctgataacgcagttgtgtgatacctactgctggaactgtattttgagttttttatgtgcaggtagcttgtattcagacgcctttcttttacatttcttgataataagtctctacttggttaatgttcactgatcagtgagcagtctggccataggccgtactatatccagataatatcgagatgagatggatttttaaaatctaaagtaaaaaagtaagtcaaagagcaatgggcctattatagatattaaatagtaaaacctataattttggccttccctttttcttgggcagaaaaaattgtcgttat

SEQ ID NO: 93853 - DNA, 1141 bp, Homo sapiens
gggaggctgaggcgggcggctcacttgagctcaggagtttgagaccagcctgggcaacatggtgagaacccgtctctaccaaaagtacaaaaaaattagccaggcatggtggtgcacgcctgtggtcccagatactcgagaggctgaggtgggaggattgctggagcctgggaggtggaggttgcagtgagcgcagatcacactactgggctccaacctgggtgacacagcgagaccccgtctcaaacaagcaaacagacaaacaaaaactcattatgttcttatttctcatttcacctgaaataagtgaaatgttctagactttattgggaatctgataaagaattctgtgccagattctagggtattttcaagtacaagtcatgtgcatgacctgttaatggtttttgaaatcagtttagtcgtggtcaggaccaacattagaaaaatgaggagaagaggaagagataatgtaaaatatcagtacttcgtgtgatattgcttcatggaacatttaatttcagttacatatatttgtcttagatttcagtgtaaaatttctgttggtcacaatcagatgaaagatacatttttagtggctaatccctatctttgagagaataggtggaaaggttgacatacatgaaaaggtggatgaacaatcagaagtaatcattgcgggctatgtctttgacaagtttttagaatctgaatataattagaatatgtttaacagcagcagcagcagaaagatatttattagttgtagaatcagtgtaattcaggcaaactcagtatgtaaagaagtgattttataaaattggtagggctagggtatgtttaccttgcaaatcaattctttactttgaaagagaattttcaggccaggtggtatagctcacacctataatcctagcactttgggaggccagggtaggaatatcacttgaggcctggagttcaagaccagtctgggcaacatagtgagaccctgtctctaccaaaaaaaaaaaacaaacaaaaattagctgaacgtggtggtgcatgcccagctccttgagaggctgaggtgagaggatcgcttgagcccaggaggtggaggctgcagtgagctatgatatgccactgcactccagcctgg

SEQ ID NO: 93854 - DNA, 1496 bp, Homo sapiens
gcaggcttccattctcagttccttttttttaaatcgtttatatttaaggtataaatataatactgtgtatacaagtataaataatatactatgctacctttatggttggacatatatttttatttttagaatttttttcttattaaataatctggctgtatttcaataaaatcttttttttcaggttaattattataggtcactgtttatcaatctggattcaggacctacatccagtcactagagaattctcaggatgctggggaggtcttaaaacagctgtttgtgggtggttgtgttggtagaggcaaaatgtgggttgtaccaccaggatgaggtcacctctttgaccttctggccctctttctttccggactttaacacctactttggtacttaaagcaatttgggctatttgctgtgctctgaagtgttgtttagtagtagcacctataagatggtgttaaatgttttttgaatgagtctgtgtcacagcaacaaagaaagagttgttttcagtagtttgaaaaccattgatatggtttttatctcactctattcttacttaacctgtatatggccaccaggttattcattctaacacactgttttctttttttcattattattattatattttaagttttagggtacatgtgcacaacgtgcaggtttgttacatatgtatacatgtgccatgttggtgtgctgcacccattagctcgtcatttaacattaggtatatctcctaatgctatccctcccccctccccccaccccacaacaggccccggtgctaacacaccattttcattgtcactccctggtttaagaactttcatctcaagtttctatgagataaactctagtatggtgtccaagttgtcctgccacctggctctcacctacctttccagcttcaccccttactgcgccccctacatggattccctctgtatcccttttcttgcttagttttttgtgaactgctttcttcttataccgttatttattcaatatctctcctttctcttactaattcctgtttatccaaagtagtttaagtccatctcttcttttgaccactttaatccacagggattttctgtcctattttctgaaatctagcacatttgattttccttacagagatcaatcatatatttgccttatgttcttaagtcatatatagccctttaagtatttcatgtttatcttgtctcttcagttaggaaatacatttcttaaggacaagaatgtgccttatactaggttgaatgtattgccttttgagtggtaactgctctcatatccagtgcctaaccgctttggccgatgggaaaaccataggatcagtggattgataaaattctctttaactttttgtttttatgtaatctaattttctctcctttgtgcaatgatacatctgtgacatattggcaaaatcattggtcccggaataatataatacctgagcatatattgattttttt

SEQ ID NO: 93855 - DNA, 1030 bp, Homo sapiens
tcagggaggtggtggaaactgacatgtttggctggttggctccacttagccaaaccttagtctttagctgcagtacaatatgtttcatagtaaagaacagtcatataccacatatgagggtatttccataagattttaatactgtattttactgtaccttttctgtgcttacataccattgtgttaccattgcctacagtattcagtgcagtagtattctgtacaagtttatagcctaggagcaataggttataccgtatagcctaggtctgtagtaggctataccatctaggtttgtgtaagtacattctgtgattttgcacaatgaaattgcctgtgatgcatttctcagaactgacacatgtctgtactgcaaaacgtgcatgcagtttattctgctgaaggaaaaattagtagaagctggtttttagatgaacgataaaaagagtaaaagcatttagaatggtgtctgctgtgtgattgtttagactgacagtggaaaatttcttagcaaagaagttgctgttgcaattttatttcttagggccaaacccaatctgatgctataatgagaactaaaatgatttaaattcctttaagttttgacctttttcattgctgagatttcttaaagggacattgttgatatattttgcttttaagttttcacttttgtcatctatctattgagtcattataggcgttcttttttttttttccttttcttaatgaagtggggtcttggtatgtcacctaggctgttgtgcagcagcacaatcatggctcactgcagccttgacctcctgggctcaagcagtcttcctgcttcagactcctgggtagctgggactacaggcatgcaccaccatacccagctagtatctttatgttttgtagagacaggatctcactatgttgcctgtactgtctggaactcctgggctcaagtgatcctctccctttggcctcccagagtgctgggattacaggcctgaaacactgtgcctgacctgcagtcttattttaaact

SEQ ID NO: 93856 - DNA, 2105 bp, Homo sapiens
actgcttggccaggatctttaatcttgatggtctgatttatcatttgttccttagggctttggcttttaggtctatgttctaccttagattaatttctgtgtatggtgtaagataagagttaaaagttaatttttttcttacaaatatgcttataaatgctaacaaacaacattgtttggcaaagactttgctttatttccaaatcaggtaatcagtattatattataaaattattagttatttcaaagtagttgcatggttagctagttcattgattatagaagctgtatttttttaggtcagaattatgggtttataccttcgggatccagttaacttggccttgttttgtggccatggaatgtatttctcctaagttgttttagtcatttgttagatttgtttcattgcaagtaagagggtatatgataacttcatcatgctaccagataaaacattagagcatatgccttacacgactattaactaattttattttgtgtgagagagattacattattacattttaaggatacggtattcatagtattataatgtttaatgtatcatactcagtttttatgccatactaaaataagcaaaaataaattgattttagtaaacattagaaataatttttcagagttttgtatagagtgggaaatgtagatctgacactgtgaaatccgtttgttaggttttgtgggtaaataatgctaagtataaaaatacaagacatagaaaaatttaaaatgtacgtttgcatatgcttgtgccaatatatagaccattccataaacccaatcattggcttacatttctgagataccagcattaaacatgagttatcttttaagaggctgaatttgaattatattactctgttaggatttgtgccagcttttggttaatcattatcttgttgattatatttggttcaagatgactcatttttcaaggagctttattgcaacactacatatttactacaggaagcctggatggaaatggagcatcaggttattggagatttttttctccaatctttattgtaccaagtgttattaaagttaattatttttcaataactgaattccctgtggaacctagtgcttcattaaccaactgtaggaggatcatttactcctttttcatggcagacaaatatatctttgatgattgtttaaatattggtcatacttctatactatacattgaccagacttagatatagtattttattctcatcaaattgagtatggtcattaactgagaattttggaatcagagagatttgagattgaaccttgtttgtaaaatttactagctttggaagcttgtgcaaatacttctctgaaccctagcgttcattcagtcattaatgagtgaattaatacattcagtcattaatgagtgaattaatacattcatttattaatgaatttggataaaaatatttaccttgcaagatcagattaaaaggacatataaaagtattagcacttaatatgtgcttaatgatgatcaccatctgttgacgcttgcttatggtatatattgaggttaggagtgccaatcatttagcccttctgtctccaggttctaagagataaataatggacacagcatctgtttctaaaatttagactgtctgataacagcagaatttgagaccataacatggatctaaggataaattgagagtcagctgcaatcaccaacaaatctagactgtgagactatgataagagttccgtctgccatgtctgctctgactacacttaatctggcagctggcgagaagattagaggcttactttatgtatctagttatcagcgaaacaaagagctggagtgagaaagggaaagatggccttgttttctatgcagtaacgtaatttccttcttgttaaaaataaggtccaaggaaagctaaatctaacccaccaaattagtaacttcccttccccctctgcccatgcaggagtttgtggcttgagtttgtggaagagagactgggagagttttctgtaatacctaatacagtaaccaccctgcctccaccctgccctctactgtgggaaagagaagggaagtctcattc

SEQ ID NO: 93857 - DNA, 1075 bp, Homo sapiens
ggctaacatggtgaaaccccatctctactaaaaatacaaaaaaaaaaaaaaaaaaaaaattagctggacatggtggtgggcacctgtagtcccagctactcgggaggctgaggcaggagaatggtgtgaacccgggaggcggagcttgcagtgagccgagattgggccactgcactccagcctgggcgacagaacaagactacgcctcaaaaaaagaggaatatcagcactgtgtagacaaggggaaaaagaaagaatttcaacaaaaattatggcctttgctccacatgtgacctgtaagctgtagagagcagtcttttttgaatttggcataaatgcttttatggacaaatgttaatttgaggttgttaggtattgtggttgtcaggcatatttaattcaacaaatgctgatttcttatttgctggtcattgagatcaaaagctctctttttggcttgaactccctttctccagttgaaaagatggtttcagaaattctggcactaattcagacttacagactttctttgtagagacagtaatcctcaagttcagcagtttgactctaaatatcataacaattctaaattcatatctagaggaatgttttatatcttttttggcatttttaaagagtttttgcagacactcatagtcttggcatgccttctattgaatctttggtgggagaaagaatgtaaagcaaaggactgaaatttccagcgctttgcaggggacagtaggggaaatgaggcaggaaatgagggcccacttagaatgcagtttattccaagtcttttccacttcccctgttctccatgggctgcctgctgtattctcctaaggatgaccctaagaaattaagtgaattgcatcctctaattgttgtctatagcagtaatatgacagaagtatagtacttttaagttcttttaagtgaaggatacctgtattctaatttccatcaatcaagtcgaatttctgaagattttgtcaactgtgctaattttcaaaatgtttttgttggctacatgctagctggaaattaactctgaaagcattaccatcaaaat

SEQ ID NO: 93858 - DNA, 1040 bp, Homo sapiens
aatagctgttgttccttgaatttgtttttcagctatttaaaaatgtaaaaaatcattcttagttctcttaccatacaactaagggatggtgatgggatcagatttggcttgtgggcggtagtgtgccaacaactactgaatggcttgctgtatttgttttttctccctactaggataaacagaaatggatgattcttctaacagtttttcagaataatgagaaactgttacagctagagttagacctagttaactagttaacctagttaggtaggtagagttacaagctagtaatgaatctgtgtaaatgttctttgcctcagatattcatgaatgctaagattatggggtccctttaatattacagttcttcctattactataccatatggttttagaaatcataaatattcatctcttaatcatttgcaatacattgccattttgttctataatcatccaaagaactttgattcgaggtctttttgtatattaggtgttgaggtaatttgattcttttattaagagaaaaatttattggaaataaaatgaagggttctcaacaaagatgattcatgcagtctttacaaagtttgcctcttagattacaatttgacatttataaacttgaccttgtagaattttagtataagttggcttatgtgcaacaaaaaacacttccagatgtgatcactgatacaattctgaattaaaatgcttaatgaaaacttctagtgttgacagatcaacactaatcaaataatctgtccttacacatagtgaagtttatcagcaaaagttgacatttttatatttggtagggaaaagagatatactctaaaagtaaactaatttcagcttgcccaataataataataataggtgtagatggtgttgaattaaatgcccctgccctcagtcagcttccctggcttacctaactcacagtaagcactcaataaatgtttgctcttagaagctgtgtggtgtggcctgaatcagtaggcacttaaatgaaggaagtggaagatctgttagtg

SEQ ID NO: 93859 - DNA, 1032 bp, Homo sapiens
ggcaggagaatcacttgaacctgggaggcgcaggttgctgtgaggtgagatcgtgccattgcactccagcctgggcaacagagtaagactctgtctcaaaataaaataaaataaaataaaataaataaaataaattacatacttgaaaattgctaagagagtagatttttaaatgttctttctcctcatagaaaaatgctacgtgagataatgcatatgttaagtagtctgacttagccattccacagtatttacatgtatcacagtatcatgttatacaccataaatatatacaacttttacttgtcaattaaaaagtaaatttaaaaatgtgaaatgagattaaaaaataaaagaactgcttacttctagaaatatatatataaattttgattatagtagcagtatcccacaaaatttccatgaaattcaacaaagggaatcctctcaaaaggaaagcaagattttgttgagccttgtactgaacttgtttaatccagacttttttccactttcagttttatgtgcatgtgaaatgatgttcattctttttctttttttttccccttgaggtaagatctcgctctgttgcccagctggagtgcagtggcacagttgtggctcactgcagccttgacctcccagattcaagagatccttccacctcagcccccacagcctgccccaagtagctggctgagactactggcatacacctggttttttttaatttttaattttgtagagatggggttctcactatgttgctcatgctggcctcaagcaatgctcccacctcagccccgcaaagtgctgggattactggcatgaaccactgtgcccagcctccattcttatttttttaaagaattacatcctacctgctttcaaaattaatatgagcctgttaaggcttttttttttttttttttaaaccacccctcttccacaaagaaaaactttaaatttgcttctggtccagcaactcaattttgtgtgacatattgcaatatatatgcccttcaaatacag

SEQ ID NO: 93860 - DNA, 1050 bp, Homo sapiens
tctcttttctgttacagtcaaatctctttttcaaaactcctattcatccagatatttgagtactactgtatataaaaaattttcaaagtgctgagaatttaaaaaaaaaattactgccagaaatttatctaccagaaattagaaataaataattttttttttttgagacggagtctcactctgttgcccaggctggaatgcagtggcttgatcttggctcactgcaagctctgcctcccgggttcacgccattctcccacctcagcctcctgagtagctgggactaaaggtgcccgccatgacgcctggctaattttctgtatatttagtagagacagggtttcaccatattagccaggatggtctcgatctcctgacctcgtgatccacccaccttggcctcccaaagtgctgggactacaggtgtgagccacagtgcccagccataaagggataattttaatagatgatactcaagacagaattgatggaatatggtcattgattacataagaggataaaaagtacaggaagatccctgtttttctatttggatgactgaataaatggttcaataacatgcactgatagagaacaaaggaaaaaaaacagtgtggggaatgagggagcagaaagatgtgtggttttggatctgctgagtttgaggtcattataacaaaagtataactaggtcttgggcttaagatagaggcctgaattagagattacacttcggagctttattaggacatatctgataactggagttgtgagaattgatgacttggagtgagaaaggaatagggccaaagttatccagcagagaagacagaataaaaactgtcagaaagctagtcataggttcaggaaaggagacataatgttagactgcaaagatatcaaaagacaatgactaaaaatggtccatctgatttggccagtattaaggaatctttaccagagaagtttcagtggagtcatgggaacagaagcataactgcaatgcactgaagtgaggctgggaggtaaggcagtcttttaaggaatgtg

SEQ ID NO: 93861 - DNA, 1997 bp, Homo sapiens
tttcctgttaagtacttaagtatgaataagttttaaaaagtgattacttattggtagcatataagttcagagtcaggaatgatggttatgccaaaaaacaaccagttgtccatgtgggtgtctgaaatagtgacacctttgttttctgatagttcagtatacactttatttcatgcacaaaattattttttaaatactgtataaaattaccttcgggacatgtatgtaagatgtaagtggaacataaatgaattttgtagttagacttggatcccctccacaagatatctcattatgtatatgcagatattccaaaatctgaaaaatttgagacctgaaacacttctggtaccaagcaattcagataagggatactcaacctgtaatatgtttttaaaatagaagaggtcctcattttagagacttctcatataaacagttcaaaaagcttagttattcaatgtaccataatataggaaattagattggaaagggagcattgctatggataggcatagctaatcccaactgcaaagaggtaaggggaaaagtagaaagaaagattagaaaaccaaaaatgtggtctggtgcagtggctcatgcctgtaattccagcactttgggaggctgagaggggaggattgcttgaggatgggaattcaagaccagcttgggcaatattgtgagacccatctctacaaaaaagaaaattaaaaatgtaattttgtttttatttttttattttttatttttttggcaatagggtcttactcttttgcccaggctggagtgcaagggtgcagttatagctcactgcagccttgaactgggctcagacaattctactgcctcagcccctgaattacaagcatgtgccaccacacctggctaacttttaaaaaattgttatttatttgttttaaagacagggtcttgctctgtcacgcagacttgagtgcagtggcacagtcatgccttactgcagccgtgacctcttaggctcaagtgatcctcctgcctcaggactgggactataggtgtgtgctgccaccccctggctaattttttttgtagagacagggtcaccctaggttgcccaggctggtcttgaactcctcggctcacgcaatcatcctgcctcaacgtctcaaaagtgctgaattataggcctgagccatggttctcaattatttaattagaagtataatagcctctagggcatcatttcaccacagtgcttgcagcgtagtaattaatattctaaatgaagactgagtcaccaagaagtggttacattatgatggtgtgcccccactaagaaaacaagacagtaagtattctgttttagaaagatataaaatcggtaaaatccaaaggtactagaatgtgtaggcatgtcttattctgatatgatactggattgccaacttttggatatttataatgaaacacaatatacttacctttgcaaaggtgacacatttctcaacagttcagaaaaaaattaactgtgattcagtgtaataaaagcataatgaatagctatcattgtattctttaaactgtaatatttcaaactttataaagtttacgaagtcacatgtagatttccttgtatttctaaaaagagactgactcatgccggtaaatagatcagactgatagtgagaggtttctggatctccgttttctcttcattctttactttttttcttaatgagttcaaaaatgcttgagaattcatttgtatttcatattttaaccttcaaagctggaaactattttgagaaggggcaacaatttttaaaaaccagggggcaattagaaaaaatgtttaaagggaggggattaccatttttagcttatactcctactctataataaaggcggcggggggtggggtgtaaggaaaatgatctaatctacttgatcaagaaaagggaatgttaatagccctcagaaaatatattcatttactgaacagttatatcccttag

SEQ ID NO: 93862 - DNA, 1096 bp, Homo sapiens
taaaatataaaaatttctaaggcgagagactgaattgttcttatcattccttaagcatctcagagttggacacatgtgcctttaagtaacaaatgtgctcaaagttttcaaattgtaacttttgtactttgtacatatcctaggcacaccctccttaaaacaatcctatttaaaggtgaagaaattaatgctcaaagaacttgcctaagattatgtaactagttaatatggaaccagaatttgaagtctagattaaagatgaaacccaacttttccttcaatatctacgtctcaaagataagactgtcagtgaaataccagtaaagacagaagagagtacatgtgtatgcatgggaggtctggtggtgtatatcatcttaaatatgaaatatgaatattgtttactgttccataatgtaatggtgatagctttggttttttaaatgttgtggtggtggttttaaactttgaattaaattaagttccatagcatattatctcagtgtgagaaaaaaacagtacattctgccttattgtctgaatgactgaaacagtcatttaaatgatctcagtgtggtccaaacagctcttacattagaatctaaaacttgccctcagtgtaagccaacggtgtttttaacagttagttatttccctgaattttcctgcttatactgaatgaaccaatagcaattaatgttttttttgttttttgttttttgtttttgttttttgttttttttttttttttgagacggggtcttgctctgttgccaggctggagtgcagtggcgtgatctcggctcactgcaacctttgcctcctgggttcaagcaattctcctgcctcagcctcccaagtagctgggactacaggcacacgccaccaagcccggctaattttttgtattttaatagagactggatttcaccttgttggccaggatggtctcgatctcctgacctcatgatctgccctcctcagcctcccaaagtgctgggattacaggcatgagccaccgcgcccagccagcaattgatgtttctatatgtttggattcttattgacccaacaaatacagtagtatagtctaaag

SEQ ID NO: 93863 - DNA, 1034 bp, Homo sapiens
gcactcatcatgcctgtcaagttgtgtgaggaagctttccgttctcactaaagaaagaaagcagtttcatttcctggttttgttttgtttctttgtaacaagtatttattgaaagcatcactatatttaaagaaattatataactgaattttccatagcaagtgatatatttgatacagcatttttaaaggcaaaacagaatcttcgatatatctatgttagtgggaggtcaaatgctattataacttttattttttaaccataactataaaattaaggcttatttcaaaaatatagtactatctggggtgtgtgggggtgtatgtgtgtgtgtgttaggggatggtgggcaggagggctgtggaattacagcaatataagtttcagtggattacagatttgcattctttatgttcttttcatcagttaactaatttactccaataaaagtgctcacaggattttcccccttttgtaatttctagcaaattattcgatgtagagtttggagagaccataggtgatcagctacaaaatcttaaaaccgttttcttcaaagaatgagtgaggaaaaatcttaagtaataagatcatgtgtaacaatgtactgatggaaaatgcttacctcaataaactaatgctagtgaccgaattattcattggtgtggattcatagatacttaaccaaacagttgatgacaagaatgttgaagaaataccaagatcttcagcccttttaaaaattccgtctagaggccgggcacggtggctcatgcctgtaatcccagcactttgggaggctgaggcgggcggatcacgaggtcaggagatcgagaccatcctggctaacacggtgaaaccccgtctctactaaaaaatacaaaaaaaatagccaggcgtggtggcaggtgtctgtagtcgcagctactcaggaggctgaggcaggagaatggcgtgaacccaggagggggagcttgcagtgagccacgattgcgccactgtatcccagcctgggtgacagagccagactccgt

SEQ ID NO: 93864 - DNA, 3038 bp, Homo sapiens
tcacactaaatttaacagcaatttttttgataactcattttttttgtagtctttctagaacattaaacttagttttcatagaaattgcaattctctttgtatttaattaacttacataattaaaataacaactggcataaacagacttggggaaaacttaaactcttggtaagtttaaaactcaattgagtggagtagaagtatacagaaaaaaaacaggaattggagaataacctattaaacatgaatatttagtgttcttttggcatcagtcggtatgctttacacagatagtcctctgatttgggtaacttgaggtcagttaagagaccttcatttgtcccccaaaatctgccaagatggcaaagtttattagagaccatttctgtctaaaggggcaatcttcatggggtgtatcgccttagaatttttataaattctttactgaagatgttaatagcttctggaattttcaaagaaatattgtccttattgaatgaaaacagtgcaaattgtattagctgtatgacttagggttttgaattatataataatcacttttctatcgtttgattttttttcatttgtttaaatgtgtattgttccatgttatactttattttacagtggtacagaaaaaaagaaagaaaaaccacaaggacagagagaaaaaaaagaggaatctcattctaatgatcaaagtccacaaattcgagcatcaccttctccccagccctcttcacaacctctccaaatacacagacaaactccagaaagcaagaatgctactcccaccaaaaggttttaactgtccccaagtacagagctagggaatggttgtaatgatacctaaattctgtgacttgggaaaaagttagctatccaaggattctgagagaaaaagctggtggctttatttttcccttcttcattgcttataatttatgctttatagcccattggggaataaagaattaaggtcacaatttctcagttaaaactggaaaaaaaaaaaaaaaaaactaagttataaacaatctgatgaaaagaaggcaggaataacctagtcgaaaaccaaacaatattttcttaaccacatttttgaatacttttaaaatatgtatgtaactatgcataaatttatagccatggatagaaaatggccatatgtaattgtcctcactgtattttggcatcattacaaccttcaacctgcaagggcccatctcaagtggctcttcactgtggctgcatctcagtttcagttttgggtcttgggaggataagttcttgcttgagtagagaaatgaatccatttcacctggtcttttctatgctaaaggcttgcttgagggcttctgtgtccgtaataattaatattttaaagttatgagaaggggaaaagggagaaatattctaacaatgtgtgtgagcctaaattgagaatctaaacctgcatgctgggagtacagtgctacagctgcctcctaatcaaatattgagaccaatctaattaaatttgcctgtttagaaatgcttattcaagccttgtgattaggaatagtcatattttatcatcgtacttctgcttggaaatcttaggaaactattaaaccatttccagaactggctagaattttaataaaataaatgacaaccattcctaaaagatttaaatttttatttgatcaatttaatattttgcctcaaatcgctaatggaaattgggaaaaccaaaatacccttcacttgatcgatgcatgtttaccacttacaaaatgctttgtctgtgtgtctcatgcagattcttacccaatctaaatggtttgtagtttatctgcctggtctcctgtggagtttttcttggatatagcttattaacgttacataactttggattgtgtgtggtttaaggtggctttttataatcagtctctttaaggttctgatttcacttgatatcttctttgtcccagcatctttttttcagcttcttgaggtctcctggaaatgtgcttgccctcctaaattgctctttggatatactgttgcaagaagtattggagactggatgagtttgaggatagttagcaatgcaatgaaaaaatcatttgtaaagaaacaaatttcacttataagtatagggaatcaggattgccaataaccacattcttatataaagtcttgtttatttctgatcattggtaaaattgtccctaaagatataaacaagagtttataccttgttatatttagaaattgtcatttgtaccatatgtaatgtaattacctgaggacataattgcacaaaaaatgaaaatggcagccttataaaattcaatggctatgaaaaaatacaggtttttttgtaactacaaattataagaaacattactcagatgtaaggaaataatttttttctgttaacaaaagtgttttttaaaaaaaatcaggtaatatttgttctagtgaatcttctgagtgatacagaaaattataatacagatttgggaattgccttgtttaactccttcactcatccaggcagtctttcaactaatccttctcttttctggattagctttaaggaaatgttaattgctgcttttgtgttctgtttaaattgtcagttacatgtctttgatactcagaatttttctctaagaaattaatgttccttctagcataaaacgaccatcaccagctgaaaagtcacataattcttgggaaaattcagatgatagccgtaataaattgtcgaaaataccttcaacacccaaattaataccaaaagttaccaaaactgcagacaagtaagtattgcactttcttcattatatctgaaaagtaataattatttggctattatgtttgcatgtacagttatgtatgtctggtttgaatctttttttttttttttttttttttttgtgacagagtcttgctctgtcgccaggctggagtgcagtggcaccatcttggctcactgcagcctctgcctcccaggttcaagcaattctcctgcctcggcctcccaa

SEQ ID NO: 93865 - DNA, 3368 bp, Homo sapiens
gatgctcttgtgggatattcattgttttataaaatagtgtatattagtagttcatcagtgagaaactttaaaaaatgctgatttcttactttcacttccagagatttatctagattatagcctaagcattaaaacttttacagtttcttgaggtgattttaatggttagccatataaacttataaaataaatgtgtttcttaaatttcttttctaggcataaagatgtcatcatcaaccaaggtaaattaaaaatccttttaaaaattttattttgcccttcttagtttaatttttgctaattgaaaagaatattttcatccagtgcactttatcagttcatagtaatcaaagaaaagtgcgttactgtagtcatttaggaaaaaacccagtttttattgtaaggtaatgtcatttttgtctcaaccagcaaaaatgtcaactcgcgaaaaaaacagccaaggtaagaataagctacgcagttggttgccttctaagtgaattttttcctggatctcttatttggctttttattatttatgctgcctgactttcttccttaaaaaggaaatacagtgatttgagctagatgaatccagctacattttacttttttttttgagaccgagtctcattctgttgcccagggtggaatgcagtggtgcaatctcggcttactgcaatctccacctcctggggtcaagtgattcttgtgcctcccaggtagctggggactataggcaccaccacacccggctaatttttggtgttttttgtttgtttgttttgtatttttagtagagacggggtttcaccatgttggccgggctggctgcaaactcctgacctcaggtgatcagcccgcctcagcctcccaaagtgcagggattacacgcatgagccatggcacccggccaatttttgtatttttagtaaagatggagtttcaccgtgttggccaggctggtctcaaactcctgacctcaagcagtcctcccgcctcagccccccaaaatgctgggattataggcatgagccaccacacttggcccggctgcatttttaaaaatccatcttatttctaagaaatctgaagattcaaggtgaacagtaaaaatacagtattacaaaaagggataaaatactagagggagttttctcccttaaaaaaaagttttacctagaaataaacgattgataaattttaactcagtttcctgtcttgccaacttcattgcaaataatcactcatttcttgatgctaagactgaaaatatgatgagtctagcaaatccatttcctcttaagtttttcttttatattgattgtaacttctggctacttgctgttgttggcttgttcagaccaaaaaaagagagcagacttttggcgaatgcgtatttaatttaattgcactgtaggtaagttttatacatcagttttacattctctttagattgcctgcaaatttaattgaagcatgctgttcttaatgaaagcacgtcctttctgtgcatggttttcacagctcatttctatgtttcatagttagccttattttctgttctattatagtaaccagctgcaacgtggttaaagctttttttagagatttaacttgatttctgtggatttttacttctttcgttccaaaaagaaaagaaagaaatatttgtaatagtctttaggtcatttgtttttacatagacattctaaatgaagttgaattttgctggcattcttctttagtaggtcttactttctcccttctttataatacaacatagattaagtaatgtttgagatactttaaagggaaaaatgaaattttatttatgaagataattcttaatacattatatatcaaaacttttaagagagagggtcttgctctgttgccccggctggagtgcagtcactgccttggctcactgcagccttggcctcctgggctcaagcagtcctctcactgaagcctcccaagtagctgggactacaggcgcgcaccacatacctggctgatttttgtatttatcatagagatggggtctcactttgttgcctaggttggtctcaaactcctgggctcaagcagtcctcctgcctcagcctcccaaagtgttgggattacaggcgtgagccaccacttctggtccgaaaacttttttttttttttttaaatagagtcggcggtatgtgataggaagagcagtgaatggggaataactgtgtttagtggttggtcctggctcttatgcataatagccttatgacctaggctgaatgacaatgtctctgagtggttttctactctaaatatagtaactataaagcttatttcacatgactactgaaggatgaaataatatatatgaaatataaattgaaatatagtggcatctactgaaatagggaacatttgaggagaaggagatgtgtggaaaaggagtttggctttggacaattgcatttgagttgtctataaaacttaacctacatgtagagatgtatagcaaacaatgtcatgtagatgtttaaacacatggattttggagtccagagagtggttttaccattgacttagctatagtgacattgagcaggttacttcaacctccctaagtctttgttttctcatctgtaactgagataataataagccattaaagggttactgtaaaaattatagtaataaagtgtacccagtacctgacatataataccaggtaagttttagttattaatatatgaatttggcagtaaaaccttgcactcagatttgtattatcagatgaaaagataattattaaataggtgagagtcattgactgtaagttgtatagctattttagaagtgtggtattcattttgcatggcatattcacaacacattttctagtatttcagctattaatgctaatatttgtcattttttgacattctttttaaaatatgacattaatttagcctctttttgacaatgatagctgtggcttgttccaaatcatctgctttgatttgagaagaagcctatttacatatggtacatttaggtgagtggtaacagagaatactttacctgaaaggcctgtgtccttcagacagagcagagtaggagaaaagctagaaagctgcatattccagtcaccacttaggcagaagtcaggaaactggttgttgaaagcaatagaaagtgaaatgagatgtacgcagggcaatctctgaggttaggtgtgagaggaagggcaggttatgccactaaaaagaggctcttactgacctatatgtttataccctgaaacctaaactttttttcattactctctcccctagttctgctgggttgtgctccagatacagcagagataa

SEQ ID NO: 93866 - DNA, 1076 bp, Homo sapiens
caagtcttcctcttactgtgctgcctccctgctctaggattagattcattgttatttaccatttcagtacagtgatatcctaactgtacaggtatatcaaaatggaaggacagttataatatcttagaaaattgagaagtaattgactgttagctacctgtccaaaaatggcttcagattaaaaatacttgaaaagtcattttgaattatatactgtctaaaatccctcagtaatttattgtagccaaatgctttatcaaataatttaaaaataaataaaacgaactcatttataaaattggggaaaggaaaaaccctgaataatcttgtcattctaacaggttacagttctgatgtgtttctttattgttctttatcagatatacattttatacattcattcattcatttaacagatatttactgagtgcttattttgtcagaccctatcctaggcattcagagttacagtagttacagtgttgaactgtgtggaacttacattcatgctccatagacaaaacagataaatacttcatatgtcaggaaggtgatatatatgaggaaagaataaggagagcagagaattgctattttatatagagtagttagggaagacatttctgatatggtgacctgaaggaagtgaatgaaatatgaagtatgtagataactgtaaaaaggattttatgaacagaggaagccgttcataaaagtatataagtatataagcctctaggcaggaactttcttgctctattaaggaatagcaaggaggtcattcatcatagagtacatacaattttgtattatttagcaattacatttataaaatacagattcattccaagcaagagaagtttcatgaggtacctcatgcaggaaagggaagcaaagtgatatagcagaaagggcaaatgagtagtaaacatgagacctagttaggggtaaaatgacctgtatcacagaaaattaaagaatcacagttctacactatgagttagataactcataactttgggagaagctgaaaattccatttgctaaaggaaatgattttagaaaactaaacattg

SEQ ID NO: 93867 - DNA, 1059 bp, Homo sapiens
ttttgatgtgtgatcagtataaaaaaattattagtgagatattttacttttcctttcatactaagtcttcaaaatctggtttgtatatttccagtatatctcaattcagactagccacatggtaagtgttcagtaatcagtgtcttgtcattttagacagagcaggtctagatcatagttttagagtggaaatgtttcccgagttctaagtaatagaattttggaacaaagtctaaaaatttatttaacctctctgagtgttggtttccccttctgtaaaaggaggttagactaggagagctataagatttcatccagccccaacattatatgtgtctggggaaatgaacaacagcctttatgaacaatatcctacagaatttcttctttaataattaaactactctatcactgatcagattgacttaagaatatttatgttgtttgaacataagttagtaagtgctaaagctgagattcaaaccaaggtctgtatcacaaagcttgtcttctcttcactccctctcagtcccagaaattttcaccataccaaggttggagataaaatgttgagtctggttatatttaagttagcatcagcttcattattgaatacctcatactgtgtttaactatcatgaggcaggtagttttcctcactttccttttctggaccaccagactttgtattgttactgatctcgtattctgctttgatcagtcccatcgcccatcccttattgagtttcctggtggtttatagtgaagacaggtagaaagtagcattgggataatacatactgactataagttttatgattgtaagatcaagaagcccgagaatctcaggaaaaagtttgcagtgagaatttgacaatgactggggagaaaagaggctcctcttcatctatgtattttacctaatacccaaggtaaagagtgtcttcctaaaagaagaggttgcaaactggtgttgtgtgcaggccaaaggtatgttttcatatgatgtttccccttttttggtagaggagtaaacattttaaaattggcaggtttcac

SEQ ID NO: 93868 - DNA, 1050 bp, Homo sapiens
cgcccggctgtctttttttattattattattattattattaatagccatccgacaggtataaggtaatatttcattgtgattgtgatctgcatttctctgatgattagtgatgttgaacagttttttgtatacctgttggccatttttatgtctttggagagactacaaaagaaaagatgtccttagtccattttaaaatctgttatttaactattgagttccttatatatttttgagattaaccctttattagatatatggcttgcaaatattttctcccgttctgtaggtggcctttttattgttgattgtttcctggcataagaaaaagttatgccgtttaacatctgtaggttcatccagtagcgtggtagacatggttgttgtctatccaaataatctcactcttcttttcaagtgttagaaaaactgctgtcacaaaattttctttagcatttttctactcagccttcctggacttcttgtagaaatgtgtcaacttagataaattatattttaattatcaaaaaattattctcagttaaggaaatggccattggtttatttttccctacaatgttttagactaggactttatagtatcactttgttttctgtatgctgtgtaatgtagttggccctctgtatccatgggttctacatccacagattcagccaaccatgggttgaaaatatttggggaaaaaaattgtctgttatactgaatatatgcagacttttgtcattattttctaaacaatacaacaactatttacatagcattcacatcatattatgagtaatctagagatgattcaaaatatacaggttatatgtgaatactatgccattttgtatcaggaaattgagcatccatggatttgggtatctgaggaaggtgttcctaaaatcagtcccccgtggatacaggacaactatataacaaaaacaattgtatataatgagactaaaactttgaagtagtcatttttgtcttgtttttattgtatcacgttaataatccacttttgtatgactatacagaaaat

SEQ ID NO: 93869 - DNA, 1050 bp, Homo sapiens
ctctgtggcccaggctggagtgcagtggcacgatcactgctcactgtagccttgacctgacctcctgggctcaagtgattctcccacctcagactcccaagtagctggaactacaggcacaggccaccatgcctggctaattttttttattttctgtcgagatggggtctcactattgcccgcactactctcaaactcctggactgaagtgatcctcccaccttggcctcctgaagggctaggattacacgtgtgagcactctgcccgtccaggacatgagttttctagttctagttcagtcttcttcattgtaccttcctaattccttaagtatccatgaaaaatctgttaacaacttgaaaactgtgtttatttaaaaccttgactctttttctgttaagatatggttatcgaggaaaggactgtagagctaatgtttaccttcttccgaccgggaaaatagtttatttcattgcatcagtagtagtactatttaattatgaggagagaactcagcgacactacctgggccatacagactgtgtgaaatggttggtatcatttaacattggttcatttttgttctttcaggccctcattttgtattttttaaatttgggttttattgaaagtgatttcttgtggaaagctcagaatgtaaaaatattatgggtcatctgttgaatatattttaaaaagaaaaaaaggactttcggcctccaaaatggtggtgtggtatcagcagcaacaaaacacatcctccataaatcatgattggaacctcttctgctttctcatgtcgtacagtccttctcttctctggtctgtagtgtgaaacatatatgggacagactggacattttcaggtttctgaaagtgattattggttactcgatatttattgaggatttgtcctatgtagataaattttatacttgaagctttattcttttgggaagaaagaaatctagctgaataaggatcataagtatgccgtaggatgtcatactacaaatgtgagaactccttttaaatgcttttaaattatt

SEQ ID NO: 93870 - DNA, 1062 bp, Homo sapiens
ttgaacttttggagttgattaaaatattgccttttacacttgcagaataatgtatgtacaaaactatttactgcagcattgtttgtgatgaagattagaaacagcctaagtatttttcagttggggactactggtgaggttgtagtgtacctataggtcaccatgtagctgtaaagaatgaggaagcactttatgtattaatatgtaaatatccctctgatgtgttcttaagtacaaatatttaagagcaagagaatgttcacagtgtacaaccgttgttgaaagagtctagatatggacataaagatgtctttttcagaaatttgctagtcactcatatacgtgctgtgagtaatttaggcacatatgctacgctacttcccatttctatttaaaaattccttgcctcagtttgacttacaagaatttagcgctaagaactaattaaaagattgaaagcactatgtgtgaagatgctcattgctgttttcttttgttgaaaagtaagaaatggcctaaaagatggaagagttgtcaagtcagcatgtatgaggattatgtagcaaaaggaaaaaatgcttgtactttaatagattaaaattaaacagcacaatattgcatcttcactataataaagtcgtgtgatttgtatgccattgtgcgtggactagaaaggaacttcagcaaatgaaaacagttcgttagcatgccacagttataaatattttctttgaacttagtgtttcattaatctgtgcagcttaacaagtaaaaagtacagctgaaaattcagaaatcttcagatatttgatgattgtttgatttgctgaagaaaacagataaacgtatgttttttaacgattaaaaactgcttatttgaaaaatgtcagtacaaaggtattctgttgtttcatgtttcctgtgtttaaaatcattcttaatactgctttttagccttgctatacatcctgacaaaattaggattgcaactggacagatagctggcgtggataaagatggaagggtgagtggcatagtgttatgccttctgtacctagagac

SEQ ID NO: 93871 - DNA, 1518 bp, Homo sapiens
gttaagaccatcttgaattgcctcataactctatcttttctaattcagataatattccaatttaggctaagagataaagaggagaagagagtaagctctgcccttcctcagtgcctctcactcttcactacaatgtttctctgttccataacattgtaaagcatatttcacaaatgatactatttttaaaaagcatttaatatcatctataggtatttttcttaaactggaatacttaaaatacgtgaatgagaatggtttcagaaaaacaggaaatttcattataaaaaaggaatttcattataattttacttaggttgtttattcaagttaatgtaagtcaggtatctcacagaaaactgaaatcagcaaactctaaaatagccatgaattttagcttattctgtcaaactgtcaaaatttagtgaggaacaaagttatgaaattgtgtacatttcttcttacctaccacaaggaaaaatagcttaatacaggcagcaagaaggaagcataagatgcagaagggactaggatagcctcaaaattagtcactatctctgaataataggagtgactagatggcaagtggaaataacctggagggatgaggggatttaaatagaatattttgtaaaagaatctttatatttttgaggaaaatacaattgtagtaaatagtgtattcattatgtttcagagagcgatgagtttaaaggattttgggttatcttactatttgcagttttaataagatggtatttctttcttagaatgttagccctatcagtgaattttaaaatgcctctgattgacttttctttaggattcaggtgttcatttatgtattattgatgactccaatgagcatatgcttactgtatgggactggcagaagaaagcaaaaggagcagaaataaaggtaaatttttaaaaaaccgagtattgtgttttagagtacgttacttgttttgcaggtatttggaactatattggtattagaactatctattcgtaagtcgcaaaagcagatctactagccaaattcagcaaatttagtgatttgtcataatcgttaagatattaacactatagttatacaagataaaatagtcaagcaacttgaagcaatttcaatatttcagacattactatagtcctgaaatgccagagtagatggatgtgtgatctcataattaagactgaacacacttcttggttttcttctttaataaaacatgtaatttcattccatctttaaagctttagaaatctagaggaaaaattcagtaggaatacgactgatgtaactgaagggcttatgttaagttttttggtcttaattgtgtttgtaggattattttagaaaattcaatagcatttataattgctataattgcattataactctttacagtacaagggttgatctctgtgtagatcaagctgtacgttgtaagagaagaatgtaaaatgcattgaagctgggtttatatgagccagaaatggacttctccctct

SEQ ID NO: 93872 - DNA, 1057 bp, Homo sapiens
aaatacaaaacttagctgggcatggtggtgggcgcctgtggtcccagctactggggaggctaaggcaggagaaccacttgaactccggaggcagaggttgccgtgagccaagatcactccatttgcactctagcctgggtgacagagcaagactgtgtcttaaaaaaaaaaaaaattgttgcgtgaatgaatgctccataataatagtacaaagaaagataagactttcttttctttctttcaatacaaatagcagtgtctttaagaaagaatgtacattgctcttaaattcgacagttttaagtgtacttttctggcatgtgcaagaagttaaaggtattcatataagtgtctttctaatgcagcgtttttataaatagcataaaaggtgatacgataatacaaggacatcaaatttaaatcatcccaaaaaatacattatcaaaatttttcaggaaaattgtcttagaagaagaggcattttctcaaaatcttgccctatcgttaattgtaagtagcagtaattgaattgatacttgaaggagataaggatatacattcatctaaagctttatttcccttttcatagacaacaaatgaagttgttttggctgtggagtttcacccaacagatgcaaataccataattacatgcggtaaatctcatattttcttctggacctggagcggcaattcactaacaagaaaacagggaatttttggggtaagaatcagattgttttaatgtcattaggtgtataagactttaatttttttaattgtttaataagcatcaagttgtcatggcaaaaagaaaactgaaaatttttattgtttccttgtagaaatatgaaaagccaaaatttgtgcagtgtttagcattcttggggaatggagatgttcttactggagactcaggtggagtcatgcttatatggagcaaaactactgtagagcccacacctgggaaaggacctaaaggtacagtattcttatattaaactcatttctggtaattctcacatagtactctttcagtcccatctcttagaccagg

SEQ ID NO: 93873 - DNA, 1063 bp, Homo sapiens
actgggctgttatttagccatcacattggtacagctgaatcaatttttaaaatactgaaattattctctgctagtaggtcaaaagccatcactgcaggtatccattgcctacctttgtcccaataacttctgtagtgcccccatatctcagcaaataaaggggagtaatccttggcacagcagaaggcctctgggttaacaatggttgtaaaacgttaaacgttgtgactgttacctcagaaggtcaaccaaagatgtttttgcaaagttaaaggaacatcaaggtgggagacttgagcctagtcacagctttgttattagctaactatgtggtatcccctaagctgctcctgtacctcttgtgtcttgagctctcatatcagaagagtgacacctaccctagctaccatacaagatgattatgagagatagtaaagttctgaaacctatactatatcccctttcgtctgtggaattatcactacttttgctttggttttttgtaggaaaatattttgaaatattttcagagtaaataaatattgacagaaatgcaaaagattgtattataccctaaactttactacctgctttgcacaaaagacttgctgaaaataggtttttgattgagtcatatgaactttctgattattaactctagttctactgaagttttcttccaaatagacactaaaatctgaagaaaagtattatcactagtgtttttatttttccctcatattaggtgtatatcaaatcagcaaacaaatcaaagctcatgatggcagtgtgttcacactttgtcagatgagaaatgggatgttattaactggaggagggaaagacagaaaaataattctgtgggatcatgatctgaatcctgaaagagaaatagaggtaaggatggaaacggaatataaaaatattaaatactctaaactcaggtattttgtcccacattaagataacttatacttttctggcaaacttattaaattcttataatttcatttcctttcctcaagaaaggagtttgttgttgcctttaagataacttttttca

SEQ ID NO: 93874 - DNA, 1044 bp, Homo sapiens
ttaccctaccagacccccaattttttttgttttgttttgttttctgtttttttaatcttgttttcacttttgagacagggtcttactctgtcacccaggctggagtgcagtgcctcaaactcctgggctgaagcaattctcctgcctcagcctcctgactagctggcaccataggtgtgtgccaccttgcccggctcacttttttaatttttcatagagctgaggtctccctatgttgtccaggctggtctcaaactcctggcctcaagcagtcctcccacctcagcctcccgaagtgatgagattaggcatgagccactgcacctgtccggtttttaatctcaaccttttttaaaaaaaaagtccataccttaataaacagtatatcaaatatgacttaatcttgtagaatcaagattttacaggtagccctgtagcacttagcccacttttcagagaagattaatgacttgtcattggtgtcatcttgtgacgtaatggcagatcaaggacttgaacacaattctactaactcttagtagagccgactttccaatgtacagtaatgcctcaggtttttcatttcgtgtcttattttactgtacaactgatccagaagagagagcaatgtgtgacatggaataatcagaatgacttggaagtattgagaaatggcaagtttgtcaaatgcatgagacttgtcctaatccagttaggcagttctttgaagcgtttgaagaaagtattaatttgagatacccataggaactgttaaaagtttgcagtaccgtttgaggttgtaatgaaaggttcaactattctgcgttcctaattgtcttcggttttgtgctttgcttctagctttcagttcttgctgcctatttccaccggctggtcttatagtcagtcccctgcttttatctattgtctgctgttatataggacaggcaaaactgggtcaacactgtctctgctgcttactagtttgtgactttaggcaagttaacttctcagagttttaattttattatcttaaaactggag

SEQ ID NO: 93875 - DNA, 1081 bp, Homo sapiens
tgtcttcaaggagatatactagaatttgctcctgtgtttgtgcccatggagtaaagtttgaggcttttttctaagctgtgcatacactttgcattagcctgtgacttgggtagaggaaggacactgaggtgatttgtggggagggtaacatagaccccaacagctgcatttcatcttttctttgcttatttattggaattgatgccaggcagaaaatactttcatttctaaatatgagttaataactttcctaagatcttttctaaatttggggacttctcctactcaagagtcctttttgagaatactttatgttgatttaccttctgaaaataatctgtgtccaacatagatgtttttgcatgaatattatgtatatatacaatgcttttgatgctcttctaattgaactattgaaagctttgcacaaagctttgcacaaagatgcagatagtatttttaaatactattccattagggtgaaattctcagaggcctgtactttgccatgaccaatcttgttaaatcttcatccacgtagcaagttttaatttcagaagcatggcttccccagacgccagagccaggctcatgtgcactatgaaaaggatgtatgaaccctgccatactcagaaaatagccaacatccatgtgcatcttgctgtctctgaaaattgatttcttaagttagtaggtcccctgtatgcctagcaagtgattcccaacgtgttttccaatataccgcttaattctagtgatttcagaaagcttcacttctcagattcatataatttaaattggtttaaatatgtttatttcccatacagcactatggtggagattatggctccagaaaggtttggggacacatcggtagacttcagaagggtactaaaagaattagagtcattgttctaatgtaaatcattaaaaactatccctaaggtacactgaatttgttaacttacaaaataaaatcctggtcaggtgcagtggctcactataatcccagcactttgggaggctggggcaagtggataacttcaggtcaggaattcgagaccagcctggctaatgtggt

SEQ ID NO: 93876 - DNA, 1059 bp, Homo sapiens
attcccacagtgtgaaaacctaagcagaaaaagatcgttgtttcctgcttaaggaatgttttaaggaatcatgattttattgagacctactgttctgatggagtacagcgttgggtgaattttccccaaaacattctttagagatagtctttctaggatacctccatagaccatatacgggtgctgtattcctcagcttctgagttgtaccatggataattcagaagtagcccaggaaaactgtattcctgatgccttatgcacaacttataaccaacacttcattctcaaaaatggagtcactctcatggggacaccagtgacgtgaaataaggccagagggtgtggtatgtgttgcaatgtcctgtaagatacaagtttaagagactgtctttcttggaagtgtctaatacaggtagtaggtgctagtttctggtatctagataggccagaaagtttctcccaggtttcaagtgctgaggatttgctgtgagcctgctcagttttagagggtgtgacactgcttcctctcctttagaaattccaacaaatgtgtattcagaaacagtattggctagctgttgaactgtttatcattcagaactctaaatgctttctaacaatttatctgttattttctagggacattccagctacatcacacaccttgactggtccccagacaacaagtatataatgtctaactcgggagactatgaaatattgtactgtaagtatgaatgattttatatatatatatatatgctatgattatatttatatatatatatatatatatatatatatatatatatgctaagatgtgtctgtcaggggcgctaatgaacaggctgcatggaatctgaattgtgcagagaatgcttgccaacctctttaacctgacaaagcatatgttatgctgagctaaggtaatgagaatctcaaatgtgattcacttctccaagagtaatgaattaatgttaatagtgtagaacagaaggcacatatagtaataagaaattactctgtcaaattgatgctgctctgaatggtttttca

SEQ ID NO: 93877 - DNA, 2140 bp, Homo sapiens
atgtaaagtgataataaaaggaaataacggctagccttactcctgagatttgatgacttctggctttaaattggattgcccatttcacaagctgagtttaccccccttacgtatcacctccatttctgaaacaggcatgtcaagaatgagtttaattttcctgtctgtctgatttatttcatataggctcccagtcacaagtacagtgcccacagcagccatgtcaccaatgtcagttttactcacaatgacagtcacctgatatcaactggtggaaaagacatgagcatcattcagtggaaacttgtggaaaagttatctttgcctcagaatgagactgtagcggatactactctaaccaaagcccccgtctcttccactgaaagtgtcatccaatctaatactcccacaccgcctccttctcagcccttaaatgagacagctgaagaggaaagtagaataagcagttctcccacacttctggagaacagcctggaacaaactgtggagccaagtgaagaccacagcgaggaggagagtgaagagggcagcggagaccttggtgagcctctttatgaagagccatgcaacgagataagcaaggagcaggccaaagccacccttctggaggaccagcaagacccttcgccctcgtcctaacaccctggcttcagtgcaactcttttccttcagctgcatgtgattttgtgataaagttcaggtaacaggatgggcagtgatggagaatcactgttgattgagattttggtttccatgtgatttgttttcttcaatagtcttattttcagtctctcaaatacagccaacttaaagttttagtttggtgtttattgaaaattaaccaaacttaatactaggagaagactgaatcattaatgatgtctcacaaattactgtgtacctaagtggtgtgatgtaaatactggaaacaaaaacagcagttgcattgattttgaaaacaaacccccttgttatctgaacatgttttcttcaggaacaaccagaggtatcacaaacactgttactcatctactggctcagactgtactacttttttttttttttttcctgaaaaagaaaccagaaaaaaatgtactcttactgagataccctctcaccccaaatgtgtaatggaaaatttttaattaagaaaaacttcagttttgccaagtgcaatggtgttgccttctttaaaaaatgccgttttcttacactaccagtggatgtccagacatgctcttagtctactagagaggtgctgccttttctaagtcataatgaggaacagtcccttaatttcttgtgtgcaactctgttttatcctagaactaagagagcattggtttgttaaagagctttcaatgtatattaaaaccttcaatactcagaaatgatggattcctccaaggagtcctttactagcctaaacattctcaaatgtttgagattcaagtgaatggaaggaaaaccacatgcctttaaaactaaactgtaataattacctggctaatttcagctaagccttcatcataatttgttccctcagtaataggagaaatataaatacagtaagtttagattattgaattggtgcttgaaatttattggttttgttgtaattttatacagattatatgagggataagatactcatcaaattgcaaattcttttttttacagaagtgtgggtaacagtcacagcagttttttttaccaacagcatacttaacagacttgctgtgtagcagtttttttctggtggagttgctgtaagtcttgtaagtctaatgtggctatcctactcttttgggcaatgcatgtattatgcattggaaaggtattttttttaagttctgttggctagctatggttttcagtacatttcctactttaagagtaattactgacaaatatgtatttcctatatgtttatactttgattataaaaaagtattttgttttgattttttaacttgctgcattgttttgatactttctatttttttggtcaaatcatgtttagaaactttggatgagttaagaagtcttaagtatgcaggcgtttacgtgattgtgccattccaaagtgcatcagaactgtcattcccttctaatatct

SEQ ID NO: 93878 - DNA, 1155 bp, Homo sapiens
ggagaagaaagagcatttctttaagtacctggggaatacagctctcagtgatcagcagggagtttatttgaggacatcagtcacctttggggttgccatgtacaatgagatttataatcatgatactcttcggtggtagtttcaaaagacactactaatacgcaggaagcgttccagctatttaatgctggcaactactgtttaatggtcagttaaatctgtgataatggttggaagtgggtggggttatgaaattgtagatgtttttagaaaaacttgtgaatgaaaatgaatccaagtgtttcatgtgaagatgttgagccattgctatcatgcattcctgtctcatggcagaaaattttgaagattaaaaaataaaataatcaaaatgtttcctctttctaagtgcgtcttaactctttcttcatttatactgagagtttccatgactatccagttatcagaaggcatgacaattcagaagacaacatttatcagtgggctactgctgctgctgtggataaaatcattctggtagtaacaaactcccatctcataatgttagaggaaattacttctgatttatgctccccctgaatatgtggatagctttgttttcacttatttcatgtcagcactttctctaatgtttaatattggataatcctgataatcttcgttacccatccgactaggctgcctcgcagtgttagcctttgtgaagtacttgaactcagtaggccatggcattctctgctttctcccatctctcccatgttgctttttaacgcagatcttctgtataccacaatcacaaattggctactacaaatgtttctttataaagaataggttgattgatagtattccaaacattccccaggtttacaatcatagaaatgatggggttttcattattgccttactcgtccctggtgactgaatattcacagccacttacttacatatactaatccatgagaggctatcctggggtaggagttccattttcactgattctgagacagaatggctagtgggcaccaaaacaaacccactcaacaatgtgatttttcttcacaagtaagaaaatccaaaactacttctatggcgaaatgatgaattagattttgggcacattgaggtgttgtatta

SEQ ID NO: 93879 - DNA, 1050 bp, Homo sapiens
aattgcacaggtagagatttgtaagtcagcttgacagcaagcagttggtgggatggcattttccattggttgaaaggcatcttccttacctttctctgaattgcgtcaaaaataaattgaggccaataagcacatgaagatgtttaacattttcagttattagagcaaatcacaaccacaatgaggtaccatttagtatccaccagaatgcctagaatcaaaaagacagatgataacaagtattggtgaggatgtagagaaacgaaacatgttacatttgtggtggaaatggtaaaatgacgcagccactttggaaaacagtttggcagtttgttaaaaaaggaaacgtaattttactgtgtgatctaggaattcctctcccaattaagatggcagaatggtattctaggtaaagggaactgtgagagtgaaggaagggagggggtctggaggagaagcattgggtaggtaagtttgactgtggaggatggaggtaaatcatgaagggcctagtatgtaaggacttaattttgtgaggcactagtaggaagttgcagagcaacttgatgcagagttgtggtagtttgtcctttcagatgagacagatgttggggatgaggagggagggcttcagcatgattggtgaattggtgcttttcacagtgacagggtgttcctgaatgggcttaggagtgaattttggacatgatgagtgtgaggtgtcagaaggacatggaggtaggtggtgatgtctagcttaccgttagaaataaatagaggtcaggtgcggtggctcacactggtaatcccagtgtttccggaggccagggcaggagaattgcttgaggccaggagtttgagaccagcctgggcagcaaagtgagaccccgtctctaaaaaaaaaataagaaaaattagctgggtatggtgaagcgtacttgtagtcctagctactcaggaggctgacgcggaaggatcacttgagcctaggagattgaggctgcagtgagctgtgatcaatgcgttgcactccagcgtgggtgacagtgt

SEQ ID NO: 93880 - DNA, 1052 bp, Homo sapiens
aggagtttgagatcagcctggggcaacatagtgagaccctgtctctaaaaacaaaaacagatgattctaatctcagataagaagggcaagttttttttttttttttcgggggttagtgggggagttgcggtgggaacgggaaggaagagtttagggtttataaatgttgagtttgtgatatgtcatgcttggtagcagctagatttttgaatatggagtttaataaacttgggtgtcttcagcccataggtggtaatttgtagggaagaaaggttggattatagttagagtatagaaacatgagggaagggtggagaaggagaatgtgtttaaagaatagtccggatgagaagggaaaccagtgtggtctcactgaaaccgaattggtaatgacttgtaaggaaggaatagtcagcagtgttgcacttcttttacagattatgtgagaaaatggccatttctatcatctgcttctatgaaatgtattctccagtgtatggatattaaatgttacagtttgatgagtttggacaaacccatgtactgtataaccacacctccctcaatatgcaagatgttacatcatcccaggaagttcccttgtaccctctgtcaatccctgccaccttcttattctgacttttatcatcataaatagatagttttgcctttttttgaacttcatgtaaatggaaccagctctgacccaggctggagtgcaatggcacagtcacagttcactgtagactcactcctgagctcaagtaatcgtcctgcttttgcctctgaaaatgttggaattacagatgtgagccgccgtgtctggctgctcaaaaaatatttttgaggttagtccgtgttgtacgtatcagtagttaattccttttatcctcttattcttctgtgggatttcattttataaatatatcacagtttattctgttggtggtagtagatgttcttttatttatttttttaaaatattttttgagacaggttcttgctgtgttgcacagcctgatctcgaactccccggctcaggcagtcctgtc

SEQ ID NO: 93881 - DNA, 1030 bp, Homo sapiens
tcaatagcaccatgttagaaatgttcttctgctctaatttcccctcattcttaataaagacacaagacataatgaggcaaatgggccctgtatttggaatgcaaatctggcctgcagagccacatcctggcagagctgtctgggaggaaaatagtcacagcagcgctctccagaagagtccttcctgaagattccccagctgaacctgggagctcagcctacagcactttcctccggaatgagagttggtgactctgggggaaatcctaaggcaaaactggactgcccagagaaacaaataggtgtccccaatgaaccttgctgaaaagagtccaaattggactctcggagaaaatgaggggaaatgaaaatataagtgaatcaatcatggtttcagacagatttggagctaggaagataacagcctgtgaatgctggtgggagagctgttctaatagctcactgattatttgttaagttttcgagtcatctaagagaaacaggcctctctaaggaaagaacaaagactttttcagtttgacagttctgagaaaggtgaggaataagtccacatgatcaaaatggccttattcagaggagtctgataaacaacacagcagccttgtttccctgggttttaaaatttttgtcttcctcctgatcattcacgtatatcatttctcactccttcgttcacttttgcccctggggattgggtcatgcagcaatcaggaatacatccaggaacaaaatattaaaggcaccatccttgttctgcattagagagtgaacattgtagagctacggaaaatgaagccaatctttcacccaggatggctcagaatagatcattccctgggatctgcatccaccattcataaatgaatccagagcttttctaaaggagcttaaaagattttattcctaatccattttttttcttagagctttggaaatatggctctgtaatttaatgattacaggagatgagcaaaagaatgaactaaataagatagcatcagcttgcttt

SEQ ID NO: 93882 - DNA, 1030 bp, Homo sapiens
tggtgtttcagtaacagctgtgcactaccacccctgaatctgctaccaccacagtgttgtattagagaatcagcaggtgggggacacccatcctcccctggcattacccactccctgacacccaggatgtgaaggaaggagatcccaaagtttcaggttgtaactagtagtgcaacaagcaaagggccaaggagaagcagagactagaggaagggaccaggtgacctggcagggcagggagatgtgggctgcagcatggactaagagcagacgggagacaaactccctttccctgaatgcattagaggaaggtggcagggagagcctcctgagttcatgcctataaggcatttctgacatttagcatcattttcttaggcataggctttggtacatcttgactttatttgaattaaactgatgaaataattatttagcgaatttcagatgctctaattgttatgaataaagagatccctaagattttgctgtatctttggtaggaaaaatagggggccaaattttaagatactgatatgagtgcctggcaccgtaaaaacatctttattgatggaattcatcaaagacaagagatataaaatgtttaggccgggcgcggtggctcacgcctgtaatcccagcactttgggaggccgaggcgggcggatcacgaggtcaggagatcgagaccatcccggctaaaacggtgaaaccccatctctactaaaaatacaaaaaattagccgggcgtagtggcgggcgcctgtagtcccagctacttgggaggctgaggcaggagaatggcgtgaacccgggaggcggagcttgcagtgagccgagatcccgccactgcactccagcctgggcgacagagcgagactccgtctcaaaaaaaaaaaaaaaaaaaaaaaaagagatataaaatgtttaaaagagagacaagtgtatgctagacatctactcttgattattgagaaggctgggaaggacagctttctcaggaagctgtagagagaaatttggtctgttt

SEQ ID NO: 93883 - DNA, 1060 bp, Homo sapiens
tttgagacggagtcttgctctgtcgcccaggctggagtgcagtggcgggaccttagttcactgcagcctctgtctcccgggttcaagcgattctcgtgcctcagcctctccaatagcttggactacaggcgcgccaccacgccccgctaattttttttttttttttagtagagtcgggtttttgccatgctggccgggctggctgatttgatattcttgcgttgacagtggcccaccggtggagcagctgcccccagaccccttgacccggtggtgcttccaccctgccggaagcaccttgtgtggccccgccaacagcatggcggttgcatccccaggaagcaggcccgcagcgccaggagggggtttcctgaggacagaggcccttgtcctgattgtcgcagcaggccctgtcgatggacttaactgtgaaaatcaccctttcaggggtggatgcaaggacttctgagggcggagaagtagataccttcctggatagctgtggagccggggtcctgcatttccctctggcgtctctgctgactgagatgtgaagcagtcggcccatgtcccgagaagaggtttcctttgatttattgctattaaagttgttgctttgagagctgggcataaaccataaaaacagtggggaatcacaagaaatttgtgataattgcatttaagacaggaacccattcgtcaggtaacacttatgtgctattaatcagagcaatggtttctaagccacagggtttgcttctcatttgagttcttctttatattttatttttggaactaatcaggtttttgttttctcttggggaaaaataatagcaaatgtcagactgaacattatgtgtttggattattttcacaaatttaaaagaattaagagccagtgtgcatggttgaacttttggatacctgagaagataattaatgttttgggttttttttttttttttaaagggacggagggggaattttcatagtctatcccgaacccccatctttcattgatgtcttaagctgacaaggtgatggatataccagtcagaag

SEQ ID NO: 93884 - DNA, 1033 bp, Homo sapiens
ctggagtgcagtggcacaatcttggctcaccgcaacctctgcctcccaggctcaggggattctcctgcctcagcctcctgagtagctgggataataggcgtgcaccactattgtctggctaatttttgtatttttaatggagatggggtttcaccatgttggccaggctggtctcgaagtcctgacctcaaatgatccacctgcctcggcctcccaaagtgctgggattacagatgtgagccaacatgcccaggctaaacttaaaaaaaaaaaaatctaccttgttattagtttatatttgggatgatgaatactttctattttaaggaaaatattttgaacatgaattcagttagcactgaatgtcattgcatcagactatttaataattaaaaatacatagacactataagtctttggactagagcataaatctggagtacattattttccactttttgtagtagttaattattttttgcttttagggccccaaactgatggcttacatgttaatgtaccaaatgacctatgacttagatttgtattatccttcattttagaaagccattgacttgaaatctccaaagataaacttttaggccgtttttaacttgaaagtaaagaacagatttacttttgtaaaggtaacagaatgtagatttttaaaatatattatgaataccaagttatggattatattctatttaaattatttatgtaaagataaatgtatgtctgttttgcactaaaaaatatcttatgcattcaaccatttttatacaatgatagttcagttttatgttgaaataatttttttttttttttgagacagggtctcactctgatgccaggcttgagtccagtggcgagataatggctcactgcagcctcaacctcctgggctcaagtgatgctcccacctcagcctcccaagtagctgggactacaggcacatgccatgacacccagctaatttttgcattttttaatagagatggggttttgccatgttgcccagggtggtctcaaa

SEQ ID NO: 93885 - DNA, 1032 bp, Homo sapiens
gtgttttttgtttgagagtaacattttcatttctaaatgttttataatttctcatatcaatgtcagaagtatcctggaaacatatgtcacatgcgggaactgtttaacaaatactttaaaaatttggccaaaatttaaactgtataatggagctagatacaagcaagaatagtatttgaaagacttttccagcatacttctcaattctttgctttatttttgtgccaattattcaccttatcgtgccgcttcatggaagcttgagtatgttctcccttttccattttggatttatctctttactgtaatgactcaaaaggtatttaagaattgacgagagcttgtgttgtttagcatcttactggataatatttgaattcattgctgttcctaggtgataactgtcctaatatttagatgtccaaacaagaatacttccaacataaaaattataataggaataatttgagatgactcaatattacaacctcttcttctcttaacctcctcccccaaacactagaggtttaataagacttatcagatgaaaggatatttatatagccttttagtagcaaagtcatacttacgtgttgtcactggattatcataaaagggagaaattaaatattactgtactcttagttgctgtgtagctaagtcaattttaagccagtaaaagcgatggatacataatgatttgatctgatctttaactattgtgaatcacagctacaccaaaactcttcttgtaagaatactgactaatatgccatgttaatctggctagattattaggactagataatgtaaaagtgatgattgtttagtaactaaattttagcaacagaaattagaattttgctttttcaaccagttaccataaagaagttagtgtatatataaacacaaataattagtgacagattcataaaaaattgaatgttgtacacagtaattttgtcagaggtagagaagacagggattgggaagtggtgggtgatggaggacctggatatatttatcaaataa

SEQ ID NO: 93886 - DNA, 1035 bp, Homo sapiens
actggggactgtgttactttccattagttggagcagatggtacaaggcggagagtggcagatctgaagctttggatgataactcatgcattttagctgttatctgtggagagttaggagtcagcaatacctcagtactcagagtattcgagtattgctgcttttagtactgcgaatgtttttgtattcatgactatagactaaaacacttagcttattgtttcaggaagaccttatagtctagatactttgaaatatccctacctttgtttaaatcttttgttttggccaggctcagtggctcatggtctgtaatctgagcactttgggaggccaaggcaggtggatcacttgaggccagcagttctagaccaacctgggcaacttgttttaatgtacatttggaaactttgtgtgcgtagaagtatcattgtcctaatgtttgcagtgagtacctagtacacagtagttaagtaagaataatctgagttgagcactggacacattagttacctgttgttaggaaatagcaaataatgatatcagaatgaactacctcgcttttcaaaatgtcatttgttgaggcagcccccgctgcagccaccaccgagcctgccaccaccactgagcccactgccaccgcctctaagcagaagatggttaagcctcccacgtacgctgatcttggcaaatctgccagggatgtgttcaccaagggctgtggattaggcttaataaaacttgatttgaaaacaaaatctgagaagggattagaatttacaaactaggctcagccaacactgaggccaccaaagtgactggcagcctgcgaaccaagtacagatggaccagatatggcctgacagttatggagaaatgaaacactgaccgcacaccaggcaccgagattgcgtggaggatcagcttgcatgtggactgaagctgacctttgattcatcgcttgtcacctaatgctggggggaaaaaatgctaaaatcaaaactgctataggcaggagcatatcaacctgggttgc

SEQ ID NO: 93887 - DNA, 2210 bp, Homo sapiens
gagccctccgggtaggacgcactgcttctctacccgtcccgtccgtcctgtcgcgtctgtccgtcccgtccatacgtcccgtctccgtcctgtccgcctccgggcgaccgagccagcggggtgcgcgcccagcgaggcccaggcgcggccaactacgggaccggtcggtccccactcctaccccgttgtccggggcaccagcggggtctggcccttacactagacgcacctcttgagggcgaaatcctcaggcatggggaggggcgtgtagagatagacaaatgtcccctctttgtagtttacttttgcgcagagagcaacctgctaattacatttttctgaacttttattgttagggttcaacaattaagccttgaactaagcgcagtttgaattatttgccaatttttggtagtgtttggaaagatggattcttgttatggtgaaatgtgcactctccacacattctatacactctgcccccggcatactatgtgctgtaatggaatcgttatattataaagcaggttaatttatcgatagactctaaataatggatgtctgtgcccttttcttcccccttttcctacaaagtatggagttagcaaacctcttgtccaccgtttggtagcaaagattcacactgcgactttcagagggtctatgatatgggaagggaaaaaaccattaccttgagaacaaagaaaaatctaaactgtcctaaatccagaaaacagtatttgggtaaatttttttttctactttactaggatgaatgggaaaatattgcagtcttttcttagactgtcttaccttgaagtggtgatagcactttcctgtttttagtacaagtgagcatattcagtgggaggaataagcagactaaggatggactttcaaagaagacagccttttggggcacaaaacccaaactgcatattatagtttatctgtttgacactgtcttaagatcctccttccattcattttttaaatttaaggttgtgccctgtcatgttttactgataggcatgtacatgttcggaacggcggccttgctattgcagtggattacttctacataatattcttcctgtagggagtaaggatttttatataaatctaagaagtaaataaaattgtctagtgccacggagtctattatttcttcttggcttgaaatcgaagatacatgctttgaaaggaaattcattaggaaactcattttgtttagtgaattaggttctaacagttttgaatttacagataagagttacttatttggttctccaacaatacaatgaaattaatttatttacctaaatacataaatgccttttttttttaaggagggctttaggaaaatggacttggaattttgattctccagtaactgtagaattctaaggttagtgaaggtttgagctacattagcaaaggaaacaggagaattgaattattattagtgcagataatgagggagttgactgaaccagtatatgagcaaaaccagtaaaatacctcaaatataatcttagggggagggagggtgttttgggagagggaaagggccatatggagatcattaatgtaaagcatttgtaaagaaatgagagaaatgcatagtaattttagggagagaaacacaagaaacaaaaaagggaagacagagatggaaaagagggagactgcaaaagaagtgaagggagaaaagtaatgcttatttgtgtatatgtattttatgtatgtgtataattattcaagtcagagctgtttcctagatacttagatatttcaggcaaaagcatgtttttcttagcttaatggcccagttttagcttcactgtctgagtgtaggtatatgaaaaccaatatctgcaatcccaaacagataaactgcaggatggccgaatgaggatgctgctcattacagaggaagctcccctctgcccttcaacagagagggcccttaacctgtcactttaagtatagtcgttaaaaccctgcttgcttgtggttgctgaaattagtctttctaaaacatcattctcattatttgaccatattttgcatctgccaaataaagccaaaacttctttcttggccttcaaggctctttacagtttgatgacaacctgccgatcttgacttactccatcatagtttgcaaacatcttttgaatatctgttatgttcaaggcactgctggt

SEQ ID NO: 93888 - DNA, 1761 bp, Homo sapiens
gttcatttagcagattgctggatcattacttctggagaatgtatttgatcacaatattatgaaatatagaagcactttggttagaaatttaatatgatttcagttttaaggggcactgtttccacaggactatttcttaatctaaaatacggctgctggacttcataaaattgacaaatttactgcagcacttatattcttctttgtatttgagtatatctgtaagaccagagaaatttctgaaaatttgttctcacacttgtttgaaaatggaaatcacaatagcattttattataatctgtgtgtttttacagggaactttgtaatgaatgattgaccttcttgagagctctcagaattctagagaataggagagcaggagcctgggccccagctgcagtaaatgacagcataactgaatttttttttgaagccatcatactttggaagaacctaactgaatattgtttgcattgtagattgtagccaaaaagaaatgagagtttcagtgttcataactcaaggtttttaatatttttagatgtgaaggtaaactaagtactgcttagaatattgactcttagagattcatagacttccttggtgtagagaatgcttttccaggtcacctggtctattctgcatgatggctgcttcccacctgcagagcttcactgtccatggaacatgggatacttaggggagggcttggtgattttacacttagctagtgctttctgggaatgggtttggacgaggtgtgtttaaatgactgaaataaattatttccgtcagttgtggctttaaaaattggtgggattagtttctttctcttttgttttttttaaggctagttaattgaagcagttgggggattagtttcttaaagctaatcagtgttaactatgtctggctttaatcattaaagcagtctaatcagtttagtttaattaatgccagtgttattatatgtttgacattccagttgtgcttggaagcagaacaaatgttgctcatccttatttgaattttttagctctgtggttatcctgcagttgtggttggcaccagtgttaatgagcatgatcatataattgtgctgtatctagtttcgttgtataaattatttgactctaatattcagtgcaaatgacttttatttttcttatctcttagactgcaagtggcaacgtggaagcaaaagtagtatgcttttatagacgacgtgatatttccaacacacttataatgctcgcagataagcatgctagtaagttgtttttctctgattaaaaaaacgttttaagtcttgtgttttttgtgatgaggtggaaacatgctttttcttacctgaagtcttttgcttgtccatttatcttctttgtagttttgatgggagtaaaataagtgatactaactgaaaccaaacactggtgtttggtttcagtgtatatgtgtatatatgtgtgtatgtaattttatatctatatatatatatatttttttttttttccggagacaaagtttgctctgtcacccaggctggagtgcagtggtgtgatcatggctcactgcagcctcaaaatcacaggctcaagtgagcctcctgcctcatccttgcaaagtgctgggattacaggtgtgagctaccaggcctggcctagtatatggttttttaggttgtatcacattcattaattggtgaaaatgttgacatagaagcctttgtaaataggctttagcaaaggatctgggcagtg

SEQ ID NO: 93889 - DNA, 1024 bp, Homo sapiens
aggctggtctcaaactgctgacttcaggtaatacgcctgcctcagcctcccaaagtggtgggattacaggcgtgagccaccaacccagccaccttcttatttaaaaggcatctcagaaaagaggagataaacacattggctttgcctgtcatttaattcattattctgttgagactgaaaatattattccattctcctccctgcattgagatgctgtaaaacttctttcagttagctcactgaataaaaataccatacaattctgggatttatctcttcttgtctctttttaaaactgagttattgagtattgacaaaacatttccaccctttttttttttttttttggtttatgttttacctagagcaattagtgtttgaagggaaatttttcctcgggttgtcctatgtgtcagaaacaaataaatgaactaaaaatattttatgtgtaagcagaattttctttttaaacaaaaaatatttcaaatactgggcaaagaaatagtcggtagatgggagtagattggaatagattgccagagtgaatttatatattgctgtgtttagggatggtatatccagtttggttaaatgctcagtgcaacctgggatccaaaagcagtggatgatagagcaatatatatatatattttttgagacggagtcttgctctgtggcccacgctggagtgcagtaatgtgatctcagctccctgcaatctctgtctcccaggttcaagcaattctcctgccacagcctcctgagtagctgggattacaggtgcacgccactatgcccgggtacttttttgtatctttagtagagacagggtttcaccgtgttggccaggctgatctcgaactcctgaccttgtgattcacctgcctcggcctcccaaagtgctgggattacaggcgtgatccaccgtgcccagcggatagagcagtctttttttgttttcaggaccacagaaaacttatgacatgccctcttgcttttaaaatttaaattttttttggtagtg

SEQ ID NO: 93890 - DNA, 1065 bp, Homo sapiens
ttatggctgtgttgtatatctaatttgtttaatcctaactaatggatttttggtttttttagtcttttgctgttaaaaataatactataatgaataaacttgtgcctaggacattttagttgtgtgattgtgagtgtagctgcaaaattataccaagtaaaatagttgaaagtatcttaatttttattttgtatttatttcttcatatttctccattggtcaaagcagggaggttcagctgaaaggatttgtaaatttaatttatgtctattgagaccttttttgctactttcagagaaaaacaagtttttatggatatgtttattgaaaaataaatagtagtgctaactttatataagtaataaaatagaactccactgtggattattagtctctcttcagtttggctgtgaatgttaaaaacttacttggaatctttaaaataattggttttcttcctgctcatttaattatgacagtatgttaaagtgttaggcttttgtaatttttttggtaatctatacataaaatttgaattagccaaaagggtactgttgatacctataagtagtgctccttaataaatgaagttaacatgagaaagttagttagtatgcttagcctcttaagattgctagtaggaggaaaactagaggaaaaatacagtaagtggagaaaaatcctgtcacagcttaacattttatagtgtacatgtttagcatgctctttttggaagatgtgtgtttatactatataacctttcctttgaattaactgcttaacccctttaagggctgaagtagttttcttcaaccagaatcacagtgcacaagagcatttgggttagatgcaaagtatgtcctatgtattgtctcaagtacttgtgtgtgtgtttttttttgattttcaatttttgtggctacataggtgtatatattcatgtggtacaagatatattttgacagaggcatgtgatgcatagtaatcacatcatgaaatatgggctatctgtcccctcaagcattcatactttgtgttacaaacaatccagttatactcttttag

SEQ ID NO: 93891 - DNA, 1048 bp, Homo sapiens
tatatatgtgatatatttgtttttgcatgttggcttttggagatgtcttaatttttgtttagaaaatcaaatgatcttacgacattttaaagaaacattgtgtgagccctgaccagtatttgtaacttgaataatcttcaaaatgctcctgtcagatttctattagttatacggatttttttaggctagttagggtcattttgaaagtgctcgtaataaatgcctctacctacataacctcagtttttctcagagtctagacaagccttataaaaacagacgttagtttccaagctcagatcaaatgtaagtgctgtcagacctcaaggtccgtggatctgtcgatgtttattttgccccttgctctatagaaggctccttgtgtttaaattttaactagtttttagagtaatttcaatatagatgaattagttatatcctgatatgaatgtgtattatttttaggttcttaaatgtagttagtggctgctcataaaaatctgaatattatttagccattggtttgtgtggtggtgtctttgtctgaacatcccttttataaaattacctcataatatctatttataggttcagaaactgactcttagtctgaagttctcattgtactctttttttttcttgaataagtagaaactacctataaagtattgcatattaggatttattgcctaacacaattactccaacaggctagcctctcaagaaatgcctataaagacagccttattttataagttacctgacattaggattgtaaagtgggtctaaatggtttgaaaaaatatatattcctaactgccatgtagtttcttaataccagtctcacattcttaactttgtatttctcatcactgagaaggtgaggtggcctttgttacatttattctttttttctttttcaacaggggaaagtgcagtgttgcccttctgaatgagacagaatcagtattgtcatatcttgataaggaggtaattcacaatcatagttgttttgtttttttctccctttatttcacatgaagctctt

SEQ ID NO: 93892 - DNA, 1059 bp, Homo sapiens
tttcagaccagcctgggcaacatagggaggccttgtctacagaaaattttttttaattagccaaaaaaaaaaaaaaaaaatagctgggcgtggtggtgcatgcctatagttacagctacttgggaagctgaggtgggaagattgtttgagcccaggaagttgaggctgcagtgagctatgatcatactattgcgctccagcctgggtgacagagtgagaccctgtctcaaaaaataaaaataataaaaataaaaaatctcttccatagcaaacatgtttaaaatacaggcaggaaaagcagtgagtcttcattttatgctgtatgtgttaaggttagggtttcttacatattggaaggacttccaaatcattaaaatcagcattatggtaatttctttttaaatgagattttagtagaaatctgtttcatgttgaatcctcacaggaaggggttgctacagttaatgatatattgggggaaaaatgtaactgagttttacaatttgggcttaaaaagtagtcaaaacttgctttgctgtaatagtcaaactctgcagctgactttttattttttgagccaatttgaataaatgttttactccatgacatgttataacagagcttccctttccttcttttttaccccctgcacaggctattttttttcttgatttcatgataacgacctgtttatagtaaattggcttgtcaattattatatcttatagagtgaaaattctttttatttgatgtttgattctcattcagaaacttgtttttgcctcttcttttacagttttttatttactatccaaatgtgttttttaaaacgttaaaaaaacaaaccaaaacagatacttaattcttccttattgtgtttgtggtttattcagtgctgttgggacattcgccagagccctggattgcagcagttctgtgaggcagcctagtttgcatatgagtgctgctgcagcttcccgagacatcaccttggtaagacatggtttgaaattttgtgggtatttatccttctgttacttgtttaattttaaagccatt

SEQ ID NO: 93893 - DNA, 1288 bp, Homo sapiens
aattcctttaaacatcattttatggccaagtacactggcttatgcctgtagtctcaaaactttgggaggctgaggcaggatgatcacttgaggccaggagtctgagacaggcctaggcaacataacaagactctgtctctacaaaacaaaacaaaacaaattagccaggcatggtggtgagtgcttgtagttccaactattcgtgaggctgaggtggagggatcccttgagccaagaagttcgaggctgcagtgagctatgatcatcccaatgtaggcaacagagtaagactctgtttcataaataatcattttctgtgtagtttctgtaatacttgcctcttatgctccttctaggaagttaccttcacacccttcagtgttttttatctctcctgttttgtttccattctgaagcttagtaattttgaggtccgattacttttgtatcacatatattctttctagttatttattaccgtaattattttctaaagcagaagtaggctcagaggctcaggaagtggtgttttgtcatgtttgtatagctggtttcagagatagggtttggatctgcacttgattcctcctgagtagttatctctcctctgtcagattacctcttctatctacccttccacctcatttttgttagaatgacttggatttaagcgtcattattgtctttctttgaggcagcactgaagaagatgtgtttttttgcttgcaacatttaaataccatggtttccttctcatactgctttaggttcagctttacttagactcttagatcctgaggcatttataaaattgagtagtatggttaaaaattaattattagtatgttgataatgagctttgcagattgtttcccaaaaagaacatatgaaaggttcattggttgttttgtaccattaaatgaaaatggattcatcattcagttgaatttggggagtcacattcttttctttgagtatttatggtcctactaccccctcaccccgcttaccttttttttttttttttttttttttttttgagacagtttgctctgttgcccaggctggagtgcagtggcgtgatcttggctcactgcaacctctgcttcctgggttcaagtgtttctcctgcttcagtctcctgcctcagccagtagctgagattacaggcgtccgccaccactgccgactaattacggtcctattctgatcgctttagcacctttttctattaggtgatcaaaccttggatctgaagacctctttgagaggcctgcagagagggcag

SEQ ID NO: 93894 - DNA, 1185 bp, Homo sapiens
acacttcacctgaggtcgttcatatttatctttcatttctgtcaattctaggggaagcacttctatttctggattttctgggatagcaactcctaagtgatgctttaaaaaaaccaaagcagtattaggtttctctggttcttttctaaggctaccagcaccttcgttcagcaccccagagccctaagcacctccagaattgcttgatcttcgagttagcagtgttctaatgggccatagtgacagctgcagtggcatagctggcactgagaccttgactggtggcgggcttggagatgcacgacttaagccaaaagctaaatttttaagagttctattgttgcgtagaagtgaagctatccccatttgtgaaatttttaataagtagcaggagatactttgcgtaaaaggtgcaagactttaagtttatgtgttagaaagtctgggtgggggtgagaggtggggagaaaaacagaactagttctcacttgggcaagaattagatcactttgcagcacccatgtgctaatccgcgacataggcagagatgattttgttgcttttcagttttcctgttacacatacacatgtatgtacatgctatggatgactctctttaaatcaaaggtttttcaaacctcgaagttttggaacctagttattcattgttctgattggaggaaaatgccttcttttttaaaaaatagggcatcactctgttgcccaggctggggtgcagtggcatgatctcagctcactgcagcctcgacctccctgggctgaagtgattttctcatctcagactcctgagtagctgggattacaggcaatatgccaccatgcctgtttttttgtagagacggggtttcactgtgttggcccaggctggtctcgaagtcctgggcaccagcattctgcccaccttggccttccaaagtgtgattataggtgtgagccactgtgtctggccagaaaatgctttttaagtaagctagacctaagtaacttttgcagaagtaacctcgggcccaggagttcaacgttatggtgcttgtgtgttctaatctatcttttctcctttcaaattgtgcttcaaatcactttcccttgaaatatataagaaaaccacagtggccttgctgttccaagcaaacctggccatctattctttgtcttctacaatct

SEQ ID NO: 93895 - DNA, 1051 bp, Homo sapiens
cttacagtattcatttagcaagtttgtgagttaatagtttttatctgctcaaagtaaaatgaaggttagtcttgtaaagggagaaactgataattgtttggaggagtagttgtagtaagacccacgctatcaggccgggtacggtggctcacgtctgtaattccaggactttgggaggccgaggtgggtgaatcacaaggtcaggagttcgagaccagcctggccaatgtggtgaaaccccatctctactgaaaatataaaaaactcgctgggcgtggtggcacgtgcctgtagcccgagctactgaagaggctgagaaaggagaatctcttgaacccggaggtggaggtttcagtgagccgagatggcaccactgcactgcagcctgggcaacagagcaagacttggtgtcaaaaacaaaacaaaacaaaaaaacccctacactatcaggaagtcctgtgtttttggtgtaaaccttggcaatattaatttatcctatttacttctctctgagttccaagttaaaatctggtcagcttttctcaccatttgcgctaaacagtctgatctctgcttttagactagttgctctgctttaagctttctgtatttttctagttgtcttactaattgttgagcctgaatttgatctggacccttaatgaaatgacctctgctaagcacagtaggagaatttgttttatgggcttttgatctttgattcttcttaatgatgtagaggagtggtccccaacctttttggcaccaaggaccagttttgtggaagacagtttttccatggactgggggtggaaggaggtttcaggatgattcaggtgcattacgtttattgtgcacttcatttctattatgattacattgtcatatataataattatacgactcaccataatggagaatcagtgagacctctgagcttgtttttctgcaactagacagtcccatctgggggtaatgggagatagtgatagatcattaggcattagattctcataagaagtacgctacctagatccctcgcatgcacagt

SEQ ID NO: 93896 - DNA, 1072 bp, Homo sapiens
gacggggcagacctcagggggcagtgggagtaatggggagtggctgtaaatacagatgaagcttcgctcgcttgtccattcaacacctgctgtgcagcccagttcctaaccagtccatgacctgggggttggggacccctgagtatcctatgtatattttttattattaaaaatttttttttcctcagctttactgaggtataattgacaagtagaaaatacatattttcaaggtatacaatatgatgatttgatatacatatacattgtgaaatgattaccacaattaacacattcatcacctcacttacttaccccatgcagtggggtaaataccaggtcatcttgtctaactatagtatgtactttgttttgtctttgtgtttatggacttactgtctttagttaaacttatagttcctttgaaatggtgaaatttccatttgagattttcataaatagctttctatgaagtcatcctttattttaaattatgaaaatagaatctttatagaccattacgtatttgatgtgagccaatagcctgccttttatgttgctgcatctttactgaattgtttgacacaaagttattacttaccaatatgggctgataaattaaatcccagacatagtaattaaaactgttagtgtcactgataatttgttcttctggcaaaacttcactcatacttaaattgttacatgccatgatttaaatttgtaggatgcgcagctgaaaatttaaagtgcattggtatttagcttcagatggtcagaataacaatagagcagtgttattaatataacagttattaaaataatagagctacagctacatagaaattgcaaagaatgaaacctaacaaatcaaatctacactgtgaggctcaatgaaaattcaaaaaagataaataaaacctgcagatctgataaaggagtaggagttgagaaacactaaagtgaaaatacttttccctgcaccaaatgtaatacctcattctgtgctctggtggtatttactgagtacctgtaacatgccaggcttgcaaaaaggcactaggcatgcaac

SEQ ID NO: 93897 - DNA, 1632 bp, Homo sapiens
tgtctctactaaaaatacaaaaaattagctgggcatggtggcatgtgcttctaatcccagctgcttgggaggctaggcagaagaattgcctgaacccaggaagcggaggttgctgtgagctgacatcgcgccactgcacttcagcctgggcaacaaagtgacagtctatctcaaaaaaaaaaaaaaaaaaaaaaaaaaagaaagtggtggtttttaaggaaagtactttctatagtagcttattttcatctcattttattatatgttaacatagatgataggttgatttttttttttttcagcttccttggaaatcattgactagcatcattgaatattattacatgtggaaaactactgacagatatgtgcaacaggtaatttttttcatattgctaccaatatggttgcatttaagtgaactttctgtttatattttaatattttttggcgatgtactacttttaaatttgtttaccttactttttccagactactttaaactacatgatttcatatctttaggatattatttaagattttaatcttaatatttccttgacttcgcatgaattatgataaatattttggagagataccactagagaggcattattttccttgcatttgactgatccttcatctctttgtagttcatggcaatgatcaaagatgtgatgctaacacaaacctcttgaacaagttatttttatgaagaattgagtatttagaccaatgtcatcagccatataatttgatatgtttttaaagatcttctgaaacctctttacatgacatttgtgtggctatacccccgaaatccttgaccttaaatgtagtagtcttactagtatggtgtttttgtactgtacataagctttttcttaaatgtaatttttgagtccttctcaaatatcctaaattcaggtaactctcaattacttattttttgaataatattacctctggggaaaggcacattttcctgaaatgacatcggtcaatacttgtgttatgtttgtataggcacatattagaactgataaaaaggcaaatatatttaacacagacattatttttcctatatatgtaggttatacagtggcaagtattagatgctataaaaaaattttatgaatcactttttaaagtatcatagtgagctgggtatggtggtgtgcacctatattcccagcattttgggaggccgaggcaggaggattgctcagcccaggagttcatgtccagcctgggcaacataacaagaccctgtctctaaaaataaataaaaattgaaaacaaaaagtaccatggtgaattgctgaggtcacaaatagtgaatagatactcatggcttgttgaaaaatttccagtgtcaatattaatataattcaaaaagtgcttattataaacaacttaggtatagatcaagaccatgtagtctgggaacctattttattaaaaaagagtctctaaagatggagatgatggtatcaaggatggttgaaaagtagataatattctttccaaaaacttcaaccctgttctaaaagtttcaagttgtccccctaagtatttctgttttctcctcattgggaaaatagaagatagccttatattctggtttgtctt

SEQ ID NO: 93898 - DNA, 1066 bp, Homo sapiens
tttttaaaggtcctgtttattcagtcatagaggaatggaaaatggagttgctcattgctttatttttttaaacctatgcctaaaattgtattaatacttaaagttgtgtaccacagaatctagtgacttttcttagacattattgcagtttaagaatatgcatatgaaagaaaagcttaagatggtaatttttgaattacactttaatacgtattttcttgtgaatttttaagacaatgaacagtagtaataattaggcattgcatgtaaaatgttttattcatcttttgaattagaaacgtctaaaagcagcagaagctgagagtaaactgaaacaagtatatatcccaacctagtaagtaattgaaatcttttaaaatatttgttttggtcttaattttatcattgcagaatatgtcattttgttcagtttcagcaaaatttgaacttttgtgtatctttcttcttctacaaagcatgagacttactattataccactacaataaaaaggagccagtgagagaaacctcaaatagactaacctgaagactagaggaagaaatgtactatgtactatacttttattaaatcaaagctgcagggaaagcgtcagaaaacctatgaaatgctgtattatttgaagcaaatgtgtttcagaaagctagcagcttttcaaactatagattttgtttgggtaatgcatactgctctttggaggtttgttgtttatttggttgaggattttacattgttttcttggttccaatggcaattagaaccatatttggtaaatgtgtgataaataatggagaggttttgattattttgtttgtctagtgttctatcattattatcctttgaattcagaaatcattgtcatctcaaaatgaatgccaattttttttttttttccatttgctttgttttaaatgaggctgagcatggtagttcacgcctataatcccagcactttggggaacctcgtttctgcaaaaaatttaaaagaaatataaggtactatatccttttgttgagattttcagagtttgcttattcatttgttca

SEQ ID NO: 93899 - DNA, 1035 bp, Homo sapiens
ttttctccctcttcaacctatttacagttgtttaataactagccttttgtttctggaattttgatattttgtataatacatgtttttatatacatagaggaggcctcatagacaatgagttctgatctttcatattgatcttttaccacaagacagataactctggtttaattttaagaacatgtaatttttacagagtctgtaatttttattaagaactgtaatagcccatctgcagagtggtttctaattccttctaaattatatgttttatatgatgaatttataaaagagccacttctcaaataaaatactgttgcaactcatgtgtcttagattttcaaaagcaagcataccagctttcttatacttcaaagtgctgccaccatgaaataatacatttggctagttttgaccaagtaacccagataattgtttccatttggctttacgctgactttggagtcaatgtaatctaagtcagggatcaacaaactatagtcgcaagccaaatctgacctactgcttgttttgtgaataaaattttgcttgatttttgtttttgttttgtgagatgaggtcttgctctgtcaccgtggtttaagtgcagtggtgcagtcatggctcactgcagcctcaacctcctgggctcaagcgatcctcccacctcagccccccaggtagctgggactataggcacgcaccaccacacccgactaatttattttttatagagacagtgtctccctatgttacccaggagttctcatgaacagtggaagttgattttaaacaatgaagagtcatggtcagattagcactttaagatcacctgctatatgttgggaaatggtttgagaaagaggactaagagtagatgcagagggaccagttatgaagttcttggagaggaaagataacactagcttgacctagagtagtagctctggaaatggcgtgatatttggaggtgactgacttttatggcgggcgggggtgtcaagtgtgaatcctaggtttctggcacagtgaagt

SEQ ID NO: 93900 - DNA, 1178 bp, Homo sapiens
tccttttttcatagactcgttttataaagatgagtagtgtgagttcatttaacaccttggttttaccagtttatttcttcttcacacattttaaaatgtttgtttatgtttattaaatagtgacggtaaatcagtaatgatatagagctttttgccttattgtacaaatcattttatcaccttattttaatttcattgaaagcagcaaaccaaatcccaaccaaatatccactagtaatgggaagcctggtgctgtgaatggagctgtggggaccacgttccagcctcagaatcctctcttagggagagcctgtgagagctgctatggtaagttttctctagcaggtcagttaagcatcgggaactgttctggctcatggggtgtgagcgtctgggaagtgcctgaggtcagtacggtgcaccttggaaggcacaagcatgtctcctctaaatgagtagatgcccctccttaccttctgcctggaacagagggactgtttattgaatccttattacgtaccacacactcaagttaggcattggatttcccttgatgtactcttgtggtttgttgattatttcatagcagtgtttgctgagttgtgtttagagtcatattagctttgcagaaactgtgttcccatgatgcataccaaattcccctttggagtttctcagtatactttgacaaattaaagctccaagtaattctgtaggaaaggcctctgtgtggataagctgctgtatataatcctcagaccatgttccctcagtgcaccagtttgggaaatgctcttctatgatacttgcttttggcctcaggatcccactgtatttatctatggtggcagtattttatttgcccagggtgttaaatggggtcggtgaagtgaaccgttaggtagttgatagactttgtgtgtttattttaaatctcaagcaaggatacaatatcttaatggggcattggtgatattatcatctatgtttccttccagttaaggtagcctgggatgggagagggaaggaaacgaatgtttattgaaaacctacttggtgccccattttgggttcttagtagctctttgagagtacatgtagcctactgccttcaggaaggatataggaatgagggacggctgtgagtacgattacgtcgattgatcccaaggaaggtg

SEQ ID NO: 93901 - DNA, 1054 bp, Homo sapiens
tcaccaccacacctggctgacagatacctgtttttattagattcctgactttatcaatgagacctccctgagtaccttaaataatccttggagtggtgtctgaaccctgggtttggaaacgtggatttagattttttttttttttcttttgagatggagcctcactctgtcgcccaggctggagtgcagtggcgtgatctcagctcactgtaacctctgcctcccacattcaagcaattctactgcctcagcctaccgagtagctaggactacaggtgcgtgccaccatgcctggctaattttttttgtgtgttttcagtagagacggggtttcaccgtgttagccaggatggtcttgatctcctgacctcatggtccgcctgcctcaacctcccaaagtgctgggattacaggcgtgagccaccatgtccggccccagattttttaaatactaccatctttttgagaacctatttccagaaacatacacaatagagtatttttaatcaacaaaacaaaaactccctcagcagcacaatgcataatacaggatgcttcactgaatagctttaacagggccacaagcactttatataataatggaaataagttggtttaatgaattctgagtattaaaaaaacaaatatactattatgtttggcttgtaagctgggaacaataacattgtaaactaagcatgacaagtatttttaaaatgtttgattattttgtgttgatgttacaaattaaatagcatttttcgttttttcttatttttcttctgctttagctacacagtctcaccagtggtattcttggggcccacctaatatgcagtgtagattatgtgcaatttgttggctttattggaaaaaatatggaggcttgaaaatgcccacccagtcagaagaagagaagttatctcctagcccaactacagaggtacagtagtctttttagtgttgaaaaatggcatgtttttaaatgggttgattattccttggaaacagaagtacagtataggataattaaaaaatgaagaaagctaccttt

SEQ ID NO: 93902 - DNA, 1048 bp, Homo sapiens
gttgttttctgattttgcaggaccctcgtgttagaagtcacgtgtcccgccaggccatgcagggaatgccagtccgaaacactgggagtccaaagtctgcagtgaagacccgccaagctttcttccttcatactacatatttcacaaaatttgctcgtcaggtctgcaaaaataccctccggctgcggcaggcagcaagacggccgtttgttgctattaattatgctgccattagggcagaatgtaagatgcttttaaattcttaaccttatatgttgtgcttctgaccattttctcttttcctctctttccttttttttttgtttgtttgtttgcaataaacataagttcttgtgtacagccttttatttggtttattttttaacattgtttttgtgtgctgccatttgtatcatgccaacctggaaaaaaaaaatcaaaacattgaaacttctgtactctttaccagagagtagtgcttagcaaaagattggtgggaggtgatcctattccatggggttttgtgatggaattgcctgcagagcccttattgaagcacttttaccttttaggtagtgccacaatgtaacccctaaggatgctgttataatgagactccataatcgagacagtacagtccagtcttacatggattcattaggtttaaataaaatttgccaatttacactaattagagactgtatgtctttgtaaacctctcgtttttctcatgaaccttttacaattgtcatacaacattatggaaattcacccttgattcataacaaatactatatttattagaaggtctagcaaattacaagtaaattttaaactcatttttgggtgagttttctgaaattacacattgcattttcataagctagcatctaaacatatggttgagcagcctgtttgtccagtttggtttccatttcatgatcatgtatcatatatatcaccacataacatttacatgacttactactcttattttcaacacatttggtcttgcttatcttttttatttttatttttgttagcacag

SEQ ID NO: 93903 - DNA, 2081 bp, Homo sapiens
aacataccgtgccactgtattgaaaactgcctcctttttgtgtcagctgcataatctattttgttgtaccataactagtttcctattaaaagcttttaagttattttcagtcattttctatcataaataatgttgcaacaaatatccttatgcagatatcatttcatactgatgtataaaatgggaatgttccttacaagatagatccctaaaagttaaagttggggccaaggagcatacattttgaattttggtgtagttttattgcccgtagaaaaactgcaattcacagtcccactcacaacatctagacaattcctatttctctagaactttgctggcagtgttacccatctttgaaacccgtgactaattgacagatgacaagttatattagcttgcatttctcattttgaatgagatagaaatctttgcctatatttgaaaaccatttatctccttttctgtcaactgtttttgcccgtggcctgttttctattggcagtcttactgacttgtgggaactttttatattttaacaaagttatctcttaatctgtgatatgtgatacaaatagttcccccgttttctctttgactttatggtgtatttgccaagcagatttttttttaaaaaaagacatattaatagttgaatttataaaaaaaaaatcatgagttttgtggcttctttaaaaatacctttccagttctagaagcaaactctactgatagttttatcttgacagggttcttgaatgcacatgtgggatgtttttgtgaattctgtgtgtatattgcagggtttccatctcactgcccccagtatttccaaaacactgtagaaaaataaccatgagtttcaacaaaagtaatagtgtatttctaggttaaccccaaggaaatatagatcatcctctaggacagtggtccccaacctttttggtaccagggacaggtttcatggaagacaattttttcatgaactgggtggtgtgggccgtgatggttttgggatgaaactgttccacctcagatcatcaggcattagttagaggctcataaggagcaggcaatctagatccctcgcatagcggttcacaatagggttagcgctcctatgagaatctaatgctgccactgacctgacaggaggcggagctcaggcggtaatgctcacctgctgtccggcccagttcctaacttgctaccactagtactggtctgaggcctggggcttggggacccctgctctaggaaactaaagacatgttccttgtgaccagtcaagtgacttgagtgagatatagatgttctctctggacaggttttgattccttctgggttctttggggatttctcagattgctttcattatctgtgacttcaaatgcatatctccctgttgaagtggagttaggtgagtaatttgggagcaaggactgtctgacaagtggcagcattgttggcctggcattgagtgcagcccagcattccttctaaccaactcaagtgtgggccagacaatcccacctatggctatttcctcagggccaactgtatttttcctactgaatggcaacaacttttcttatgttaaagagtgactaaggcagtcctagaatcttttcactctaattttttcacagttgagacataattcttgccaccaactacttttttttttttttttttttttttgagacagggtcttgctctgtcacccagcctggagtgcagtagcgtgatcatggctcactatagcctctaactcaagggatcctccctcctcctcctcctgagtagctggaactttctataaaatattatgaggattagtgaaatatgcttctttctaaaaagctttgatctcccattcagaggtactctgtaatgcaaattgtcacttagaacatcatataattaatcctcctatttttaatgagaaattagaagcaaatatagtttaaaatgaagtatctttgggtattgtgttggtgacctctttgatggatttgttgatgatagccatcaatgtctatcaattgctgccatattggcagttttcctttgggtcatct

SEQ ID NO: 93904 - DNA, 1276 bp, Homo sapiens
gcctcccaaagtactgggattacggatgtgagccactgcacctggccaatgagggaattttttctaatgagcgttagggcagcctacctgaagaaagtaatagttaatttcagccttaaaagatatttaggattcgaataggtagaaaaataggaaaagcgtattctcttccctcataaggccaagacaaccagatgaacaaaggcttcagtgagtccaaggacttgaaagcagcttgtttggtctagatggagcatagactgtggaggttaaatgaaatgcaaggctggcaaacttgtcatgtcatgttggagaaaaaaaaatcacttttttcggtggtagtatttaagccatttctaaattttggcaagtgtgggactttgaccagagctgtagtaattctaacaattccaatggcttttcctaaattccagtaaataagggtgatatctcagcccttaccttcagtgaaagggtgagaaggcagggtggcttgtgtgtagttggccagctgcatgatgactctgagaatcagtgagctgctaagctttagaaaaaggctgcccagctttagtagtaaactgaagttcttaaatccagttcctacagtgttacagtttctgtccatctacaataagagcacgtagttctgggctgtatggctaacaacaatatacctttgttaaacatgcatataccacaggcacattatggttttgtgatatatccttggataaagcatttcatctacctcttgactattgtatttggactttggtttcaggtttcatctatatcaaaatgttctaggctgcgagtaattgatcctggtcccatactctgtctggttgcagagccagaggaggaatcccgtttttcagaaagttcgcatacgtgacatggtgcctggtttgacagagcacagaagtgttttacccccctcaccccaaggctacctctccagatagccttttgatgtctaatatcttgaggagtcagatgccttattcccttagtaaatcacatgttgtatgtgaccttctgaagtggctttttgttttgtttttgcttgtattcacaacccgaggctcagagctccagccagcagggaaaaaaccagcttacttgataagcaaagccatggcaacaacacttgaagctgactcattatgcaagtccttggctggctcaggaggaactgactctcagctcattaagaaataagatgtgtgcctattagccaatgtaaatgcacacagatttttaatatcatgtt

SEQ ID NO: 93905 - DNA, 1069 bp, Homo sapiens
tttcagccttttcttgcccacaacctttggattcaggcttgaatgtaatctagaatctctcttttccattataccacctccctggcctttctaggcatataatattgctgtagaaggtataaagtaagtcctgaaaaacacacacacacacacacacacacacacacacacacacacacacacacacacacgtatatattcttttcggtaaaaagactgtcgttgtgggccaggtccagtggcttatgcttgtaatcccaacactttgggaggctgaagcaggaggatcacttgagcgcaggaattcgagaccagcctgggcaacacagagagaccctgtctctacaaaaagtttacaaattatctagtggcgcatgtctgtagtcccagctactcaggaggctgaggtgggaggatcgattgagcccaggaggtcgaggctgcagtgagctctgatcatgccactgcactccagcgaggatgacagagaccccatcacacacacacacacacacacgactgttactgtgactgatgttagcatagcagctttctggtatcttctttcactcacaccctgtggtcattctggatcccagtcctggcctgcaatacctcttctgttgctctttcctcagtatcacaggtacctgtttttctggaatttatttaaaatgtcaccttgtagtgttccctctctagggctgtttgtttcatttccctctgaatgaatgctgccacacggtcattgcttctctgctctgaacagaaggaatggacggggcacacaatgaatccttggttttctgtagacagagaccttcagcctttttgggggaaagacccatcttattttctgaagagacttagctgctgaaacacttccttctttaagacccatttgtgtttgctctgctgtcatgggatggagaggaaggctgatgacatgtgctcggcacttgtgctaactcctttactgagttctctcatttaattcacatgacaggaggttctgggaggtcagggaatttgttttgcatatcattgtatctctgtgcttagcacagta

SEQ ID NO: 93906 - DNA, 1008 bp, Homo sapiens
acaggaaacagccaccattctcagggttgggagagcacaaggaagaagctgggcttatcacaacccagaagctcaaggagggcctcagagccagaacgcaacccagaggagagggcactgccctgccggtgcaggcacctctcaggaggtgtgatgaggctggttctggtacaagcttctgcacctacctggggggacactgacagggacaggaccgagcagttcctacctccctgctccagcactgcagaatccttctagcgccctgctggtgtgacacagagccagacagcaaaggggaagtgtgcttgtagagtcccacccacccccagcatcatggagctgagaaacaagagtgtaatggaggcacacatgttagaaagtgcccacattcttgtgttacgaatggaccttttcattgggataatgggcctgtttcctatgtccacagggtataggatcctgattaaccagagtttccaagatgaactcaaagtactggaaaaaatgttctgttaatacttttcatgagctagttattaccatcatatactgaaatagatacaaactcatgggaaagccttgttctgtgtgatccaataataaaatcaattagcactgctacttaattatcagcatgtcagacagatgagcataccaaacagagtgttgatgggcagaagaaactgaattggaaacaacacccggggctgctgagatgtttaggcctcttagctttagggcagcctgcccccttcagtggcttgcctcctccactcaccctctacctttgcattgcaggttctttttttttttttaattttattattattgtacttcaagttttagggtacatgtgcacaatgtgcaggttagttacatatgtatacatgtgccatgctggtgtgctgcacccattaactcgtcatttagcattaggtatacctcctaatgctatccctccccactccccccaacccacaacagtccccagagtgtgatgttccc

SEQ ID NO: 93907 - DNA, 1064 bp, Homo sapiens
attcattctacaatccaagacttgctgcactgtcctgctgatgttcacagccgtgcctgggaagaaggcagccccactcccagtacatttcagtgggagacctctgcgtgcatccatggagacgcaatggggcggggaaggaactgtgggagtgcacgttccaaatcctgtgtctccacgtgtggatcagcagcacctcgctttcttgtcagagacctcgctgttacggagcgagacctgctgagaattgaggggctgagggaacccctccacctcctcccttctgcagcgccctgcgccccacccagcaacagcggccacttggcagtggggctgctgcaagctcagagccgctgccaccctgcatgtgtccgctcagctcggtcttatgctgtatagttactaaatatgtacaggagggccatggcatctttctgaatggatttttcttaagaaatgcgccagtgtttatgaggttcaaggtatttccctgtccttgctgttaccgtcactcagctttttctcgataggcttcatccttgtttttttgaaatgggggaatttgctgtttaccctctgcattcctatatgtgaccctccctcctactcctccaaggaacagaattaccgaggttctgacaaaagataagcctgtaaactcatcatctgtgttttgtggttggagagaaactggtgttctgcccggctctgcttggtcacagacagctccagcaagagcagttgttaaaagtgccaagcgtgtgtatcactgtgacaagccgtttgcttactgccctgttcccttgcagccaaaccagctgatgaagaactgctgccaggtgggtcctacagcaggtcacaaatgacctagtttcattttaagcagacagactctgtttggcctagaggtgtggagtgagagaactgtgtttgtgggtatgagtctgtgtggccaaccccatgacccccacccctccagcccaacatcttgtgagcacatgtgacctaggccccgggggacctgcctgctcctttggcttgggctcttcgtgtttcccacctgc

SEQ ID NO: 93908 - DNA, 1037 bp, Homo sapiens
agagtgagatggggtggacacgggccagggccagggccagggcaggatgggggcatggggaagtggtatccctaagcaaggggcttagaggccctgtgtggggctggcccacggcaggtgggagggatttttaggtaggctcaggtgcagatggagacattacgccgtggccccacaggtggttaatatttaatctcctccttaatcattaactccctggctggctggggaggaacagggctgttgtcaaatcagtaaccacaggcccaggaacaatgtccacagatctcatggcctctcccattgctggccgagtggggtaacccctggccctgggggccaggtgcatctccctcccacggtgaccttgggccatggagagggcttgaagaggccaatcctctccgagcccctggatcgccctttaccctccaccctctacttactggtggggagtggtgggaggtggtgtccattcacgcatgagggttctagtccctacccactccttccaggctgtgtgaccttgggcaactcacgtagcctccctgaacctcagtttcctcatctgtgcaatgaggataattattcgtgtcttggaggattgtcatgagatttgaatgagaggagggtatacaaggaagtactttctaagctgacgattgagttagcaaacaagttagagaaagtacagatgggaagagacagagagcaaagggtaaagaggaaagaaaacagcttgagagctcttgtttccatccacccaaatgcagttcctttccttggagtttgttttaattcattcaaggagtgttgattgataaggctgtgtctccctaagtggggctttaggggtaatttaaaaaggagtcaacctcaccctcagggagcaagagtgaccaggctccagggctgaacccagcagtgtctgggatgaaggtcagcaggtcagtgggatgggctggagggtcagagcaggccttaaggctgaagcagggcggggagaggatcctgagggatgattaggagttgcgtgt

SEQ ID NO: 93909 - DNA, 1126 bp, Homo sapiens
cctgtaatcccagctacacgggaggctgaggcaggagaacggcttgaacccaggaggagaatggcttgaacccgagaggcagagggtgacagagtgagactccatctcgaaagagagaaagaaagaaagaaagaaagaaagaaggaaggaaggaaggaaggaaggaaggaaggaaggaaggaaggaaggaaggaaggaaagaaagaaagaaagaaagaaagaaagaaagaaagaaagaaagaaagaaagaaagaaagaaagaaagaaagaaaagcaagcaagccacacatggttgggaactgtggctgaaaagaagctgagcttggggcctagacagctgtggcaagaacggtgttaggtccttttcagttttgtatggcttttgcaccaggcaggccagcttctgccatttcctgtctgtttgagcgtggccaagtcctttaatttcacccagcctcagtttcgccatctgtaaaatggggatgacattgcctgtcactaggcctgcagtgtcaatgcagttcactgacatgcagagagagcagtgcaggcccaggctacggtggggcttacgtaccatagtaacttacccacacagtcatctggggcttccccacaaacaggaatgagagcatatcaatagagttattatttgaataaataattccatttttctatatttatagaaaaagacgcaggtgaaccctgtgtcatactgcctgtggttcctgctgtggggagggtgaccatggcttcacccaggggcaggccctaggcttaggtgagatagagcagtccccgcccccagcgctcggaggctgtgcacttaaacttcaaaggaccttccaacagatgcagctggtttcctgcagccgtgcagcagccaatgccagcctgaatcaccccggcctaagggaagctggggagcagaggcccgcagagaccttagcccaggttaatatgagaggcttcctggaggcagaacacacccagattctaactgctagaagaaagaagagaatggcgtgttggggagttgctgtagcccagggtgttggggcctgggatgtgtagattcagaggggtctttaggaggaacgacttgggagataagagcgataagagc

SEQ ID NO: 93910 - DNA, 1082 bp, Homo sapiens
ctgccaaagtgctgggattataggcgttagccactgcgcctggcccatcatgcattaaatgcttgaagcctgccctcgtagtaacatgttgcactaagtataatacctcggaggccgcgtccctccctgtctgtccctccccactgcctgttctgagtttctggagtccacatctcaggggctccagcctggactctggtctttctccgactccctgccctgttctcaagtccccctgttgtcgtccactgcctaggctggcaccacagtctgaggctgccacctgggagacccaggcgaggcctggagcagtcccagtgggctcagggctcctggggcctgaggaaccagaggcactgaagccacgtcggggaggccctgcctgtgtgatgggtggtgggagcaaaagaaatcctttctgaaatgacagcattgggatgacagcgtgtgtgggaaggggtgtgtgtgtgtgagtgcgtgaggctgtggtgtggctctgtgagtgtgtgtgagtgtgggggggtgagccggcatgacagcatgtgtggtgctatgtgggagttgccatgcgtgtgttttagggcagttatgtcaggcgttatgtaagggaggcgctccctggggccaacaaaccgcagtggtgtaaccgccaggccagcagggaaggagggaaaatgtaaacaccattccgtgcctttccctgccctgccacaggccctgcggtcctgccttcccgccacctgaggccccgtgggctggctggggggtgatgatgggggcgtgagggctgaggctcccaagagctccataggcgtgcacatctgcagctcttgatactggcccaagggatagcaccaaaggagagcccagccagggcctaactgggcttcttctggtcagttgcaggccatgcatcccccacgtgtgaggcgtgcaggcttccctaccccacagcgctcctgtgtcccagaggcctctccctggcataggagccccttgccctgcaaagaatcagcatggggttcacggctcacctgttcacacctgtacggtggcctcagggccagctgtctctgtctctc

SEQ ID NO: 93911 - DNA, 3422 bp, Homo sapiens
tgtagttcttggactttgcctctgtccccaggttctgggggacgcccctcccgccctgcctttcaggtcgggaaagtcccggggtttgcaaaagagtgtccgagcgccctggaggcggggagggcggcaaggagggcgccggtgtcgcggttgagtttctccactgccgaccgcggccacgctgcccggggcttcccggacaggcttcgcgccgcccacctcggcagccggggcggaggatcacgtgtcgaaacccagcgcggcccacggtgggcgtcctcccctctcccgctccgtccagcaagatcttgctggttttgcgcgtgtataggtggagggtggaggccgagtcgggatccgccaagagtgggggaaaaaaaggaaaagaatcaggctgggagttcctctgcggctcgccccgagtctgtcttccccttccgtttttcatcccttccccgctcccctccctttggcagacagagaaatccctggccaacctcaacctgaacaacatgctggacaagaaggcggtggggacgcctgtggccgccgcccccagctcgggcttcgcgccgggattcctccgacggcactcggccagcaacctgcatgcactcgcccaccccgcgcccagccccggcagctgctcgcccaagttcccgggcgccgctaacggcagcagctgcggcagcgcggcggccggcggtccgacctcctacggcacccttaaggagccgtcggggggcggcggcacagccctgctcaacaaggagaacaaattccgggaccgctcgtttagcgagaacggcgatcgcagccagcacctcctgcacctgcagcagcagcagaaggggggcggcggctcccagatcaactccacgcgctacaagaccgagctgtgccggcccttcgaggagagcggcacgtgcaagtacggcgaaaagtgccagttcgcgcatggcttccacgagctgcgcagcctgactcgccatccgaagtacaagaccgagctgtgccgcacctttcataccatcggcttctgcccctatgggccgcgctgccacttcatccacaacgcggacgagcggcggcccgcgccgtcggggggcgcctccggggacctgcgtgcctttggcacgcgcgatgcgttgcacctgggcttcccgcgggagccgcggcccaagttgcaccacagcctcagcttctcgggcttcccgtcgggccaccatcagcccccgggcggcctcgagtcgccgctgctgctcgacagccccacgtcgcgcacgccgccgccgccctcctgctcttcggcctcgtcctgctcctcctccgcctcctcctgttcctcggcctccgcggcctccacgccctcgggcgccccgacatgctgcgcctccgcggcggccgcggctgcggccgctctgctgtacggcaccgggggcgccgaggacctgctggcgccgggggccccgtgcgcggcctgctcgtcggcctcgtgcgccaacaacgccttcgccttcggtccggagctcagcagcctcatcacgccgctcgccatccagacccacaactttgccgccgtggccgccgccgcctactaccgcagtcagcagcagcagcagcagcagggcctggcgccccccgcgcagccgccggcgccgcccagcgcgaccctccccgccggggccgccgcacctccctcgccgcccttcagcttccagctgccgcgccgcctgtccgactcgcccgtgttcgacgcgccccccagccccccggactcgctgtcggaccgcgacagctacctaagcggctccctgagctccggcagcctcagcggctctgagtctcccagcctcgaccctggccgccgcctgccaatcttcagccgcctctccatctccgacgactgaggcaagagggcgccagtgaggaggaagggaaggcggttcagagatgttggaggacacccctcgccatctcgcccttgctgggggcacgggagtggggggggtgacatgggccctaggcagactgcaagcccgaccgagcacttggactcgaactctgtgccgggaggggcccccacccctcctttttcggtttcctcttgtctttttttttttatttttattacgaagtttcattctttttgagcaaaaaagtcgaactttttctgttgaacaaaatattcacaacagggcagttgtgatacgaatagaacaaaaaaaaaaaaaaaacacttaaactttgttaggactccgatgagtttgggacttcaggaaaaatcaacccagcaccagcagctaccaaccaccattccatctcttcacttgaacagcattagttaagtccagatgtgggaacccttctcttggaagaagttcctaattgtgtctcagaccggtgtaaacaaaccagccagccgccaccttgctaaacctataagctttttaaaatccaatatattctgccaagaatatgccttgatagttagccctcagcccataggtgttttttgttttttaacagaattatatatgtctgggggtgaaaaaacccttgcattccaaaggtccatactggttacttggtttcattgccaccacttagtggatgttcagtttagaaccattttgtctgctccctctggaagccttgcgcagagcttactttgtaattgttggagaataactgctgaatttttagctgttttgagttgattcgcaccactgcaccacaactcaatatgaaaactatttaacttatttattatcttgtgaaaagtatacaatgaaaattttgttcatactgtatttatcaagtatgatgaaaagcaatagatatatattcttttattatgttaaattatgattgccattattaatcggcaaaatgtggagtgtatgttcttttcacagtaatatatgccttttgtaacttcacttggttattttattgtaaatgagtacaaaattcttaatttaagagattgtatgtaatatttatttcattaatttctttccttgtttacgtaaattttgaaagattgcatgatttcttgacagaaatcgatcttgatgctgtggaagtagtttgaggaacatcctatgagttttcttagaatgtataaaggttgtagcccatccaacttcaaagaaaaaaatgaccacatactttgcaatcaggctgaaatgtggcatgcttttctaattccaactttataaactagcaaaaaagtgtttgcttattccaccagttctactgtgacatactcgagtataaagacatgtagcaataacggggagtggggggggagtctcacagtgcctttggaagggcccgaacttgccttaaatcttcctcaaccaaataagtattttattagtgcttgagagaatctgaatgtaggatgggttcaactg

SEQ ID NO: 93912 - DNA, 1090 bp, Homo sapiens
tggtaagtgtctgacaaaaggaccttgagaatcacagtgttatagaaacaggacacagcctagtgtcctgtgtttggagattccttcctctctggcctgctgcagagatgacctttcctccctcctctccaatttccagctgcaccttaaactctagagcccactcccttgttgaagtccccttttcagcatccatcccccaaagtatcttgactttgaaccacaaacacatctttatccaaggtcatgttaagtctggggaaaaaattcctctctggtggagaaatacagtgagtgaaaatagaaggtgaccttcaaggctgcaagtggtgtgtgtacatggatgttgacaggcaagagtgcaccctctgtcaggtgggggaagggaaacccctcttgcatctggcagggtactgcttggtctggactggggcttgtcaccattccctgtaagactgactttcggctttttcatctgatttaggtggaagaagactacctgtttgaaaaagcagaagtcaacttttgggccgagaccctgatctttgtgaaatacctctgcaagcacctcttctgtctcctctcaaagtccggctggcgtcccccaagccctgagatgctctgtcaccttcaaaggatggtgtcagagcagtgccacctcctgtctcagttcttcagagagcttccaccagctgctgagtttgtgaagacagtggagttcacaagactacgcattcaagaggaaaggactttggcttgcttgaggctgctggcctttttggaaggaaaggaaggggaagacaccctagttctcagtgtttgggactcttatgcagaatcgaggcagttaactcttccaagaacagaagcggcatgttgaagaaaatctgggggattgggatgggggtatgtgtggatttttcctccactaaatctgcaggaaacatgttgaacataaattcaaaaattttatcccattcatgcctcccctacttctgtgagtccagtcgtctgtcactccttacagagaaacttttcttcagttcactcattcagggcagcctattttattgctgctactgtaggaagt

SEQ ID NO: 93913 - DNA, 1406 bp, Homo sapiens
cctgtaatcccagcactttgggaggccgaggcgggtggatcacgaggtcaggagttcaagaccagcctggccaagatggtgaaaccccgtctctactaaaaatataaaaagtttagccaggcacagcggcaggcacctgtaatcccagctactcagggaggctgaggcaggagaattgcttgaacctgggcagcagaggttgcagtgagctgagattgcgccactgcactccagcctgggtgacagacagactccatctcagaaaaaaaaaaaaaaaaaatcaaatgagttttctagtttttgctcttacatttaggtgttcggtacattttaatttttgtatattgtgtgaggtaggggtccaacgtcattctttcgcaggtgtgtatccagttgtcccaggattactggttgaaaagaccgttttttccccattattttggtacccttgtcaaaaatcatttgaccataaatgtgagggtgtgtttctggactctcagtctgttgatttgtgtaatctgcccttgctgttctgttgatctatatgtctatccttatgccagtaccacgctgtctttattccctggtttttttttttttttttttgagacagagtcttgctccatcacccaggctggtgtgcagtggcgcgatctcggctcactgcaagctccgcctcccgggttcacgccattctcctgcctcagcctcccgagtagctgggactacaggcgcccaccaccatgcctggctaatttttttttttttttttgtatttttagtagagacggggtttcactatgttagccaggatggtctcgatatcctgacctcatgatccacccgcctcggccttccaaagtgctgggattacaggcgtgagccaccgtgcccggcccacgctgtctttattcctatagctttgtagtaagttttgaaatcaggaagtgtgagtcctccaattttgttttctttttcaagattgttttggatacacagcagattctttattttttgtagcaacacggtcttgtctcaagtgatccttccaccttagcctcccaaaattaggggattacaggtgtgagccactgagcccagcctctcagcagattcttaaaacacacttgttgcttggctgcttgctttcttgtttccttgatggactggccagcctgtaagagcctagctggcctgcatgcttaagtgacaaattcctctccctactccagcctcccttcataaggcatttggccagtagagatctaggcagttctggctgagctgtcttagtccagggcaaggtagtaagagaccgaatttggcaggttgcagctggtccctcaagcaggagatctaaatccaactcatccttccccccgcatccccaaaacatctcagcattc

SEQ ID NO: 93914 - DNA, 1027 bp, Homo sapiens
acgaccatggagaagactagaaataatgaggttatctggaaacggcctcatgaaacctgaatgtatttttgctcagaaaaaaagaaagtgcagtaacactcactccgtcagacgctgcctttgctgcccaggccaccccagcctgcctggcctcgcctccagtcctccctttagtgggcagcttgtctccctgcggcccaagcttgggctcctcactgcctctcggttgtgtgtgtcctctcacccaccctgcttagcctgtctgtgaagccacctcctccttccacatttgtttttcctttctgtcttttgattacccctactcatgatataatttgtctgtgtcacacaccgtcttcgactgtttcgtcacacttcgtgtgggtcagcttgcctctggcaactcttctctctcttagagtggttttctgggtggttttcctcatgtttcacacagcgtcctccacacacaggtgatcaataaatacttgtgggtagataaaatatcagattgatgggtgaatgggtgagtgggtggatgggtggtgagttggttggatggcagggccacccaacaccttggccagtcccctaaagctgagggatttttcagatgcctgaaggaggattctccagagctaggggcagggagaattcaacccattgccatttgcacagcatttactatgctgattgccctctcttgagaaggactagaaggcagacttgaccaatggccttagtctagaagtcatctcccccataatactttaaaatcagaccatgggctttttaatccgtggtctgaaatagttttcaaggttggcacctggaagacatccactttgacatctttctttcattcagtagttgaaagcaacctcaaagtctgtgacttacctgtctacctgcctagaaattaataatcacttcccctagtggggggaatcagaggctgagatttgtagtggaggcaacacactgtgtgaggcctgggtcttcacctccagccctgttggggggcggg

SEQ ID NO: 93915 - DNA, 1038 bp, Homo sapiens
ttggatttttccccaatgggaaaatgcaagtcacaagtaaattgcatagtataagaccacagtcaagtgctaagcgggtggtatctgggcagtacccagtgttggttttatagacagtcctgggaaaggaaagacacagggttcagccatgaagtgcccccctcagcatctgtgaacaccttgagcactgtgcagatacagtggagaaaaagtccccagtgggctgagaaacaccacaggatctgcgttgcgtcctgagggacaggccggcaggctaagtgaaaaggaggaagaagggaccccagagcagggaatggtgagtgaatcaaagccaagagagttggagggagggggaaggcccagatagcagtgtggggagaccactgagatgaggtttggttgagggactcagtgttctctcctgtaaaagtaaggggagggcctggggccagctgccttcttcagtaccatttcacaggggtcaccaactcacatgtccacagagaccactcaagtgagcacgcacgtgaaaggcgcgcgatgggaggcagtagggcggtcccaggctggaagcatccgccttctgtaggcgtggccaccgctctgctccagcagctgctgccgtcttctaatgcaggcctagagacaccacagtctgattttcctaattttcaaaagatgctagaaatttggatctttatgagaattgccctgatttttttttaaatccatgtgagctgtactaaatagtccctttgcacccctgtccagacactgctggtaagtccagacaggggtgcaaagggactgtttagtacagtttagctgacacaactcagcttagaacccaagttgtgtgtgtttggattctgcctccgcatatactttcttttaaatagtaggctctaagacttaaaacaaaaaggatgccaggcaaagtggctcacaccagtaatcctagcaccttgggaggcctaggtgtgtggatcacttgagcccaggagtttaagaccaacctgggccacgtggcaaaacccg

SEQ ID NO: 93916 - DNA, 1080 bp, Homo sapiens
agggtatttctggtttcataataggtcaccaggaaacatgtttacatcaggcagtcataggttttaggcatgtaacacttctgtggagtttgtattctttgggaactggacctgcaggtattctggggaacccaggccatttgttccatttgaaaatagctaaagcatgaagaaaaggcaaattcttagaattttaaagggttttctctcaagtagttttaaaatttcaaatgatggtgttgtatcccttcccttcagacctggaatcacattttcccctcaagacagaaagggctctgcggcaggttgtgcctgggaaggggctgcttctcatttgtggccacctctctgcccaggagctggtgaggaagggtgaactaggggatgcctttcagaacaaaggaggtgaggagatgagcccctccacatctgccccaaatagagaccggcgtactagactgagcactcacagagacgttcacgaagggactgtttgcggttgtgtgagattggaggcaggcctacagcagggcttctcatcgttggcactgtggacattaattggggtggtagggctatcgtgaacactgtagaatgttgagtagcatctctagcccctacctactaaatgccagtagcaccaccaactctgactctgacaaccaaaaatgtctccagacacgggcagatgtaccctaggagcagtgtgccctctggctgagaaccatgggtgaagggaagcagtcatgatgttgaggcacctacagacaagaacagtaggaagcccttcccacccctctggctgaaagggagaccccaggaatagtggaagtcagggaggaggagctgcccagcaggtgccctagccatgagggatgcagccactgctagaatcttcgcaactttctggggagggtgcaagaaagaaataccgccaactcctctcacttctaccctccagtataccagtgctcccttcacattaggagaagtcagctagaagcccggtggcaaggacacctgggtaaggcagtctattgaaatcagcatcttggggcactgggcagggtggaggagggg

SEQ ID NO: 93917 - DNA, 1018 bp, Homo sapiens
acaaaaattagccaggcgtggtggtatgtgcctgtagtcccagctactagggaggctgaggcaggagaatcgctggaacccacaaggcagaggttgcagtgagccgagatcacaccactgcactccagcctgggcgacagagcaagactccgtctcaaaaaaaaaaaaaaaaaagaagaagaaagaaagaagctccagtagtgaaataagctgaagaaaactgaagtgacttcaaggaaaggaaaaagagaagtttcaagatccaggctggtcagtgaggaatgtggaatgtgtcctcagagctggtgaactctgcccaggcagaggagaggaggctgatggaaggcagacctcaggttgcccagcacttgccagtctgtggaagcctccgtcactggctcatgacacaggggtagggaggaaagaagagggctgggtgctgccatgtccaggaggagtgctctggggtgagtggccatgcagataggaatgaagtgcaaggcacttaccacctggtcagagttggaggcgatcgaaccctctgggaggctctgcagagtgaaatcatcaaggagcaggcatagggagggactcatctgctgtggagggactggctttgcacttttcacaggaaaggcctgacacagttcaggccccaaaggaatcgtcaccaaatgcaagaatgccaaatgcaggccaaaatggctggacagggcccactgcttgctctgctgtcccttcacacaccagggccccaaggactggcctttattacctgctccagaacagccatgaagcccacatgaacagcccatgggtgccgtaccctttcctgctgagctccagagattgccacaggaaacaggagtgaggtgcacacaaaactgggtataatggaagcacccggaagggctggaggctgtgacagctccaggttgtaagccccctggagaaccacgtctttttcacagatggtattttctgagagcaatatttgtttgaatccattccttatttg

SEQ ID NO: 93918 - DNA, 1098 bp, Homo sapiens
ggggagtatttgaattgaagaggttgaaaaatggtgaaagcaaatactgggagggacatctttatggatgtggaagtcccagatggggtggccatggcgcagtcattgaagaaggccaggtctgtagccagcaagaatggggagatggttagtatggacttcaaaagagagattgtggggaatggcagggggattatctaggagtggcagaaggagtttgctattccgtccaagtcagagactcagggacagaaggaacagccccgaatggaaaatcaggagaatggtagcttctgccgggaggaggaagaaacacggaaaagatgacacatatggagaatttgctcacaatatgacagattttaattgaggggaactattttttcataagagcttttgagaaaaactattccctgaacatggggacacatctgaaaaaggcatgaggataggggaggaggtaggaggttttggagtagatttctgagaaagccaacagagggaggccctgtttcctcaccatgattgtaaggtgcatgacatgagacaagctggctcaggcctgtgggctggtgctaggcatgccccagctggacacagctccctgtggccctgccacatctcccactcgggagtacacagtcccacagtaccttagattgctgtatttcccagaccggtgtttcgcacgctgacagagacaggaagcagaccaggtgagctgggattgggggcttctgcttttagagagcagagagcaacaaatgggtttaaaggagaggaaacaggacaccagcaggcttcagggctgccttctcttccaagagtgctgctctgtaatgtaattgtatttggacattttttccacatgatgtcagggtatagcctcccttaaaagccttcatgaaaaagcacaactataaaacagactcaggcagtgaaatggaaaccagacgagtggttctgtgtaatttaggtaaagagatttctctttgcagctttgtgatctgatctgatctctgctctctgcataaaactgtgtttcacaggatccacttacatttgagtcttaccatgcaggtgatttcagatgtgaaa

SEQ ID NO: 93919 - DNA, 1089 bp, Homo sapiens
tttgcttttattgataggtggccttaaattcatttttagccatgtgaatcactgaccttcaccttgagctgagagaaaggccttccatatctggaatgaactcatgcacatcttcctagaacagatgccaacggaggaagtggggaatgggatagactgaggtggtcgagtgaagggagacatcactaggttgacctattcaagagagaaggagactcggaagcctcctgtgctgccccgaagcccagccttttggaattgggccccgctggcccgggagaagcctcctctctcctctttatgattgattgcctgactcctatgcagtgagaagcagcctgtcatagggaggcgcagggtttggggttagagacaagcgccccaggggccttgtgccttccctctctgcctctcccagtgggagcagacacttgaaggaaactccactctgtcccctcccaaaacaggtagtctggacaactttctgacgtccccctgtgttagaagcttctggttgctagttgctaccttcaaggactctgatgtctgttttctctcccattctctctgtctgcctttgtttttccatcccccctctccacccaccaacagagggacctctacctgtctaccagatgggaggcgttttcccatctgggaagaaaactttgaaggacagttgccatcttggagagagaatactgatctgggaatcagggagtcctctctatcctgagctatttggctctactctcttggcttcagtttctgtataaaatgaaggtgattttgtttgtattaaaatatgaataaaaacgaatgttggccaggtgtagtggctcgcacctataatcccagcattttgggaggctgaggtagaaggatcacttgagcccaggaggtcatgaccagcctaggcaacgtagtgagatttcatctgtacaaaaaataagaaaattaggggggcttgatggtacacacctgtggtcccagctactcaagagtctgagggaggaggatcacttgaccctgggaggttgagaccagcctgggcaacataacatactctgtctctaccaaaaaaaaaaa

SEQ ID NO: 93920 - DNA, 1044 bp, Homo sapiens
ccacaggcaagcttctggccaaatattttaaattcgactctgagaaactagcaggaatcttgttctggtggcttcccaagcacacactcagggatcagaacctgcagaagcagaattcccagtttcagataaaatgttcattcatctccaatatgcagtgctggtccccatcgcccttccatccatgctgaaagtgtgtgcagcacggtacttagggaaaaacagtgccagcaaagtgggttcatttgtttctgtcaccaccatttgctggaaatggttgtcatgttcacggtactgtagaactcagagatgggtgcaagaaatcttccaaagcgctgaccttcctgtgttcttctccagctagttctaaccctgccctctatcctcttgccctcttttttcccccaggctcctcccttcccttcttttctcccaatccagagtagatctaggaatctgaaatttccaccttggctacaaacagcactgagtctctttgaacagccttgtccataaatcttagattgtttttcatctttgaaaaagttacttctggcccagcacggtggctcatgcctgtaatcccagcactttgggaggcagaggtgggcggatcacctgaggtcaggagttcgagaccagcttgaccaacatggagaaaccccgtctctactaaaaatacaaaattagccaggcgtggtagtgcatgcctgtaatcccagctactcgggaggctgaggcaggagaatcacttgaacccgagaggcggaggtttcggtgaactgagatggcgccattgccctttagcccgggcaacaagagcaaaacaccgtctcaaaaaaaaaaaaaagaaaagaaaaagagaaagctacttctatcagcaagtcattattcacatgtaggggcagggaaaagttcactacattcagacttcagtttcttttcactctatttcacaacatccactcccctgaaaccatgggctttaaaaaaaaaaatcagtccccaataggcaaggtgccccgtgacatagccagctagaac

SEQ ID NO: 93921 - DNA, 1084 bp, Homo sapiens
ccccatgccctcctttcccacaaagcctttccagtctttgtgtctctccttgagtcagacccacactgtttagctcttacattgctcattctttaggagactcctcctttcacccacactaagctttttaagggctgaggcctccatcacagcagagtggatcatgttgttttttgttttttgtttttgagagggagtctcactttgtcgcccaggctggagtgcagtggcgctatcttggcttactgcaagctctgcctcccaggttcacaccattctcctgcctcagcctcccgagtagctgcaactacaggtgccagccaccacgcccggctaactttttatttttgtttttttgtttttagcagagacggggtttcaccgtgttagccaggatggtctggatctcctgaccttgtgatccgcccgcctcggcctcccaaagtgctgggatcacaggcgtgagccaccatgcccagcccggagcatgttacattctagagtggctcatgacaggcagacctattgtttctgtagcacagcctggttttggagttgaaagtggacatggggtttgagatgggcagcttcccttcagtcagtcccctgctcagcctcccggcaagctcactggccccagcgatgagcctgtagggtcaggttacactgggacaggttggtaagggctccccaggcaacccagtcccatcacaccagaaaatgaaattcccctcttttaaaagccactcatagaacatagtggtggttgtggtggttctgcttcagaccctcaagagtctgtgtgtgtgtgtgtgtgtgtgtgtgtgtgtgtgtgtgtgtgtgtgtgtgtgtgtgtgtgtttcaaaagtaaaaaaaaatcggattatcatcctcgcccccttaatctgttccaaatgagaacgcttaggaagaaaactcccaagaacccactctgttaagaaaattggtttctgctgtggagtgggtcagggtggggaatggagttaggaaaatatatggaaactgacagaagagattcggtttgtgtttggaaaaggattcgggttgttttcaagttttgagt

SEQ ID NO: 93922 - DNA, 1682 bp, Homo sapiens
actggccacggtggcgacccctccctcaccatcctgctgttatccaaggaggcgtaaagggtgacatcagagacctgggaagccctcatcctacccaccaaactccaattctgttctcaaatctcccagaagatgcttggtggattgtgaaagcctgggcttccttgtttttgctgctctattttgactacagcagtccccatggcaagacctctcatgggcagaagagcagaatggagagtggctctggtggtggcgggccagtacagggagggtttttctctgcacacgtggggcagggtgtgtacattgagatagaatggcatgttgggaatctgtgcacctttcagagtgtctgtttgtaaagagtacacagccccagtttggatgtgaatgtctgtatgagcgttaggaggagaatgggattcaagagatgtgctctgacctgttcactgatgcatcatgatgagctaaaagtaagaaatccctccctgaatgtcaaaatggccaggaaatcgttgctgtatttcagtaattgggtttgtcagaagtgaatttcttgtgaggctgatctacaggagcagaggcagagaacagcaggtgggaatcaaaaacaaagaattggccttgacggcaacttgtcttctccctctctgcctcctcttcccttgttcctttccccctctcctgcttcctcacctccagctgaagtactgaagttactggagtacaaccagggctgtcagcttggggtgtatcttgaaatggactttctgaagtattttctggggtttcaagcatgaaacagctggtgttttagtcggggtatagatttggcatctgtaagagaagttaatagtggcttaaacaagtcagtagcttattttttcctcacacagagcactcagtagactagtgtgatggtccgtatgattaggggcgcacaccttctttcttggtgctctgacattttcaagacacaccatccctcacatggccccagatggcagtgccagctcccactgccatgtccacaatctggtgagccggaaggcaggagggaagggccagcctggaagtcacatgcaccacttccatggatcttatcagccaggccctcgtcatctgccacagatctcagccaaagaggctcagaaatcgtgtgttgagctaaatggacacacgcttagctaaaaagcccatttctgtgtaagggggaaagactgggttttgggagataggaacttcacttctcgcaatctgccatcttcttatttttaccaggtcctaatcactgaggttctggcaagtgccagctgcatgggcactaacatctggggacacagggatgaattagatagagcatctgcttctaaactgttgggagtccaccctctcaggtggtaggccacctaaaatcaacagaccttcctttacatgtatccaaatcattttttctgttagcaacttacatggctaattttataagaaaaggaagtaaccattaataataagaattttgttctaaacattctcactaacttggtaagtttgtttgctgatccctgtatcatctcttaggaccacacacatcacccaaaatgcagacacttcattaggaagcaagcccacaagctttgcagttgcattacccagagcaagaatttactagaaagatagct

SEQ ID NO: 93923 - DNA, 1049 bp, Homo sapiens
tcttgatgctcctgtttcattttatcccctttgatcctcacaacactgtgagatactttattatttcctccattttatttatatttttatgtttttaaaggtggggtctcatggcatcactctggctggagtactggtggctgttcacaggcacacttgtagctcactgcagtcttgaactcctgggctcaagggatcctcccacctcagcctcctgagtagctgggattatagggacctactatacttcctccattttaaatgtgaatatgcagaagttcagagagttgaaggaatgggcccaacgtcccaaggcagataagtgtcagagccagagttggagctccggcccctgtggtgacagaggccttgcactctcagatcctctctgagacagggaaaggagtccaaacctggcatctagtttagaacccaggagttaagagaaaggggtgcattgaaggtcttctaaactcactgttgtgtttgaaagaagacactggagtcagagtgtaagaaaatgggttggggaccagagctgagataccagagtgtgccctggggaaagggaatagagggcagatgcagcaagaggcggcaggtggtcctctgtcaaggctgctgctgttcctgttctccagtgcccctcctaaagggagggaatcccaggactcgagggttttagagcctctgacttacagatgtggaaactgaagcccaagaaaggtaaatgatttccccagtgtcacataatgagtagaaaaacgaggtctacaacacccactcctgaggcccaggacagtacctctctactgtcccccaagccttgatttatacagaggaaatgacagaaatgtagggatgccccctgagaataatccagactcgggtagagaggagctggcaggggtgagatggggtggtgtggggtaagggcagagaagatggaacactgccttgagaagagggcttggaggaactccagcaacactggggtgggaagaactaagtgttctgtgaaaccagccatctctcagcagtcagcaatc

SEQ ID NO: 93924 - DNA, 1046 bp, Homo sapiens
cccctctgcaggccagcttagatgttgatgatgcttaaatggtaaaatctgtgagaaatgttcaacaatgccctgtatttgtactgcctaaaacatgaataatacatatgtgacatgaataaataggtcagtgatttttatgacatattaatttcctttacctaagttcctgggaaatatagctgaacagttacagagaatgaaaacaaacactggcatcttacaaacacctgctttgattatttagtctaattaggttaaatttaactatttccattttaacaaattgaaaacaattcttatctgttcctcggtcatgcactttatcagtgttggatgcagatgtgtttaatatgacacagttggtgctgttttctcagctctgggtgggaaataaaaaggaattgagaacatatttttagagtcttctggggactttgtatttctgggcctatagctatgaaattttaaggaggaggaaaaaaaaaaaaaaaaaacaggctttgttgtcaataaattagttggttttccccaaaacactggaactgtcatctgaactgctgcttgtgccaaaattatctttcccagggaacagtgagcttctaaaataacagatgtttcctagctgtctttcagaagtcagaataatatagggtatgttattagattgctaggttaacgtggtgtttactctgttaattccaaaccttgcgctgagtacagaggcccacaattctttagaaatttagtttagagatcatagcaatttaagtgacttacccaaggttacacagctggttagtgaaaagggtgagctttcctgactccttattcaccgtccatttctgtgaccaaagttaaaggcctcatataatgtgagagttgtgtctgtggcagaaccgtgtcatgaaaccttctacccacattttcatcccaggagtgaaataccgttctagtcaacaactagggtctcagaacatctgtgatttcttttttttttttttttgcagctttgtcacccaggctggagtgcagtggcacagtca

SEQ ID NO: 93925 - DNA, 1055 bp, Homo sapiens
ggaatagatttttagaaataaccaaataccaaataaaatggcaattaagatggaaagcactgtttgggataaaaataaactgtgcttaatgtagtgaagtctattcttgtgtgttttataaattgttccccaaaacaggttgagcaatagataaatatatcaccaaataaggtgatcacttacttggatgtgtagatttcaatatgctttcaaaataatgtgatgatattatagttttagcatataagctccttgaaagaatggaccatgtcttagattctttgtcgtctaagcacatagtaggccctcattaaatggatttattaactgtttgatgaaatgcagttctcctcagtttttagaatagtaacagctgttatcaaaatacagattttatttaaactcatgtatcaaatagatgtgaattcattttctgaattcaagcaaggtgtttatgtgtgtatgtaaatatatatctgcctccattattagctcacaaagtccagagtaggaagtataccacatagactgaagccaaacctctgggtttgaatcctagatctgccatttactaactttgtgaccttaggcaagttatttagctgctttgagacacgttgtttccattgtaaaaggggacagtaagatctatatcttagagtggttgtcagcttatacatgtgaagctgtctgtgaagaatgtgctttgcatggcacagaataaatgctcaataatattaactattattaatatttttttgttgacatggagtttcactcttgttgcacaagctggagtacaatggcacaatctcggcttaccaaaacttccgtgtcccgggttcaagcaactcttctgcctcagcctcccgagtagctgggattacaggcatgtgccaccacgcctggctaattttgtattcttagtggagacggggtttctccttgttcgtcaggctggtctcgaactcccaacctcaggtgatccacccgcctcggcctccctaagtgctgggattacagatgtgagccaccgtgcccagcctattatcatt

SEQ ID NO: 93926 - DNA, 1168 bp, Homo sapiens
ctgcctgccttgtgcctctcccaacttccaggagagagggcaggagatttaaagaagttcagagatttcccaaggcaaaaacatattaatcaagttcttaagtggatatttaaaaggacaaatggtaaaaaagagtggaagaaaacaggattcttaacagggccttcgtttcatcttctgtatgtcaacttcgtccgcatagtgctggattccttctcctccttcgaaagccactagtaatgctgcttttcagtgcatctgctacatgctgatcacttctgattttttttgagcactataaatcttcattatgctgtgctccatgccaggatttttccatttgggggtagaaaaattccccaagcccaccaaaaccctgtggcttagtttcctgtccagctggcgtgctgctcttcgggattttgttcccatcatcaaagtggcttgacagactgagaacaaacctctggctcaccctgaacttacagtgcaccatttccaagtcagaacaaacaccaagtaatagcaagagaaaaagaatgaaaaaaattattttcctgacttagaagccagttcagagtgaagcccaactctgtgactccagacagggatgttataaggccttggctgtcctcaagggtggagtcatgaacagtgggctccgggctggaatttcactcagagtcatctcaaaggagaagccatggatggactcctttgtggccccaaatcttctgtttcctggaatccaaagcagcagcatttgagggagcctcccatgatcttgttgactacatcacacttggccccaagcctcacagttgtgggagcagtcagtgattcctgaagtgtcccaggaggccagtaaggtcaccagcctgtaccgggtctagggaagatgcagaacacttcagcctggcagaaggctctaaagatcgtcaacctttcctctgttcattttgaaatttttaaaaatatgctaacttagctgaaaatctcatggaaaccaggctcctcatcagacttgaaagtcaaaccggtttctcaacaacttctctttatggttctgtatggctccacagaaaaccagaaaaacatttggggcaagaagctatgactctgtgaggccacatgggagcaggcagtcaattattacactaaggaacac

SEQ ID NO: 93927 - DNA, 1118 bp, Homo sapiens
cctgactcacccagacaaacagttactctgttaatccctccttttggggcacccatcatactctagcatgactggttgtgtgttttcccaactacactagtggctttcaagtgtttttttttttttttttttgacagacattgacaacaagaaacagcttttacatatgacctaatgcatatgtttgtgtgtatatactgtgcacacacacatgaaatcatgcacagtcggaaattttagtagctgcgtaagatataaattgccaaaaatgcaacagagagggaatttgctcaagatagagcatatttaatttcaggaatgtgtgctttcaagatatccactgccattttggatacaaagcataaccctattgatgccattcagtataatgtagggtagcttattacctggaaaagaaaaagaaaaaagctagaccagtcaattattttacttaaacttgttgcattttaatggttatttaaatcttaaagataacttattaaaaattattcttagcaaggacttaatggaaagctgatacataacaaaaaccttagtgaaacaatcccttgggaaatctctgaacttctttaaatctcctgccctctgtccttactacactactttgatacactctgattatattttcctcctttctccctctgtcttcctcctagctccttttctcccttcttcttctgcccccatctctctcctcttcccttcctccctccttcccttccttcctttcttcttccttctttctttccttcctttattgctggtcactacccactagttgatttcataacctaacatacatttggaaaaacactattcaggactctaagttccttgagggcagtgactgtgtcactgaatcacttcatcttcctatttccaaacccaccactattcctggctctcagtagcctcttaataaatgtttcctgaatgaataggcctcagttaaaaacaaaacaaaaccaaaaaaaaaaacctgcagccactgggattccggaagggacaggaaaagtgaataatttatcacagacttccccaagacttctgctgtcctctagacactggggcttttgtggacgtgtctgggaagccct

SEQ ID NO: 93928 - DNA, 1028 bp, Homo sapiens
acgggaactatctattgtcaaataacgaagtctctatcaacataatcgccacgttgaaaatgtgcctttatgctggtcctcacagaaacagctgcacttggagccttgcttttcaccagactggctaccaggatataacaccagtctacgtggtttctaattgcttggcccaatgtctcacttttcacctgattgtgtttgggacacatagatacaatttgttttctagaaaaccttgattctattcttggtttctgcccttgtcttggctaggtcacttgagctactttgttgatttataaaaatgggaatgataatttctatttttcttccttcttaagaattttataaagataaaataagaatactttttaaagagaaaacttttaatataataagatgttgatattgttattatcattcgtactatttttaccagggctaatttccaagtgtgtgccttgccaaattcacatgaccacggtcctattgacggtgctgttagaaattctccccttgtgatttacatagctcaggcagcatccagaagatttcatccacctcacctatttatccttttttatgcttttagggagaaagtaaggtttgaaaagaaaggggacttgtgttaacattctatataagatttgaagctatatatcttccaagccccaaactgtacaataaaagttttcttggatactacttttctcccataattcctagcacatagtttattaagttattaaccagcaattactctggcagcatattaaactttacttttaaacaagtcacagagggagggaaacacgcatctctcgtaaaaggaataaaaaacatacaccctctaaaacagtttccccaggctttgaacaaatcccaagccccacaccaaggtctctttttcatcattctccgcacatagcttgagtgttagtacagtaatgagaacaagatgcctaatagaaagatggaaaaatatgaggattctggaggctccctgggggctctctggaaaggcaggt

SEQ ID NO: 93929 - DNA, 1007 bp, Homo sapiens
gagatggtttcaatatggtctaaactggggtgggggcccggagacccacctgcatggcttccttcctgttggtagccccagaagggactaagagaagcaccctaactccctatttcaaaacagtgatctaatctaagctgatatttgtagaagaggtaatagacacgggggcaggcgacttcttcctacttgaaagatatggctgtctcagaagatggctcaaattagggatgtaaatagcaagtttgttttttgcctcttgacctgctttcttcctctcccgaggcctgatcatccttgtggaaaattctacaactccatgtccttgggctgccaagggccctctcttaggagctgccttccatggatagggcttcatgctccagaccttcttgccatcaaaacttaactattctatatcccttttcctcactctcagctggctggctgtccctaaattttaatatgtaaataagtttgttctcccgggtcacacagctgttttccagtagtgacctggtagagacagcacctttaactgaagtccgtaactgacgcaggctttacggcagtgcgctggcctggcaggagcacatctgccctcatattaagctgctcagccctgatacatttgtcccgtgtggctggggtttcggccacctccacaagggctgtgggcagcatgagctggtcttacatgaatgggccaagggagcatcttggagagaggccctcctaagtctcactagcctttccttcccctcagctgccagtgatgatcaggcttcctcagcaattagactggcctgggtgcctctgggaataacaccttcccacgcaagctcaggggctcactctaggactccccaagccagacgggtcctcaccagtccgcaggctctgcgttcctgggtaaccacaaggagagtcacatctagaggcacttggtgaatggaaagcctctagccagaaaacacagtgcagtgccattgaggagaggcagagaa

SEQ ID NO: 93930 - DNA, 2154 bp, Homo sapiens
agcctggccaacatggtgaaacccatctctactaaaaatacaaaaaattagccaggtgtggttgcgcacacctgtagtcccagctacttgggaggctgaagcaggagaatcgcttgaacctgggagatggaagttgcagtgagccgagatcgtgccactgcactccagcctgggcaacagagggagactctgtctcaaaaaaaaaaaaaaaaaaaagttctggtgatttgttacacaacaatatggatgtgcttaacactagcaaactgtacactcaaaaatggataagatggtaaagtttatattatgtatatttcatcacaatttaaaacattttaatggaaaatatttaaaagaaaatataccccatcattcatctgaagttatcattgtcttgacattttatgataattatttctttgcttttcttcctagttttaccacctgtgcatctctaaaaataaaatacttttgcctatttttcaattaagaaaaaaaaactttgaaaacatcatttttgaaggtagcatatttttgtcacctgaataattactcattaaatttacctaaccattgctggcatacagtttgtttcccatttgtttagtgtcgtagatgatgtttcagaaaaatctttgtacatgagtgtggtgtgtgtgtgtgtgtgtgtgtgtgtatgagtgtgtgtgattgtgggttattgccttaggtttgatttccagaagtggaataaattggtcaaggggaaatggaaaaagtcttggtatacactgccagattgttttctaaaaaagtccatctgcctaccaacagtgcgtgagagacctccaccaaaattttaactaagatataaaaaattcagttgaggaaacttttacgttttgaatgcttactctgtgccaagcttcgtatgaggagatttgtaaatattatttcattaactcttctcaaaactgccttaatataaaaaaatcttttctacagtgaaaacaactggggagacacaccacatgcctcacagccattttagttaacatttcagcttggcatgagttaacagataagtcaaacgggtacagattgttcttcagtttttactttctatattaccaaacagagatggccctgcgttagcattttgttttgtcttctttaaaaggggtcttcccctggaccctccctggggtgctgctcaggcccaggcctgctgtgcagtgtcagccagagggctcaaactgacagtgcattcgggtcagattggccatagttgtgttttgtttgacttgtggaggatttacatttctttttttaaataatttgctgacattttaaactgaggaaatttcatagtaaatcaagatctacagcttcttttgaaaaactggaagatctggcaccaccaggctcaaattcccacgtggccacaatgggccagagctaagtcccagccatcctcccttgatgagtatactctgtgcttctgcacggcccccgcccagccgcgtctctcattaggttacctgagctcccatggaaacaggagtttgtatcccttgctattggcatttattaagtagcagattggctgatgctagttcttaatgttcatggctgcgtttttagaatcatctggagaggttttaaaacctgtgatgccaggccttaccctcagagtttctgattcagatatttcaagttatctcactggccctcagaagtaccatttaaacctgatactgtggtgtggttagtggttgattgttgtggaggcttatggcacttcaaaaaaaaaaaattggggacgagtgcagtggctcatacttgttaccccagcactttgggaggctgaggcaggtgggtcaccggaggtcaggagttcaagaccagcctggccaacatggcgaaaccccatctctactaaaaatacaaaaattagccaggcatggtggcatgcacctgtagtcccagctactcgggaggctgaggcaggagaatcacttgaacctgggaggcggagtttacggtgagccgagatcgcgccactgcactccagcctgagcgacagagtgagactctgtctcaaaaacaaacaaaaaaaaatggtttttttgagagacatggtttcattctgtcacccagcctggaatgcagtgg

SEQ ID NO: 93931 - DNA, 1020 bp, Homo sapiens
gtttactgcccagcagaggaaagtcagaataaccagcgttatattcttttggcctacagatttttcagtttcctaaaattgtgaccttgtatttagaaaaagaaaacatttacaaaattttcctctgtgtaaaattattttgaagtgcatgctagcttcactttaacgctactcttttggaaagaattttgtgtaaggtgcattcatcttagatgtcatccagtaattgaaaagctaagaagctacaatgatgaagtataaatcagacagggaccccaagtatacttatcattttaaaattaagaagaatagagagaaaatactgtgttatattatacttacttcattcctacttggtatacagtttgtgatcttgcagtgtttattgctccattgatagtttcattgacaaactggattatgtggtggctagaggatgatataatagaaagaagttttggatccaggcagacagtcctggacttgatattctctttccccattttctagatacttgctagggcaagtcacttaaactctgaactgaagcttacccatctgcaaaataataacgcataattggcaacgatgctgtaaggaatagagatgttacatgtacaaattcccagtatagtggctggcatgatatagtttcttaataaatggtaactatcatttgcatagtttttctggttttttttttctttttggtccacgaccatttattagaaaataaatcttacctccccagactgaaagctgtctttgtcatacactgagtttcagtatatagttgctcttattttccagatttttggtcttttcctttgaacaatttgtttattcatacaccagttgctcatagtagctttacaatatgtgttttacaatttggtgtagactaattccccttcagtattattttttcaatattttatgaactttaaatcaatttgtatagtcgcctaccttttattgtcatttttaaaattaggatcacactaaactaatatgttaact

SEQ ID NO: 93932 - DNA, 1214 bp, Homo sapiens
tatttattcattcgacaactgctaattgaacaccagctacgtgccaggcactgttctgggtgcttggactatatcagagaacagaagagacacatccttgccctccaagattactgctctcagtgtacttatattccagcagcagggagacagtaagaaatgttcaagaaataaacattcaataaaacatatcagaacttattatagtaaatataataggtaaattagatagtttgttagaaggtaatcgttgctgcggacaaaggaacaagtagagtaggctaaggggaatcaggaatagataggagaggagggcagttggcatgtcagaatagtcgtcattggaaacgtttgagcaaaattctatcacaagacatgggaaaactttcttattttttgaataaaggtaaagggtagacatattttcttctgaaactgtgctggctgcagacatttgtaagcaggtataccaactgcatgtttgagactatctttacccataggaaagtgccaacagagtgggcagtagtggataaacaaggccaggaaggatgccattactttagaaacttaagagctccctaaagcgaggtggtcatactatagatgccaggactgctggggactctgaaacccttttcttctggaatcaccgtgaataccgtcagtctgtcatggttctgatgagcttaggcaaagagcaaagtatccatcatattacttcctctgctttctggtatgacctttaccttaaccctctggacctgggccttagagatgtagagtaaatgtggagaatgtttattcttctgcttagcaaatatttattgagaagttaagtacatactatgtcaggtactgtggaggatacaaagaaaatttatagcatattctctgctctcaagaagcttatgagctacctggaaaataaaccattgacactgcagacaattacacagaaatacgtggctacatgttatgtgcaccaagcatgtggccgagatcacacatctgagaggcaagaccaggatggactggagacatgagagaaggcttcaggggaacattgggccttgggataaaccttgaaactagctttctgtttttgaggcaagggacatggtatgagcccaggcatggaggagggcatcagaaagtgtttgcaggaggcagtgagtaaaccagcctgttgtgtcaaggagagaggatgtgtg

SEQ ID NO: 93933 - DNA, 1029 bp, Homo sapiens
agtcaaagggatgtggaaagtctttctggcatgtccatttgggtgtcacacctgtgttgtcctagttctgtccatcctgtggttctttatggggaaagcataaagggttaagttgggaagggctctttctttttcctttctacagcttatagattcctctccacataaagctacctttgaaatcattaaaaagcctgcacctggaaaagaggtgttagggattgaaaggaatggtcatctccatgggacctccagagccagctaaataaatataaagttgttatttttttcaaaagcaggaaatcatttcataatcagaaaacaaattctttcacagaacattttcttgaattatacattttgactgctttgaaaatgtttacataaatatatcaaatctcagagtatttctatagtataccttgaaaacaagaaatatgctgatctctgaattttctgggactatggaagaaagactcaaattatagcacatgcaaaaaagaacatgtgggattcatttcttaatcgttttaaaaaccagaggttcataattgctgtgttgagatggttataagtaacacacattagaaaaggtgaggttatgcggcagattcatgagagccaggggtaaatgacattaaatctcaataaaggctagataagagccatggacattacctcatttgggaacatcactagcagggctgctctgtcttttaagtagatttaaccttctgtttttgttgccagaactcttcatgttggggacttaacattattactaggttacttatcactctcaagaaatcatattggagttcagaaaatcttatattgaggaggagcttggccaccaatcatgaggaagggtttattctgattcttgggtacttaactcacattttgggtgattcataagaaaatgtataccatttgaaataagagtttgaattttcagttttttcatttcttgtctattttgggtcttttgttgttgttgttgttgttatgtacaaataaaaggtgatc

SEQ ID NO: 93934 - DNA, 1931 bp, Homo sapiens
ctctgaaccagataaaactttgtcttttccatcaagtatgcctgcaaaacattctgggctactacctattccgagtgaaactgaaagcattccttgagagaggttagcctgagaggcacaggaagagctgtacacatcagggagagtttgccctgtggcacagcaccttagtacgtggaagtattgaacctttcctgttttctctgtgctaccaaaaaaaacttattactttgaataaatgtacaagtttattgtttttaacctaacatttcttctagaaaagaataacatacaaaaaataaatgagaaagagactttttactgaaactgccctatttcaaccctaacttgaggacaggtagtattggtgaggtctcctgttcaaatggctgctatagtgctcatataggcatgcggttaggggtggaaaataaatgtcaggtcatgttcctggtttatgaacagagttgagagatggccttgagatctcaatacatgttataagcctgagatcgacactgctgacatggcaggcagtgtgtggagtgattaacaaggtgaaactctggagccagactgcctgggtgtgaatctcagatctaccccgcattacttatacatccatgtcttcatttttgaaataaggataatagtagcatatacctcatagggactttgtgaaccctaaggaaattaatacatacaacatgcttagaatagtgccgggtacaccacaagatatatagacagtcattattgttattattatcattaattttaataaacctatactataatgaaaactaattatttcataactaattccccctaggtaataagaatgcaagatagaactatctttttcttttttctttcttctttttttttgagacagggtcttacactgtttcccaggcaggagtgcagtggtgcagtctcggctcactgcaaactccgcctcctgcgttcaagccattctcgtgcctcagcctcccgagaagctgggattacaagcagcctgcacccccctgtccccacagtcactaatttttgtatttttagtagagatggggtttcatcatgttggccaagctggtctcgaactcctgacctcaagtgatccgcccacctcagcctcccaaagtgctgggattatggacatgagtcactgtgcctggccgttccttggttgttttctatattcaacaaatgcctactacatttcactgtgtcacagtcgcaatagcagctaagtcagtttttgccttgaaggagccaaggacaaaaaaggaccagaaaataggcagtcatgatgtagtgtgctaagtgctggctgaacacatagcagggccaccagacttgtctaggaaatcggggaaaatgtcccagaggaagtgacctctaagcagagactgaagaagttagccaagtaaagaaagggaaggagtctcccatgcaaagagagcaacataaaggctcccagtgggtagcccccaagtgggaactgctggtttgggtgggactgaagttctaggttggcagttttcaaatttgtctcaggacctctttacactcttaaaaggggttgcggctcccagagagttttgtctatcaatattcagttagaaagtaaacttgagacaggctggtgtgggggctcatgcctataatcccagcactttgggaggctgagctggacagatcacttgaggccaggagttcaagaccagcctggccaacatggcgaaactccatctccactaaaattacataaattaactgtgtgtggtggtgcacgcctgtagtcccagctactcaacttggaaggctgaggcacgagaattgcttgaaccccagaggcagaggttgcagtgagccaagatcatgccactgccctccagcctgggcagcagagtgagactctgtctcaa

SEQ ID NO: 93935 - DNA, 3224 bp, Homo sapiens
catcattttgtatgtctgatgcagttcatcatttaaaagtaagattcgaaatagcctggaccagcctgggcaacataaggagaacctgtctctacaaaaaattttaaaaattagccagacttggtgatttgcgcctgtagtcccagctacttgggaggctgcggtgggaggattgcttgagcccaggaggtcaaggcagctcaagtgagctgtgattgggccactgcactgcagcctaggtgacagagcgagaccctgtcccccaaaaaagccttgaaagactggattgatgggatgagactatcaagataacatttaatagagatatatatcattctgattttttaaagaaaagtcaaaattatatacatacaaaatgagggctatctggcttcatagcagtttttgtgggggaaaaaatatcttggtgaatgagatatcctggtgaaccatgagaaagcagcatgacactgttgctgcttccagatagtggaggctgtagtccccctgaactctgttggttagcctaaacccacattattctccttattattctgttctgggctccccattttaggaaggtcactgaagaactagtatctgtcgaggggaggtgaccaagatgaggaggaaaccaaacatctggaaacagttagactggagaagacttagtggcaacatgataatggtctttatatacttgagagactgccatatggtagaaggcgcataatttctcttttttgctcccaatgggaaaatggaagatagatttcagcttttaatttaaagaagaattttgtgaaaattagtattctctatcaaggaaaagaacatatttccataatactgagtttgcccatcagcaaaagtgttaagttttcaaggaaaactgatcacatgttgagcatatatctgcagcgcacctgaggttggactggatatcatcaaggtatctgtttggcatgccttatttcagaataggtgaacaactcagctgtggattctgaatgttcagtgaatgaaatgatcaacctgcctctaatcctgtgacaatatttgtacatttttgtttatgggtccttcgatctctcaaagaaaagaagttgggatgccattcttggcatggcccaaaaagtcacagtggtttgctcttaaatggcaccctccaggaattaatctactaaaatttagcatttaagtaacttctgtaactgtgttctggatagttctgaaaacatatttttggcctatgagatgttatgtctgaaaagcattctttattaatttaattacctttttttgtggttcctgtatttttctccattccagatgttggcttaagccacattttctgacaagcaaaagaacatctgagtctttgagaagtcagagatgcttttctaaagagtggttatagtagataactctttattgtcccaatttcccaaagtatcttgaacagagttgcctggagagagagtacaggggtctccaagccttgctcattacaagtagaaacacctgagaaatagggctttgccagtactgttgacatagaacttcctgccctggccagcactctacctggtctgtggttactactaaattccatgaggttcagagaagggaattataggaaaggagtatgcccccacccttcccccgctgcccagccatcctaatctgctaacagttgttgggtgaaaaaagggttctgctatcccataattctgtggaaaccctggccccttggtttcactatgtgactgtctgataccaggtcaggcttgggaccagattgttgaggcacaggtgttcagtgctgctcagttttcttctttgcttataggccaaacttgcaaaacatgtaaatgcccccagtgttatcttccatggggtatttgtatattacagatacatacattttgaaataaagcagtaaaactctaatggtggtgttttaggccttatatagggaggatctagaagcagagattggaaggttgtttcctattgctggggaaatcacattgtttgggcagctacttactctgcctcctttttactgtgcctagcactttatttggagggctgtactcatggccctctgaatttctgaattctacccagggtagctgaggttcagcatgtagtatgaaattatgttttgcattatgtgtctttttttgcaaatagttctggcataaaaagataccttgttatctgtcaccaatttttatctgttagttcctagataggggcctggccaacttcatttctggtgccagatctctttaagaccattttctaaatatgtttttgagcagaaggaatgaggagttcacctcttatggaatgcattgacaaagcaaactagaaaaacagaacttgtagggaccagcttttcttcagtgttatctgttatcccaacaggccagtttaggtcatgttagaacaagtgatttgatctgcacacagtcccattcttaggtgaaatttctgacaatgatgataatctatggcctattgctgccattcatactagaagttagaatctaatcagttaattgagtaaccaagtatttgttaaacattcattgtgtacctagctagtgttaggtcttgggtaagatgcaaagtaaagaaaaatgtctttatgcttaaagaacttaccgtctagctaataaggtaaaatacatgcttgtgaacctgataccgtgtatattaaccacttaattatatgacatatacactaaggactgaggcctacaaagaaggggaagagcatcagtgggttggagaagtccgggaggctttcccaaatagcaaggcaggaagaaatgtgggagttcagtctgccatctcagggacttttagaaatcacccatggtgattaacaagtcatgtgagaggagtgaaaagtcagggggatccaacaaggggaagattgtgatggagagttttatgattcataacttggaaggcatcataaagagctttgcttccacttgaaccaagggcgacccaggaaattcacaaaataaatggtttgctatttaacaggagaaaccattgatggtgcacctttggtaactttaataaagaacagtatttgtcctgagtgttgcatttaagtcttgtggaagtaatgaattgtagtgggaaaaaaaatttaaatttagtaatacttaacattttaaagtatcttaacagtgtttttc

SEQ ID NO: 93936 - DNA, 1878 bp, Homo sapiens
ttgtttgtttgtttgttttttgagacggagtctcgctctgtcgcctgggttggagtgcagtggcgcgatctcggctcactgcaagctccccctcccaggttcacgccattcttctgcctcagcctccggagtagctggggctacaggcacccgccaccacgcctggataattttttgtatttttagtagagatggggtttcactgtgttagccagaatggtctcgatctcctgaccttgtgatccgcccacctcattctcccaaagtgctgggattacaggcatgagccaccgcgcccggccatattatatatttttttatatatgtaaacctattgtatatattaaaaactattatatatataactattatatatattatatgtaaaacttttgtatataactattgtgtgtgtgcgtgtatatatatataacttgtatacacacacacacacacacacacacacacacacaaactttgggaggggtcttgtgaaagcagaggcctgggttttcctgccattgcccccagtgtttcagagtaaggtgcttatattgtgggtacaggatctcattagaacctgtgtaagtaatgttttctttgagccctgtctgctccaaggcaggtggatggtgttgataggagatactccttttgaaagacatagccccatgtttgcgttattcctgtgttgagcctggctagcacggagcaggcttggttctggtatgtatcttctgtccacgggttcgagaggatgtcaggacatctgcctcttcactctggaagagtctgcgagccggtgcaatgggtggcatgtaaatggtaatgccatgtggcatgaattcccactcgtcttctcttttacgtttgtagtacctgaaaaaagccatgaatatagagtattcatgaaataatataacagggttctcttcttttagagcctattaccacttcttgtgttacatcttttcaggcatttgccgtcttctgattactttgttcattttggatcaaaggcctaaatatgtaggcctccaagaagtattaaaattttctcatgaaacctttcagaagcctatcatattagttagctattacctttctgcttagctcttgacaaaacagtaccttcatttttgtgtttctaccaaaaattgaagtggatttggagcagaagggtaagaaaccaaactcaagagagtatttcttatgtatgtagtgtcctaggtttcacttccttgtttcacagagctgacttatgcattttaatgtgagaaaaccattaaacatgaggttctggcatgcgcttgcagagctatttgtttgcgccaagccttggctgtggctgtgttatctttgatcacagagatgactcaggcagactggtttttgtttcctgatatacaaagttaccagtctccttcatctggcatttggtgattcattttaggaatttgggtggtaaattttactttcaggggccttaaaaattgttctttcatgaataagtggaaagaactaagaaatgttttcagaaagttgatgcaaggaggaaaggcatgtgcacagaattgcagtttacattagaaacagagatttgctttagaacctgtgctctgtcttaagaacattgaatttgtggaagctttttactactcagtctgttgttcattgcatcctagaaataataaattactacattgaaagtacctttcagtggtacctgaaagtacctttccaaaatgttgcttagtttacatataatcagaatgctgatactactcattatattcaaagtatccattatataaaacaaagattgcattaatatagaaaatttaaatattgctttgaagccagtgtacttagggcatc

SEQ ID NO: 93937 - DNA, 1038 bp, Homo sapiens
tgcaacttaccattgtgaaactatagcgattagctgactaatatgatcacttgtgttcagaaatggttcttgtctacctgagcagaaatggccagtgttcttggaaacacagagcaaagccattacgagggctttccagtcttatagttcaccattgtcttaaaaatcacattctggctggtgtggtggctcacacctgtaatcccagcactttgggaggccaaggcaggtggatcacctgaggtcaggagttcaagaccagcttggccagcatggcgaaaccctgtctctattaaaaatacaaatattagccaggctggtggtgcgcacctgtgatcccagctacttgggaggctgaggtaggagaatcacttgaacccaggaggcagaggttgcagtgagctgagatcttgccactgcactccagcttgggtgacagaaaaatactccgtctcaaaaaaagaaaaaaaaaacacacacacattctgaagctggtagtggaatttttagtatggacatcataaagcatgtcttttgtatttttcctataattttgcacttggtatgaatgtacactaattgtttataattagaaaataaaagtaatgaattttacttctggttatgatgcatttgctcacattagtagtttatgctaatgtgcttttctggcctttagtgactattcatgctttcttaaatacatttggatgttgaaagtttcacatttcatactgtggaacaggcacgtctctactgtaggaacagttctaatcaaaatagcgtactctaattatgtaaatgataagctttgagaagaggatcctgtacgaaagcccatttccctgttttgctagtagttttttcttatgatgcacatttgggagataagaagtgaacgtagaaaaaaaaaagaaaaaaggaaaactatccccttgattgtggagtctcacttcatatacataattttgtttttgaaatggagtctcactgtgtcacccaggctggagtgcagtggcgtgatcttggctcactgca

SEQ ID NO: 93938 - DNA, 1013 bp, Homo sapiens
aagtccaaaaatcctatggctacctacagaggatcggcagggaaacaaggatactggttggagccctgatcagtcagtgtgctcaaaacagaggccccgaggaggatgctttccttcaaacatggtctgcctgaaagggcttcctggtagatccatcgctatgaatacacagacttcctgagtgtgagattctgaccacgggactcctgacatctcttttctgatcactcattgttttgttaactactctagggagaaaagctagtgtcagcccagtctgaggtagggattggattccaagaacagaatctgagaggattccaagagcagaatcagagatgggcttcctgatgggatttcaaactgagatttctttttattagttgtttctattttattagtttgcatttgatcatatcctttgaaacgcatgtgcatgctttgtcttctttgtacgtttgtttcctttgcgggggatggggggattatttttcttaagatgaggttgctgtttttatcagcaatcactgtggtgaggagacacaggccgttagatgatttctctcttgtggggtggttttataggccagaatctagggaatagctccgttttaatagtttattggcttcccgattgaaatactaactgaaaacccccaggctttggccttcagcatttgttttcatccagtgaccagatttatggtgtttgctccatggcctgtgaataagtcctgtttttaaaaactggacacaacccacacctttactactgtttcctatgcagttccttactcctacatggtggctttgcttgcctttgctagcttttctttttatacctctgtacattactctgttgatccctattcctgagatgatcgagaatgatatgggatgtgtgtataagaaatgggtgtgtgtggatacctccccccccacctttttttcaacacgtttcaccagatgcctttttcactgcacaatagttttcactggtatactttttgttc

SEQ ID NO: 93939 - DNA, 1053 bp, Homo sapiens
gaagcagagctagtgttcaaatttgcactacatgaaaggttttttttcttgttaaataatatacagtatttcttaaagtaacaaagttctgccaagcagcatccccgtggtgtttttttttttttttttttttttttgagacggagtctcgctctgtcgcccaggctggagtgcagtggcgcgatctcggctcactgcaagctccgcctcccgggttcacgccattctcctgcctcagcctcccgagtagctgggactacaggcgcccgctaccacgcctggctaattttttgtatttttagtagagacggggtttcaccgtgttagccaggatggtctcgatctcctgacctcgtgatccgcccgcctcggcctcccaaagtgctgggattacaggcgtgagccaccgtgcccggccccccgtggtgtttaatcacatcctctttctttagaagtagaataaaattactcacatttatcctgctgaagataagaaaataaggtcatattggaggaataatgaaacatatttatgctttctgcctcagttgcctcatgtcttgaatggggaaaatatctcttagggtttttgtgcaattgagtgagttcatacgtgcctgcagattaggagagtacttggcacagagtaaatgcacaatacaattagctcttgtaagcattcatttactcagtagggtatattgacctgctgctatgtgccaggtaatatgctgggcattaggaggtaaataagtcaaagtctttgcccacaaagatctcagaatcaagtagagtagacataccccaaactgtgtgctagcagcgtgaatattctcatatagaggtatgcaaggaggtatggacacacagagtagggatgagtagggactgttaggcaaaacttcctgtaagagtcagggcctgagcttgaaggatgagtagaagttaaccaagtgaagaaaactgtaggggcaaagggagccaggaggacagatgatggtagtgaaaggttggtgtgaacatgttttttcaattcagaatttcttgaagaca

SEQ ID NO: 93940 - DNA, 1032 bp, Homo sapiens
ctttgagcaatttattttagtcccccgggcctcagtttcttcatctcagggtcaatcataaaatggggatggtaatagtatctgcttctagagttgtgaggaataaatgtggtaatggtcatcccagcacttggtcttcctttccttaggacccttcctgatgtgccccagattctgtatgccatctctttcttgcggtggtattgtttcttgtgaattgttatatgccctcagataccaaattcttaagttggtgggggattgtattttaaattttttgcccatcctaaagcgctgtgtaaatgctgattgagtataattgagtagctttggtagcagtgagtataattgggtagctttggtagcagtgaaaatgagggcaatgcagtgaggaggacctcattttcagtcttttactaaaagctttactgaccctttattggagaactttctcttagggcctttaaaaaatatttaattttgttgcttattcagccaaatggagttagttattcagtagaaaatggtaaaaagatccaaataacaccaccggatttcacttttccatatagtgtttcaaagcgttgtattcattaatatttgtgcaaaaacctatggttaataccacaagaagtcataaactaaaccagatttttcccctttttaactttcacatgacttggattaacaacagcgttactccctaatttacaccaagcattctcaaaaagctgaaacaatgattcatgtttagtcaccgtgtgactggctattttcatttatttaaaatataaacaacaaaaaatatcctggataaagatctccacatattttaactagtgacagatgctatgatcagtatttttacttaagtcaggcattttttacttacacctcaagccttgcaattaagctttaggcctttccaagcataacagttaaccaataaaccaaaatatcagcctggtctggcttagctcagcggtcttttgatttcttccagtctgtttgatgtggaggcttattgagatt

SEQ ID NO: 93941 - DNA, 1098 bp, Homo sapiens
tttaatgtgtagggttatttcctacagatagattctcctaggtgtaatttatgtgtcaaaggttataactggcctcagactctatttacatattgtcagatttcttttcttttccttctttctttttttttttttttttttgagacaaggtctcaccgtgtcacccagagtgaagtgcagtggggcgatctcagcccactgctgcctcgacctcctgggttcaagcaattctcttgcctcagcccccaagtagttggggctacaggtgtgccaccccacctggctaatttttgtgttatttttagagatggggttttgtcatgttgcccatgctggcctcaaactcctgagctcaagtgatctgcctgcctcagccttccatagtgctaagattgcaggcatgagccacacccggcccttgtcggatttcttgaaaaacattttttcccatgtcaccttcctactcaggaatttttattagctttctgttgcctacagtctaaagtcatacccatctaattggtccttttcgtttttaaaacactttctaagaaactttttttgttttaaccacctacttatcattgagcattacattccatctgattttccacataataaaaagtgatgcagggaatattctcttatgcagagagaggcatgtttttttggattttttgaggggataaatgatcagcagcgaaaatgctgggttaaagaatataaacattcaatgaaactaataaccaagccttttaaaaaataagattatatcagtttacaaatttaccagttatgtatagtcttcctagtagtgagaataataattttttttaatgttcatttaagggaatgtgagggggaaatttccgtgtttttttcagtttgcattgtttttattactagtgagatttcaggtttgtccacattatttgttggttaattgtattttcttcggcttagctttcaaggccctctgtaagttggacctgcccttttcaccttatctgctgttattcaaacccacaaatatttattaagcccctgctggctaacttctcccaccccaacaaataaacacactctaatcaagccaat

SEQ ID NO: 93942 - DNA, 1211 bp, Homo sapiens
gctcttttcctttctgtttattgctgcgtgactgacttggcctgacagaatgaagaactgattttatgtaaaatcagaaccagcaaagctctgcaacctgtgcaatatgcatgttttctaaaatagcctccatctccatgtgagtgagctcagcttcatagctcctcatttcttacaggacaggagctaaactaatatggcgcttagctctaggtctttccttttagcccctgtgtgtattaactttcagctgtgagtcccagctaaatgatacatgtcaatatgtagcaatcagaaaaggtttatttttgacttcttggagtgtgctttgccaaagcttcatgcaggttcttaatgtatagcattgtctagcttttgcacactctccaccttaaatcagtgagccaatgagaatttgaaagcacttatcatgaactcagtattaacataataggggagtacatgaagaatataaaacttggatcttactcaaggagtttacagttcagttaggaagacaaaaattgttacatgtgagtcagatacaaataggagacaccatataaaaatcacctgtacaatgtgatgtgagtgatgaacacattagaaatttataaatggtagaattgagtggagtatatgttggggggaagtagtattttttacaaggcattgggaaatgagtagatttggggtacatggaaacaggtagattgaaagaggaacaaaataatagttttgtttactgtgttaagtacaatctctattctgtcttattaaagagagctcatattcaaattaatagcttaggataatttagtacaatttaagaagaaaatgtgtttctaaaatcatgggatgatccaagtaaaattgtttctagtgactatgttgggagatgttaaattgtatttattttattttccagggtataagtgatagagaattattttagttatttttcttagcattttagtggtgtaggtctggaaggatccttcaaggggcatctaatccagtccagcatcgtgcttatagagagattttgaagcaatttccagacagactggcttctctcctgttcttcatgttttctaggaaaagagattccacaagtttctgtggttacccacgctattgtttgggaaagaattgaattctcaaaactaaaattgaaagctgcagggcaattgggttttcatattttagag

SEQ ID NO: 93943 - DNA, 2924 bp, Homo sapiens
acaagaatttttggagttaaaagggcaaaggatgaacattccaaaacaaataggtaagctccatttaaggctaactttactttttttaaaaaatacaatattgtcctggccaaaaacaaattttgaaattgtgcctactgttatagattcatctagagcataaaactataaaaatactgtaatgaattaacctatgctgccaagttataaacccttgggcaaaaatatcaactgtttaataagtggacctttcaaagcaacaaaaatttagcaaggtagcaaggggtgaaatgtagagcttgtttctccatgcaaaagctagtgttttttttgtttttttttttttaattgcatcttctttaagtagtcctgaaatgtcttaactttacttgtatatattatcctagcttgtataatatctttaattttataggtggaagtttaaatgtttatgatcctctcattagaacatctctcacattacctttgcattaaactcttgtactaagaggagcacctatatgtgttaaccacaagaaataaacagtgctttttacttttggtctttagttttatgtttaacctctaatttgtttttgtctttaaaaaacagcttttttgttatgcctgaaaagaaacctgtggaaccattttgattttgggtagtttttagataaaaatgcacaagatctgtttgtttttaaagaagaaaagctttgaatagttgttttttagcacttaagaggatttaatggtaatctaattgacttgcagttgttaacactagatgtcactgttgctgcacatttaattacttccttaactttatttaggatccagtttggcccagtggtctttctcttgaggatctagagttatattcaaagccctattcccttcttccctaaaaaagtcattatgcttcatatttaagttttaagctaatgtttattgaaatgcatttttgtgtgatggaactaaatcttaggaattaaaaaaatatgaaatcattttgtgatgtactagtgataattctaatgaaacctactatggtatttccgaattatcatttaaattgcttcttgtcaccctgtaacattcaccagatatttaaaaggaaggtaactggctgtaagtataaatcccttgagcatgttcaggcaataccagagagctttttaattttttttttaactgagtattttttaaataaataaaacattactcttgtggagggatgattataatttttattttttagcctgttcttaaagaaattcttcctgtcactaacttgaaatcactaatatttgtttctccttagctttgtctattttgttaataattctccagtgtgctacagtttaaaacagttgggtcatgttataaggccttgataaatactggtataaatgaaatatgatattaagtcatcaaacaagtaaaattaatgtttaaaactgaacttgaagaaaatttttttttgttttttatgaagtgattcttgaatatatatataaatatatatacattttactatgtataggagaaaatgatcagaaaatgagaaaacctcatttaggttgtatctgagggaggaagaatagggcagtgatactatacaattttaattttttgccaaagttacaatgatggaaacctccattataaatttattcctcttggataggaaagattacaaaatatataagatttctagaaaaaaggaaataggaatgagaagtttttaactgtgaagaatgtgagagcttttaattttagtaatctgaagatcggtatggaccattatgtgtacaaggcttctgttccctgtttaacccatgaagatatatttcttggcagctcccattaggtttgctttgcaaaacctttagtgtcttaaatttgcagttgcttgtgatggttcttttagttttagtttgtttaattatgtcactttttgtttaaatgtttatatgcctgttccttccaatattaactttctgaaggaaggacctttttcatctgttctgggtacgtaatgggcactttaagaaggctagtaataatgatatcttggttggttacttatccaccggataactaacctcagccggtgacacacctcacaagtcagttgtttcctttcacaaccacagattgtcctgctcgcaatttggaaatgtgtgttcttggtcagagggaactggacataaaaagaacatctgctttttccatctaatgggaaataaaggtctgacttggagtaaacaaacctggtttctaggcattttgctgccactggagatgaccttaataggcccccttatccactttgcacttcagtttctccatctatataccaggaataataagatctgtgctgtctactcctagggctattgtgaggataaaacaaactattagaagttcattttctttaacatattggaagtcctaggcaattagagatatagtttggtttttctttctgttaccacttctgtgattgtactcatctgattgtcttgctcttaagaccgtgctttttgaggacaaggtcagtatcttaaccattcttgggtacctagagtctagcatagtatctggcatatagaaggcatataggaataattgcctaatgaataagtaaattttgttactagaggagaaataagaaatctggtttctactcctgcgtttgttacaatataaccactataatcaactgagacaaaatagccaacctctctgggctttggttttcttctctgtaaaataaggtttggaatattcctgaggtcttttctttttttaaaatactaaagtaaggctttacataatgttactggaattgtaagtttggtaaaatgatgtattcccagtgccgtagaacagtccctgtcgcatagtacagacaagaa

SEQ ID NO: 93944 - DNA, 1083 bp, Homo sapiens
gcatttagttccttttagtcactacctacatatatgaagttaaagcactcctcatagctccacttcaccactagggagtaaatattaataactatcaagtactgcttgtacgttatagtctggacttcctcagttaatgcttcatagtaggacactcctttttggtttgtttgttttttgagacagagtctcactctgttgctcatgctggagtgcagtggtgcgatcgtggctcactgcaacctccgcctcctgggttcaagcgattcccatgcctcagcctcctcagtagctggaattacaggcatgggccgccatgcctggcaaatcagctgaggtcaggagtttgagaccaggcccaatcacctgttggccaggttggtctcgaactcctgacctcagggatctgcctgccttggccttccaaagtgctaggattacaggtgtgagccaccatgcccagcctatagtaggacactcctacccaactgtaaagggccatgctaggtcagggaacagattgagagctgaagtttacaatcaagtacgataagtacatatgattttatttcagaacctgtgggaggtgttaaagagagcccacaggccagaatgaggactgtggaaaagaaaggggattttatgtttattggatattggcaaagtgttagataaagggagcccatgggccagaatgtggactgtgggaaagaatccccattcttttccacagtcatatggaacatagtcatatggcacatagtggccagtacccatagatatgaaatgtctttatttctttaaaaaattgactgaaatgttgttaatcaccattcaaaaatgatcacttcaagacatttttcagtgaaatgtgaaaaaaatgtaattggttctattttcctagactatcacttttaaaaagtacatgttgagtatcttttatctgaaatgctggggaccagaagtgtttcagagttcagtttttttttttattattttggcatatttgcattatactgaacaggtcagcatctctaatctgaaaatctaaaatgctccaattagcatttccttagaatgtca

SEQ ID NO: 93945 - DNA, 1563 bp, Homo sapiens
aaaatcccaatgttcctaagagatctaattctcactgtaaattggaaatcagttatctttctgcaacttttcttcctcaacttaaaaaagagtgtttttcctttggactttatctgtaaattttcatatattaatttcagttaaaaccaggtactaccttgctaagataattgtgtctacctaccactgaatttggtattccttgggcaatgttatacagtctagtagggcatacatttaaaaattttataaaaattaaatgtacttgagcactctaagatagcgcttaatgtaataatgcagaagctcactgatgtaatgttcaaatcgcctcaaaatgtttatgcctcttcccagataaattgctttaattctccagaggatctggttgaaaattttgtggtaggcctcattttgagagagatgaaaatgattactaaaatacagtttaaaatgtgttttctttgaatatgtgtaatccctataaacatagaacataaattatagtaaactataaacttatattctctttgttggaaatcttgagttgtatagtatgaaatatctgtgagaccatgatcaaccttttcctgaatattttgagtgtggatgcaaacccatgtatcaaaatttattttgcagacaagacacatgctttaaacactgcagttgttagaaatgaaatctttagatcttaagacccataataaagaggaaagtaggtgaaaagtatgagacatgttttagtttcacccccactcaatataaggatatttattatttactaacagtgtaaatgtgcatcaatagtttgtacttttaactttgatacctaattccgaatatttgattatatatgccttttaggtgcccaaatgtgagtctgcaaaagctgccagaacagtggctatggagtgttttagaggaaattaaatgcagtgatccttcatctaaactctgtgctacaaggcgcagtgctggaattcctttctacatacaggtatttatctgtaggaccctagctgtttgtttatatttgtcttttgatgatagtgtatcctaacctgtttgacgtgtgagtgagcgtattacacataaaggacatttctgtcttttcagcaccatagcatttgtggctttgttttaatgtggggatggtgtgttcctgtgacaagatctgttcttggaacaaaccctctaaaaggtcaatcttgtaatataaacagagggtggtataaatttctgtctgtgtattaagtaggcagacatcactgtggcacagtcattgctcacttccaggaagtgcacatgttaccccaccaccccactgtatttttttttaaaaatagtcttcctttcatctcaagaccttcaatactctctgtaggcaaccagtgttaacattttcttttcaattctcctataaaacgtccatccataaaataatcatgatcataatagtagctgacatttattagtggttatttcacctcattaactccttccctgtaccctattatcatccatatattctagatgaagagactggggtttaggtacgtt

SEQ ID NO: 93946 - DNA, 1102 bp, Homo sapiens
gctgtctgcttatttagtggaaaggcattcactaacaaaagcaggattttggaattccccatagctgtggttggtgactacatagagttggctcaaagaaccaaggactgtttcactcgagaacctttctttttatatccttgctaggccctggattgtgtgatgaagaaccaaaacaaacaactagggtttgctgtattgttcttgggaaccttgcatggtttcatttttacctctcaattccttcattatcataaacaccagcaaccctggagttttgaaatcacttccttataaagaaatctttccttgctggggagcagacagaaggttcattgaatagtcagaactctattctgctttttataggcacagtgacctcactattgagaagacttagggttccagctccctgctttttatacctggtttgtcaattttatgcctacctgcaggcacagctaatgtgcgccagctggcaccagcactagttgctccttaattattcaacaaaagatttcttaaacatctactgtgtgccagatgctgtgtttgactgagctctctttgaccattgagaatatgatatggtaggccacagttactgtgaacctagacataattaccagagtctaaataggaaacatataactgtggaagtaagagagggatgtgaggacttgaataagggactaaggattgtatgggaccatgatgaggagttttggggacattctcatcaggaactacttatgtattttagagtcattatcttctctatataacccagggaatgttcattgaattttcaaagcatttttattttattttcattctaaagcactgagaatcaagtgatttatctatagctacacatgtagttggtgattgagccagcactagaatctaaatgtttttctggaatttcatagcatttcagaggttagcagtttaacaaaagtttattgattattgctttctataaggaattgtgatagctaggataaaaatattgataaaacatgggccttgtttttagaggaactttcaacctagcattttaatctttgggattagataagtaagtcacataatttacaag

SEQ ID NO: 93947 - DNA, 1050 bp, Homo sapiens
tggggtttcgccatgttgcttaggctggtctcgaactcctgggctcaagcagtatcccacctcagccttccaaagtgctgggattacggacatgagccaccgcgcccagcctaaacttttatttacatttcatttgggaaatgtgtctaaataagacactatttctcactgagtgtcctattaattttatttgaaatatgaataattaaataaagaataactaagagatgagccaccttggggagccatattcttttttttgttttgttttgttgagatggagtctcgctgtgttgcccaggctggactgcagtggcgcgatcttgcctggggagccatattctttatagagagaaaaatccttttaatttcccttttctattgtggattaaaagaatttggagaaaactagaatgtcttgatgtatacattctaagtgtttgttaatgattcctgcatttttattttcatttttaagcctactgtaatagttgagtcagatattactgtttttcctcgatatttgaacactcatttaaaaagttttcataataacactttgtcatttagacaatagcagagggactttgttctcagtgagtaacctctatgccagctttttaagtaaagttttagaatttttttaatattaatttttctccttgatcttagggaatgattatattaaataattgagagaaccagctatctggtacatcttccaatgacttcttttaatccactgtatcttgtccttctccccatggccctctgattggtaattcaatttagatttggtcattgtattattgcctgtgcctgcagctaagtcttcaaaatagccccctaatgttttagcctgcagtaagcctcaataatgtatgatagtggtgagggaggttaagatggcttctcttgatatgtagctttctaacaggatttcatttgggcaaatcatttttcaggcttaaagtttcctggtgcttcagggttgtgttcctatttaaaatatacatgcaaacaaccttcctgcacacatctattagtgtt

SEQ ID NO: 93948 - DNA, 1528 bp, Homo sapiens
ttgtatctcaacaatttgggcagggctcagctgggtgattcttccttagggtatttactgagttcagttggtggcattcagctggcagatgaactggtcacaagggacctaagacaacttcactcgcatttatggcaccttggtgggactagctagaaggctgggcctagttgggactacatgtagcctctcaccccagcatggtagtcttggggttgaaattcttatatggcagcttgcttcccccagagagagtattccaagagaatcagccagaagctgtatgctcttttctgacccagccttggaagtctcattgcattgctttagtcacattcctttgattttaagtgcatcttaggaccagcctggattcagtctaccttttgacagcaaagtggcaagatcatattgtagaagtatacgcagataggagatgttgtggtagccatctttgaaaaacgccatctgccacatgaaccaactgaatgtgaatagtagaggttactagggagttcatggttgcttctgtgattctaagtcttggtcaccagacaaatggggttgatgttaacaaaacaaaggaagttgaaagagggaatggtttgataaagatgagtaagtttttttgttttttatgtgttgagtatgagataatgatggcataccctggtggaaatacttaagtcagatgttagagataggggattagtttgggtgatataacaaaaacagagatgtagatctgtgagttttctccaaaaatatcatagtaagattgcagtctttggtggagagcatgaaaggaaaaaagaacagaggtctaaggacagaggcttttgaataactgtggttgaatggtacagttgaaggcattccgaataaatggagcggggagactagggaatgcccaatgcctggtatcttagcccctcctaatctagtttaaagattttctcatggctgttactgttggcttttaaccaacctgttaggagttctcagctgttgctttcaaaccaagtagttcttgatccctttagagacatttcaaatctgctgaacagaatgttttgcagagaacatctttacagtgtgtgtggcttccttttgtttggtttttatttttaaaagaaaatttgtttcttttggagcccttttgagagcgttttataagcccttaagttatgaaaaagttgtttaggcatacaacatttaaaaagtttgcaaaaagaaatctgggcattcatgaaaatccacagaaatggaggccaactgctggccacctcttgaactacagctgtgttaaggaaggaagcacttaaagagattaatggataaataactgaagagttaaacatgacccacattgtttgaattggtttttaataggattatgcaaaatgtcttcaaatataaactgacttcactattaaacaatcatctaagaataaatagggatggagacattgttactttttctgggaatgttttgaaagcaacacttgcaacacacataacacaaata

SEQ ID NO: 93949 - DNA, 1974 bp, Homo sapiens
aattaaaaaattaggtgggtttggtgacatacacttacagtcctagctgctcaggaggctaaggtgggagtattactgtaacctcaaactccttgagcctaggagttcgaggttacagtgagctatgattgtgccactgcactccagcctgggtgataaagcaagaccagaccctgtttttttttttttaaaaaaagtcatatttgttatttgtctaatcttgtgtggagaaagacagcatgtaggaaagccactgggtgacattctggcaaattccatggttctgtcttgaagtgaagcctagtagtttttcaggaggtcctttgcaccacatcttgcattgtcattaacaattttatgtctctaaaaggtaatacgggttattttttaatgggtatggagtttccatttgggaagatgaaaagttctctaaatgcatgatggtgatggttgtacaaaagtatgaatgtacttatgccacttaattgtacatttaaaaagggttacaatgataaatattatgtatattttaccacaataaaaaagaaaaaaaattttaaaagaaggaaaaaaggtaattatttcacctagacctatgtgtgtgagtgttgtcgctttgtgtgattttctgttggagttgaataacatgagctataacagaaaacatactgaggtttgtgaatgtgacataggaaggcagttctagtgtagcagttaaagatggtcaactctggagccagactgcttggcttcatgttctggttccattgctttcttgctgtctgaccttggataagtttcttagcctttcttggcctcagttttccaattgtgaagtagagataatgatcgtacttatttcatggaattactgtgaggattagatgagctattgttaaaaaaaaatacttaaaatggctgggcacagtggctcacgcatgtaatcccagcactttgggagaccaaggtgggcagatcacctgaggtcaggagttagagaccagcctggccaacatggtgaaacccatctctactaaaaatacaaaaattagccaggcgtggtggcaggtgcctgtaatcccagctacttgggaggctgaggcaggagaatcacttgaacccaggaggtggaggttgcagtgagctgagactgtgccactgcactccagcctggacaacagagcaaaaatccatctcaaaaaaaaaaaaaaaaaaaaaagcttaaaacatgttctgtcatatggtaagcgctaaatgaatggacccctagacctgggttctaaacagtgttactgatataaatacacttgcgaatgtaaacataaatcggacatttgtttttgctttttttttaaaggtaaaagaaataggagattactttaaacaacaccttttgcagtccaggcacagaggagcatttgaattggcttatactggttttgtgaaactcactgaagtactaaacaggtaaaacaaatatccttttgtgtacgttttaaaaagactaaatatacaaagcatatgcttggagtagaatttagttgtgtcttttgaagtttaaaagaataagacctggttgactacaaaactcttggaagaaattgttttcttaggtttcattgtatgatttactgcagataactgattgaaacgtccaaactgagttattattctgtcattgaaaggtgatttgaagcaaactcaaagattttgctaaaaatagctttgaaattactgttttttttttattgaatgaaataaatgttttgtctgtttgaaaattacttggtgtttggaataaaacaggccttgcaatttttggggtttgtattacagaagcacttaaggattttggtttttttcttcataattttatcgtatagaaaagtttaaaagaacagtaagtagactgaaaagtagaaaatatttttttccttttacctggaaaactacttagatagatttcatatattt

SEQ ID NO: 93950 - DNA, 1954 bp, Homo sapiens
tattttaaaacattcttttttagtttagtttttttttttttttttgagtctgggtcccattctggcgcccaagctagagtgctgtggttccattttgactcacttcagcctcaacctcctgggcttaagcctcccaaatatttgggactataggtgtgtgctaccactcctggctaatttttgtagagacgggatctcaccatgttgccaggctggttttgaattcctggactaaagcgatcctcccacctcagcctcccaaagggctaagattacaggcatgagctaccatgcccggtctaaaaattgtatgttagattctgttgtaacttttatgatgcccagagttaactacattgatgtattccctcagtagtgtcttttgttattactttagattttctgtaatgaactacaaatgggatatatgtttattcacaagtcttaaattgctttttgtattttcttttgccaaagtttattttttagaaattacaaataatttcattgaattgcactcaatgcaagttcccatttttaagctttgaaatgaagttgtgcatgtaaccacatcctatttattgactgccttactacaaggatatcgtgggaaaataaagaagtacatagtatgtggttctgtgacgtcaaagggcttagaaatacaatagaggataccagacagaaattcattttaaaaagtcagactacagggcaacagttaatattgcccatggttaagaatttgctagaaagcaaagaataaacattctggtaagatgatatctgagtggtagaaaattattacctttgttgttttgtaggagaacagtgtttgagctttgaagaaatcccaaaagttagtaacaaatcactgtaggagagaaggtacagtttaaaacattaactgttttactggagtgtaaacttttgtaaaacatcccgtttaaccaaagtgaaattagaagtggctgtgtcttaaagtcagaattcaaattaaggcttagggattaaggctcactactttatagtataaaataaaaataaaatggacatttactgtttgctactctttgccaggtactctgataaacacttaaatgcataatcttattatttatttctcacaataatcctgtgaagtaggttctagtgttagctccatttcacaagtaaaagaactgtgtttaattactttgcgttagtagtacatttcagaatttaccttctctagataaagggtagatttaaaatatatttatattttttttaatgggttttatgctttagatgagcatttagatcccctaattagtctgttggtgaattatacctgcctggaaacatggcatgtagcttcttcccctgtggaaatttataccctgtgagtccataaaacatgttaatttccctatagagatactttttatgaaaagttaagagcaggatatgctaattttaaaaagacaagtgattagaatttaaatttctgttctttaaattttaagaacagaaatcactgtatttttctttcactttgatcttaatttcctttataaaaatcctgagatgtatgttattaaaaattattttgctggaggtaacatactaccagacttcaaaatatactacaaacctgtagcaacaaaaaagtgtggtactggtgtacaaacagacacatagaccagtggaacagaatagagaacccagaaattaatgtatctaccgccaactgattttcgataaaggctccacgaactctcattgggtaaaggactgtccaataaacggtgctgggaaaactgagtatgctttcttcatatgcagaaggatgaaactagacccacctctcactctatacaaaaatcaactcaaaatgaataggctgggcacggtgggtcatgcctgtaatcccagcactttgggaggctgaggcgggcggatcaagaggtca

SEQ ID NO: 93951 - DNA, 1020 bp, Homo sapiens
gaagtgtattttgcttttactgtaactaagacgtgaaagcttcctatgaacattattttgccttgacacttttcacatagcacccaaatcttatgtatttaatttgtgtgcgacagccgtgttaaaattgggaattaatgtaaaataagagatgtttgttaaaaaaaaaaacaattatcacaaaaagacaggttcttataaaccaaagaattcttccagtgactgcttaaataaaaaataagatcctgactgtttttctgtaaaacattagtttccgttgtaatgaggtccagtcatttttctatgttgccattcacatggtaacctcacatacataggcgtgagaagaaactgatgactgaatgagcgatgaactgtatatgtaatagcagtgttctaacactggaaccccgtcccctatgaaaaacttgattcttcgtattgctgactttagctaaagaaatgtctcagtttaggagtcaataaaaatccaaagtcatcaagaaattagtgttatttacattactggagaattcctgcttttaaacataaccttttgccccatgaacttcctttaaattaataataattaaatatacttacatgtgcttaaaacctttaagagttaaaaatataaatgacagagaagaacatcatttacattggaatggctgggccacacctgaggtacacccttccaagagcatagttgccctggcaaagctagatctgtgcctagtggtaaaactatgagtttaagagtcaagccttaggtgaatgtgactgccgtctgaatacacggaggcagtgaagtgacttgcaggcagaatgcaaccctagttagaggggagaatgtggaacttgcatttcttattcttcagagtagtaactgtgatctacttttctctcaatggatgaagaaagccattccatacagtctaaaatacaattctattctattttgaaatttgatgacttgaatgtagatgacagtccgtttaaaatcatcctgattttaca

SEQ ID NO: 93952 - DNA, 1030 bp, Homo sapiens
tgaaataaagtttgtaaatgtattttagagtgcaaagagaggcttgtattagaaaaactgactgtatcataaacactcactgaaccatatgctgaaataccttgggctgataattaaggtaatgtggagttatgtgttttgcacagagaatattaggttttgttctttcctaaaaatgagttagaagattggtgatggttcacgatagtaagacacatttatttagcctgttgttagtctaaataccaaattattttatttaattaatttttttttggtagagatgggatcttcctgtgttgtgcaggctgctcttgtcaagcaatccttctgccttggcctcttaaagcattgggattacaggccttagccactgtgctggccttaaatactaaattttgtcgctttagattttctacttgagcagtgcataagaataaggaacatgcaatcttatagctaatatttgggtcagcaaagtacccatatattctggatgagaaatcttgaatatttctgttacctactgtgggtagatcctacagaggatgctaacattatctttattagtgaagagttttaaggtatcagttggtctcaaaaactgtctttgccccacagacttttccttcattctgcctgtctttttacctctggttgtcttcatttttgctgcttcttccctgtgttatctgccatacattctgaattgcatgaggaaagtctcccctgaaagctgtaaaattgaatggataggattcttaaaaatttattctctgatcttttcttggtctttgcgtggtttcttttggggtcattgttagtttttcatggctgttgaaatttatttttgacaaaattccaggaaggaacataagatgttgattgaatcatcatgatagtaatttgcgtgtttgtatttcccatagtacctaaatataagtcaaaataatagatgtacaataaataccggttcttcgatttgttaattgatttcagatgattaccaatggctagttttgaaaatctg

SEQ ID NO: 93953 - DNA, 3118 bp, Homo sapiens
cagtcaaggtagtgaatatttccatcatcccccaaatttccctatgtcccttcctggactattattatttttgagacaaagtctcgctttgtcacccaggctggagtgtagtggcatgagcacagctcattgcagtctcactcctgagctcaagcaatcctcccacctcagcttcccaagtagctgggactgtaggtgtgtgtcaccacacccagctaaatttttaaattttttatagagatggggtttcactatattgcctaggctgatcttgaactgctttctggattattttttacaaggtaaaaagaatcatatacaaatttgagatctgttttggctttacttgtagttttttgttcttgtaaatttaataattgaaatttgtggtcattctgtgtatttaatatttttaaagtctaaattgttataaaatgaaatttcttttactaatcagtttacaataatggctcatggctcatttttcttcaggattaaagagccaacgctggaaatgtttctgtctagaatcttagcatcctggactaattcagccatacaagtccttgaatcaagttccccgagcctaacggacagcctgaatgggaattcaagtatagttgggagacttttggaatatgtctatacccattgggaacatccattggatgctctgagacaccaaaccaaaatcatgttcaaaaaccttctccaaatgcaccggctcactgtggaaggtgcagatttcgtccctgatcctttctttgtggaattgactgagagtcttttacgattggaatggcatattaaaggaaagtacacgtgccttggttgtttggtagagtgcataggagttgaacatattttggctatagataaaactattccatctcaaatcttagaggtgatgggagaccagtcattggtaccttatgcaagtgacctcttggaaaccatgtttagaaatcataagagtcatttgaaatcccagactgctgagagttcttggattgaccagtggcatgagacttgggtttctcctctcctttttatattgtgtgaaggaaacttggatcaaaaatcttacgtgattgattattacttgccaaaattattaagttacagccctgaaagcttacagtacatggtaaagattcttcagacttctattgatgctaaaactggtaagaaaaatgcatttttgttttagtagtttctaattatgatgcttaaatgtaggtagctatgcagatactaatcatattcaaatttaaatatcacttctataaatagtaaaggaagagattaatgatagatgtttcagtttgaaacgaatgttcctatatatagctgaatggagttttttggctgaagtcatttctacaagctaaagaataattccacttaaaatgataaactttcctgtattacaaggttttaattcattttttcaagttctgaatttattttattgtatcactgaaataaaagtttgtgtgtcttatataatgtgcttattcaagtcattgagacaataattaaaaattgtgttaggcaaggttaaagacaggtaacttggcagtagcaagtttttttctctggggaagtgacaaaattcagaggcatgatctcaagaaatagccatctatagttatttagaataggggtaaacatcccattgaaactcacaaaccctacaggaatcactgcattcaagcataattcaggatgtgtaaagtgatgatcatgacacatcatataaatcttaaaattattacattctgtttaacaaagcaagaatgtagtatcgtacagcataattttaagaaatattttcaactaaaattgttaaaaacgttcagtacttcaaagagtaaccatgaggtagcaggaaaatttgattcctgtatgcaaaaataagccattatttgtaatttttgacaacacttgttcttgagtttttgaaaagccatctgaaattcaggattcaagaatctgttctgaagtaaggttgtctttatttttatatcaagctgccctgtcttcttggtaatggctgacgtcctagcctctgaaaccagcaggctctttgtgttccttttttaatctttactagtgagaaacagccactctaaaatatgcagagaggttcagtgtttacttttagagaagtaatagtctgtagccactgatgtgcttatttctccacctgattttatttcctgatttgctgcctgattccctttctaggtgttagggaaaaagcaaaaatgttagcaggtaaataatgatttgtttatgttaacgataagagaattatgcttacttgaaatgattgacaaaagggcaaatcatattaaataatgattattttagaataggaactttaatttgtgttagaaatgagtttaaaatgtgatttttatttattgaaataaaatgttaattggaaacatgaaaattagcagctgataattatagtagtcattgcataatacagtaatggtctttgttattgtgctttcaggacaagagcaatctttcccatccttagggtcttgtaatagcaggggggctctgggagctttgatggcatgtctgcgaatagctagagctcatggacatcttcagtctgcaactgatacctgggagaacctcgtgtctgatgcaagaataaagcaaggcttaattcatcagcattgccaagtaagtaaagaaaattacctggatttgtacatgcagtagatccctttcatgtagcagttcaatatagaggcccctacattgtatcctgaactgttttagggagttcataaagagaatgagtagaaaccctagtctcccaactaaactttcagtaggccctttcttcaagctactgaaagtttagttgaggatgtaagaaaacttacataaaacaactggaaactcttagaactgacaatacagatacaagcatgccatcatgtgcccttaaatacataaggactcgcttggaaggctcagaagagactgatcagagcaggtggtgcttgattaggaaagtgatagatatgattagaaaagaggaagccttggagcagcatacaaaatggagggacccaaatgagcaaggtct

SEQ ID NO: 93954 - DNA, 1085 bp, Homo sapiens
tttgataatttaggccacaatccttgtattttttactagtagatttctttttttgcttgctatattgtatggaaacttattttatctttttacctgaccttagaaaaatatattatgagatcacacaaagtaattatctttggataagtcgaagatgtttatttctcaaatcacctctaaaagcatttgtttaaaaaaaaaatacataccaaaaaaaaaaagcagttgttaagcttatccacctgcaggtggcgatgtgttgtgctctgccagtacattccaaccagcaaaatcattctcgtacttgatgtaatttttttcctttaatactaatacaataatcatgacatttgtgggtattttatctttggatttagtcatttttcctaggatttttcaggggaaagagatgtttgggtttgtattttgaaatatctctgaaaagttttaaaagctttatgtgtgttagctctgctatatttttccagattagcagtgtgctgcttcgttcagtggactgcaccagtgtccccgagtggtttatgagcagctgcaggagcctctgttgtggtgacatctctcagtcagctgtcttattcctctgtcaggggacacttgccatgttggactggcagaacggaagcatgggtcggagtggggaggccctgctcttggatactgcacatgttttgttcaccttgagttcacagtgagttttgatgctatcgtctcatattttgtttcacttgtaagacatttagaagatgcagtccaaaagctggagtggcttgtgcctctaatcccagctaccctcccagtaggctgaggcaagaggatcacttgaggccaggagttcaaaaccagccttggtgacatagtgagactgtgtctgtacaaaacttttaaaacttagctgggtgtggtggcatgcgcctgtagtctcagctacgtgggaggctgaggtgagaacattgcttgagcccaggaggccgaggatgcagtgagatatgattgtgccactgcactcaagcctgggcgacagagtgagatcctgtcttaaaaaaataaataaataaaattattgc

SEQ ID NO: 93955 - DNA, 1060 bp, Homo sapiens
ctgtcagttatcactcatccatctgctttgcagcttctgaaatactattgttattgtcttgttgcatattggttgcctttaagaatttatctttttacgttttcaatcccatggctgttggtttgaggaggttctgggagagaggagaaataatacctgtacatcttctttcactcagggtagcctttttccacagcaggagctctttgtctctttttctcctttttggctcttctttttatgctcatcgtgtaaaggtgggttctgtcctttttattttgttcgtttgaactgcttaataatgtccactttggtgtcagccaccacctatgtactcaggattcccaaatttattactccaagttagatctctttcctgagtggtagactgatggacatcagttgacagttaacttgtggacatctcagcttggatgttttacaggtacctcaaattcagggcgtccaaaagaaaggaaaatttatttttttaaaaaagtcttttcctgtagccccaggtaacctctattctacttcctgtctttttgaatttgcctattctaggtgattcttatgaatcatgtaggatttgtccttttgtgtcaggcttatttcatttatttttccttttttttttttttttttttttaattgagacaagctctggctctgtcacccaagctggagtgcaggattttggctcactgcaatctctgcctcccaagcccaagtgatccttccacctcagcctctggagtagctgggcccacagacgtccgccactatgccctgttttttatatttttggtagaaatatggttttaccgtgttgccctggctggtttcaaactcttaagcgcaagcagtccccctgccccagtcccccaaagtgctgggattacaggcgtgttttcgagggtcttccacgtttgtagcatatatcagaatttcattcctttttgtggccgaataatatcccattgtatgtttagaccacatgttaatcaatctgtcgatggacaatttgatctgtttctacctttaggctattgtgaataat

SEQ ID NO: 93956 - DNA, 1007 bp, Homo sapiens
gccaccatgcctggctaatttttgtatttttttgtagagacagggtttcaccatgttgcccgagcttgtctcgaactctcctgggctcaagcgatctgcccacctcagcctcccaaagtgttgggattacaggggtgagccactgtacccagcaattgagacttcaaagagtatctgtaaccatgttactttgctatatttgatattataaaaattacttcaatgttttgtattatagattgtgcctctgctggagaaagcagataaaaatggcatgtgtgatcccactattcaaagttgtttggatatcttagcaggcatttatctttctttgagtctaaagaatcccttgaagaaagtattggcaaggtaagaaaaaaaggaagggaagttgggtgttataaatgttgaatttgaccaaaagtaactgaagttccttccttggtttgataaaactgaactgatacagatcacaaaaagttcattcatatggtttgttctctgtttcattgattagttacaactattttttttttttttttttttttgagacggagtctagctctgtcgcccaggctggagtgcagtggtgcgatcttggctcactgtcagctctgcctcccgggttcacgccattctcctgcctcagccaccacacccggctaattttttgtgtttttagtagagatgtggtttcaccatgatagccaggatggtcttgatctcctgaccttgtgatccgccttctcagcctcccaaagtgatgggattacaggtgtgagccactgcgcccagcctagttacaactttttaaaagtataaaaagccttcttaggtcacatgcttaataaacaggctgtgggctgtagtttgcttactcctgcctcaatccatttacatttattggttatgtttaaatgtcatcttgctgttttttcctctttttgtcctatctgttcttggtttaaatatatatttacacagataacacaggaatataggcttgg

SEQ ID NO: 93957 - DNA, 1098 bp, Homo sapiens
ttagtagagatagggtttcactatcttggccaagctggtctcgaactcctgaccttgtgatccacccgcctcggcctcccaaagtgctgagattataggcgtgagccaccgcgcccggccctcaaatttcaaatttagcctctcttggttatatttctatccctttgtttctttctgtgataagttccctgataacatgtaacttagcatttttcctattatgaatgttatgcttttaagttacagataaaagattcctaggctgaacaaatagcaaaggacagaaatcaagacaaatgcttttcagctaagatttttgtgtctttttttttgtatttgggactctgattttcatatagttctgtataactatacactgtgtgcgtctggcatataaattctatagcacctgtggttcaactaaaagggcattagggaatcagaacatgaagactgaaatcccagccatgaacaaggcatattcactctgaacatcaatttcctaatctctgtaatgggaataacaattcctgtctcatagcatagctgtgaaataatgtatttgaaagttcctggttcctaaacactaatttgaatttttaaaaagttatcttctgttccctgaattatctttctttcttctaggattattttcctgtttttatgtttgtaattacttttcaggttgcaaacttttctcaaatgtctgatgatttttagtggtctatttatatttaagaataggacacctgcaaagtaaactgacaattatgtataaatggtcagttgctggttagcagtcaatcttttctttagtgtgagagggtgggagagtatctgctgggcggtgaggtcatagatgccatagctgttggactagtgcactccaattcacttattcaattttgtaagagaataacttttcaattttttagcaggaagtaaatgcttagttgctagacatttggcagatgggtttaagagagaaggtttcaatgaattagttgactctaagggccacagattttacattaatacctactgttttcagtctttcatgtcactccgcctctaggtctttacagggctctgcagggc

SEQ ID NO: 93958 - DNA, 1051 bp, Homo sapiens
acttccaaatcacactttgatctgcacaggtctcagagttatcgagaagtctgttaagtcttttcatcaactctctgcttaagacaatccctccttccacagtcacgtattcgaggtctccaaatataacagtgtggcccagatagaagggctgggatgcatcccttgtaaacaaaaggtactttaaattttcaatgacagcaaacgtagtgggaagtgcaaggaagaaccagttgtagttgtcaccatacttttcaaagacgtatttgtaagcggtcctcatctgtacccacctgtcattactttctatattgaacaaattatcatttttagtatcgtagagctctgctttgtcacagtgtttggtccaggtctctttcagtacagcccagtaactctcatcttcggattctccaaagatgatacagaaaacacgaatacttttactgagctccaagagtatcacttttgaagtgtttaagaaatcgttcctgttaggtggacgaaggtgatggtgctcgtggtcttgagtttgacctctgtgtcgaatgtgaatttggccaaacatagttatcaaaacccaggaaatgctcccaagcaacatacccttaaaaaatgatgtcccactagcggaaaccattttccaggcgttaggacagtgtgccagggtcaaaggcagcctgggaccgggtcctggggtcccgcgccttccggagctggcggctgcgctcccggttgggccactctagctgcgggaggtcgcttctcggtggcgtagagaagggggcggggcaggagcgggacgcggcggccactgcgggtggggtccgggctgctgcgggtgagaggtataccaggagttctgcacgcctggccttccaaccagcaataaagttgaaaatgagcagagatgagtcacagacggctctaaagtgagccagacatcagcactgagccaaaaagaataaaattgagttttacctcacgatttgtgtattcagcccctggtacaacacatcccgtatgttgattagcatggggtccttcttaa

SEQ ID NO: 93959 - DNA, 1100 bp, Homo sapiens
ttaggcagcaagaaattgaaattttgcctatcttatgatgttgagattttcagagatttaggttaggcttttaagttcgttttatttggcaacccattctactacttttttttttttttttttttttccattctgtcttctcttactcttttgaagctattcggtcctgaaaaagtagtattgcttttcaaaagccttccagcagactggccaagtctgagattttatttctgtgtttattaggtattttcaggtttcaaggaaaagagatgtattctaattgcctcaataaatatgagtttattttaaaaatttctaagagcttattttaaggcatagcctatccttattgaactggaataccatgcaaattacaatagtcactctagagggacaacatgtgatagtcagcagtacctccgatagaaacaagtgacatccattgcccctgctcccagtggctcagcttgtcctcccaggcctccagtcccctctctctaattctactactaaccactttcccccagtctcctagggcttcagactgcctcccgtctcctgcttactgcccttattgttatatgtctttctgttgctgtttgtgtgtgggtgtatctcacactcaaagaaactacatctgattcactcagccaggcactattcaatcgaaaatgtccctgatagtcggagaactcatgccagttgcctctcaagccactggctgtcttgaagaggatggccttagttgcccactgtgtcctggacagtcaactgtgtccaagttagacccattattaaattcaggacatgttgctctatgcattaggaaccacctgtggtcccttttctcaagggagcagggctagtaacctgtccagtacctgtttcagagatttttcagaagagaagagaaaacaaaataatctacttttggaacaagataatataaattccattgcaattctcatattcatttcttgtttgactttaggtatctcttctacttgagtgaaatgtacattgacataggaaggcgatagcatttaatgctactgtatctatgacttctgacttcaggtttttccattctttgtttaacc

SEQ ID NO: 93960 - DNA, 1107 bp, Homo sapiens
cttttttgatgttgagctgatgatcttgatgttgatgtagatttctacataattgacatgtccctctccacaacagttcctggattatcttgatttcacagtggttttaagccaaaggggattgaatggtgtgtattattttataactgaggacttcagtttgtggtcacttgaactatcataggtcttaaataatgtaataacctaagtgaatggtatcaatattattctaaagtcctttaaatgtagccatatttgtcattttcttctccttcaaagtgagtgatgccgaatgagggatgtagagaagtgagggagatggtagattctgaatgtggcttcttactgaaagtagttaagtgttcatttgccgtgggataaagggatccagccgtccctgagtggctgttttggtgaaaagagtaagataggttgtctttatctctgattaatatatttttttctttatgtcagtctcagagaaagatgtcacatctgctaaagcactgtatgaacatttgactgcaaagaatacaaaattggatgatctgtttctaaagcgttacgcatctttgctgaagtatgctggagagcctgtccctttcattgaaccccctgtgagtatttcttaattaaggggaaaaaatacctctgcagatttatgtgcacttcataacaatgtgtaagaaaataagttgaagacttaattacatgaggattagatctctgtgaagagccctcaggggatggcttgagggactgagcagcatgccttggctgcggcagtcggagaacatagctctctggggccacagtttaaaatacaaggtctgtctcagaccttcagctataggcatggatttaccaaatgtccttggggcagttctctcatttcaacttgaaataggatttaatggcctgtagttcaacagccaagcatattatgtcagtggtaattacttgttcatttacataagttggtttttatttcttcgtctaggaaattttgcctttttttttttttttttttttttttgagatggagtctcgctgtgttgcccaggctggagtgcaatggcacggtctcggctcactgcaacctccgcc

SEQ ID NO: 93961 - DNA, 1851 bp, Homo sapiens
ctgattttttccttcaacttgtggatgcaggcaaggtggatgatgccagagctctcctacaggtaatgaccctccactcatggagcagtggggctcgaggcttgcaagaagtaaattgagaaattactagacataggcgtgtggtggaatactagaaattcagtgtggtgtgcagctagcttgtttacattcagtgtgaatcacggttgcaggacaaggactggatggtagattttaggttactggttttaaagatgccagatcaaactagaaatgtctttagaattgaggtagcggggagcggcgggtggtgcgggggtaggtatggggcagcgagtttcgctgaaatgattaaagacaaatctttctgtgcagatagataatgcaaaacaacaattcctttgattttctactttaatttctcaaatgcgctagatactgtgcgtcaccatggcaacacagtttgcaaacaaaaagtaggaaatgtttgcttttcaagtacagcttctcacttgaatactcaaacattctcagtgccttattcaaggtttattaagagttgaatatgctttctattcacttgtgtgtcacagacacattaaatgacaaatgcaggtctctgtggcccgcactctcagttaaattagcaaccttcagggaaggagacaactgcattcatgccattttaacagcactaaatataaagctatgccaagtgccgacagaacagtgggtgatcctagctgccactggcaatgtacacaaacaggcaccgccggggagccccttcccagcaggtggcagtcaaacagtcaccgtgatcccgccaacggctgtgtttgtgtagactccctgtgtcaaattgaggcgtgggaccaatttctgatcgtaaatagtattatattcccttacatttttaccagctgtgaaagatcttaagtagtagatagggaaggtaaaactacccatgtgcttgacctccagtttttattcttcaagttcatctagtttgacagtagaatccaatccatttttaaaaggaatacctgaaaaactgtatctctgttaacagttttataaagggtgaattagcactgcttctcagactcttacttttgttgctggagaagggaaattccggttcactgggaattttcttgttttgctttgcttgtttactttttttcctttgtttttttttttttttttaattttaaggaaaaggcagtttatgatagggatttcaggacttttaaaattgttttatcttgctatcttacgtggtgaaaaaaaaaagaaggaagatactcatgctttatcttcatatgtacatgtctaagtacctactaggggtataataagcatatacatatctaattatacacatgatggtatgcaatcagttttaacacatccttttgatagttctttagaaagtggcacttggtacttcatctactagcttgttctctgccataatcaaggtttttctggaagagcacaattgacagccgcctgggtgggtggcagcagggatggcgcctgctccctcagaaagaactgcgttatctgcagtgacctcactgaagggctcttggtggtagctgagtgttgatgcaacagcagagtcttttcatttaccatctcatcactagactggggtttcagatgataaacccttcacccatcctttacctgcttgtcaaacagtaaaagattattcttgccgtagcgaagaatactttattcacagatgtcaaaaacatcagtgcgtaatgtaaatgttctgtgtggccccaaaaagttctttttataccattcgttttagtattgacagtgttttaaagcttt

SEQ ID NO: 93962 - DNA, 1913 bp, Homo sapiens
attgttttgatgtactgtgggaagagcctccctagctgacaatattcttggttaataagactattattataattatctgtgtatgaccacccattagcaaaattttatcaagcttattataaatatttttaaatagtataaaaacattttttgtttcctatatgtgcatgtgtatttttaaatttttattgactatgctttttaacctgtttttcttttttctcatttgagaatgagtggtttaagattgtagatttcaaataatcataaattctttattcattaatgaacactaaattcatcatgtctttccactgtattttgagtacacttcaattaatacactttccccatttttctgtaaaactaagctgttcttagttggaaagctgtttggagagtcttagttttgtctaagttacattgctttagttgctataaagctattaagttttcttcgataatggtaggggtgattgttaggctactcctcagtctaccactttatttcatatcatgattttgctacagttttatgagtcagttagctagaaggctattccatagttatttataatcaagtacttgaaagtgtgatacttcaaaaaaacatacaaacaaaactccattgattatactgatgctcctcaacttaccgatggggctaagtcgggataaagttgaaaatgcattaactaccccataaacccatcgtaagtcagggactgtctgtatttgtggaaatcagtaggcattattttttaatttagtgcaggaaaataatcacaaggcatctaatcataaaataaatttgttggtgttaaagttcaatgtttcagtttggaacattgatcctagaggatcaatgtttttagtgtttttgagaaagaattgttgggatattaagttttgatgatcatttaatcttcgagttaaaatctggacaagtatgaacatggatagaagtcacacatttttggaaactctagaaaatctttcttatttgtattcatttgaacttaccaactttagtcactgaatgttatccctaaatggaactcatattgtcggtaacatttgtattttctctgtgacttaaagaagaaattcctcgggcctctaatatcttatatagtcaagtaaataatttttgggggtatctcatgaagtattaataattttctgtaatctaaaattaattattcatagctttttgtttatggccatttggtgctcatatttaaaagctggttttcaaaatgcattaaagtcagcacaggtcatataagaaaagccatctcctgctcttgtattttagaggctgtgacaacactgaaaacagtattggatcagcagcagaccccttctaggttagcagtgacccgtgtcatccaggcattggccatgaagggtgatgttgaaaacatagaagtagttcagaagatgttaaatggactcgaagactccattggactttcaaaaatggttttcatcaataacattgctttggctcaaataaagaagtgagtatttgcaagccttcttttccttcattggtcactagaatgggcattgcctcagataccaccttttaaaaacttttttagacatgtggaaaccttatcaactgcagaggaaatgttgatgctagttgctgattagggaataattatatgttgaaaaatatgttttttctttaccttaaatcttagaataaacagcatttaccaaattcataaatcttgctccacagttgataacctttctcattcctgtgtatatatgccaggcctcttgttgtcgaaacactttgttcagaagtgaaaaatgatctcatttgtttgtcagtaatatttgatagggacactagtagaatattgtgaagcagaaggccccgcaagcttattaaaaat

SEQ ID NO: 93963 - DNA, 1093 bp, Homo sapiens
tccatttagcaaattacctgcttatcaagagccttttgtggtagctgagagacataaattactgtacatgcatttataatacagcttgaatatgaatgtacttgtcatttgaccacttagtccagtttccattccatttaacacaagatgggttttcttaagatgaatcacagctcttcagacatgcaaaatttgtgttccagaacgagagaaagtacaggctttcaagtgcgttaaaattcacagcacaagtcattttgctttggaaattaacatactttagagcatctgaaacaattcccagcagttgtttcttgcatattgtgttggttgtgtgtgagataccaaatcagttaaattgagtgttaaatgtgtgggattgtgcaccaaatgattataatattgatttttaaaacttaatctaatacttttttaatagttcataataccaacagcaataaaatacagtgtttgtttgaagtttggagttttcaaattaatgttaagagaatgacacctgaaagatgtggacatgactttggggaggattgggattggggtgggggccactggtttgatagaggctgtttatgagttttgaaggggatgaattgggatgtggaggtcttatgaatgatctcccaaggggcactatgacgaatctcttaaatttagctaagtagctttccactttaagatttacatttgaatttgagtgaatacagtgatactgcagttttgccagtacaacaaaacccacttaggagatcttcaagaaaggttgaaaaagctctggaaatgtaaccttattgcttcctatctctgtaataatggtattattcctcactgcatgttctggttttgttttgggtttttttttgttttgttttttttttttgtttttgttttttttgagatagggtctcattctgttgcccaggctagagtacagtggtgggatcgcggctcactgcaacctccgcctcctgggttcaagcgattctcccacctcagcctcctgagtagctgggattacaggcgcccgccaccacgcccagctaatttttgtattttcagtagagacagggtttca

SEQ ID NO: 93964 - DNA, 1293 bp, Homo sapiens
ttttccagaaggaaagatcaaaattaggtgtgaaaagttaatgtcttttattatattgtataaatgattccaatataaagatctctacccgcaactttttaaaattttttccttttgccactttggaatctgttttggttgtaattggtcagtttctacatatgtaggatatattattatagaatagatctggggtttcttcttcctgatatttatctccactttcatatttgtaatgagcaggcagcttgagagaggaagagattattgaaaaagaatgttacaggctttgaggtttttgaaaggtttgtagttcatacttagtgtcaaagacaagttttgttgccttgtggttttaatgaattgtaggtgaatatttttaaattaatatggtataatacatgtaataatattagaagtgagcttttaatagtgtctcatttttatttaatcatgtgaaagattgagaaagtaaatcctttgtgcaattcttagtctcatgcatgagttgttgacttaagttgttgacagatgggacaaagggagaaaagtcaaactgagcaatgggtactttggtgggataaagaggattggtcggaggaataagaaaatcctgtgtccagggactgcaggggtggaccttagaggctgaaagtgactgagagaatgggcatgtcgtagtgtctctgggggattttcttgggattgatgaaaataatttagcagtgaccccacttttgttgcaatctgcccagcttatatgtccgtgttggcagggcatgctgttgttggcaacagggtcatcactgagctcgataaggcaaatgggagcaattgcttttgctccttttgacctgtttagattttctaatccggagatgaactctgggagcattaaggatgcagaaatttcatcacaggagatgcgcaaacagtgtagcaaacagaaatctccagctaggttttggggttttctgtttgtttttgttgtttcattttgctttttttaaatcctgtaggttttattgaaaagtcaagtgattttttgctcttgagttttaaaagttggtgttttgtttcaaacttaagctagggcaagatggttgtgtgaaatttttaattttaaagtaccaatagtttgagttctgcagtatgttcagcttcagaaactgtatgaatctagatggcagaaatttgaaaattaattgaccaaatgatagagtgttagtaatctgctttagtttttatttaaaatgtacagtgctgaaaataaatcctcattttagtttctgg

SEQ ID NO: 93965 - DNA, 1052 bp, Homo sapiens
tagtgggtcatgacatctattaagtgggacagaaccaacattgtttcaatgaaatagtatagactatttcaaagtatttcctgtagtaaagatattatttcatgaaaagttgctttcagttatgcgtgtgtgtatgtatctgtggattgggttgtctatgtaaaacatcatttcttactataatcctcccatggatcttgatctaccaaggttgaaactgctgacctggaagatagttgtaagcatgaccgtctatttgccttaaatttacaacctgtgaaacataggtttatcttcttcccttcttctctagatctttatgaagccttcctgagataaaattgacatgtaaaaagatacatatttaatgtatctatctcagtgagtttggggataagtatacacccttggaaccattgcctacttcaaggccacaaacatatccttccccttccagagttttttcccaccctcaatattattattattattattattattattattattattaattgggtttttttgtgtgagagagaacacttatgatctatcctcttagcaattttcagtataaatacagtattgttagctgttagcactatgctgtatagagctccagaacttacttatgttccataactgaaactctgtactttaaccattatctcctcatttcccctcctcccagtctttggtgtctaccatcatactctgcttctgagtttgacatacaagtgagacttttcttttagctgtgttatccaccagggttatttgggagttgccttcctccgtgcgtctgtgtctacccaagagaacccaagatccaaagcctgaagtcaatctgggctttggatgcatgtcctctcccttgaaccaataaaatgttatatctaactatgtagaattgtttcatgggttaaattgttgagtacttttaaaaataatgctggactgaaaattcagaagtgaaagttcaagttacgaattatccaactaactatgttacttgagatatttcaagagatattttgtgggttcggttcctg

SEQ ID NO: 93966 - DNA, 1050 bp, Homo sapiens
tgccatatatctatctatctatatctatatatatatctctatatatagagatatctatatatagatatatatatatctatatatatatatatatctatatatatatatatttccaggatctttgcaacgctaaaggtcatagttgaattgtcacctgtttctgattttgatttcggcagtaggcactttctcagtaacattaaaaagacaaacttcttatcaacatgattggaagtgtgtaataaagtgtgatgggggcttcttgttattgctttttaataggtagggtatttttggtttgtaattcagaagtacagagaaaagttcccttctcgacttcgggtcacggtcacttttggttcctttccctaaaggcagcatttggaataatgctttcttcaacatcaaataagaaaaagttctaaatatttttgtgtattctgtttagcatatttattgattaatttctgcttaatcaaattctacagaaataaacggtgactggcaaagagctgatgcagtctggaataaaatccaagaagaaaatgttattcctcgtgaaaagacattaagattattagcagaaatccttagagagggtaaccaggaagttccgtttgacgtacctgaggtaattgtttttggcataatcgtaacagattttgttgtcagtataattaggttatagattagcctacttttatattgaaaagattaccagtttttatttaacagaataactttgttttaaagttgtggtatgaagatgaaaaacattccctgaattcttcgtcagcctcaaccacagaacctgatttccagaaagatatattgattgcctgccgattgaaccaaaaaaaaggcaagcacatacggggatgggggtgtgtgtgggggggtggtcttctttctaatagcagtgtggggtgtaagcccaaccaattagaagtgctctaggatagagataggacttaaattttacatatttcttgtccccttccatactttaacgaaaacattttggggcaattgggaaaatttaactattga

SEQ ID NO: 93967 - DNA, 1241 bp, Homo sapiens
ctatttgttaactgtaaaatacatcctttacacaaggtagatctatctcttaatcttacttttaaggttgaaactctggaaaaattagtggagctgacacagaagctatttgaatgtgatagagaccagatgtactacaatctgctaaaactgtatagtaagtgatttaactattcttcacgctttcatttattctgttgaaggcagtggcaggaaaggagtatttggttttgagggagctccagggattgtcagaaggcagttttcattcaacagaggctcaggtagaggctagattgaattttatcacagaatgttatatcgtagcactagacactgtatgtcttcataatttctgacattcttactgcaataatgagaaagtacgaaaaccttcatcagaaccacagaatttaataggactttttgaggtaagaacggtctttctgttctttttatttaaaccttcaggtaaatttattggtgacttttataaataggtaaccaccaacacattcatgtaagtagagatttttttctttttgcaaaaagatgcttatcttgcatatctatatacaaactcattgttaaacagctttttaaatgtcattatatatttttgagtcagctatatattacaaacatttttctatatttaatcacctacaaataacttatatactacatagatatactaaaatttattcagcctatcatctcctattactgggtttgtgaatagatttccattttccatttctaaaacaacactacgttattcatttttgtgccttaatcttcattcacatccttaactgttttttgaggctgaaatcttagtatttgtatttgacatttctgaaactttcgatctctcttttcaaacaatgctctagtacttttatactagtgtacacatttggagctttacagtttcttttaggatatttcggtagagaggaataacacttagaacagccagtgacctttccctatttgtttcatggatgtttatctagatttattgttcttcttttctcttggcaaatttcccttcaccaaacgaataaggggatttatttgtcttttcaaacttgtatttattaccattgaaagctttattttacatctcgatgatgtaaataaaattaaacttgcttaaaattttacattccagtttttggttgtattgaaatacatacttcacagtgtaattcttaagactttggcttgaacgatga

SEQ ID NO: 93968 - DNA, 1060 bp, Homo sapiens
ttcttttaaaaacgaaagccaatggtttattattgtgacaactgttactttgtgtaacattgataatttttgtctcctgagtctattggaataaagtgtatgtgtgtgtgttcaagagagagcgtgtaaatgagaaagagcacgtgcagtcaggtgtggtggcccatgcctgtaatcccagcactttgggacgctgaggtgggcagatcacttgaggctaggagttcgagaccagcctggccaacatggtgcaacccgtctctactaaaaatacaaaaattagccaggtgtggtggcacacacctgtaatcctaactacttgggaggctgaggcaggagaattacttgaacccatgaggcggaggttgcagtgagccaagatcatgccattgagactctgtctaaaaaaaaataaattaaaaataagagcacatgcatgtgaatgttgacacacactttttatttgacgttttctagtttatcgcttatttttgaactaaagacagtataaccattttattaattaaagatttatggaatgaactttgacgtgcagtgcagcatttggaaattatcggcgtcttctaggcagaggttaagcatagtttgtgttttatgctctcttctactcttacttaaaggtctttgataactatggggttaattatagtttgtattagttatagtataaatttagtatatagattgtatactagtatatatagtttagtatataagtttagtatatatatttggcagcaaattcataagaaaagaaactgtctttgaggaaaaaaataatattcagccgaagccttaccttgggtgctatgtgattattttattttacagactccagggattagagctcgatctgcaaggcttcagtggttttgtgacagatgtgttgcaaataatcaggtttgtatttgattcagatgtctcaatcacctaaaagtgtgagtagaaggcaagggtcctctgtatcacatgaagatttggggacttcgagagacagggcattgtggaagcagtgtttatctcgatcatttgccagata

SEQ ID NO: 93969 - DNA, 1206 bp, Homo sapiens
ctattgctaagacttccagtcaacagtaggctattagtagttcagtctttgggaaattaaaagttatatgtggatttttgactgcacagatggtcaaactctaacccctgtattgttcaagggtcagttgtacttggacggtacttgggttggggtggggatgttgttttcttttttttttaagagatggggtcacactgtgttgcccagactggagtgcattggctgttcacaggtgcaatcataacacaccgcagccttgaactcctggcctcaagcagttctcctatttcagtctcccgagtagctgggactacaggtgcataccaccttctccagcattcttgtctttgtctgtcccttctttaaagcccttgtgcacatgatttttcctcctactatgttaactaggggacatgaggctagggcgggcggtttttgttgttgctttcatttgacatctccagcagaagtggcaagaaaaatcagaacaggtgaaaatttctatttgagttaaattcaggataatcttccttgagacagagtttgaaatgcagtagaaaaactttcatttctttttacctaacaggtaataattattggatatctatttttactagtatacatagaagcttatgataagctttttatggtaaatttacatcagagtgttgtaatgaaattaaagtaatgacagttatttttgactttggattacttttttttcccctatacaagtaaacctagtagtgaattgcaactgcagaaagttgtggtttgaagcacagtagctcaggtggaaacaaacatgcaattgtttctataaaaatacttactgtatcctcactgttcattagatagattgtatgtggcaacacagaaagaactaaatatgagtttaattaacattaactgttttttcatgttatatttaacatcccaattagaattctattcttctccatgtttttattacattttctatttctgctttcaacttgcagtttttaaaattcaataagatgttaagagataagccagaaatcttgacattacagcagcctaggagatttagttaatctgacctagatgttcttttgatgattgagatttatatatgaaaacagttctcaatttcaaaatgaaacatgggaagatctgccatataaatcagctgtcctgccaaagacaggcagattaatcagc

SEQ ID NO: 93970 - DNA, 1078 bp, Homo sapiens
ccaaagtaggtaaagatgtaaattatgattattacctgtaacagtgaaagtttttctcaaaggagaaagggcgcaaatgaactccagtttgtttatgaaatggaatgatgtggccattaaaaataatgcttacaagattttggattttcgaatttgggatgttcaaccagtaaataatacagatattccaaaagtcagaaaaatctgaaatctggaacgcttctggtcccaagcgttttggataagggatactcaacgtatagtagttacggaatttgaaaccaggccctgagtttctgttttctattggttcctctgtaccatcctacgtccatgatctcatgacccctcaatatctgaactgtcgaaaataacttaccctttctccggaattcctctttcttgacttttccctctctccctatctgctgttttgcctttccatcacggtgcagccggagtacattttgatctcttctcagtgggggaaaaactctcttttgatggcttttgatttaagaccaaaagcttggattccagtgatctcccagtctttgttactcttccttttgttcttttccagatctgattcaggaatttttatcccatttgccttccttaataagccagcgtggatcgtatacacagacagtggattttagagctagggtttgtttgtttgtttgtttgtttgtttgtttgtttttgttttgtcctccaaaatttcaggatatgtcagttctcatgtaaatatatacccccttttgtgagttagtttagtatctcctataacacctggtcaagtggataattttttagttcatgatagtttgttaattggacttgctcagccatattttcctccttattatacatggtcttcaagtctatcttggaaaattttagagaaaaggacaaatgctaaaagacttaatagtaccatgagaccttttttgctcccttgttctgtgctagctatggggataaatatagttgatccttgaacaacataggtttggattgtgtaggtccacttacatgtaggtttttcttcagtaaatatactggaaaagttttt

SEQ ID NO: 93971 - DNA, 1201 bp, Homo sapiens
ctctttccattttatgactcaatctgcccacttgtcagcagacagtggggcatgctatcgtgctatcttggacaggtgcttctgtagcttaagtggttcatttacattttctagaaaatggtataatttttcttccacattcgcttctgaaagtacagtgaatccaaatgtgagaagagctgtctggctattgagttctgctcctctgtaggtacagtgtcagtattagcaggtcactgatcagagcggaaatgaagctcagctctgagaggttctgcaggaggaatgcatgtgcctgtctttgtgtagtaaggtgtaatagagccagaggcagaagagtgatttcttgttttgccatctacctgcttatgtgataatggacaagttattaaacctttctaagcttcctcatgtataaaagagaacataatatctgtctttaagattcaatcacataatgtatgtaaagcagcttgcatgtttcctggattatggtaagtgatcaataatattaattccctttgccccttaaaggtagggattgtgttgtcttctttacctcacataattcaaaatatgatgttcagcataaggtacatgtttgccacatgaataggcaagagaagactgcctcttaattacttagagctttgccacagtacaaccacatttaggaatggctgtctgctgatgacagaattttcgtagtaggtgtgtacaaaattttttaaagggtgaagaatagctttacagaaagaatactacaagtcatgagcaacatttttatcattcccaaaaaaagcaatagtgtcttatcattgggtagattcactatggttgaatttacagagctgctgtgtatttgaagcgttgtggaaataattagataaaccagtcataagctcattaaatgaagaaagatataggcaaggttcaatgtgtaaatatcacctgtttttttgtttgtttgtttttaagatgaattggcatacatgtatcatgtgttatatgtagtatatttgacagtctccagtcttttttttttttttttttttttttttttttgagacagggtcttgctttgttagccaggctgtagtacagtggtggcttagcttactgcagccttgatctcctgggcacaagcaatcctcagaaagacctagtctgaaaaaagtcctttctacaacacttcatctta

SEQ ID NO: 93972 - DNA, 1244 bp, Homo sapiens
tacttatatataaagattgtttctttttttcccccattttagctttgtggttttctaccttaagtaaagctcagttgtttacatattaactggtcattaaacatctctctaaagtattactaagagactaagctgaattcgatttattttattcattgctaatttttttgtttctaaggggcgacctatctactgctcttgaggtcgccattgactgctatgaaaagtataaagtattaccaaggattcatgatgtcttgtgtaaactggtagagaaaggcgagactgatctaattcagaaaggtgagtcactttctagtatcttaatgtagtttttttttcccttcttgctgatttaatcttagtgtattgttaagagaaaccagcagaaggccagcacattcagataaactttctttatacttgtgaaatctaaaagaaaaatatcaggtagatttccaatattatacatgttcttgattttagtaactgttcattttgaaaaaatgtctgttatttttgtgttctaattcttggtgatctgcctttatgaagattttttttacccttatcctcactagttctctttgtagctactctgttaggtacttaattagtcgatatagctatattctttaagttattcttaatatttgtttttaaaataaatttttcttgtatttgtctggaacttcatatgatactgtttttctgggtttttttttctcctaatatatatatttttttctctcctacctagcaatggactttgtgagccaagaacaaggtgaaatggtgatgctctatgatctcttctttgccttcctacaaacaggaaattacaaagaggccaagaagatcattgaggtgtgattttaactacagtgttctaattgtagagctatttagactcttaattagaatacatttaaaaattttaacctttaattacacttgttctgattcatgttaatagaattcaatcccagtaatgttgggggagggggatctcggccagcttctttattgtatataattacagttcagaaaaggcagtctggttgtatattaaatttgtttcctcactttgttaaattcactattatatatcaaaatgatatttgcatattaaatcttggattgtggaacaattaaattaaactggcattcctgggtgtaaagttgctaatcctctttgccaaagaattctttgttcttaaaagcagtggaatttaatttgctgc

SEQ ID NO: 93973 - DNA, 3411 bp, Homo sapiens
taacaatgtataagtttaaagtactttattccaaataaaaaaaatcaatatttgtcatctttcgttttttgttgttgttgttgtttttatttttatttttatttttatttttttgagacggagtcttgctgtctcccaggctggagtgcagtggcacgatcttggctcactgcaagctccgcctcctgggttgatgccattctcctgcctcagcctcccgagtagctgggactacaggtgctcaccgccacgccagctatttttttttttttttttgtatttttagtggagacggggtttcaccatgttagccaggatggtctcgatctcctgaccgcgtgatccacccacctcagcctcccaaagtgctgggattacaggcgtgagccaccgcgcccggccatctttcttttgttgtttaagtatactctctgggattagaaagttacttagtataaattacgagacttaagtttaaagctactaatagataaatagatagttgtcactcgtggttgttttaacaattccagattgtatgaaatacatttatgatttttacaggtatatgtattgaggaatgtatatgagttttaggagtacatgtttcttggtatctcaaagtagatagttttatgattggtggatgtcccatagaaatgtctgtccagcaaacttacatgctacatggtgtttgtttttctgtcagtgacgttatagcatacttcagtttcagaatgaggactcaaatgagtggtactatcagatttgccatcggagcttcaagcttatttatcgggatgttcttccgtgtaataatgaaaaaattgtagtttgtagtagctctttgtagtcatgttcccttaagaagtgaattctagattctagaatgaattttgatgcaggccaagtgagtctattcaagttaatgaatttaactctattttaagtttccaaatttcttgctggacccagcctatctcatatatatgttcttaaaatttaaaattacagaatcttttcctcaattttacctttatttcatagacttacagaattttggtaaagcttatatttttaatttgcaccaaacaaaatactgctttttaaaatgattgcttactttttattagtgtacgtagttttatgcatgaaaattatgtagtctattgaaattttgaggggggtgtcttgatttttttttttataaagggtaatagtatgctacagagttgattttcttttagtgtcatttgtgaaagcattgactaaatttttattaggagtgagcctttaaatatttgtatgtgaagctttaggaattatgcatatatgctgatacaagcatgggctcaaagttttgaatgcaaaattaatgtgtcaacattaatttcttcagaggattattgttatttcttagcaggatttaaatcatttctagtgctcaaagaaattcacagatcactttgggtcacagaagctagaagtagactgattggtaatgtgttgtcccacattttggttgtaaagcaatttttacctttctccttttgatattgtgcttcccttactgatttcatcctgcctaataaaagtggtattttcacctgatgattttctctgcttgtgcaaaacactttagatgaacctaataagcacagagtcatagaacctgttagaactaggagggaacccaaatgtccttgagttcagctgttgtgataatttgcttttcatcaccacttctagaaatgtatcacgttgctacagctgagtagcataagtactcttatcagttgggatggaaatccaaagtcctatgactacatagctatcttcatagcaatgcaaattttaggtgcttttaaacatatttttcatttccgtcatcacctaagttttcaagctttattatgaaagattaatagtgacataaattatgtggggaatgtaaatttttgtcttttaaaatgacatgatccaaccacaagtccgaattagataatagggactgaagaactgactagtcatttactttgtttttatctccagtacactttgtatgaggtatttcattataaatttctaattcattttgttggcatcctaagagcagtaacattggttcttaaaattactgacaaatatatgaattatttccattttgccattcttgttttttctgttgttgttctgaacatgtataatcttcagaagcatatatttggagaccaaagactattaacgtgtcgctttgattgacagaacaattattcattcatttattgatagctttgacctaatgtagggggaaatacaattgagacaatactattctagtttgggaattgatctggaaaagcaaatcatgccacttaaaaaaaaatcgtatgtgtgttagctttgctcttaaaaaatgttttagtagtttttcgttaagcagagttatagaaaggcaataaccgaacctgtgtctgaagtaagggaaaatactgattatataaagctttatatcatatgtggtagctactgtaccatttctcttctatgacagtaatccagcctgcaacatctacttgcagtttgaaattaacctgtaatttagtcttcaccccaaatgacaaaaattcaaatgactctgtggggtgccagaagatgcactgtaaacagggcttagtaaggggataaggtaagagttccatcaggataggctcgttttcactgtgtcactattattgcaataaaactaacatttcttcgttgtcttttacttttttagtacagcttaaaatcagatcttgataaaatagtaattcaacttagggcaatgtaacatttgtataataggcaaaaatgtgaaggctttaacaggaagtataaaaggactttctggttttgaaaactgttatgtgtatgagaaatttatattctctacaaagattttcactaattgtcactagttgtacttggagccatgtctctaaccatgcctctttttaaaatacctttcatactctcttttcataaatcgttaatttcttattccaaattgcaccactttattacattattcaaataccagtgcttttaataaagcataatgtgtaattagatgtactgaactgacaatgggaagtccagcgacttgcttacctagtaccttcctctgtttacctggtagccttagtcaaatcagccagtctctagatgccccagtttcattatttctttgaaagtaaaagggggtggcaagtagaattggatcatataatctctatagttcttccaagggatttcttttttttttttgaaacagagtttcacttttgttgcccaggctggagtgcaatggcacgatctcagctcactgcaacctccacctcccgggttcaagggattctccctcctcag

SEQ ID NO: 93974 - DNA, 1039 bp, Homo sapiens
aaaagctttatgggtatagaaaaaatacactgtttttattcatttgccaagggaaatccaaaacaataacagatttagaaaattataaagaagttggtaagctaacctgcttttgtattatcaaaatgaaaatacttgcattgaatggaaaaaaatttgcagttgaacaaaatttttatgtttcatttacattacattacagtctctaagccacgtattttacatgtagtccaaatgagtattatttcaaacattttcttttgtaagtattttatcttattaaaatcatgcctgattcatggagatgacagcaatccgtcacattaaggaagaaagaaatgctttaaaataggttaaaagagttttttattagtcttcatgttatggtcaaggaaatgaaattaataaagtctgggccatcagatattaaagcataaaaatttgtatgatgcagtttcaggttcacttgttttatacctgatccattttggtttcattgcatgcattaaaaaataactgaagctgtttaactggattatgttggtgcaagtgatcaaagcagctttaatttctgctttccattaaggattttttttgtgctggtttgtgttataatctgtatatgtacatatgcatttcatttaagtgtgtcatgaacttcatatatactatcctcccagaattcttgctgaattaatcttgagttcataaaggtcacaatttctctaagatgaacttgtaacaatgtttttggaactcactgtaacactttaatatgttacataaatgggaaataggctttttaaaatgttgatgattctgttacacatgctccccttcaattttagcatcttcatttgtactggatactttcattatttatgggaatgcttgccttctagagtaaaactccttatgtgctgaaaggaaattaaggaggtttggctcttttactccattattgcaattaagaatttagcatcatcagtgccaaaggacaaaaagtggttcatttgccctagggggacaggacagtgat

SEQ ID NO: 93975 - DNA, 6317 bp, Homo sapiens
ttgattaataaagtatgaagagaatgtctaaaattttggaaagatgaaaagtagtaatatgaggtgagacttacaaatttgcttttgatgtttgctgatgtatttttacgtgtgttttctaattctgggctaatttaaatttcaattttaggatgctcacttgttggttgagagtaagaatttagactttcaaaaagtaagtaggattttgactagattctacatgctataatacccatatttaatgagtattctggattgtgtacttataaaaccagtgattcctcacatttttatcatcttgtatacctctaagaagttggtaaaacctgttccccacctcagaaaaatcaacatatctaagaaatttgcatataatctcagaaggtttgtaaatccctggagtccatccatggattccccaattaatatccctgatagcatttatgacatttaggaaggtagaaaggaaagtcagtttaaagggaagagtgacaaaaggcatactatatttcctttttcaggaaatttttcttttcttttttcttttctgtagactgtgcaacttacatcatctgaattggagtccacacttgaaacactaaaagctgaaaatcaacctataagagatgtcctaaagcaactcatattagtgctttgttcagaagaggtaacatttgttttaatatttaaatattattaaggcaaaaaattcttggtaacaataagaaaaaccaaatataatatttatgatttttacaattgatcgttatatgtcaggcttgtaaagaatgcaattaaatgaaaggttaactaatttcagctacaccttgaatggcatgttttctggttgctgtagtttgtttacgataatctgcaaagtgaatgatagtaacagctgtgataggtttatcatacatgccaaatgtcctttcaagccatggctccggtctcttatatctagattgtcaagcaactgatacacgcagtagtcatttgcaagtcaaatattactaggttgttaatgcagggattgaaattccattttcctgctggaaaaaagctctttctgagataaagggtcccttgccttttttcagcgggcatccagctgtactttgtgttcattttagtgtatgtctgcaatttgtgggatatcactagactatttttcactttctagttcaatataattgagccataaacttgtagttttagggaaaaaatatcatgactaactttatgattataatctgctactgttaaattctaaaatatttcttcatattacttggatactaaactagactgagaaacttttcaatgatacatatttctgcatcctgaaattagactgtgattaggatttgatttgggaattacttaatctggaagtcttttttaaataataccatacacaaagcctaaaacatcaaatttggcataaataatggcctattttatattacagataacacatcttttaacccctacacgtgtaagacttgcccacttcttagaggtgaataaaaatatcaaggggcagagtcaggttgttaacatgaaaccatttatttttaaagtactattaactttttctaaactctgaacagtaaagctaaaaatgtgacatttttaccttcacactgatttcttctttttcacatctatgctgtattttagaatatgcaaaaagcccttgaattgaaagcaaaatatgaatccgacatggttactggtggctatgcagctttaataaatttatgctgtcgacatgataaagtagaagatgccttgaacttgaaagaagaattgtgagtaccctggcactgaaacaagttgtcaacatttattctgctctacagaccttgatagattatctagatggaatattactctcttatataatgtcatttttaaaaattcttttgttgtcagtgtttttgaaatttcgtattatacggctctttaattaattgtggcttatgttcagcaaggtgtctttgtttaagtatgataagacattctagtccttagaaccaaaggtttttttccattgattatatatcatcacaacagtggtgatggtggtaactgttttaagaggcttgataacatttccctttcaatattgtagtgtaaataaaattctatccatttctcaggtacctttggcttcctatcctgttagatttttcaagtaaaaatgtcaagtattcgtgatgaaggttagaatcacttaaagccaaagagtttcttcataagtatcctttgcagatggagtgatgcaatatatatgtagtgttgggcttttacttcactagtcactttgaatataatttcgtgtgaacttgtatatggcttcaaaaagaaatcctaactgaagcgtagaggccaacattagttcaggtcttctgatgagcttttgaaaagtgattaaatggatgttgctgttcttttagcagttaattgacttttaaaacaatataaatgtggctttaatttttagtgaccgcttagattcatctgctgtccttgacaccggcaagtatgtaggccttgtaagagtattggcaaagcatggcaagctccaaggtaagcctcagcacataaaggaaatatgtgatgcaagtatcttgccactggaataacatgtgaattgatattaatggatatcatgtcctgcaaagtgcttgaacactttgcatagaaatttgcatgtgaatccaaccagagctacatggacagtgtaggccattagttttaatggattggcaagcttgtcatttacatttgcacagctcagtgctttttgcatttctgcagctagtttttattagcattgctgtttggattgagtttgaagatcatgacttatggcacaatttgcttatgtgcctgcactaatggctttgtttttgcttaagaaggtctgaaggctgaacgtaaaacctataaacgtaaaacctataaacataacctaatatatgcgcctgaattttgcagtagtctttgccttactttttaataacattaacaaaatatatactttaaagtttttattttaattaaggtttttatttaatggttcatggaaaaagcatagctgattacacagctgatttgcatactcaaattttctcgttgagataatgctaagcctaataaaattaattacacttgataatacattcatactattttcttgtttcttaactttctgatttggctttattttgaaatttcctttttagccttcctcttttcctttgattttcagaaaagattgttttaattttattatagggaaaaatgtatggagaaaatcatttattagaacattgaatgttttcctaggacgcctttctaactctttctaaggattagcctatttttttaaaatcactttttgtaaagtggtcaaaacattttgtctgtgtaataattaagaacaacattataaaaatgcacttattccatatcctaaaatgtttgtttctgccttcctaatgaagcttaatgaatctaatgtattaacatgcagtcttttggaaagctttcattggctctgcttggctaattagtatcgacatagcaaacaggccctatcggtatcagaccattagtctggctgtatatacagtgtaaacacatctttattatctggcctcctgacaagccatctgctgaagaaacaatggtgtgatttagcagatgttagctctgaacgataaaagcatccatttaggaggatcttacagctatagggcagaccatacagggttatgtggtacagagtgggcacatagtccctatctataatttgtagtcaaagttgcagggaaatgataaaaccatgctattgtggatttataattgtagtctcgtttagaaatgcaagtagtaattaacttgaaatcggcattatacactagaatttacattcctgctgggcttgaaatgctgttttaatagcagtttgttttccctacatgaaattacctaagggtcttttgtgttacttcattgtagatgctattaacattctgaaggagatgaaagagaaggatgttcttatcaaagatacaacagccttgtcctttttccacatgctaaatggcgcagctttaagaggtgaaattgaaacagtaaaacagttgcatgaagccatcgtgactctagggttagcagaaccatccaccaacataagtttcccattggtcactgtacacttggaaaagtaagttaattgaattttgaattttaaatgttggcattaaaagaatgagtctaataattttcggattatactttataaataccctcatgatggggaagccttggaggtcatttaccacagagtaagagggctaatatgaactaggtgacctttaaaatcactagcagccctgtggtcctgtggctttacatatcaatggaatagtccctggtgctttttttgtaggagcatgtgatcacttgaatttgaatctagtttttcctagttttgagcctgataagtgttattaataaatataagaaaaaaggatcttctggggcttttgagtatgtgtcttgacagttattcaggtaataagtgttgaagcatcttcagtgctccttttcttcacagggtattttaaatacatataccattacagttattctagctttgataaatgttgtaggagatgaattttactgatagggcaagatttactgagtttgttaatttttccatttgaaatgctcttgttggtgctcaatttaaggcattatttgcaatgtaaatcataaagtcagtctattttataatgaataaaacattttagtaagatgactaagcgtaatttatcatctttttcttttgtacttgtttttgttttctgttttgctttttaaatttcctagatcttctttgtcagctttttcatagcttaacatagtttgtaatctgcattacatggagactgcactggcaaattagtttaaacaaccctaggcaaacaaaaatagaagataataattaaaataaaataaaatggaagatatacgtatctgaaagtagtaaaacaccgaaaatgaaaagatactaatttagatttctttagttcaattaacagggagagctgaatttgactgaaacgcagaaatatctcactgtggatgtagtgtggatgttgtcctgttgatgccaggagaaaaataaaatatgtattttaacggttctcatgttttccccaaatttctggtagtttttctttatttattagagagtttaattaattgaatataataaatgatttagtgttgaattttaaatgtataataaaaaccatctcttttaactaacttaaaaaaatgtgtgaatacatgcatgcacacatgaaataattcctttgccatccaatcaaaaacaattaccgggttagatgactggtcaaatcttaacctctacagtctcagcattacatccttttaaagaaatagtgattcaaataatgactgtgttattgagttatcatattcatagccaactttatatagaaatcctataattaatatgcttcctattagaatttttttcaattgcttaaaagacccatttctgcaaattgcatgtgcaactctacagaaggatttgaaagaaatgggcccagtgcccagaaaaattaggccctcctacactaccgggcaaaaataaaataattaacaatgaaaatgaggccatcgtagaaaagtatcttacaaatagaaatactttgaagacagaggagacctgaaagctttccgaaagaggtctgcagatggggctcatgaaccaaggagagcttacccatgggaaaatggaaacggtgtggaattcaaatgttaacctagagcatcctctgtgcttctgattatatcctgaagtcagatatttctgtgtctcagtcaaatttggctctccctgctaattgagctaaggaaatctaaattagtgtcttttcattattggtgttttactactttcagatatgtatatcttctatttttattttattttaattctgtttttatttgcctagtttttttttttttttttttttagactactttgctaatgcagtctccatgatgaggtctttcagtttcatctatcataataaaaagggctattgactctttcagagtcatgagactaataaaaagataaaggaaattttatatttatgaaattacagaaaacagcagaaacattcgtagtcaggggaaatgcctggagtaaaaccctgactttgaaactctttctcaattgtgttttctccaactgatgg

SEQ ID NO: 93976 - DNA, 2952 bp, Homo sapiens
cattacaagtaacaagcaatctgtgggcagtcactttgagactcactgtgtctcccaggctggagtgcagtggcacgatctcggctcactgcaacctccgcttcccgggttcaggcaattctcctgcctcagcctcccgagtagcctggattacaggcatacaccaacactcccggctaatttttctacttctagtggagacgggatttcaccatgttggccaggctggtctcaaactcctgacctcaggtgatccacctgccttggcctcccaaagtgctgggattgcagatgtgagccaccaggcctggcctattttgaatatttgaggtgggtgagtgtcagcctttctaaattacctttgtcctgaaaattcatcctgatacagcaaacatttatttacttattaattttaatactttgatctgtacatattacaagtatgcatatacttgaaaataaacctgggtttattttcgatcctttgctgccctctgcaggtctatgaatataaatctttggagcgaggtaagtccctctaatattgcaaatcataaggtgcttttaacgttacaagccaataccataggttatgtaataatttttatcatgaaacctatatttggttttctactaaaattttgctggcagagttaatgttgaaaaataatagttatgtgtgtcttttagtgtttgtgaatccaattgataagaatccaatgggaggagggagaggatcaggaagaatagctaatggatgctgggcttaatacctgggtgatgggatgatctgtgcagccgaccaccatggcacacgtttaccgatgtaacaaacctgcacatcctgcacatgtacccctgaacttaaaataaaagttggaaattaaaaaaaaaagaatccatgagaatagacactttaatctttagaccccttttgttttagtctcattaagatgaatggaagttgttattaaatatctaaaaaatgtaagttatttagcagttcaggatattttactttatatttcagtaaaacttaatataaaatgaggaaaccagttcagtgtcaacaagaccaaaagcaatataatgaggaataatattggtcaataattcctataagctcttttctatttataacagttcattcagagtgatgtttatatatcaatttataaatcagtttagagtctttctgtgtgacatttcacaaaacattgcagttttccttcaacatggatttgtttttgtttttaaaagacaaacctattatttaaaaacaaaacaatctccttggcgggtgggggtggttttgaattactgtgaaatagaatagtaccttactggggagaggttttattatttcaagaattcaatttcagattgtgtttgttcttgtttgcttctcttgctgcaatgcacgaattttctgtcttaccagataacagaattgttgtacaaggatggacgttattgccaggagcctcgaggaccgacgggtagcgtttcaatttcgatgattgtaacttatccacaaatccatttttctgtgtaatgatgggttaggaggattacagcagtaaatactttattttttaaagtggaatttgaaaacatttggttataaatctttatattgattacaacattttgagatctaaagtgtttgattttgttacaattattttttctaaagacagggttgggaggctttttcttttcagatattggggaaatgtttcttctaacatctatggaaataggcttaaaaatcagtgattcttagtatttatgtgcttttaatgttttgcaggtgtagttaattttaaacataaaatgtagcgaaggttcttgtggatttccgcttaaatgtaatttattgccccaaatacattgttttgacatttaatgattttcatttttcatataatgaagctagactatatagttttctgtaagatggtacccctcttgaaagtttacatttctatcctaggtattactgtaacatggccctatacattttatgcttgaatgcaaaggaaaattactgttgttacaaaacatctttgttaatcttggtttttcattggctaataggcagctctccacaggattactgtatctgcttattaaaattgtttaactttctttactcaacatttaacaatcctttctaattttatgtgcttccctaaatattgtccacaaaaaaaaaacagtatagaaatgtgtacaagacatttatttattcttattacgtgtgatttggacaggaaaggggtaaggccttgggcaggaccacttctgtcacagagtggtggaaaaaaaatagattgaagtaagattcagtactgaaaagctgtcactcggtctgaaaataattaatattcctttcactcaccagttagatatgtgctcccaaaccacataatctctatgcctcagtgatcattgttgccatttcagagcctctcatcagggtgacatctcacaccaaaatgatttcttataaattaatcttgataacatgacagtctcggtaattttagtggaatgctttctcttgtttttttccacagaagctgttggctattttctttataacttgattgacagcatgagtgactcagaggtacaggccaaggaggagcatttgagacaatacttccatcagctggagaagatggtaccatttcgttttttgctatataatgcctgtcctgcctgacatgtatctattagatttgaaattgctgcttttaagtacaaccagaccacttctcaatgacatgcaagagttggagacttaaattatgtctgagataatttctgttagacaaatttcagtttggttgtctaaaactcaggttttttcccccctcccttcccttctcacagaatgtaaaaattcctgaaaatatctacagaggcattcgtaatctcctggaa

SEQ ID NO: 93977 - DNA, 1988 bp, Homo sapiens
ttaggaatgcactactggttactacatcacaggaaatgtcaggtagtagagaacagtaaatggattatcttgattaagttttggagtagtagagaacattttcccacttgtgtttgtaggcatggaaaactaatttgatcacatgaaattaaaagctgctgagaggcatgtggtggtgttccctttaaaattccttgagtgactcagtgcaggtcattttaaaagtgacttttagattttcaaacactataaaagcactgagaaacttaggctccttgttcaaggaatatagcagctgatctaaaacaattctccttatgtgtgtgggttaatttgttatttttggggagatgaacacttaaaatgggccatgacttttcccatgggatttttctttaatgaaaccaggtaccttaaccttcacttaaactgtatttattgtcttcagaatttgcttctactatgaattcctctctaatcccatcctttttgtattattcagtagccacattacatttatagtgaaaagattaactctattacttataacatggtcccattttagtacaattacagggaaaaacaaattcagggaatgcctactgtgatctcatcccttgctagtttggcaagggttatgtgaagagtcagtgtaaggtgtgattcttacacaatggcaaatcaggcttataatgtcagcattgaaacatacaaggttgtagactgttaaatgtcaaaatgagtagtagagcaaacaaatactcagaaaagtgaaagatcaatataagtcaattacataacggacgtatgacctattttattattactttaggtggttactcttgtgtgagtgcaggtcattgatcatagtggaaaatgaaatgagaaagtatgaatggttcaacagaacccaacacctctccgagaaaagaatttttcctctcatgtgctgtctttaaagaacaaaagtcttgtagggtattacagtctctctcttcatggtgccaccatgtccaacaacatacagcctcagtgtgtgtaccaggctgactctgattctgctggtatgttagtaattgccatttataggaaaggatatttataaattaattagttgtatatattcatgaaaattaaaaatacgttaaaagggtagcttatattgcagatatatattactgcattgtctaattttgtatgaaaacatttttattttttaaatacaatttccaaaatgaaaactaaaaggtattggtataaatatgttttcaatttgataatacagggtttttaaatttgtttggtctgagatttaatgatggtcattttcttttgcagtgaaatcaaatacattgcccatctcgctgcagtctataagaagtagcctactgctaggcttcaggaggtaagatgatcaacttaaatgttccttgcctgaacatggactgatttctcctgtccttttgacttattgcatgaggaaaaatacaaatattcttatctttcagtgtacattcagtttacctgaaataacctttgcttgtttaattttttcttttaagtcattgaattaaatttaggcagctttgtgtcatcttttctgagaaatgcacacaggtttggtaaagatcctgtttccaggaagaaagtcctgtttcaaaatggcaagttggagttacagaccaatttgcatatgtatgttcagcttattctttgagcatttaattgcaaggtgacttttattcagtaaagtatcattctccccttctgtgtgctcagagaatgttaatgaccttgcccttccaattttgttattttgaaaatagataaacataaaagctgaaagaatagtaaaagggaatactcccataccacccttttttatttgatttatttttttgagacggagtcttgctctgtcgcccaggctgcaatgcagtggtgtgatcctggctcactgcgacgtccgcctcctgggttcaggtgat

SEQ ID NO: 93978 - DNA, 2228 bp, Homo sapiens
acattcattctcatctcaactatgttgccttcattgctggaatttcagtagtattgagtgttttgggattgaaaacaactactctgttaagtgcttaatagaactcacagtattgatctgctttttttctttgttttttgaggcagagtcttgctctgtcgcccaggctagagtgcagtggtgcgatctggtctcattgcaacctcctctgcctaccggttcaagcgattcttctgcctcagcctcccaagtagctgggattacaggtgcccaccaccacacccagctgatttttgtatttttagtagagatgggatttcaccatgttggccaggctggtctcaaactcctaatcttaggtgatcagcctgcctaggcttcgcaaaatgctggcattgcaggtgtgagccactgcgccctacctgataatgccttttgtcttcagctgggcattaaaaagtacatttttaaattagttttcagaaattacataataaatgtttgttgataaattagagaacacaagtaagtggtagggctgtacaatctgtccatagttccttgagatagtcattgcttagcatgtatgttctttcagatgtatactaggctggagaaatctcttttagcaagaaagtatactgttcatattatcgagcaactcttattatactgttcctattatccacctaacttgacagaggctatagtttaataaaaagaaagaacattcttattttccttttaaaaacttacttctttttgccttcattactttcaaactccccctaaaagtctctgtttctggcttactagagacctgaagaaaaattacacttctctcatatttgtttcatgatgaactttttttcatttgacaccttttcataacagtatttaattccacaaaatatattttatgcttgtatgctgtttcattgtatgggtatgccataatttattttttatccttgcttattgctgattaagtggttttttaatatactataataaaatgattcaataaatgtatttgagctaaattttgactcatatatttaaattgttaaacaaatgatgttgggacaagtgatgagcctctatgagttaaattacattaaattagatcctggccaaactgtatgccccaaaatattttagattaatgcattgaatctttgttttgtcttgaatgggagaattattctagtgtcctcagtagtaaactcatcctggaagtaaggccctctaaaggcatcagaccatctgtatttgaagataagcatttaacttagaatgctgaaatgtcatctttaaatttttgctaaaattcaattactgagcttatctatttttctagaaaatcagagaatatggtgattcaaataatcaggaaaacaggatctttggcttatcaaaatattgttagctgagatgtattctcattgatatatgctttatctccaggaaaatggatgtctgtctgatagtgatatgttttctcaagctggattgagaagtgaagcagcaaatgggaacttagactttgtattatcattttgtaagtatacaacattagcggtaaacttgatagatgtttatttcagttactattgagggcatgcagggtggttcacgcaatgaaagcaaggaaggtttatatgttttgttaaagccagactgataaaacggtttatgagttgaacttgtggataatttggaagtaattttaatgttataaggacattgaatattatatgtaatatggtgttagactgaaggctggacctggagaccctgaagacgtggatattctttataatttggccaccgattatgtgatttagaagaagtcttctaacctctctgcttcacttttactaaacagggatagtactacctaacttgggggagttgtgaaaatcaaatgcggtattgtttctgaagtgttttttaaactaacatctattataaagacttctagtcttcattaacaaaaacacagcaaatgtttactaaacatttttaaacactagtgtgctttataatgctcatcacatgttaatacaattatctccattgatagatgactaaaggcatagagaagttaaatgatttgcccaaggttagtgatttgaaccagaagtaagatgttcagactttagctttgttcttttcaccatactgcactttattttattttattttatttatttttgagacacagt

SEQ ID NO: 93979 - DNA, 2667 bp, Homo sapiens
cagaggttgcagtgagccgagattacaccattgcactccagcctgggagacagagcaagactccatctcaaaaaaaaaaaagaaaaaagaaactgggcttgatctgatctgaagtaactgctctggaaaatatttttatttttgaagagtaatttactaaatgttattcttacctcgaaagttaagtctgagtcataacctacataatattaagagggtatgttatttaatgtctatgtaattattattattttttaatgggggatcagatgtttatgatctttattatttcagaaacatatatccagtttaatatacattagttcttttctgacatcataattccaaatggtacttagcattttttattttaataagcatatgttttagtttgaataactatattaaatttggcaaaagcataataatctgttttttgaattaacttgtagtgatatggagaatgcagaaaacattctcacagtgatgagagatgccggaattgagcctggtccagacacatacctcgcattattgaatgcatatgctgagaagggcgacattgaccatgttaagcaggtatgacttatgtctaaataaacatactttaaaatcatttgtaaaaatttgtgttatgttttacatgaggcaggaaagtgaagtttatacctgttttcaaagatgtttccttgcagaaagtagtatttatggagaattattatagtttagtatctcggtgctggtatgtaacagttactgttgaagtagagtatttcctgttttttaaaagaagtcgtaaacctttaggtggtatttttccctagttttttgaatctggatattttatttagctttaatacttaaataaaaacactctaactttgtcttctaatttctggaactctctatagactctggagaaggtggagaagtccgagcttcaccttatggaccgtgatttactgcaaattatttttagcttcagtaaagctgggtatcctcagtatgtctcagaaattttggaaaaagttacatgtgaaagaagatatattccaggtagttttaaaaaaatctatttacatgatttttataaaaatctgaattgctattcttacatgatggaaaggacattttctaacaatgggcattgtgggagttgaacatagaactcttaaagtcagttaaataagcccaaaaacatgagttaatgaacacatggggatgatttgatttgcaggtgttttattgttatttaggcagttatatgcttttgatgtttgcaattcttattttgtcttcagtattggaacattggttgcagtgtaaaaatattgttcagtttattaacaaaagatgtctttgttttcttcccagatgcaatgaacctcattttacttttagtcactgaaaaattggaagatgtagcgttgcaaattttactagcatgccccgtatcaaaggaagatggcccaagtgtctttggcagtttctttttacaacactgtgtgactatgaatacggtattctgtccacttttactttgtagacaatgtaattggcagtgaaataagattctttaaagtataggaacatttataagattagaccagttgtaaacatcataacaatgttcttgtgttgcaagatttttgggtagaaagaggatgcggggtttaaaatgctcatctcagaagtggtagaatatttgcagcaggtcaaacggtggggtgtttgccaatccagctaatgtggtgacttttttcccacagcctgtggagaagctaacagactactgtaagaagttaaaggaagtccagatgcactcctttcctctgcagttcaccctccattgtgctttactcgccaataaaactggtactacattcttaaagttaaagccaagtaaggaagttttgctgaggtagctttgtgatcttttatgatatctctttcagatttggcaaaagccttaatgaaggctgtgaaggaggaaggttttcctatcagacctcactatttctggccattgctagttggacgtcggaaggaaaaaaatgttcaaggttagattttgccttttaccgatttgtaatggttcccagagccagtatgacagtttgcacgcacatctaattggattctttggaaaagcatacttattcctgagtattatgagataatggaattgttttaagtcatcatgaagtattatgtgtaagcattttaaaaaacaaaacatgatggatttctttcatctgaatttcattaatttcatttcttatttcatctctgatcttgatattcaaacttaatgaacgtagtttttttaagttcttaaaaaaactctttagttcttgattttatatatagtgtttgaaatcagattgtctacctttaataaagataaagttgtatatacaattaggttcatgaaaacaaaaagtatggtcattttctttgtgggccaatctatttctttttaactgagcttagttagaataataggaaaggcaggaaaacttttattgtgaaatgagtactcatgacctgacagcctgctgattgaaggacaaaaatgttcaatctttcaggttcttaagtacgtttaagcatttatcatacttttcccttgtacacatgggatgtctataggatatgaataagaat

SEQ ID NO: 93980 - DNA, 1289 bp, Homo sapiens
tgatcttgttgtctaggctggagtgcagtggtgcaatgtcggctcaccgcagcctccacctcctgggttcaagcagttctcctgcctcagcctcccgagtagctagaattacaggcatgcgccatctcgcccagctaattttatatttttagtagagacagggtttctccatgttggtcaggctggtctcaaactcccgacctcaggtgatctgcctgcctcaacctcccaaagtactgggattcgcgcctggccctttatactgttttcataagatactgggaagtttagcctttgaattgtagcaagcactgcctataaagtaggttctttgtatttttgtatttgatagagttttgcagattacatagattttataaccttagatttcttaagaaagcagactaatatttaaagtttgacttgtaacttagtaacactgtacattaggataggatttttctaatttatggttactctcagtttgagccagaagatttttgaatgcttatagatttctgtttaaattttgatatttatctatgtgatattgctgctatgttaaatgttatccattaaccttttttccacaggtggcctaggtggtagtcatgccttgcttctactacgtagttgtggttctctcttgcctgaactaaagcttgaagagagaacagaatttgctcataggatatgggacacacttcagaaattaggtatgattgtttaaatatatgatgtgtataaaaggtgtagatgttttttctttttgcaaaaaagtgtttgtttacataaatgctgtaattcagttttatggaagggctacttgattcataattttttgataatatttatttggtgaggtatagtgacatctagggtcattaacaataaataatttttcataacaagtattacttacaagtacggtaagttaaaaaagaaaaagaagaaaatagccggtttgtctgtcaaagttataaatgcacataccatttgaccgagcagttccatttgttcgaatttaggtacagatatactcacatatgcaaaaggatattcttcattgtagcttgtttgtaatagtaagaaattggaaccaattcaaatattcttctctaggggattaggtaaataaattatggagtacccgtaaaatagattactgtgtaactgttttaagaaatgaagaagctctttatatgccaatgggggtgttctccagagtataaataaaaattaaggtgtagaccagtatgtatagaatgataccattttgaagaaaagtg

SEQ ID NO: 93981 - DNA, 1277 bp, Homo sapiens
tgcacagcagataagaattaagagccttatcactattaagtgtttcaactttatttagacagattagaaattatttgggcctaaatgatccttaaaaaaaaaaaccctgcatcgttttagcctggacattggtcttcttttaaattcatagtaagcttatacctagaaaacttaaaggtagttataaaaattttggatatattttagatctcttgtcttatttacagagatgagaagagctttgcagcataaactgcttcatcttctgtcattaccttgttttggttaaggagagatttaaaaaacacttaaaacacactgtatttccatctgattttgaaatcattccatgttcaaagttaccaagatgttgtcaattattcaggagatttactgtgcatatagtttatgtatgtgtgtatatgattttatctaaagtaaaagctaaaactttctttcccattagttcatacctctatttttggtattgtactgtgattttaggtgtttaataactaattttaaaatttgtttaagttttgttcaaaaaatgacctaaatagatagcaactgattattattaattatgtttcattttttagaggactactgagcccagccaggctgtatgccattgctgccaaagaaaaagatattcaagaggagtccactttttcttctaggaagatttccaatcagtttgattgggctctaatgagactagatctttctgttcgaagaactggccgcattccaaagaagcttctacaaaaagtttttaatgatacctgccgctcaggtatttcaaaatttcctgttcataaagttgacttttggctggtcacagtggctcaggcctgtaatcccagcactttgggaggcaggtagatcgcttgaggccaagtgttcgagaccagcctggccaacatggcaaaaccccatttctactaaaaatacaaaaattagccaggcatggtggcgcgtgcctgtagtcccaactacttgggaggctgaggcatgagaatcgcttgaacccaggaggcagaggttgtagtgagctaagatcgcacaactgcactccagcctgggcgacagagagagacatctgtctttaaaacaaaaaaaaaagtcttaaatttaggttggtgcaaaagtaattgcagtttttgccattaaacataatggctgcaattacttttgcatcaacctaaataaatacttgagggtaagctcattacacagtagattatttgatactttaattttctttgttatat

SEQ ID NO: 93982 - DNA, 1780 bp, Homo sapiens
tggaagcaacctggatgtccttcagtaggcaaatgggtaaacaaatcatgtatatctacaaaagaacattattcaacaatgaaaagaagtgcgccgtcatgctgtgaaaagacatggaggaaccttaaatgtgtattgctaggtgaaagaagccaatctgaaagggcagcatgctgtatgatgcaactatatgacattctgggaaaggcaaaactagagacaggtaaaaatcagtggttgccaggggttcggaaggagggtggaaggaatgaggagatagagcatggggcatttttagggtggtgaaattattttgtatgatactgtaaaggtggatacatgtcatatgtttgtcaaaacatgtatacacacagtgaactctaatgtaaattatggactttggttgatggataatgtatcagcattggttcatcatttgtaacaaagatactacactacagcaaaatgttactaggggaaatgggagggagaagaaagtgggaactgttctttcagtacaatttttctataaacctaaaaacactaaaaaattgtgggtttttttctagtcagtctctgcttatcaaaaaattgtgtttattttttaaaaaaatggtacatgcttaaaagtagtggggagggtcccatggaagcctgcttagtaggataatctgatcccttatatcttttttttttttaatggacattcaactataagatcgttttctattgaagagttaaaaaaaaacccaccttaatttttttaaaaaaactgagagataataactttaaatggtagattttacaagaaaacatttatgggtaatttgagtattagtggtaggagctggagtctggaaggaacctgagacatttaactaggaaatgtaaaggagccagtatgatacttggatgagatgatacaataatttccccttatgtggttatatcaattttggtccttagcatttggaggcagtgagctccagcttgtgcaagcctggtgggtgtgatcttcttgtggggccccaccgtcacccctggacttgttctgttctttcttttctgtgacgacatacccattactccaggctgtgaaactcttgtttccagaatgtattagagtgaatttaaaaataagttctggaccatataactgaagagtgaagacttctttggttaaatatgtaatccttcctctatcccaatttattttataatagattcatgtttctacttaattaaatccaagcacacttatgagaaggagactcggctgcagtaaagacatgtatatgagaaaaatttgcctagaatattcagaacaatgtgctagtttataaacatgttttctgcctgaaatttgagttggtcttctcttacatttaaaaaatatcctgtagcggaagttttatttttgctctttaacagtttatcagatttgcattgtgtaaaaaactttggcaaatagacttcacaattttgaaatttctgtattaatcagcttttgttgttgactaatattattgcatactcctccaaacttgacatgttgtcctggacagtttaaaaataatgtcactttgtgcttgcgggacattaagaaggggatagtttagtaacaactgatagagcaactagataaatgccttttggaagtaagggataaatattattttaagggtatatcttctgtggtttgtagcttaattcagctcgtttgacaaactcgagtcaattagccatctacaatgtgctgatcattggtcttacaaaaata

SEQ ID NO: 93983 - DNA, 1049 bp, Homo sapiens
ctataggcgcccgccacggcccctggctaattttttgtattcttattagagacggggtttcgccttgttagccaggatggtctcaatctcctgacctcgtgatctgcccgcctcggcctcccctaagtgctgggattacaggcatgagccaccgcgtccggctcattaccaaacatttttaaaaggcattatctttttgcattttggatacatttaaaactcgggaggctccagcagtatataaaaagaatgatttaccgtgatcaagtgggatttattccaactgtgcaaggctggttcggcatttgaaaatcaatccacgtgatccagcgtatcaacaggctaaagaaaattcaagtggaatagttaaattagggattggtgaaaacgtaggagataaatttgagttccccattttctacattacagtgcaacaaaataagttgagagagcggctctatgaaaactagttttgtactttacaagtgtgtcataaaatccaaatcccttatttatctgccattagagactttgcactgtctagtctcactctcactgtctaggtttaattttttaccactttccagtgtgaacacccaattgcagccagattagtttcttcaatgcccttttgccacgttgagttcgtttcagaatgagaccgtctcagaatgagaccgtctgagtgctaaccctggccctatcattagccttaactgtgatgactttgggcaagttgcttcagttttttcatttgtaagttataattttctcatacccagcacaaattaaacacctgataaacattagctattaataatgcctcttctgtcttctacctgtatctacctttaaactcttgatagctctaaagtgacactaaactgattcataatatcagtgaagaagaaaaaaagtggagagaagagttttaagaacgtgtatggcctgggcatggtggctcatgcctgtaatcctagcactttgggaggccaaggtgggcggatcgcttgaggtcaggagtttgagaccagcctggccaacatggt

SEQ ID NO: 93984 - DNA, 1056 bp, Homo sapiens
ggtcctttggggttctgaaatctgtaacattcggcctctgctctgtgagtgtagatttatcaatcacagggctagacaggcacatgtacaactattagacgtgctgtccataagagaagaatataatattgtggtatttcagagagaggagcagtgccatttgttttatggcagggggacattgagttttagaggacacatggtagtggatattcagaatgttccaaaaatagagaagagcgtgaagagacttggaggccgtttatcccgtgtagctgtgtgggatgtggtggaagttgatttcttgaggctaccaagattgcttagaaggtaggttagttgatgattggaagccgttggaggattttaagtacagattttgacaaagtttatgtagattataggaacgtggggatggaacaacactggtattgcaaattagcagtaataggccttcaacgaggtagtaaagaactgacgaaaagatccgtttcttgagagaaagagaacagaagattggtgagagtgttagcagaattaagaaaagtagatttggggattagggtaaacaatggtacctttagaatagatgctgattactttcttttttttttgagatggagtctcgctctgccacccaggctggagtgtaacggggccatctcggctcactgcaacctctgcctcccaggttcaagcgattctcccacctcagcctcccaagtagctgggacgacaggcgcatgccaccatgcctggctaatttttgtatttttagtagagatggggttttgccattgccatgttggccaggctggtctcgaaatcctgacctcaggtgatccaccacctcagcctcccaaagtgctgggattaaaggcatgagccaccgcacctggcctgatgtttattattttcaaagtgtgtttgtaaacataacatcatacaaacatttcaacttccgtgggttattacaaattaggaaacagggttagaagtataatttattcaagacctcaagttgagattcaactccagataccgtgattcccgttt

SEQ ID NO: 93985 - DNA, 1796 bp, Homo sapiens
ccccggccgccgcctccgctgggctgaggtctgggagaggcgcagggagagaatgggagtttgctggaacgcctggaagctgactgattctctcttccctccgcttcagtctgcaagcatctctttcacacgaaagcactggggctaccccaagccttggcgcttctcttcctggtgcatgccctgtttgaaaacactatcttttaccattcgtttcctcatcagcttctgccctactctgcgctccacttcacttccttgttaaatcgtctttctctgctgtctatgcgttctaccctcgccttccctccttagtggctttaaattgtgtgtttctcttttcttcgtaccccggcatctcttgcctgtcttccctagcaccatccttttcggatgtcattcctaacagtgaagttcttaattgaaactgccacttattgtcagtaccccaaatctaccggagccccattaagagtatagactgactagccatatgtggtaaatcagtttttcatagtttaagcctaacaaccttgaaaaaattgtattattaaacgtaaagtgtgaaaataacaccgaaaataattttttaaatgaaggactcagtgagtgttggaaatagttatttcttcattttttaaacttgcatgacctctcatatcagatttagcagatctgggacgtttgcccatcttattcggcaaaaaaagtgcttcttaggcgtttgatagcagcccaaattcatcaatattcaatttcttctaagaacaacttgaaaacttttttaaaaagagacgttaataactgggaagttgttttgatagtcacagttaaagagcttttaaaataggctccacatgtttaatgtatcaaaataaagttggcaggcatgttgtaaaaggattatttaggaatttgagtagtcttagtgttatgtagctattttaggaaaaacattctttttctgttaacaaacgtttacaactacggtgatgtgagaattactgaggcttactgtgggattaacacaggaactgtctttatttgagctactgcatggatgaagaagtggtaaattgttcagagtagacagtgtaagtcacagtatgttctaggagatggagaaacatgccatggacgctgaatgttaatagatgttatttcatttactttctctgttgtgcaatagcaaagttcctattgttggcctacttttaaatggggcatttctaagtaaatagtgagacaagttattctaattattatgatagtcttttccaagtgtacaggccttttaaaaatatagttgaagtaatggtaattttttaaggaaatgtttttgtaggtctgccaaatggacagtgtgttgttctaatcgaaattttaaaattaagtatttagaacagaatattttagtccacacattttcagggataatctttattttgtgcttcttctctcaatgccttctttgtctttttttttgtcttaatggttgttgtgttttcgcctcttcatttgtttttgctctcatgaagtcttacaacagtttctgcagtggttctttttgttgctgtatattagcacgagtatttttatttgagctttcatactgtaagatttccccagtttctagtacattatcctctggatttgttgaagtgattgttctctttgaagtgaccagcagagctttcaacaccgttttcttacactgggtgtctgatttctgtgaagactctaggaataggtgaaaggcctttcaatttagtcatgtcagtaaatactgttttatg

SEQ ID NO: 93986 - DNA, 1437 bp, Homo sapiens
ggttactggatgttcttatgagtaggagaatctagaagtgtcagcatgggtgtttaacctatttgggcagtgtttttccttttccttgttctgactaaagcatttatctctgaggtggggaaatggcattttctgttgaacacaggtggcctttcttagtcccttaaaaagaggacatgactgggcctggtggctcacgcctataatcctagcactttgggaggccgaggtgggcggattgtctgagctcaggagttcgagaccagcctggcagcacggtgaaaccccatctctactaaaatacagaaaattagctgggtgtggcggcatgtgcctgtaatcctagctactcaggaggctgagacaggagaatcgcttgaacccaggaggtggaggttcaacccagctgaaatcgcgccactgcattccagcctgggcaaaagtgagactccgtctcaaaaaaaacaaaagtgggggtgggggaacataattaattcaaagcactccaaatgttaagattatataggagattttgttgagctttgggaggctttctgcttttatttactctgagctaccaacccactgagaagtaaagaattcagaacagtctaatagtatttagtctgtaaccctccagccaattcttatgttcactgagtgccttctgtgtgcaaaggcccccatttcatgccagtatctgaacaaaacagacaaaatcccaaatccttgtcgttgacgatcttgcattctgttaaccagcaactcacagtttacattacagctgaactccttatgtggctggcttaaaaacttgagtggaagatttggggtgtgtgtgttttgtacactaaacttaaaagctgtgattagagctttactatttttaacaaaaggaaaggaagaggttttctgtaattggataaaaactagactgaaaagaggaaagaggaaatattgttgtgccttagagaaagacattggtttgagattttttttttttttttttgagacggagtctcactctgtcacccaggctggagtgcagtggtatgatctcggctcactgcaacctccgcctcccaggttcagacaattctcctgcctcagtctcccgagtagctgggatcacaggcatgcaccaccacacctggctaatttttgtacttttagtagagatggggtttcactatgttggtcatgctggtctggaactcctgacctcatgatccacctgcctcggcctccccaagtgctgggattacaggcgtgagtcaccatgccctgcctggtttaagattaaaagatgacccaaagagagaaaaagagatccctgcattagacagacatgagggaaatttggggccttcaggtgtttccatttactgtacatccttggatagatgagttcctggaaaggaggatgggagtaaaggt

SEQ ID NO: 93987 - DNA, 1029 bp, Homo sapiens
tgttctgagagggaccccatgggaggtaattgaatcatggggacaggtctttcctgtgctgttctcatgataatgagtaagtctcatgagatctgatggttttataatggagagcttccctacacaagctctctctttgcctgctgccatctatgtaagatgtgacctgcttctccttgccttcagcagtgatcatgaggcctccctggccacatagaactgaaagtccattaaacctctctttcttttgtaaattgcacagtcttgggtatgtctttatctgcagtgtgaaaaagtactaataaattaaatatttaaaatccattgtgtattttacacttacagcaaatctctattagcattagcctcatttaacattcctactagccccgagtggttagtggctactataccaaacagcaaagctctgtgttcttgtctgtgtttgatattgagagtctctctctctctcttttttttaatctaaggagagagaaatggtgttttattttgactttaattttccatcttcctattagttttcctaatgacaaaatcttacaggcataaatatggaattactttgccgttggaatgcaggtgtttattttgttaattgtgtttaagagtttttagatattagatattagatttagatgttagtgtgtctataaaatgatggtgctaattaaagactttaacctggccgggcatggtggctcatgcctgtaatcccagcactttgggaggccgaggcgggtggatcacctgaggtcagaagttcaagaccagcctggtcaacatggtgaaactccgtctctactaaatatacaaaaattagccaggtgtggtggtgggtgcctgtaatcccagctactcaggaggctgaggcaggagaatcgcttgaacccgggaggcagaggttgcagtgagccgagatcctaccattgcaccacagcctgggcaacaagagcgaaacttcgttccaaaaaaaaaaaaaaaaaaagactttaacctcaagtcaactct

SEQ ID NO: 93988 - DNA, 1199 bp, Homo sapiens
ggaaaagcatgacaagtgacgttaaattaattcctcttgtatgataccttgccctatgttgagaactgctactttaaagttgattaagtggtaattttctgtttttgatatagcctgaataaatacttttcataggtctgcatgtagtttggtttttagagcacactgtatgtattcagtgtgatagattttttttctcagattaaatttgcgactaaagcaaaataccactgtcaacaaagctatttccattttatgaactatatttttcttgttgaaaggcttggagaggggtaagttacactgttgtcctgagtttgaaatttctagctgagcttttgatttaggacaagaaaatctaaattattcttgtatctggggtctctcacttatgatttcagagaatctgatttactgaataaatttgttttcataatcttgctctaatgtagagctatagtttccagcttttggagaattattgaaagtgactagcctatttttatcagtaacatctccttgccattggacctgggtgtggtcaatgccaatgttattcagcaattataatgaaaactgtaaaatatctcttaaacaattattcaagcccttttgaatgtcagttatgattttgaaaatctgaagtgaatgccactgatactacagttcatcagaattgatttggaagaggggaggacttaaataatttaattctgatgatactaagaattggaagaaaggatgtgagctacatgttctgtttctgtgagtttactgatgggtggagttgtttttcttttgcttctcattcaagcagtataggatttgatgcaggtgtttgtgaatgagtatgttctgtaaggtcctggaatggtgttattagtatgtgacttttcaagcatctctttgaacttaagctggttattagattttattactactatcatttattttagcaatgttttataataatgaaagccattaatctacacattgtctaggaacaggctggaagtgaagagtacttggctatatcatagaaatatttcttggtaacactttggagtatatgtggcatcagttaaattttgaagatagaagcacattattttaaatatttcatgtgtacaagctttttttcttttgagacagggtcttgctctgtcatcgaggctggaacgcagtcatatcatctcagc

SEQ ID NO: 93989 - DNA, 1218 bp, Homo sapiens
tagtgtttatacaactcaagcatgtttttaaatacttttgccacatattcatgtatgtaaactaatctgttgctttgtaaattttatttgtttttgtttttgtttttttgacacggagtctcgttctgttgcccaggctggagtgcagtggagtgatctcggctcactgcaacctctgcatcccaggttcaagctattctcctgcctcagcctgccgaacagctgagattacaggtgcccgccactatgcctggttaatttttttctatttttagtagagatggggtttcaccatgttggccaggctggtgtcgaactcctgaccttatgattcgcctgcctcagcctcccaaagtgctgggattacaggcgtgagccaccgctcccagcttctgctttgtaagttttataactttgcataatggcatcacactgtatgtatcattttccagctactttgttttgatttactcatggtgatacaagttaatgtagtctatacttttaaattctgtagagatttacattgtatcagcattattgtatgcttctgcttgtatatatgtgaaaatttctctgggtggatactctataaccaacaattctccaggaaattatatgcatttttattctaccaaatatcactctggagatttctcatgctgtttgggttcctaattctttatgtgtgacttattttttccccttttttccctctgggaaatgttaggttttatctttatcaccagtgttttgaaatttcagttgctttttgtgtctctgtatgtgtgtgtggttggttctactttcagtcctgacacttagggtgtttagttctctttccttttcttgttctttctctaatagctgttagtttcaggactgatcctgcagctttcttagttttattctttactactttgagtctgtttggtttttgtgaaggggaggggtctgggggattttacttttgattttttttttttcagtttgattttctaaacttttattgacaattttctgtcattttaattatttttattttatgttatgttatgttatgttatggtattgtattgtattgtattgtattgtattgtattgtattgtattgagatggagtttcgctctgtcgcccaggctggagtgcagtggcacgatctcggctcactgcaacctccatctcctggattcaagcgattttcctgtctcagcctc

SEQ ID NO: 93990 - DNA, 1546 bp, Homo sapiens
ggctcaagtgatcctcctgcctcagcctcccaagtagctggtgctgcaggcatacgccaccatgctaggctaatatttttccccaattttttttggtagagatagggtcttgctatgttgcccaggcggtcttgaactcctggcctccagtgatcctcccagctaggcgtcccaaagtgcttggattccaggcatgagccaccatgcccagcccagacatgtattaaaactaccaaacaggccaggtgtggtggctcacacctgtaattccagcacttttgatgtgggaggattgctggacgccaggagttcaaggctgcagtgggctatgattgtaccactgcactccaacatgggtgacagagcaagatcctgtctctaaaaataaaaaatacatgtctgcaacctatttagtaatcttctcctttgagtggtggggtctacgttcctttgtcttcaatctgaacaagacttagtgactttcttgtaaccaataatgcagcagaagtgacttctgagggtgggtcagaaaataccatgtagctctgcctgggaaaccaggtgacatgtaagaagcctgaccgtgttgaaatcctcaaactggagaggccacatacagaagatactccttgggacagtctcagctaaattcctagccagcatccctcatcagctgcctatcatgttaagtgagctttcaggtgaccttctccccagccagtatttgtatgcagtaatatgagaaaacccaagtgagaactgtccacttgaacccttacaattaatgagccaatactgatacattgttaactaaagcccataaagcccattctttatttgcattttcttagttttaacctaatgtcctttttctatccaagatcccattaaggatgtaccacgttacatttagtcatcatgtctccttaggcccctgttggctgtggcagtttctcaggctttccttgttttttatcgccttgaaaattttgaggagtactggtcagatattttgtaggatatccttctattggagtttctctaatgcttttcttatgattagactggggttattatggattttgttttggaggaagaccactgaggtaaagtgcctttctcattagattatgccaagaatataaaccgttgatgtcaagtttgattacctggctgaggtagtgtttgtcagatttctccactgtagagttattctctccctcgttttcattttgtactttttgaaaagaaaataactgcccaatccacccttatggggtgggaagttgtgcttgacctatttgaaggtggaagatctacataaactgtctggcattcttctgcattaaaggtttgtctggtatccccattcatttacgtattcagtcctttatttttatcagcaaagactcatgaatgtttgtactatgggttataatccaatattacgttattttgttgctcagattgtttatccattaaaaaagaaaatgatctgtcatagaccaagagtggttataacatctcagaaatagaatcactggat

SEQ ID NO: 93991 - DNA, 2228 bp, Homo sapiens
tcactgttttgaatattctcattgtccagtcttctgtaaacttacatgtcgaaccctagactcaccttgtaaattaaatcagaatgaaattattaatgaagttttatttcttgttttttcctttctcctagaacagtggtctcaacgtggctgcacatacaagtcaccagagaggcttttaaaagatgatatctgtgtcccatccctagggattctgatttaattggtctgattattcttacgcgctagggctgagaaaccactgttctgtaggatgtaggggaggaaatttcttgggcttttgttgttgctcccgtaaattaggataatactaaaaaaaatacttgaggtaggagttactagactatagagggaatattgtacatacattttctgtcaaatttaaacatttaacacctgcattttttatttcagatttattgctaaacatgggtgcatttttggataaacccaaaactgaaaaacataatgctcatggtgctgggaatggtttacgttatggcctgagcagcatgcaaggatggagagtggaaatggaagatgcacacacagctgttgtaggtattcctcacggcttggaagactggtcattttttgcagtttatgatggtcatgctggatcccgagtggcaaattactgctcaacacatttattagaacacatcactactaacgaagactttagggcagctggaaaatcaggatctgctcttgagctttcagtggaaaatgttaagaatggtatcagaactggatttttgaaaattgatgaatacatgcgtaacttttcagacctcagaaacgggatggacaggagtggttcaactgcagtgggagttatgatttcacctaagcatatctactttatcaactgtggtgattcacgtgctgttctgtataggaatggacaagtctgcttttctacccaggatcacaaaccttgcaatccaagggaaaaggagcgaatccaaaatgcaggaggcagcgtgatgatacaacgtgttaatggttcattagcagtatctcgtgctctgggggactatgattacaagtgtgttgatggcaagggcccaacagaacaacttgtttctccagagcctgaggtttatgaaattttaagagcagaagaggatgaatttatcatcttggcttgtgatgggatctgggatgttatgagtaatgaggagctctgtgaatatgttaaatctaggcttgaggtatctgatgacctggaaaatgtgtgcaattgggtagtggacacttgtttacacaaggtatgtaaacttttttgtcattaaaataacatgttaattttgaaaagttacggtaggtaaagttaagctaacttaaaattttaaaacttttaatattttcacagaagctgtatattttgaagtactttaccagaaatgaaaccattgttttctttgccatccttgtttgtcccagccttctaatttgaaaattaagcttgataaatttgaggcatttgttgtcatttaagtacttcatagcttgttgctgtagcaaaagcatttacacagagtgactttttcttgacattggcagtaaccatcttatgcctgattatgaagcagcttgataaaatatgtatatagtagaattctgtactagatattactaaaagatcaagagccatgtgaaatattggaagatgtactagatgcctagcctgtataaaatttagtcctgagcctcctagcagtgaagacaaaaactgaaataaaaatatgggttgtatatttctcattgtcttctaaaagcagctcttatctggcaatacaatctaaaaaggatttacatgtggctctctaagtaatacatgacttggatagtatcttttgtagaagataaaattcttttcatatagatgtttttattatttctgattaaaaaccaaaggcttctataaaacataatcttgtgaaaaattcctgtggaacactaaagtttatttagatttgtaattttgtatgaatcattgcttgatacagtaatagaaaaaaagtccagagtaatagataattggcaatcctttgaatatctttaaaatactcagttgtttcaagtgggtttttgacagcatctatatataattcaattaaaatttgagttatctggccagtgtctggagtgtgtaagtatttgactgaaaagataccaaggtaaaactgacctttagttac

SEQ ID NO: 93992 - DNA, 1191 bp, Homo sapiens
cactgtatctttttacttctggatgagttaagtaaagaagtattgatggttgtcagtgatcaaatagtaagtgggtctaaaattatgtatttgtctttgaactctaaatgaagcaattctgacctgtagatttttgagacaagcataggcatatgtttgttgcctgactagctaatgaaaacagcattttccccaattataaaaaaaaggtatatacttactattggaaaaaaaatccagatgatgaagaaaatatagagaaacacccaaaattttgccatccaccctaagtcagctactttcattgttgtggtgtatattgttccagtcttttctgcctgcctgtgagtgtgtgtatttttataaaaccgagatgattatacttgttattctacagcctgccttttccaacaatatattgtagagagatctccatgcctataagtattgatctgtatcatttttcttggctgcgtagtattttattgaaagaatgaggttgtgagggaatagccaaaaaatctattaggtctgtaatttggactaaggaaagaagtttgtgttagtagattaactcacttatccattgaaaggatgctagtttttgagaattttgactcgacccttctgaatgaggtttaaatatttctggtggtatatcttcacttgctagcttttatcaatttagagtgattaaatgttcatgttgatggtgttaaaagattctagatggcatcctagaatctcagaaatgaggaatgataataacagacaagaagttggggcccatgattcattcaatgttaatggaagctgaccatcatagttccttctaatggagctgcattcaaattgaaatcagtttggaggtttgaattgaaacaaaacagacttaaaattatttttgaacctttgaaagttacttatggaaaccttcatttctgtttaacttcgtaattttgtctttccatttatttgtattgtaaaagcaagggttagcaataagatcaaatataattactttgaatttactcagaaaaattgtaagttaaaaattcatggaaagcacttagcgattgcacagtagttacctgctgtaagaggagaggaaacattaataagtagatgtttccctgataagagatttaaatgaagtcctagttttttctaacacctccatcacttgtcata

SEQ ID NO: 93993 - DNA, 1867 bp, Homo sapiens
gtatttttgttaacaatatttcccagaagggcctgataaaataaagaagagtgggtgtgggtgtgggtgtgggtgtgtgtgtgtgtgtgtgtgtgtgtaagtgtctgtctgtttcggttttcatggtctgagaaatttttccccaagggaaacattaagactaaattttttttgtaacaaatacagagatgtttgaagtaaagtgattccccttgatgtttctgctttccagtctcatctcacttagggaaccactgctcatggtttgctgtatatctttccaaatggttctctgtgattattgatagaaatgtataaacgtaaaataggattttttctttttttgtattttatagaaaaagatcatgctatgtttgttactttgtcacctgttttgtttttcttaaattataaaagtcggtattcttttaaattgttcttttaaaacattatttgattttccaaaatttcatttatataccatctaccagaagcctatttattttaaaacatgagatagtacctcatagttggataaaattgagggaaattatcattttccaaaggcaacatcattctatattaatttatataacatagaaaatgtaaccccctcaataattgtttagttctaaactcaggagaattgcttgaacctgggatgcagaggttgcagtgagctgagatcgcgccattgcactccagcctgggcgacagagtgagactccgtgtcaaaaaaacaaaaacaaacaaaaaactgtatcagattgttttctgtttaagtttagatgcccttatttatggcaggggcactggcgtctttgatctggtactatgattattaagagtgttaactgctgtgctgttgtaaaaagtaaaaagaacatgtaataatcaatttttatatgcagagctaatttctttagttatccaaactggatttagaaaaaaaaatgttttatttatggacttagtgaaaactttatactgattatacaaggatgttttgtctctaaaaaacaatggcacaaaggaaaggaccttttctgttgctgtataacagctactgaaacatattcatacttggtgtttaggggaaagccatctttacatagaaatagaagcaagccaggcaaggtggctaagaagcaacatcactgaaatcacacatgcctgagatgtaaatataaattatttcccttaaatgtctttggagaaccataaatttattggaactctctttcaattaattttccaaaagtatttatattttataacttacaaaaatcgaatggaaattagataaggaaatgttccacaatgctcatgttgttgttaccaaaaactcaaaagggttaaaagaaattagatttctaaaagtgtaaggtgttaattccgtttatgcataaaattgctttataaagtgtaattatgcttgattctttttttgttgttgtgttttagaaagggtgtctcactgtgttgcccgggctagtctcaaactcctggccttaaatgatcctcctgcctcagcctcccaaactgcggggattacaggcagccaccatgcccagctgtttgattcttgaatatccatggtgtactttaaaattatttttaattaaaaatttttgcttgaactgcccttatgacatttatacaagtatattcatataaccaaacacatacagtatttctaatataaaagttttggtgggtttcattaaggaatgaattaatttggccaatttggaaatggtttttccagataaccgggaatctaatgaaatactcaagttggttccttgttccaaagcacaacaatctgtgacaagttaatttattttgaagtcttctgaagacccaa

SEQ ID NO: 93994 - DNA, 1135 bp, Homo sapiens
aggtgggtggatcacctgaggtcagaagttcaagaccagcctggtcaacatggtgaaaccccatctctactaaatataaaaaaattagccgggcctggtggccgtcacctgtaatgccagctactcaggaggctgaggcaggagaattgcttgaacctgggaggcggaggttgcagtgagccaagattgcgccattgtgctccagcctgggcaacaagagcgaaactttgtctcaaatagtaataataataattgtttagtttagtattttgggtattctgccgaataacaattttcagctatgttaaattcatggagtcgtagcattgctctgaggcagtttaaaagctaagctggaaaacatttgcatatgtgtttgggaggatccattgtggacttaagccagtttgggaatagacaatcttgagtgggaaatagtttagaagatttaatatgtattgaagatatcttcatttctcagactggaatggctgtgggtaataatagttcaccagaattaaaaatacagaaatgcttacagatatacccatacctagacaccttgtttcttcaagttgtgtttttagtaattcattggaataaaaatgaatgtgttaaacataaacgttctggatgattaaataaactataattgcttaaagtattttgaagtaaataatagttgattgtagaaatacaattttttttcttttttttctttaatacacagggaagtcgagataacatgagtattgtactagtttgcttttcaaatgctcccaaggtctcagatgaagcggtgaaaaaagattcagagttggataagcacttggaatcacgggttgaaggtaagacaaatgctttttaaaaatatagacaggccaggcacggtagctcatgcctgtaatcctagcacttttgtcgcctgggcgacacaccaaggctctgtctcaaaaaaaaaaaaatttagagagggaaagtattctttttgtttatcaaatgattattttaaaatttcctggtcaggcgcagtggctcacacctgtaatcccagcactttggcaggctgaggcgggcagatcatgaggtcagatcgacaccatcctggctacacggtgaaaccccgtctctgcta

SEQ ID NO: 93995 - DNA, 1895 bp, Homo sapiens
tataattcttatctagctaaacttttattatcctttagtaatggcattcataacttttatattgtttttacttaatattagatcagaagtatttttccatatagctgttactgtattcatcaagacacctatttcgtaatttttagtgattataaaccatttcactcaatggctacaccaaagtttttaactgtcctcttgttggtgaacatttagtttgttccagtttttgctttttatgaataatgctggaatgaacatacatatgcaaataactgttttttcttttttccccctgcatagcaatgtttcagtcaataagtagctttttgtattacttcttaaaaattttttgtgtgttgatggtaattttttttaatatattttaaaataggtactaccaaatagtatctcttgtttcacttcttggtgagtactggcttatcacattaatttaggaactttttttaaaaaacctacagagattatggagaagtctggcgaggaaggaatgcctgatcttgcccatgtcatgcgcatcttgtctgcagaaaatatcccaaatttgcctcctgggggaggtcttgctggcaagtaagtagaacaaaaagctaattttgagttcgttcataattagtaattaaataatttggggtaaaaaaacttaaatcagaagtacatcaattatctagaggtgaaatgggttagtgtttcttatactagagaagaactcttaaaacttcaaccaaaaacgattttttaaaaggaattatctatcatactctttgagtatgaaggtccttctttccttgctaaggagtacaaatggattgtgcaaaatcagattctgagagtaaagtgtagaaggtatgttcttgacaagtatagagtgtaccagttacttttttagtgtggtcaggatgaaatattgagatattcacaagcttaaaattctgtgtaatttaataaaactaaagcatgttttttttttttaggcgtaatgttattgaagctgtttatagtagactgaatccacatagagaaagtgatggggtaagttttattttatttcataagcatttgaagtaatttcacaatataaatactaaatatgaatacattcacattaacgaagtctataataaattatagtctgtagtaaattactactgcttttcattttaaagtgtcagttaaagtttaagaaaatgtattgaaatgaaggtagagataaaattttgttttgtagatagttttgttgtcactttctgggcatcaaatgaccttttttgtttgggctgtctttatttcttctctatatgtctgcttttccttcttctcctttaaaccttaattttgaggcaagaatgctcttttaaatatctcaatttctcctccagcaggctgctgccatcaccagaagttagtgatagtgagtgagttgttattttaataactagacctttcagtacccctgtatgcccacttggaatacccgaggatagtttttttctaatattattgttgtattatgggtacatgagtgttgagctgagataaccatttctgttgtaccttgctgtacttcatcagagcaagactctatgcccttaccttttattttgcttttcttcgaaatgtcagtgagctgccagctgcccctctatattgttttgttttgttttagtactattaccaggagacagaagtgtcctttttttttttttaaatccaagttagttcaaataagtatttttctcttgggttttcaagtttttatgtctaaaaataaattatttaatttttaatatatatgcttcaaagctttaagggaaccaaacagaaatgaaactgattgggaggaagagtccacctccagtctccagctcctcttg

SEQ ID NO: 93996 - DNA, 2037 bp, Homo sapiens
ggatcacctgaggttgggagttcgagaccagcctgaccaacatggagaaaccccgtctctactaaacatacgatattaactgggcatggtggcgcatgtctgtaatcccagctactcgggaggctgaggcaggagaatcgcttgaacccgggaggcggaggttgtggtgagccgagatcatgccattgcactccaccctgggcaacaagagcgaaactccgtctcaaaaaaaaaaaaaaattgacccaaagctgagaaaattaatttaaaaatccaaatattttatgtgatccatcagagaaccctcaaagaaatgagtataggatgttgacatatgactaaaaggatggtggtaatttggaaggttgagagaagagaatcttaactcttcagctagattatagattcttcagggcatccactaccttgattagaggaaataagccctcagaagacagttattgattcattattagccatagaagtactcccatttcctcaggtgtttcaaagtgtcaaccctcatgtgtaatctttaaaaatacatatatatatatatatataccttgctggattttggggtccttcatagtctatttttactccaaacaaggttttctgtttaacatataccaaggataacttttaaattttttaaaaagaaaaaatgattacacatagtagctacataaacagggaataaataggcaacggaactatgaaactggggggaaatgctcaatatataaaccttaccttaaatagattattatttggctatagaaatgggatatatgtacttaattacctttatacataaatgttctatcaacatcagcagatcaaacactgacagtgtgttgtatagtggattcacagagggagaagactagaaaacgtaagacgtgaccccacctgtgtgtctagtgcagcttacactgtagttataaacacaccttaaatgatcaaaatatttcgtatagcttggtaacaaataaatgacaaaatccagaatgtgaccattgccatgtgacttggacagtgattgctgtaaaagttcagctgcttaagcagggggaaagtcagcttcttagagaaaagatagtatttgaagaatgatttgaatggtagaaatgacatgaggatgatgacctttcaagtggactagagaggcaaggacaaagtataagatatcttcaaaagaaaggacatcttttttggctaaagcagagaactgttgtggtgaaaaataagaatttaggttgcagaggtacttgctaagagaccagccttttgaacatcattttagggtaatggaccaccttatgtttagagcataagaatgatagattcaaaaaaatatctgtggtattttaatctgttagaaacatttaccatattagattaaagagatgcaggcagtcaggtagttgtgaaataattacagagaccaaatggtaactgtagacttattatcattacatagatatgtggattaaaggaactttccttgtttactgtgaaaactgactttacagcctagaattttaaatggggaaatattatatgcctttcacaataatcactaacttagaaaaatgttgaactataattgcaagtagcagaaatgtgctgaaaaataccgcagaaggagagagaatgaagaaaatacagacgtgattaaattctgagctcttaacttgacccactgtagcaaaaagctagccgcaaaggtgctccataaatgcttcttaacagtgtggatgatgtcgccgggagctggatgttaacttgcggggtgggaaagatgaaagtatgctagaattacagaagaggagaaagttggaaggtattataaaaattaagtttttttaaataacaaaaattatttttgtttagatatttaaacaaagaattctagccagagttaaatcagagggtttctttagactcctgaatgtctgctttatgtcggagagaattgttctgttgtaaatgattataagtagtaccactagaaatagggattcattcatt

SEQ ID NO: 93997 - DNA, 3577 bp, Homo sapiens
gggtacactgtaggtgtataaaaaaataaattgtataatattgaatatcaagtttaaatttccctagttgtcactagagtgactattgtaattgttattttgaatcccagtctaatcaagtttatcaatcaagcacattaaacaagtctttaatcagtcaagcccctcacctgtttttttccccttgaaactgactttgaagaatctgagccagttttttacaatacgtcctgcattctgaattcatatgattgttttctcatgtgtgctctaacttgatcctctattcccttttttcctgtaaactgggaattagcattattagattcattctaaacattttttggcacgaatacaggacatgactgtactttataatgcatcatatcaagaggcacatactgtaaagatatctttattttagtctgtcggcttaactgtgatcagcttggatgattagagcttgttctgtacagtattaagtagttactattgtagaaacctgtagattttccaaaattcactaaaatatgaaaggattgagtagtttattattcatactgagaatacttaatttatttttatctagagatgtttttatcaaaataagagcaaaaagtaaatacaatttttatccgtaaaaactctaaaatctttcaaaaatctgtttaaatctatatagttttatgttttgtatttcctacttatttagcagaaatgatgaagaaactgttctgatggcctgcttttctgtccttttcctactgctttaaacattgattttcttttgtactaaatcatatagccaaatattgtttaagtaagtcagttttaggaaatgcttgtgttgctgttgaattataaaagctgagtaaatttcagattaaactttaaatgactgtgaaataagacataaactagttaatggtaatttgcttaaaatgacttgagattattattggaagtttttattaattgatacaggtaagaattgatatttaataaaatgttctcatgcttagactatattacttttcggtagagaaattagtattttgctgtaatgtgttatgaaatacatgtgatatcctagtttgtctactgacactggggtcttgaatcttaaaaaaaggcctccgatgaagcagaggaaagtggatcacagggaaaattggtggaagctctcaggcaaatgagaattaatcataggggaaactaccgacaacttctggaggagatgctgactagttacaggctagctaaagtagagggagaagaaagccctgctgaaccagctgccacagctacttcttcgaacagtgatgctggaaacccagtgacaatgcaggaaagccatactgaatcagaaagtggtcttgctgaattagacagctctaatgaagatgcagggacaaagatgagtggtgaaaaaatatgactttcctttttggtaatatttttgtgatctttgatggtttttaacctaggaagtgtaatgtatgcatttatataactgttttgttatttgaatcttggaaaactagttttattatattcagatagccttgttttttaaaaaggcctttgcatacacctttatgagatagtgtaaaattgactatttatagtactatggatttaatgaaattatatgtcatttcacattgtatgccagaaattaggctaccaattatgaattaaagtcagtagttaaattaatactagatagaattagaaattttgattagagagattatgctatattatggaaaaacttgttaatgtagaattatactgcttcatattattttacctattagtacactcatagttagctttgtaataaatttatgttttctttaataattttagttcttcaaagaatggctgatgctggcctgtaatttttctttcaaggatgataatttgtgtgttgtttgatttgtttatattttacatctctgtagttttatttttagaagttgtgagatattggatgtgtggctatttttcctttctctgtattctttatgaaacataacttttgaaaaacctatgtattattcatacagctttggtttgtatattctgtatagcctaactacacacatcaaaatgtatgtcaaccaagtgtttagaatgaaattataagtgtttaagtccaaataaagcatgtgatgtggaataatctatgcatgttgtacttatttttgaattaattttttaaaaacaaccaagtttggtatattggaagaatacccattagaaattcatttgtatttatataacatttagaacacttttggcttaccttttttcattaacaaaaaggaaaagtttaatattaaaatatatgtgttgcatacttaaatctattctttttcttatccatcttttgtggtacaaaatattaatctttggacattatgggcacacattagacatgtgagaaaattgccacagtgagcattttaaagattgcagaattgtccattttgttacaaatttttgttagttattaagaaattgaacaattatgggctatttttaaaatagtggcagatgagagtttttgtttaaagggatttttaaattatagatttgtcacatagggaaaaatattttttaaaaattattttataactgtagaacattaacttttcgtctttacgtttatatttatatcatgtgtctaaagttgctttaagttaccataaattgaaacttcggaatctttggatgttatagctgatgttttgatgtatttttccaatgccagaatatttttaagtgctttgagaaaggaaggcatttgatggagaggggaggaaaataacccaacccagttatctatccatattagatacacgtgtacacacacaatatgcaatacacaacatctctctgtaaaagtacccttttcagacaaagaaaggaaggtaatttgttcatcaattttgttttcttttgaaattcaatccaatctggaagtggcataggtaaataataatattcttccttttctcttcctgtagggtgctggagatctagaagacccatggtagccttaaaaaccttctaaaatgcttttgattctgaaaattgggggaaaaaacttttaatcacaattttcttcaatacaaggggaaaatattcttgcggattcccaacgttttgtgatatgagcagaaaatcattagcatttcccatcatttgttcatatttgtgttttctgacagttgccacttgtagcattgcctgtactacagtattttttgccaacctcaggcatactcgttacatctgtattgaactttcggccctagaaaccagtggagttatttcaccacaaatcaacaatgtgcctgaggtgcatgggaaatatagttagctatactctgaaaatacattatgttttttttctttaaacaaaacacacaacatgtaagcatgtaagagtaaagaattgtatgatatgttccttttttcagttcaccaagttggaagccttttgcagctctgtggcttggaatttcatttgagcaatttctataggatatgtatttattattgattg

SEQ ID NO: 93998 - DNA, 1921 bp, Homo sapiens
cagtaaccttgaattcttctgagttttgcatgtattaaattcaattaatgctgaacatgaagagtaaagtatttatctgaaagaagtttctgggttaggagaagtaatgaatgtatccatttgtacatggtttacatgttgtggatgctttgtaaacattttcctgtatgtttaaattgtgtttcagcaggatgtaattgcccttgtgtgtagttaaaatgagtcatcatctggtcctttgtgaaatggaattcatggtattttctgtaacgttttcctgaagctgtttctggagagccacacatttaaatacagacagctttcctgatcatttgatttattgtgcacctgatttttggtctaaaaggaattattgccacaatatattttatttattctttagattttagccttgtaagttaaagtgctttacatgatgatgtgaaaagctgtttgtccctttactgggtttggggggttgttaaaagatagggaatgaagaatgcaaaatggtttatcgttcaaactgtccactctgatccaaccctgtactgatagtacttcccagtatgatattgtgatgtttcatacaatgcagtgaacataaccaacttgttacctaaataaagaattgataaaaacagtgtgacatattactatttggtatgattcagtttttaatgttattttaaacttcttatatggttggcatatttctgaaaatttaattccaaagaggaattaaccaaactgtacaggacaatattaaccccttctgtactctagaaatatttatactccttttaaaaaaacctgcctttggccgggtgcattggctcacacctgtaatcccagcactttgggaggccaaggcgggtggatcacgaggtcaagagatcgtgaccatcctggccaacacggtgaaaccctgcctctactaaaaatacaaagattagctgggcatggtggtgcttgcctgtaatcccagctgcttgggaggctgaggcagaagaattgcttgaacccaggaggcggaggttgcagtgagctaagatcgcgccactgcactccagcctggcgacagagcgagactccgtctcaaaaaaaaaaaaaaagaaaaaaaaaaacttttccggcagggggcagggtgggggttactggtgcttgaaacagaaataatgtatgagttagtaaaagaaaaacccatattcagtgttgactcatctgaatttcctagcctggctattctcaagtattttggtctgaggacccacttatactcttacaaattgtatactccagtgaacttttgcttttgtggatactatcgatatttactatattagaaattaaagctgagaaattatacatactgttttaatttgttaacaaaacaattacatgttaatatataaaccattttatgaaaaataattgtcttataagttaggatacaaaaattcagtgtaaaaaggaccatttttcatttttgtgagccctttaatgttgaactgaattcttgtttgtgcttttgcgttcagtctgttgaagtgtggtatggcccgatggttgaagtttatgaagaaacctggcctcacacagataggtagttggaaaacaggaatattttagtcacttcagataactgtggatatcaaaacttgacaactgatagtttcttgaagattggttgcaatgtgaaatcggaaagtttattagaggacttttcttagtttgttatgttaaaatccactgggtctgtcttgcattttgaatggaccttctggctatgcatgattttgtcacatcatgaattagtcatttggaaaatactggttcactgaattatgcagttcttctaaatattgatccgttattctgcaatgattaaagttttttgttaagggtaggcacagtgatt

SEQ ID NO: 93999 - DNA, 1195 bp, Homo sapiens
catgagccaccgcacatggcctaaatctagttccttctaataaaatgcaactaataatccacattctaatataaagagcttgcatccatttggggatataatattgaaaattgttcgcccttcctataattattttgtgtgtttctgttgtacatttacatttttaattgtactctgggaccatgttgctcactcattttaacctatcactccctttcctccccctgtaaaacaggattagtaactataccatgccaagtcatgtgggagcctaaggcaaatggaaaactctgtaatgattatttttttccctttttctttttttcagcagagagtagattctgtcttatttaaaatgtttatattatgttcgtcattttgcattagttttgacttttttaatgttgcattaaaatatctaaaatttaaaaaaaaatttatcttgattacttgccattccttaaattttgtccccaaagcaagtgcttcaccctggtcccagatgatatgtgaattcctgggcctttgaaaagacaattttcctgatttaaggcagatgttcccaagaaggaataactccttagcctactagtacccattagcatgaaacagcgttttctggggtggctcagtaaaatggagggagcgctaagctaagagagtcccgagctccagcagcagccaggtgctgttggcttccttacgcagtgagctgtctcttaatactttgaaaacatgatgctgagagaaagcaagttataaggggatgtcttgtatgtaaatttgtctccaaaattaattccaaaacacttcatattttaatttctttgaaattgggaagcatctttatttttattttttttttttttgagacggagtttcactcttgtcgcccaggctgcagtgcaatggcgcgatcttggctcactgcaacttccgcctcccgggttcaagtgattctcctgcctcagcgtcccaagtagctgggattacaggaatgcgtcaccacgcccggctgattttgtattttcagtagggtgggggtttctccatgttggccaggctggtctcgaactcccgacctcaggtgatccgccccccttggcctcccaaagtgctgggattacaggtgtgagccaccgtgcccggccaggaagcatcttaacaattgtctttgactaaggcagccatcatg

SEQ ID NO: 94000 - DNA, 1035 bp, Homo sapiens
tgagctgagatcatgtcactgcactccagcttggatgacagagcaagaccctgtctcaaaacataaaatgtcttcaaaatgattatattatgatttggcatataacacagaaataatagcatatgtaagattaaaaaaagatctgtcctaaaaacctgttataataagtattagaaaataatctttttttttttttttttttgagacggagtctcgcactctcgtccaggctggagagcagtggcgcgatctcagctcactgcgagctccgcctcccaggttcacgccattctcctgccccagccttccgagtagctgggagtacaggcacctgccaccacgcccggctaattttttgtatttttagtagagacggggtttcacagtgttagccaagatggtctcgatctcctgaccttgtgatccacccacctcggcctcccaaagtgctgggattacaggcgtgagccaccacgcctggccagaaaataatcttaaatgttaacaaaacattatttcgtagtttaattggcagcattttttcttaacatataaaagaatggtacgtaaaataatggaatcttagagttgatgaaatatgataggtacaatttatggatagtagtatgtacatataaaacacacatgaaaataatacacattaactttagaacagtggttacttttttaaagatattgggaaaaggagctttttattttctccttaaaaaaggtaaagatgtcaaaatgtgaaatctgggcaataggtaaaattgttgtatttttctctaattttccatatgtttgaatttttcataaaatcttgagttaaataaaatacagaaacaaaattcagtgtcctaaattgcctttcaggaagagggtacacatttacaatcttaatagtatacaagagtagctatgtttttcactttcttaccagtgttgcacattgccaagctgctgggtaaaatattgtaacctacattttcttgatttaattcccaattatttgattactagtgagtgaaaatg

SEQ ID NO: 94001 - DNA, 1207 bp, Homo sapiens
ctatagatttttccattatccctttataccagctgttacataagccaatcttttctcattatttgaagttgtcctttatgacatattcatgtatatgcttgtatttttataagcattctattttatcgttttgtgttgtgtgtcagtaccatgtcatcttaattatcatagttttactatacattttattatctgatagggaaaatgccccttattattctacatttacaaaaattgaatgtgtttatttttccagatgaatttttcaataacttggccaagatatccctgccaaataaaaatctcattaatgtgttgattgaattgttgtatgtgtagattaatgtaggggtcattggtatctttagccaaggtgagttccaccaggaagatgctacatctttctatttatacaagtgtttttaatgtccccagtacagttttgtaattttctccatatgatctacaccgttcttaaattaattccttgttattttatatttcttattgctgtgatgagtgaacccccctcctcagtatattttaaatgtataccttcttagacaactagttttatttacttaccaaccccaatcctgcaagaaaaaaaaaaaccatatatatatatatatttcaatttctatcatatccaccagatggcagtcttgggcacgtccatctgtaaacctgctgagagctctggtgacaagaaaggcagtggctggcagaccttccaagcactcagaagcacgcggacaaaaaggtttttttgtaaacccgaacgaaaaataaacccagcattatataattatagtatttgtactgctgttaacctttaatcttataacccattagtggagacagagaaggactgtcactgtgcccttcaaaatcatattttttcctgtccatgtgataaacacctgtggcttcttggcagcacttttggtttgattccagggactcttatggttaaaggcaggctttaatctggcgttgttttccttctcctaaaagcaccatttaaatcggaagttactggatttctaaacggttaagaccgtcttccgactggtttttatcattcccagatctcttctgaaaggaggtggtgtgcatagttaatatgaaaggaactggcttgttctacgcgaatacaaatctgaataactcttatatattagacctttttttttttttactttag

SEQ ID NO: 94002 - DNA, 1403 bp, Homo sapiens
ccctttcccctgactcatgacctatgacctgctgccttttgcacattgagtgcttaggaaaagcaatgctctgactgcatagacctaaagccctaaatccagagatatgtttaccacttcctggccctgccttcttaataatctccttctggataggtccaacattcctgtaaacatggtggtttctaatcagctctgatgtttgtcatttccaatacctgttcttggaggaatgttttacttcctgcaatccataggcatttgtctttgaggttgaagggatttcattgttgttattatgaagatcccattccagctttgagtctggttttggtgattgccctctctccttctaaaatgtggggtgggatcccttgtttactttctccagccactttgttttcatcctcatgttcctttgtgcctcatcataagatatattttgttgctgtgctggcttagatcaaaaccctcttgctgcctgttgataccgtgtgagatcttgcagctacccatatgggggaactggggtacagagacagaaataagcagcctgtcaggccaggcgtggtggctcacgcctgtaatcccagcactttgggaggccgaggcaggtggatcacgaggtcaggagattgagaccatcctggctaacacggtgaaaccccgtctctactaaaaaaatacaaaaaaaatcagctgggcgtggtggcgggtgcctgtattcccagctatttgggtggctgaggcaggagaatggcgtgaacccaggaggcggaggttgcagtgagctaagatcgcaccactgcactccagcctgggcgacagagcgagactccatctcaaaaataaataaataaataaataaataaaataaaataaaataaataagcagtgtgttataggggaaaagcccagatcccaggtgtcgaatgactctgtgctttggaattagtgaccttcagcctgcggtgtggcctctgacagtctaattctaggaagtcacatcaggattacacagaaagttactggagattgaattctagactcaagttgctgaatatgcatttgggactctgaactagaaggagaaaacacattatctgctcattatcctacaaagttctaaatacaaagtttcatttccacatgtcttctcagccaagcctagaattctcttctgtataaattcctgggttcctatataagtgaacaagggaaatagtccaaatttagcaagttcaaaggcagtctgagagtggaaacaaagactcctcaaatattggcacaaacttaccttctgtgttgaggttgcactccttctcagaccccgtgcactgacaacatttatcacctttttaaattaattgatgcatttacttatttatttatatttattattt

SEQ ID NO: 94003 - DNA, 1066 bp, Homo sapiens
gtgtgaagccataggctactctaagaaaaatgtttttgggctggcacagcggctcatgcctgtaatcccagcacttcgggaaactgaggtgggcagattgcttaccaggagctcgagaccagcctgggcaacatggcgagaccctgtctctgcaagaaattaaaaaaaaaaaaaaacctacccaggcttgttggtaagaggatctcttaagaggttgaggctgcagtggaccactgtgctccagcctgggcaacagagtgagacattgtcaaaaaaaaaaaaaaaaaaggaaagaaaaacatttctgttacagttttaccatagcataggagtataacaaagcttttaagttttaaactcagaattatagcttgaggagaacttctaaagttattttaatccaactattaaccgttattcttctctgatacagtgttctttattatctttaaggctttccactgaaagatattaatggctatttccattgctcatttgtatttgtaaggacatttagaattggtgaaaaagcactgaagcatatatgagtcccagttgagaaagccaggcaaagcacgctgtgactctggaatgcactgagtcctttggctcctggtcaccttgacaggctactgcccatcaacatttcagtcctagatttataggctctttatttttagatagtccattcttaatggtcgtttgggcatagtttttccgtattttaattgaaatatcttaccctgttctgaaaatgattatcttttcccagtgtcagaaattacgaagttacattgtagcagttggtttcactgctatcattctcctacttctaggttactctgaaaaataatgactgagatgggagagagtaaattattttcaggattttttattttgaggttggggagtttatactgtgggcttgtaaataagtgttaaatagtagtcacctgtaagtctattttttaaaaacagaaaaatgtggagaatagcctatgcacaaagataatggcagaattatttacagtttaaagacaaagcaactagattttgacttttagaa

SEQ ID NO: 94004 - DNA, 1069 bp, Homo sapiens
gctaatgcctctacatattttaattgtgcctaaaaagttagtaaataaaacatattctgtcctgagtttatgttaacaaaatcaaacttagtagcttaaaagagcaaacttacaaactcgtgattttatgagttggcaatttggattgatctcagctaggcagttcttctgctgatatcagctaagctcactgatgtatctgtagtcagctagctgtcagtgccctcactcaaatgtccagtggttggctaagcactggatatactgtctcaccacccagcaggctagtcaggactcattcatatggttgatggtcacactttatccctgatgcagcgttagttccttcagctcttcataaaacagtgaggactagtatggtctagttctcagtgattgcatctctggatgctgcagccttcgtgttttcttacctatatgtcttctaactttgttccacgtagctaatgagaacagcggctgatacccctgcaattatgaattgggatttattttttacaatgaagagaaatacaaaagtgatagacttggacatgtttaaggatcactgtgttctatttctgaagcacagcaatctcctttatgttaatgtgattggtctggctgatgattcagttcggtctctaaaggtatgtttaattttcagaagttaatactgttaatcaaaatatttatgcagtttagcttaacagaacatcacattttgaatagtggcagcagtgttctttttcttgaaaggaatgtaacttaaatggaatttagcaaagtcactcttgggtttaggagggttatcttagaattacttagaggatcttgctttttatgcagttttacttaagatagtgtcttatggcatggacttcacaagtagagttgagtgctaatatttctctttctgtatatctctctacctcacatatctctgcaacttgagatatagtaaaaactcaggccaaagttggtagctagtgcctaaacactgactgctgttcccccatcccacatccccaacagggacagtagtggtatccactgtgtttttagccac

SEQ ID NO: 94005 - DNA, 1070 bp, Homo sapiens
gtagtgataatgtcttccacttctttgatatttcccttcttttaggaagtacttcagtacttcctaaacgcgaaagatttttttctctacctgattttcctattaaatatgtaaaagttcatggaattttattttctccttaattgtgtataaattttccccatagtatttctgaacattcttctgagcttcttagtattcctgcttcttaaggacttattcatctaaaataatagtataaccatcaaatgtctatcttactttgtttactttttttaacgaaaaagatcattttattgatgagcctaggaaagaacatttacaatctgtgaaatacctactatttaatcttatttcttttttgtacaacgttaagtctacggtatagacctacttatctttaaaaagcaaaagttttttttccctagtttgaaatattttgatcataacaaaactttttccaggatcttcagcctgttaaacaagaaaacgaaaaaccccttccagaaaacatggatgcatttgaaaaagtgagaacaaaattagaaacacagccacaagaagaatatgaaatcatcaatgtggaagtaagatatctcatgtctttaaaaaaaaatttttgatattaccaatcaagatgcaaatgagatacttggtgatttagagacatagtccacatcaagattatactgcttttggcctttaaaatatgctgaaaaacttaaaaagcaaagatttcagagattgtgatcacagaatgtgatcctttacatcttttaataaatgtaaagatcgaaagtaagatgaattttcaactgtaatatattaattctggtttttgcaaacaatcagttccgatttaaaaaaaaaaaatttcaagagacagggtctcactgtgttgccctggctgatcttgaactcctgggctcaagcaaccctcccacctcagcctcccaaagtgctgagattataggtgtgagccaccatgcccagcactgatttaaaaattttttaatcattctaaggagaagttcaaatgaaagtagttcatactttgttattatttgaaa

SEQ ID NO: 94006 - DNA, 1693 bp, Homo sapiens
ttagaaattctttataacttctttttatttcatttttgtgttttttgtacatctttcctacttcagaaagataaaatttttaatttcacctattgaactaaattttggacctttaggttattttattttgcattgtgtttagaacattttgtcatgtcgtactttgtcttaacacttagtttataaatagtagacaggaattaccatcagagtaacagctgtgatattagctcacattctaaacagaaggttgactatttcttccctccatttgttcctgaagcaacttttccgttctcttttatagattcccactacctggaaactttaacctgactcaataactccaagtattaatagttcatttagtaattcctttacctgataaagtaatcctgctgtcacatgtcatgtatcaaccattccctctatgagaaatgatgtaatgtaaaagccatggtctttatcactgagacctggggaagctttataaagatgccccggcagctgtgaaaacacctgtagagaagaatgcacatttccttctttcagcaagcatccactgatttccaactctgtccacttttatagggtgtaataaagtagaaaaagtagttactgcttttaggtaaattaaaatgtctgcttaaagagctattacctatataagttaactaaggaacagaaaagtagcatgtgtagtgggaatgttagaaggcaaaagatccagccacgattggtgtgactgaactaatcaggactcctaattttcctgactgaaaaaaatagggagttctgatcaggcatactggctcacgccagtaatcccagaacattgggaggccaaggcgagcagattgtccgagctcaggaattcgagaccagccttggcaacatggcaaaaccccaactctaccaaaaagactaaaaattagctgggtatggtggcgcacgcctgtaatcccagctgcttggaaggctgatgtgggatgattgattcagcctgggaggtcgaggctgcagtgaggttgaggcacagtgagatcttcagcctgggtgacagaaggataccctgtctcaaaaaaaaaaaaatagggagtttcaacttgtcattctgtagaaagtcttagaggtgctaaaatttcatgattctatacctcttgttaccttagcaacaaattactgcctaaaagtttggggactcttcagtatcaacttctgcagtctaactgtatatcagaaatcctggagagctttttagaaatgcggattcctggatctcaccccacatctgcgtaatgaaaatctctatggttgaggcctacacatctgttgtttgtttgtttgtttgtttgtttgagacggagtcttgctttgttgcccaggccggagtgcaatggcatgatcttggctcactgcaacctccacctcccagattcaggcaattctcctgcctcagctgccaagtagctgggattacaggcgtccaccaccatgcccagctaaatttttttgtattttttagtagagacagggtttcaccacgttggtcaggctggtctcgaactcctgacttcaggtgatccacctgcctcggcctcccaaagtgctgggattacaggagtgagccaccatgcccggccccagatctgttttttgaagttcacatcaggtaattctggaactcacaact

SEQ ID NO: 94007 - DNA, 1024 bp, Homo sapiens
ggagcttctcatgtaaggtatggactgtttaagttaacctatttgtaggtcattaagattaattttaatttaaaaataaagaatgggtagaatatcagagctactaattttctcagtaattctaacttgatttttctaattttcaagtctcaattgtctctagtcaaaagtaagtataaaagagtatatacatcgaggcaggcagatcacctgaggtcaggagttcgagaccagcctggccaacatggtaaaaccctgtctctactaaaaatacaaaagttagctaggcgtcatggcacccacctgtaatcccagctacttgggaggctgaggcagagaatctcttgaacccaggaggcagaggttgcggtgagctgagatcgcaccacagcactccagcctgggtgacagggagactctgtctgaaaaaaaaaaaaaaaaaaaaagtgtatacatatatttatagggctctaatgtaatatataaaaatgtaggtttataaaaaatgattcacctcaggacttccttagtatgcctgccagtgcatttcaaagtataattcggccttctaaatttcctagaacactaaattatagctcttaataaaatctaatgatacgctaattgttttatgaatcacaaatcagtaaacttcagtaaaggccatgaattgtattttatttctctgtaaaaaaatgaaaaataatcttgcgtttttgaccacttgagtcattcaggaagacactgtcagagtattgtacttctgccagaccccaagctgtgggcgtgaactcaaccttaaggacctgattgcccttatatagagagtaaccacataaccacttttgcctggcacagctccagcctacacctgttgtccctgtgtaattattaatagtgtcccctttcctctcaaaagtgtcctggttagaatggtaaattatatggtcatcctacagtaagtaggattaaatgatctatttgtgctgctgctgctttgacatccctctcctaccttttactt

SEQ ID NO: 94008 - DNA, 1729 bp, Homo sapiens
cattcttgctggtagccatcttgagtgagggcggaccagaggatgagagagctgtggcagggctactggaacgctgtccctcattgttttagccttctgtgcttcatctcgagctcagaagactagcgaagaacgaaaagtcttatatatttcgagactaaagaacccaggaacccaagaagactccttgaccacaacaaagatggcgaaatctgcctgttgctcgtgctagattgaggttacgtagattggcgtgctgcaaaccagctctaggcggctctgggtaagttgtcgttctgtgggctgcggaacgcagacttcggctggacttgcctgcggtgacacctgctcccctctgagagcttcaggttctccggcctgccttcactggtttgtgtccagagccggactgattctctcaatttgcgtatgtatggggggtgtgctggtctctttccttctcccctttctccccccgcccagccacccacccctcagtccccaggtcctcgctttttgactaatgtcccggcactgcgtgcgtgtcacctggtccctctccctgttgcattcagatcgcctcatccctggggtggagagttgcacggggtaaacgaataggttctcctgagaacacccatttatctaccccacccccatcctagccttgcatactgtcttcttggggatgaaagatggatggataaaggctgtgggaacgtggtgatgtaggacctttgcaggtccttgttattcgggtcttttttcccctttttttactagtgtcggctagtaaactagtgttgctcccctacccccaatcgcccattattttgctgcgacatggaaagggattaaggggggcgggggcgtcgtagcgcatctgatctatggtaaatttgacgcagcattctacctttgataccagggggcattttgtggaagacttccataatgacattcagcggtgtgcaacatacctagattattcctgtcgtaaataatagcaactgccatttattgagtggtcactatgtgccaggcactgtatggtcttaatgttaagctgtctcattttgtctttacaacaacaaccctagaaggtaaatggtgtcatttcatttttgcagatgaagaaactgaggcccggagacacagttaagtgtaggagctaagacctcaacccaggtctctctgactcttaactacttattagcaatcaaggttaataaaagctacctcctgacaaaccagagatggccttacattttatttgtgcatcttgcaggggttttttgttgtttttaattaaagcgctaaatacctttttaacattaaaaatccgaagttgagtatgtccagtatttggaaccgaaccaaattggattttttgctatacagcttactgtacaagtgacctggaacagttgcttagaacctcccacagccacagtttggcaacctgtaaaatgtgcatggtaatatctactttattaagtccatataaaatttaaattagacaaacaagataaaagcacctggcagttagttaacactcaacaataattaatcttccctcccccacctttattaaataattaggcttttccagtttatcttccacatatataccaaagatacgttcataattatgtaagaccaaagggctttttaccttttacagccctgagttcctgagataccccattaagtctgtgtacttatttgc

SEQ ID NO: 94009 - DNA, 2041 bp, Homo sapiens
ttcataactgtctgtagatggaatagcagacctgaagattggctatttctttgtgactgaagttctgaattttttgtgctgttatagagtaaatttatgtattgttgagtgtggttctggaaggtgatgatttttcagcttgattctctaagtatactgtgtgggtttttggctttaaaaaggttaagaacttccctttacataatgaaaacccaacaagtaaatattatttgttagtactttaagatgtagattaatcatttaaaaagtcattatgttaaatattctgaggaccatactgttatttctttccttctccctctagtgggcagaaaatattcttaaaatatagcatggaataatttattgctattgggtataccataatatacagtctcagtctcagcttttttgaatactaaaaatgttaacatttcagaatcattaaagcaaacgctttactcctttctaggcataatagtggatccttgaatgttgaagatgtccttaccagctttgacaatacaggaaatgtttgtaagttatacattcactctatagaaatatatttagtgttttacaaagtgaatttatagttgatgttttcttctcactaatatttattatactcactaaatgtatgcatatatgtatatataatagaaagtttgactgtctttagctgcaaaataagccttgtataaggtacaccgacaaaatgggatactgcagtttctaaacttcgcaggtgtgtgtgtgtgggggggaggtgggggagggagagagagagggagatggagagagtaggtcagaaagaacactggacactgaagtactgtcccttttatttttgtttccattttgacctcagttaattcagtagtggggctgtttcttccttctttgctttgtttcgggtgctttctttgccattccctgcttctttactttcactgtagaataaacccagaacatatttttcttgatgctactatacattaataccagagtgtttttgtttgatgcagtattacaatattacagaatatattgccttttcatcaaagcttctgattaattggtgatagatttgtccactgagaaaatcacttaaatatttcttataattcttgtaattaatttcatgtgatgaaagacatcagccaagaatacctttatgtcactgagttaaacagcataccatcataggagctatggactttttatgttttttgtataggacatttctcttaagatagtgaattgtcaatgaaatatgagcattttaaatgtaaaaatagtactcatactctttttctcaaagaaaatttcagaactgttaacttttggctgaatttaggtagtgtctttggcttaacaatgcagttttatcaaataaatagatttgcatagaattgtgttcagtaatactcagacaacacttttgttcttatgtccacattatgataagcttttgattttatagaaaaatatttgtggttcactaaggaatctataaatgtccttaaattatcctaaatacctaaaataatgtaggtttcttttttatggatagtgactgatgtgccttttagtttctttctttttttttaaattttccaaacaccaacttgaacccgaatgccttttagtttttccatgttggcatttagtgaattctctcccacttaggtgtatctcatatttttattaggtctaggcaaggactgggcaaagcataccaatgatggttgaggatacatactcttttagttctggggtaatgttaaatatcattgagtcaggcttaaacatatgtaatttcagaaaatgattctagaatgttaaatgtggaatttttgattcagtaatgtaaaagtcaagtattgttcccagttggctccgtatgaaatagggccactagctgacagcattatgtaaaataaaaataatttcctaaaggcatcaattattattttaggcatgaatgactgtcttagccttctctaacattttttcccatcaacttgttccatacccc

SEQ ID NO: 94010 - DNA, 1027 bp, Homo sapiens
ctctgatttggatgataaattatatgtgtatgtttagaagacaaggaaagagaaagattggaagcttaattatttatagtcatttataactctttatcccagcatagtacctttcacaaagcctgacccaagtggtattcagtaagtatgcattgattcatttgaatcccaagtcatacccaaacaaatctgttcattctacacaagtgtatttatatttgatatgttaatatgttctatataatggagaggtaaatctaagtttcaattttagaggacatataccacaagccctataaactaatagaaactgagttcagaacacatacattttttatttaggtaatacaataatttttaaaaaattacaaccaggatttaaaaatcagaaatattcacataaaaatgtcgatttttcagtttcttttagagaaaaaaaaaatgatctaatggcccgagtctgagctcacatggtaattattatatggaatgagcagggtctttattttgccttggcactcaccactctacccatggacattcagatttgcaatccctgatgcatattgtatatttggaagcatttaagatgttaaactttgtatatttagttatctacttaagatgagccaattctcattagtcatgttgtttatcaaagctatttaaatgaaatacttaaaaattcttttggtgataagcctttttaaaaaaattcaacaagttaatcattaatctttgggaaatattttttcccataccatccatgaatggcaacagctattaacaaatatttatattattttattgaataaaaaataagctaacactattttaaatatttttcaacagccagtatcttcgagaaagcgtatttttgaaacatacttatttgagttaaaattgtgaaatgcatttaaaaattgaaattgaaagtagaactactggagaagttttaaatatttgtgagtacatgtatgtgtgtatgtgcatgtatacttatgtgtgtgtatatatatatatatat

SEQ ID NO: 94011 - DNA, 1453 bp, Homo sapiens
gggatttttttttttttggtgttggttgaggtttccattgatagaatattttagacttttaaaaaaccatctgtttatctgaagcacaggaagtgcatccgtctgttgactttattaagtgtattgcaaataacagatggcttagtattaggtttgctcttctgtaggaatttgttgcttctaaaagtaacaaatttttgtctttcaatattaactcatttaggatatttggactgatgtttgatttcattctaaaataaagctttcattgacaatctgacctaagctctccatttatgccctaattgtaatattgtcctactgtatggtaattatctgcttacttggcaatgtccttagcaaagaaggtagtgactttgtcttattcaatattgtctccccaagatcaattaacacaagtatgttgaatgaatgaagcagctttgtgtgtgtgtgtatgtgtctgtgacaatccagaagaaacatccagagatgctgtaaattcctctgatttagggattggtgaaattcagctattttgtgaaagctctcctcccatttttagataaaggttgctaataggtttccaacaaaaaatggcagaaacctagactgctaatttactgtttatgtttgcatatattaaactaggaccctaaatgaaaatatcagagtagcatgttaatcacaatttgaggtcaagtcaattagaaaacattataagtaagtttgctgttatttccaacttcatataatggcatcattgtctctggggcacgtatgttttcaaatatgagcatcgttaggttcttttgaacaacagtacaccatctaatgaatttacatacgtaaatactactaattaacattggtttattattttgcatttcactgctatttactaacagatttcaagacaatggacaattttgtaacctcgattttataaaaaccactagtatttttggtccctagcaaccatttagtatgtaaattaggtattctcaggcttaatgtacttcatttttataaaacaaatacatcattaatctgattaagttcttgggtggaagtgctgtcctcagatcattgtggattatttattgttgggcacgcatccaaaaaaaaattcaagcatggcacttacagtctagatttaggagaattgttgaaaccccctaaatgacattttccagaagaatagaaaggcactgcttacttacaattgcaagcattacctaaaacttaatgatgttcttatccttaattacaactcagttggatgatgattcagtgcctgaaattatgccatgttttgctttgatgttataaaatgtataatgaaataaaggtgatccgagtgaatcaaaaatagattctggctttccagtagtgacttaatcactatgtttctgacttcacaacttgcttgactgtcatggctattatttgg

SEQ ID NO: 94012 - DNA, 1087 bp, Homo sapiens
ttgttaacactgaactgtactgaaatattttactctcagggcttttcatctgacaaaggaggctttttgaaaatgaaaaatcacagctcctgtccctggtatgctatggggaaatttattagttttgtaatgcatgggttaatattaccatttttttatattgaatattacttgaaaaaattactattaatatcactgcagcatgtatgtatataagtcctgtcatctttggggtatgtaaatcaggaatgttgctgaagaactacttagcattttcttgggggtgaagtgcttagttttggaatttaattgtaggttttacatttaagctgctcagtattactcttctaaaggttctataaatttcttgctttgtagtttaacaggtttagtcaccacagttgaaaggcatcatcctcataatgaagccagagaagaataaaggttgatcatgcagggctggctggctgtgacattgaacaatagagcttgacttcttcatgtctgttaaattagactatggggtgtgcttatcttgctgcaatgatactgaattgtaacatgaaaatgttatgttgtgcagctctgcgaagggagttcatccgttctcacctcatatgtatggcaaaagctttaaaatactactgaagctgcctagtgggcttaaagtctaatggcacagaattgggcataataatgaaacaaataaagaaaaagtgcaaaggcttttaaatgtcttgtacaattttatttatagtagtcttttaagggtctaaggcagaacacaagaagggtatgctggaaaaattccatttggaagaggtctttgaaggagataagtgttacggcctgaaggaaaagtaagaagatatgttgcgtaggtgagtgatttattctaaacttttctacacgtgtacttgatacatacaactcaattctttaaatattgataaaatacctactatgttcccagcaccgtgttggataccataggagattttgaaagagcattaaattcagtcctgccttgagcaatttagtattttttgaggcgacagaaatgaaatccatgaaataatttcttaga

SEQ ID NO: 94013 - DNA, 1868 bp, Homo sapiens
agcttcagagtactcaggaaagaaaagagagaagcaattattttcagtcattgagttttgaagatcttagcgttaattatgccaaacattgttggttcatcaacaaatacaaaccttaaaaggggttatgaagcattctgaacttgcttaaacatagtttatggtgattaagagaatcttgtatacactaatatatttttagttacactttcacccatatattttcatatacagtttcaaaaccaaatattcaaattaaagctaatttcagttttggttaataaattttgaaatgcttattcactttaattagcatttctttcgtatttgaaaaaagaggaataaaaaagtacaattcactatttctctgtggagtccagagtaattttgggtgtgaaaaatatttcaataaaacaaaaatcacaatgtcatagctctagtaatgctatttaaaaattgatttaatagtgggctttgagatttagaaattttctcccacttaaatctttaatttatcaaagattatttgagcattaaaaatgtgctttgcctattgttttccaactctctgtgctctctgacttgttgaagttttgcaggaagtgcccaatcaaaggatttgaggaagcagtactggacattctttggaagtgttcatctgagaaaatgaaagttagaggctaaactagttttcttgtttgcaactcaaattttaaatctaatttcccatgtaaataaaataagtgaaaagcacaaaggatgtaaacttcctaaatctgccagaatcttgtgtcttaattaaaaaataattttatcatagcaaaagaaacacatttagttcctaaagaaaataccatgggtggtattcttttgttgtattagaggtttgaagtagaatagttgtttctcatgtacatgtattacagtagacaaagtgttgaatagttttcatttctgatacattaatgattagaaaaatcgttaccctaatcctttttttataactcaaaaacaaactaaaaaggtttttgtttttttggaggatctgttctttccaagaggctggtgttcttctacctttactgtcctaaccttgcctttcaaattaagatataatagttagaatctactatagaattaatttagattcagttgtctctattaacagaaagtgatatggttttaaaaaatgcagatgatcatttatgagaatctggctgtaatcaaaagcagtaactactatccttagcagttctttattcagtaaagagttatcctctttttgctattctttatttcatttattcttgtgaaatatgtttacctttttaacaaaactttctattttacgtggctagatatgtgataaaacaaacacggtaaaatgttaaggatagaatctaggtggtaggtatatggtcttctctgtaaaatttgcttctctttcacatttgctgtatgtttgaaattttcatgagacaattttagagaaaaaaagctttctattttgattgtaatagccaatagccaaaaaccttattccatttttgaaaaaaaacctagatattttaagtttcttttacttatctaagcataacaatgcaaataccatataatatatattgataatatcacacatttagtgagttagaaaatataaaactggcttttaattgttaaatatgtatactatataccattcatattttagctggtggtttaaaaagctaacttaggcattatttaaactgaattagggtaattacatcaaaagtagtttcttagccagaataattttccattttgttaaaggagccatgatgaaatgaagtgtttagagagttttaggaataaaatgtgggtgtgta

SEQ ID NO: 94014 - DNA, 1167 bp, Homo sapiens
attaggtatatttacaagtcatctgtgatcagtttagttaccatccctttgatatcctgcagccattattggatgcctttggggttgtgatatcatgctggggaagaatggttcggctgcaggttttatgtgtctttttatagttgttcacaatatcccatgctaaattatatggtgaattattatacatttgctagtttaaaagatgtctaattgatttactatgctaaaatatcaaagactatatgctgcaggagtgatgcttccagttaacaacttatcatgtattcatggagacgacaatgcttgctcacatattggcactattgtctaatttggtgtgccttgtgttgtaattcaatcatctattattaaaagtagatgtggctgtagggagcaaaaccacatacaaatccataaacatacatatgtgcatatttacttatactcacatatatgttcaataaggtttttgttttacctgctattaatgtttgtactagtgagtcataaatggaaaatatctattagctctaaggtaaaataaaataggttttgatttagttcaagtgaaccatctcatttaaaattagcccaggggtcttgtaaagaatgcaagtaatctaaacataataatgcacattgcccaattgcttctgtgtatgatacaggttcagtgctgtagtgctttgacagcccattactgaatgtaatgaacagctatttttaaacagaagaaattcaagttgacagcttggcaatgaaattcagctagtgggataatttttgtcatctttagtatagagaatggattcagtttggtttaagcaaatttgtatcatgtagtttatagcgcaaacatttttattaaaagataattttattgtccattttgtggagaggggcagatgttactgttaagaatatgtaatcagcttttaatgaatactttaatgaattactgaaacatcatttctagaacctaggtttaaaatgaaatttctcatttttctttcctgccatgggtgaaatagtctaataaaacgactataagattaagaggtgtttttctatgctgctttttagtctttcagagtttaaaacaagtagttttaagaaataagatagtctttggaaatggatataaagcttgaggcagtgttgtct

SEQ ID NO: 94015 - DNA, 1060 bp, Homo sapiens
gcttgaaaaatacattactcaacgaaatctgggtgaacaaagtaagtaaactgagtactttacccaatatccaataatgtttctgaccctaccagtaaaataaactaaatatatagcagtggtgaaaattttaaaattgtcagaaatccccctctaaatgcattgccagaaagctttgttcatgggtcttcattaccccttcatgcttccagggcacctcctctgggttcccaaggcactgggaacttaaaagttagctttgcttagtaactatgccttgaagtaggataataaaacaaatcatttttaatagtcagtagattttttttccatttctgatctgtttctctattttacttatctcttggacggcataatggccccaaacctaatatagcaatgaatctgtgtagaagtcaagcatttttggagaggctttcatgttaggtcactactgtactctttagaattgtattgtatcagtgaatcaaaagaatttcttgacatgaaagaattggtacacatctataaacattttatttaaacctagagaggatattatttatctaacagaatccagcttacttctagcaacagtaccatcagtttgtagcctggtctttgaactcttgattttgttgtgaagtgaccctcttgaaatcttaatttacccatggatagaggacgttgtatgaggcagaagggcatcatcacattagccctgcttctctatggcatcatgagatgctaagataagcacttgaaaggtattttaactttcttgatctcagaataacttgagaagaaattcatggtacccacatactgggttaacaaaataattagtcgcatttggttatttgtgaggaggaaactgtgaaacgtgaaagtaggactggggattccaggacgaagcctagagatagattttttttagaaggaggcttatctctgaagatgggcaggatgaaagaagtcaccagcgattccagtggatgctttctgtgttatgtgactacatttttctttctgcttgccctttgaactttgaggtctgagc

SEQ ID NO: 94016 - DNA, 1038 bp, Homo sapiens
cattctgaagttttaagtgacagataaacaaattcaacatgcaccaccaactttttgagttttaggtacactaacttattgtgggatctgggccagctgctctacctctgtagacatttctaagtgggaaaaaaaaaaaagatttaggaatagtacccttttcagattctctcagaattatagttgtaagcactatgtaaattcatagaacatagttttgaagaccagctttagaatttcaatagttattgtatattcaaaacagctacacaagcactttattttcattttaaagatttacaattaaagtcattttatgtatacctcaaatgcctgattatacacaaacccattacagggtttatacacacattaaatcccttcttattatggggttttgtgcacattaaatgcctggttgttatagattgttgtttttcttgttaccattaaatgtaacatttccctaggtgatgaaatgtattattatttagaacatttattttagtgtgtgttctgtattttaaaagagaaaggtatttaagcagcaaagatgtaactgttatgaaatttatttttataaatagctttcagcagaaatcagaacagtgctttaaaattacagttaaaaaatcatttaatcatcacactccttgatggctaatagagtagtaagtgactcccccatatcccccgcaataggctattctcgatatgctcacttaagtggccctaagaatagtactagtatattttatgttagcaagccttgatagcaaagtgccaaaagttcagggggcatttgtctcctttctcaaaaattcatttaagtcttgctggagctttaactggggcagacagccatacaaatgacttgagataaaatgaaaataatggactgagctgggtgctggggatggtagttatgctgagcacacatcaataagcttggagtgtgattctatgctaatgcaagcctgatggatcagctttctcttttagcctggaggaccattaagctctggaagctgagtcaaa

SEQ ID NO: 94017 - DNA, 1028 bp, Homo sapiens
aatcatttcgatgaatgacaaagcttttgatgaatcagatactatcaaagcttggagttgttttcagaaattgaatgtatgctggtttaaaaaataagctaaaatatatttttaggtatcatacatatggggaaaaaatgagatatatagttaagtttgaacagcttagactcatttaaacccgggttttagaaatttcaattccttgtaattaaaaattctgttgatctatttaaaaatgaatatgtatttaactttcccatatttaacaatagtaaactttaatattagtaaaatattacctaaaagatgttcacagaaactgttgacatgtttgaaaggatagaatataattaactcatgcattttgaggggaattttagggcttagagaattgcataatagactgatagggaaagactttcaggagagggagcacagtgactgatatgcctgaatttgagaaagcagcagatacaataaatgtctgattctatgtaacaagtagtaaatggaatttttcactaattgaatttttctgtttaacctagtgtccatgtgtacgtattgtacatatgactagttttgtaagcattagaatataataaacttaatcttaaacatacacccaaaacaattacttccaaaaattcttcaggaggtctattggaatctttagtgtgaatgattatcattgtgagcatctattgctattttagagtcttgcttatggggaaaaataatttgataatgattgagctttctgattacctgggtactacataaataagagtgttaacactaatttctgtacatttaggtaaatatatttacttataaacatttaacgaaaatattattattaaacatagttctattttgagtaaataatttaaaatgctgggaccgttttctctgagtggccttcttcagacttctggaccctagaaatggccttatacttcaccctaggagggccctttttttcacaggcctgaaactctgtagaatccatgttggatattatt

SEQ ID NO: 94018 - DNA, 1030 bp, Homo sapiens
tatattctgatgtcgtggaagaactccaaaatgaagtaatgaggtataatagtatattgcaatacttggattacaattgacaggaaaataaaaccttgcaaactaattgccgtgagaagtagcaattgtgattcttatgctttgaaaactttaacagaatggaaaaaataatggtaacatattagaaaaattggattattgtaaaaagaacaagaaaaacctaatttaaaatgaaattaaaaaaacactttcaatgagaacagtgtttttatgtcttatccatacccatctaatataaggagaactacttattgggttccatgttcactatttgggtgaaaggttcacttgaagcccaaacctcagtattatgcaatatacccatgtaataaacctgcacatgtacttgctgaatctaatgtatatattagattaatacacacacacgcacactcacacacacacacaaatatatgggcaatgtttcactgttggatctgcataccagatgcaacatccagttatagtattatatatatttttaatgcagacagatgcaaaaatccttttccacacagatatgttagaaataaaaggaaaaatatatagacttttacaatagttaggtactcttgaatcagaccattccaaagtgtttaattatataattttcaataatagctcatttgtcatctttctttttcttgtctttttctttctttctttctttctttttgagatggagttttgctctcgttgcccagactggagtgcaatggcgcgatcttggctcaccacaacctccgcctcccgggttcaagtgattctcctgcctcagcctcctgagtagctgggattacaggcatgcgccaccacactcggctaattttgtatttttagtagagatggggtttcaccatgttggtcaggctggtctcgaactcccgacctcaggtgatccacctgcctcggcctcccaaagtgctgggattacaggcatgagccactgcacccagccttatcgtttttc

SEQ ID NO: 94019 - DNA, 1046 bp, Homo sapiens
gtgtagtaaaaggaaagtttggcctggatagattgaataactttctatgggattttttttcctttaggtaaataatcctatgataaatataagtaatctggttaggatatccttatcaatttctataatattatgttaaaggcagtggaaaaatatgatgtaacttgtatgtcttaaattgtatgtctcagctgggtgtggtggctcacgcctgtaatcccagcactccgggaggccaaggcaggtggatcacctgaggtcatgagttcgagaccagcctgaccaatatggtgaaaccctgtctctactaaaaatacaaaaattagccgggtgtggtggcatgtgcctgtagtcccagctactcgggaggctgagacaggagaattgcttgaacctgggaggtggaggttgcagtgagccgagatcatgccactacactccaggctggatgacagacccagaccccatgtcaaaaaaaaaaaaattatatgtcttaaattcctgtagctttaatgtgagaacactgaagcacagaaaggtgacaagagctaatgagggactgagccagggtttcagctcagccaggatttgagctcagggaactgtctccaatagcctaattatttttctttgtttttaacttttagttattttagactattacaaaaaaaaagttttttgtttttgttttttgttttgttttgttttgagtcagggtctctctttgtcacccaggctggagtgcagtcatcttggctcactgcaacctccacctcctggactcaagtgatcttcccacctcagccttctaagtagctgggactacaagcacatgccaccatgcctggccaattttttgtgttttttgtagagatggggtttcaccatgttgcccaggctggtcttgatctcttgagctcaagcaatcttcccacctcggcctcctgaataaaagttttaaaataagtataattcctgctgtggtttgagtatgtcaccagaattcatgtgttggaaatatggtccctggtatggcagtgttggga

SEQ ID NO: 94020 - DNA, 1026 bp, Homo sapiens
aaaggggaagataggctccagcttttggaggaaaggcagtccagtatatacctaccataatgatacttctttccgtgttgtcggttcttattttataatggtgtctaaaaaataaacaggtaccactactttactaacctgcttttagaccaaatgtaatgaaagtgatacggaactgatttttaactattgaacctctaggatagatgaactcttaatgctatcacaaaccaccatgagatacttcagcataatagagtgctagcaaagttgaaattgctgctattgtgtatctcagacttgttaaagctgttccagactcatggtgaaatagattgctttcttctactggtggacattgaactttttccctctatacatgtgtttataaacaaacagtgacataaacttttccattggaacatattttgaagcagagatatgtgtttgtagagagcattatatatatcatttaaatgtattttttttccaaaacaagtttccaggtcataattttgaacctgtataattttcattatgattttcctgtctgaactgaaaggccatgcaataagtgaaaatattttatgtttatttttgttaagtacctctccctctctgccttagtacgaggcatagcaaggaaggattaaggataatttcataaagataattaaacataagccttgagtgacttctttctatcagaaagacttcagaaaggaaagagttgaattagcatggtatgtttaaaaacgaaacaaaacaaaaaagtgtgacttaggacacaggagatgtacgttactaaaaagttttactatgtgccgggcactgtgcttcaaactcaacatgcactatttcatttggtcccaacaacccagtgaggtagttgtattatcttaattttgtacatggtggcatgatcatagctgagaattcctgggctcaagtgatccttctgcctcagcctcctgagtagctgggactacaggtgcacagcatcatttccagatagtttttaaattt

SEQ ID NO: 94021 - DNA, 1005 bp, Homo sapiens
tgtcaggtttcttctgcagttatgtcttgtcctgtcacgtcctgctagcacaacttttggcagaatccaaaatttgggagccaaactagacattaacaatgtttcttcaacagctcagccatagaagctgatttcaaagttaacagtaactgctctctttggatcgagagtcattcattcattcagcagttatttatcgagtgcttacttagcactggggaaactggtgaatgaggtaaaatgctactcctgttcttatttacaagtaagtactggggaccaaggttaattgtttacttgcagttatgataagggtcgctcttagagcttataataaggagctctaactttgccaggggccagggtgggggtgggtgatcaaagcatgcaaccttgaggaagtaacagttgagcataaatctgaaggatgcactggagagcgagatgaaggagtagggcaaagtgttctaaacaatgggaagagcataggcaaagtcctgaaatgagcaaaacgagcaaaacaagctgagcctgaattgagcttcctccaaatgggaccctactttcatcagtgcatttgcttggaaactgttactcaaaagtttatgtgtgttgtgtcttttgccttagtctattacaagaacttacataggagagaagcaagatgtttccagaccctcctgaatgaacataatttttcaatcacagttggtagctgttgctctgagcttagggcagaaatatgagtattcctgctcagcaaacatcatgtccatgcagaggtcacccacagctctgtggtcctgtggagagcattttaatatgccactgactgatggctggactggatatgtcacataagcctgacaggtagcaaggagattggttttagaggaactgaaggtctaaaaaggccaccctggctgaagcaggtcagcataacaggagaggaaggagaaggggccagactgtgggtccatgagggcacctcatggacatggcagg

SEQ ID NO: 94022 - DNA, 1048 bp, Homo sapiens
agagctgatattttaaatctagtcgtttttaccaatgtaagggaatttaagagataaaatttgaatagaaaggtaagatttgtatagtgattacaaagatgtgacctttaacagagggttttgttgtgtttgttttccacataaaagaatgaagaatttgtgagggtgaggtaaaagagaaggggtctccttaaaacttgagagaaggaaagaatttgtcccattgtagcaatatttgaaaacaggttttattaaggttttaatatgtgttgaagtaaataattatgcaaattgaactagaaacttcttagtttaaatctagtctgctatttacagtgttagtagctggacatcatacttttttaaattaatgtaatattgataaatagcaatcctgtgtattctcttatttctcagacttaataacaaagactttataaatccacatatgtagtgggtttcagttgtttgcacgttattcatgaccaatattatgtacatagcattgttctaaggccttctttgatctgatcttgggtataaagaaacaaaaacaagccgggtgaggtggcctatgtttgtagtcccgggtgccctggagactgaggcaggaggattgcatgaactagggagttcgagaccagcctggtggcaacacagtgagaccctgtctctaaaaaataaaaattaaaaactaaaaaagagacaaaacaaataacagttattacttgcagagcttatacttgagatgatattaacatatgaaataacaaattcgaacactgacacatcactcatttgtgaactaccttcatgaattattaccaaaaatcctattttaaaatattttttatcatggtaaaacatatataatcttttacgtatcttaagtatacaattcagtggcactaagtatatttatgttgttgtgcaaccatcaccaccatccatctctagaactttttcatctccccagactgagactgtacccattaagcagtaattctacaatctccccttctcccagtccctggcagccaccattcta

SEQ ID NO: 94023 - DNA, 1030 bp, Homo sapiens
catatctgagctattcttttcatctccttcctgtttctttgtatacacttctagtagttaaactgattttaatggatgaattttcatttaaaagtaaaaaatgatgttctctgcttcaagcagcaggtgtgtttttaatctttaataggtcaccttcccaagtgcaagcaggcaagctgttattgatcaaagaggttttgttgggtagctctcagattattgagtgacaaactttattgaatttgacttaacagaagtcagaagacagctgaagcataagagcttgcactgccatcagagtcattttacgacagccagggagcaaagctcagagatggatactgagctttttgctggcccttggagattaactgaacagccttcctaccaattcccaagcctgtcagcagaaccaattagattttcaaccagtagacaagaagggtggcacttggggacctttttgctttaggtcgaaggcttttcagactgcgatgagatgacattgatgatgacacgttgagcattggttggttttaagacaagttaaattagcagtcttgaaatgattccaactgtctcctgacttctcactgttgccatattcagtggatcctgtcaggagcaagttgatgacttaatagtctttcttgagtggatttgagcactttggctgtgtgtttatgtgtagttgtcatgcttaaaatattcatatgaaggtttgaaatatttatttgaaggcgccttctgcagagttcagcagtaaggctctcagtgcttctacctactttttattttttattttttgcttctctaagcagttattttgtacaactaccttttattctatttcatgtataattgatgacaatgtttcatgtaattattgataacttcatttatgataaacttaaaaagcctttctgacatcatgcatttctcccagactactgtaaattcagatctactcataaatagtttggaaatcactggggattaggaagggcactattgtttttattctgtgacc

SEQ ID NO: 94024 - DNA, 1036 bp, Homo sapiens
ccacttctatggttaaattttcttgagtttcttttatcatactttttttcttctttaaacatctagtaagtttttgaggatgcaggatactgtgaacattacattgttgagggtctgaatttattttttgttttggtagtcagttaagctacttgtggatcagtttgattctttcaacacttatttttggttttggtttttggggtttttttaagcttttggaggacatgtctagtgtgacctttactttatgctagtttaaccctactattaaagccttaccttttggtgttttcactgaatgcctctgttatttaataatatctctctactatggctagaagtaactggaacatcttacagactattgtttttttgcctagcctgatggagtctcacactgcaacacacagcttagtgctcaggcaaagattcaaggaagactctgcatcggtttctgaaactctacttatgcatagctccctcttctctggtattgtgccctgaaaattccagccacctcagcctcccctaatttcatctctacctcctcaacttaatgagtcatccactttctgcttgtagtgatcttaagtctcacttcacttgtttcccttttctcagagatcgcagtcctttgctgcctgttgtccaatagctgaaaacaatggttcgatatattttgtccagttttccaattgtttataattggaggtcaactctagtaccagctttcagtcatcactagaagcagaagcattttaatgccttttaaatataatagtatattgtttagaaatttacttatacatcataccacagtgatttattgagtacctacgatgtgctaggtaccatgccaggatttggggatacaaaggaataactctttctatcttcaaggaagctcacagtctgttagagaggacaaacatgtaatataaatagttagaaaggtgtttgggagctcaaatgaggtcataagtaactatatggtgtggggtagaagtatttatgaagcaactagtctggtttt

SEQ ID NO: 94025 - DNA, 1117 bp, Homo sapiens
atattttatatatatatatatataattttgagacagggtctcactctgtcacccaggctggagtgcagtggtataaacttggctcactgtaacctccatctcttggcctcaagcaatcctcccacctcagccttctgagtagctgggactacaggtgcatgtcaccaaaccaaaataacttttgtattttttgtagagatggagttttgccttgttgcccaggctggtcttgaactccaaggctcaagtgatctgcccggcttagcctcccaaagtgctgggattataggcgtgagccaccacacccagctctgatgtatttttatctgatcctcaacatgaaccaggactttagaagagaaatgccatccttgcgccaatattaactatcacatttcccagcatctactgagctgtcttcacccatcttgccacctgacatcctgaaatttgggtgaaagtcttctctggcttactattctgaaaggcttgtattgtttccagacctcttaccttatttgtttgtattttatcatacagacatagtaaaatggtaatgaatatgctattttatattttttctgcctcctatataaaaataattagtggaaactatttgtaaaggaagatacatttacctttgttggctaaaagttatcttgattgccagtctgaatagtgccatggatggtataggcaggcctggggcatagatgggaacaaacctaaaagataagcaaagaatgggtggagagaagataagggtgcagagaaaacagaggctcatctggtagaaagaaataaagtgccctctgaaagtgtctcaagtgcttcctagtggcactggtgccataaggcagctgtgttgagtctaagccaagtatcttcctgatctccactgcttcctgcggctgaacggggcacaggtctttcatacacatttattgtaatttagggagtgaacatggtccaggtatttgaaaagaagactggttgtcaggaagcattccttctgcttctctgcattgtgtgtctgtgattatgtgtgtgactttatgagaagtatctgaccttctctctacacaattcctcctgcttgtgagataaggtgtgccct

SEQ ID NO: 94026 - DNA, 1041 bp, Homo sapiens
ttatgctgctgatccaggaaccacactttaagaaacgctgcctcagccaggtctgtcttctgaacatctttcgccaatcctctctccatggttccttagagattacactctattgcctaaaatataatccacctcttctgctcttgacctatcaatttttgggccctgggtcaccttaattgactttttaccaggccttctcaatcctgggtacagatagctagttgcctaaggaatgcttgcaatattaataaatgctgcctttttgttcaaagttaacaggtagcttttagaatggcctagtattattgattagctgactttgtagtctcctttaggagtataagtgtgctgaagttattctgatacaacgttaagtcatgaatcaaactcattgtccttccatgctccagtacctagtctccttccccaaaatcctacccccttttttccttcaaaattgcacttcagatctgcatcctttcctgtcatcagttagtcccctaaatccccagtcctatttgtgatacccatgtatttttctgggacatgaataacaacctcaaacatcttaataataaagcctcagatgggtaacaggaatacactgcaaaaattaaattacaatatttaagccttccttgtaatttatttagagccaggtttcccagcagtgacactgttggccttctgggcagatgactgtttgttgtctgggcctgcccggtgcactgagggtgttcaacagcagcagtggcctccactcaccatgccagtggctctccaccctcaccccgtgtggccaccccaaatgtcctttgagggcaaaaacctcctctggttgagaaccactgatttagagacatctcatgccttatttgaattttcagggatttttttggtgtgaagtattgtcagctggtttgggccttttaaaatttcaactccccaagcccttttaatcttctccatttcttttttatcatatatttctctttgtttctggctaaaagagggcattgtattttcatgattttttga

SEQ ID NO: 94027 - DNA, 1046 bp, Homo sapiens
atctttttaatttctgctgcccttagaatagtaccacagttgaacatggcatagtttctttttgttcaaagcatgttggctttgtttgcatgttcactggtttatctacttgttgacaaatattttgaccaccttctgtttgccaagtcctattctagatgctagagatggagtggtaaacaagatggaaaaggccgtgccttcttggagtttatgtcctagggagggaaacagatcatgttcttgaaggcaagaattctgcttaatatgtttttgtactccctgaagcaattagtacactttatccttggtatatgaaagcttttaaaattggtatttagagaacattttgaaagacatgaatccataaggcttatggaaccaaaccatttttagtagaggaaagtcaagctctagagaatcagacatccatttctacatcagatagctgactttcatttcagtgttggcctcttctcaggcatgcgcatgtagtgtctgtagacaaactgacagtgtgagtaggcatttatctgttctttgtcaggttgaagaggaaggttagtagaaggtaactgagataaggaagctgaaggctctctttaagaaattttctgataaaatatacctgttagtgagttttgctagaattatagtaacagaatcctgaagaccgctgagaattctagagatgccacactcctgtttccttctgttgctatcttggctatgacaaaatgaaattatcatgtgtactttctgttactaacataacactgttgatttgcttaacaggtttatagatgggctcatatccctactatttagtgttttgcactgaagacaccaactcccataagaacgttagccggttcagctatttttgatagagttatcctttttgtattaaaatgagccagactttaaaataggaggatgctgtatttttagggaccctcttaaactacagtcaattaaaaattaaggccttttattttagaataacattgtattgattctttggatttgcccacttctacttttta

SEQ ID NO: 94028 - DNA, 1050 bp, Homo sapiens
gcactgacataatagctatttaaaagaattttgaagtttgtcttatcttttgaaccacctcttagtgggttgccctacactgctaccataattctagatcagaacaatttttaccccattattttgtacgtgatatttggagatatagtggcaagaaagaacaaaattacattaaaaaatgcactgcacttgaaagtatgtaagtttgaaacattaaaaaaaggaagaaaaataaatgaaaacaccaaaaagcaataaataattttgtgatttcatctgagatggtatataattgtactttctagtccattcattctaatattttgttgtcactttgttttgctactatgtaagttaatcagctgtcataggatcagagatacttgaaacggaaaatataattagtaaaataattagtacctttcatttcaaggtcttgaaaccctttctagtcctctttaaccagtgcagaatatactggtccccagcatgaggggggtctgaatgttaggaaaatatccctcttttggactctgaaataagttcatttctgctaaattccaaacaaaaacacagagctgggatcagttttaaagtcagtccagaaaaatgtaagtgataagctggaacaacagttctcaaactttgttctcagaatcatttgtagagcttgttatgacacattctagatccccacaccctgagagactgaggcaggcctggggttttgcattctaacaggtaactctgacgcctggtctggagccctcacgtggggaccaccaaactagagttctcgctgagagcttctcattcaattctgcagtgttccattgctttaaaattgttcaaattttcttgccgggagttgtagctcatgcctgtagtcccagcactttgggaggccagggtgggtggatcacgaagttgggagttcaagacctgcgtggccaacatggtgaaaccccacctctactaaaaacagaaaaattagccaggcgtgtcggcgggcacctgtaatccgagctacttgggaggctgaggcaggag

SEQ ID NO: 94029 - DNA, 1054 bp, Homo sapiens
gatgttgccacggactccaagcagtgatctgaaatgcccgcctgcctgaatagtgtggcattggtcagaggcagagggtacagagagcagaaacttctatgtcaaatgcccagtcaggtgatgatgaatgagccccagctctgccttctgtcaagtgcctcacagtttatagaggtcaaagtgcagtttgggtatttatgaaaaaaaccctacccacccccaccaaaaacaatccccatgttaatgtatagaattgtcacattagtgccactgagaactactttgagttgcttttctgtgatttatttttccagaactatatattttggtgtaaaagtcatcatgatactcaacattaatattgactggtaaagatccctaattggagtccccttacctttttctttctattattgttttcagttgaaaaaggaaaacccggacatatatgaagaaaaccttcattacccgcttctgcttattttgaccaaacatggatagaagattaagcttctcaaagacgaagaaacgtatcaagtgcatagggaatatttttacaaaaacggaaatctgtaaggggtataatcgcctgcctgcgccctttgcagcatttcacgtgtgggctatggactccacctgtcctcacccacgttattccccagctgccctctccagctccctccccgcctctttttacactctgcttgttgctcgtcctgccctaaacctttgtttgtctttaaatgtgtataagctgcctgtctgtgacttgaatttgactggtgaacaaactaaatatttttccctgtaattgagacagaatttcttttgatgatacccatccctccttcattttttttttttttttggtctttgttctgttttggtggtggtagtttttaatcagtaaacccagcaaatatcatgattctttcctggttagaaaaataaataaagtgtatctttttatctccctccaattaattgtattaaatccgccatccctttctctgtccctctctctccttctttttttccttttaaacagtatgtt

SEQ ID NO: 94030 - DNA, 1035 bp, Homo sapiens
atgatagtgaaaacagcaacactaataactacacatgcatagaaaaaggaaatttacagagcactgttgcttctgttctaaaatcactgagaactgactaacatttcatacacactcagtaaatccttttcctgggattttttttccctggccacacaggtagctccattttccagcttcccttgcagttggttggtcatgtgacaaagctccagccaattgaataagagtaaaagtgccgttttcttggtcagaggcgccaatttgactcacaggcagggcatgatggtggtgggtacagacacctcactggcgatctcctccctcctgtccctgctgctcttcactgggatgcagatgtagatccatcagctggcctccaccgagtggcttaccatccagggtggcctgcatggctcaggtctcttcgtgctctccctcactgccttcaagattctggagaatcttgtgtttggcaaaggatcccaagcaaagaccttccctgagattctcctgtgcctcctgttggctctctttgcatctggcctcatccaccgagtctgtgtcaccacctgcttcatcttctccgtggttggtctgtgctacatcaacaagatctccactctgtatcaggcagcagctgcagtcctcacaggaccttggctcttgccaaggtcacaggcaagagcaagaagagaaattgaccttgaatgttcaataaagttgattatttgtttaaaaaaaaaaaagagtaaaagtgtaccacttctaaaccggcccccacctcacacctcccatgcctgtcctccacactcgttacttatccagcaactaagtgcaaaggattctaaggtcctaggtgaggatggaaccatttgataaaagagcctgggtccttgaatctccctgtgggaaaccacctgctcaccggaagcactcctattgaacttttgggtgggtgaaaaataagcttatgttttggaatttatttgttacagtgacaccttatgtagtcttttttcctgttctttacct

SEQ ID NO: 94031 - DNA, 1163 bp, Homo sapiens
tgcagattgttctgttccaagtgggtaaatggaaactgtgttcctaagatgcagccagttaccttggaattcctgttctccattccgtatggttcaggcaccctcttatcacatcatcagtcatgtttctagctgggttctggccttatggttagggagcagctttgcttcagagctttccttcccctgcgggctcccccactcccactttggtgtgagaatcatggggaaccaggggtgacaccatttattttaaaacaagccagcacacatgtttgtaggctttttaaagccatagactgtaagtggacacttccggtgttcctcaggccccagctggagaagtggcccttggttccatgggtcctcgtggaatggggatccaaggtgattaaaaagcaccagctttgcggcactcagacctgttgccactcctgcctccaagcacggtgttttcttgtaaaaactgggattcaagttttcatctctcatgagtggtgaggaagatggacataaacaattagaagtataagcaccttcccatctccattttgaagtcctccttctacctcccaaaccttacattgtcttctccaaagtggccatcctgcaatgccagtgagcctggccctcagggaaggacattgccagagctctttcctcctcctcctcccctgtgccctctcacagcacccggctcactgtataccaagcatttctttcagtttccctgagttggtgaagtcttgttgaaatgatccagtgtggtctcagttctgctgtaagaaattggagctagggtgcaagtgttaatagttcagaggtcttggggcaggggtaggggaactttgagacaagaatgaggcggaggaggaaaggcccagccacactttctcaaccttgcaaaacctgagttttgctttatgaaggcaactagtcattctctttatcatctgcactgtcctgttagcaactctactgttttggtttcttttggggaccatttttcccccacaaagaaaggccttcctacaaatctagggcttttagttttaaaaattactccatgagagttactacgtacgtgatcataagtatagtaatatggcattaagtttagaggttatttatccattcactaatttactcagcaaatattcctt

SEQ ID NO: 94032 - DNA, 1212 bp, Homo sapiens
gcataaccttgagattacagaggagttgcagtttttggtactgacagcatagggaatgatagtgggataagtagcagaagtaaaggataaggtaagatcaattaaagaaaagaaattctggtctgtcaagaacagaatttgagcaggtgtgctggctcatgcctataatcccaggactttgggaggccaaggtaggaggatctcttgagcccaggggttcacgaccagcctaggcaatatagggagaccccatctgtataaaaattagattatccaggcatggtgccacacacctgtgtcccagctatgcaggaggttgaggctgcagtgagctgtgattgtgccactgcactccagcctgggtgacagggcgagaccctctctcaaagaaaagagctgagaactcagaaaggattatctatgtgaagaatgattttaggaggctgtctcagtaatgcaggctaaaataacggtggcttggatcagagtgttagtggtaaaaatgatgagaagtggtgggattctggatgtagttaggtggaggtagagccaaacaggatttcctggcataagatgtgagacagacagtctaggatggctccaaggtttttggcctaagcaatcaggagtatagaattatctactgaaatgagaagactagtgggggaacagttttggtaaaggaattcattttagacaggttaaatttgagatactcattagacatccaagtgctgatgtcaagttaggcagttggctgtgtgagtttgaagttcaggggagtgggctggactggaaatgtgaatttgatagttactagcataactgcttagagccgtaagactgaatgagaccaccaatgggataagtggagataaagcagagaaggggtccaagggctgagttgttgaaatccaagaccatcagctataaaatttttgaacttcataagagcaagaattttttctcatggcacggcctgctagatgcttgttcagatttctccccttctttctaagaagatcctgcctggagaggagcaacgacgtggctaatggatgtgaacatgaccaattacgtgtaggcaaaagtcataggatggaattctaggaaagttagaaagtgtggggagcacaggcagctcagctatcatgcttttcttaacctttgtccttgccctccttcctgcttggaatgcagatagaatgctga

SEQ ID NO: 94033 - DNA, 3141 bp, Homo sapiens
gtgtaattaatttcatgtgtattaacactatggtgactagttaatttccctaactgggtttattagaagcagtccagacacaggggctgaaaatgcttggctatgaaagtgttaaagtttgcatggtacacagaggattttctgatttctcagtgtccccaactgtcttcaggaatatgttaagtagttcctgactctgattttccttgcaagattaaactaaacagctgatcaggaacccttagggaatctgcagcagctggacctccccaagaaaagagagagagagaaagaatttccaagcataaaaacaatgcctatggggtctcggagacccgtcctacctctgcccctgatcagtgacttagttccactttgctttgacacagccttagcctggtgtaatattacattacagtaggtttcttgcttttggaattcactgctttagcatcaggtaaaattccacagaatcaattccaattttagcgtactcatttttatgtgtacagtgagatttggagtttaaagaaggtttttattttgttttataagaaaaagcttaatttttaaaacgtcttggtatcagtatggttggactgggggaagggaagaaaggggtgaccagttgttaatacaaatgtaaaggatagctttaacaagtcatcaggataaagccaacagctgtggaggaaaaggaaatggaatgggtggaggggaaaatgaggccttagtaaaaggagatccaagcatagaatgtgttctttgttattagagtcaacactcagtaatcctaggaaagggggccttcaggaggagcatggataaatggagtccacagataatccacagccccgtttaaactgttagttctaactctaactgtctccctcataaaaacctttgtttttaactagaaccataatgattccttggcatgctttatgcctaccttttggacaataatgaacaaagaaatgtatgctggggtgagcaagaaaaaagggctataaagaacttggaaacagaaatctgtatcttcatcattgtttctctagcacccagcagagtgcctggccaggagataatagagttaacaaatgtttgatgaatttaattgaaagaagagaaagaatattagatactacctggtctgggattctgagccatagataatcaagaatccataaatgttgattggataaatatatatgaaataggtgggaattgattttctgagttccaaatttgtgggaagaagtgaggaagaaagaacatttgaatttcatccacatttggccaaaagttgatgtactttctaccatctttaaacaatttaataatccaggcactgggggaaaaaccaaaaaaaaagcttccagtctcttgtttccaaaggtcttactttctcagtgtttgtggtttagctttgtatatttgttaagcaaatatatattctcatcacctcttcacaaagaggaaaataagactgtcttctcgatccttatgtataatgctagtgtgtagcattgtagaaggaagtaaattttcttgaattgtttctactgcatgaatgctgtctccaactgatatgcatgttctctgaaggcaagcgttggtctgcagctccttttataatccccccttaatctttaatattggtctgggcacatagtatgtagtaagtacttattcacaaagttatgttgtatctaggaagtacaatgccttatttacacttactttttttctcttacagattttgataaacctgatttcaagagaagcatagtatgcctggaagatctgcagattgggacagttcttacaggcaaagttgagaatgccactctctttggaatttttgtggatataggagtggggaaatctgggctgattcccatacgaaatgtaacagaagcaaaactttcaaaaacaaagaagagaagaagccttggactgggccccggagaaagagtggaagtccaagtactcaacattgacatcccccgatctaggattactctggacctcattcgggtgttatgagtatcccacgaaggccagacgctgattttattttctcatttccacagattgacaaggataagtcagttgtttgtaaactctaggtagcagatgagaaataattcacttaatatcagaaatattttccaaacactttcctttattttttcttctgaataaatagaaaaccaacagtttgatttccttttcccttaaaggaaacaactaatacacattcttatatggctttatgtagtaatagttttctgactaaaattttgttttttattttttgtaatttatctttaactccttttgcattttgtataacagattgcttaacttctacttgccaacatctgccttgctggacttgtatgggattgtcttcttgatttgaattgtaccgtctttgttgacacagtagggctgggcagtgtttaatccttccattttatagatttttttttaatcaggccttttggacttcattcataattttgcaataatctcttttcccttgtcatgcaagccaaaaatataccagtaaaacagattctgacgtgtttgtagttatcaaatgaatggctcgaaacacttctcaaaaggatatacgtattgaccccaacaataaatgtttgtggctagtgacttgttttttgctatgttgattcagtgaatgacctagaagtcagtcttgatgaaaaaagatatggtttatgcaacctttggagaagagggaagcctttgaaaatttgaagaatggttttgtttgatttagcatagaagagtgtgtcctttcttaaatcagaattaaacttcaaatggggatagaaatggccgttttaaagatcaaatatagatcaggtgtgaagggacaagaaaaacaagtatataaaggaagtgactcttattccatttttatttagtggagatggtaaggattagcatgaccattcaggatcaaaataaagcccacagtggactggtatcctgttcattctgactactgctgctgctgttgatttgcctgatgaagatatttgtatgactgaatgagtgtctggttttctccatgcgtgataagtaggggatagttactaaagacgacca

SEQ ID NO: 94034 - DNA, 1255 bp, Homo sapiens
tatagtgtaaaatatttttggctggacgcagtggcttacgcctgtaatcccagcactttgggaggccaaggcaggcagatcacgaggtcaggagatcgagaccatcctggctaacacagtgaaaccccgtctctactaaaaatacaaaaaattagctgggcgtggtggcgggtgcctgtagtcccagctactcgggaggctgaggcaggagaatggcgtgaacccaggaggcggagcttgtggtgagctgagatcttgtcactgcactccagcctaggtgacagtgcaagactgtctcaacaacaacaaaaaaatgtttttggtgctgactctgagcaggtgcttcatttgataaatagcacaaaaatctttaatccactttctccctctccctcagccttttctttttcaggacagtttacagcacaggacacataatagattctcaataaagactgattgattgacctatgggtctaagatgaatgaattttagggtgatctgtataaggagattgcaaaaggagtaatattgttaagtgttgcgctttttattttttccactgcaggtttttgtcatccattggagggacactgtatgaggttggaaagcctgaaatgcaacaaaaaataaattcattccttgaaaaggaaggaatggagaaaattgcagaaagattgcaaacaacagtacacaccttacaggtcatcatagatggtctcagccagcctgaaagctttgactttcgaacaggtaaacagttgaacttgaattatagcaccttgcatttgcatagctcccattatctcctttgatcctcacagcaatcctatgccataagcagaatggatattattctcccattttatacatgagaaaaataaagcatggtgatcttccttcaaagtcattataattaatatccagagccaaagctagaagccaggtggtctccctggaccccttgttcactgtgtatttcccatttactaaacgaaatgcatcatgcatgtactgctgtatgcatggagacacacatttttttatggtccttttgtaagttgtctttatctcttgggagccagaagtgcaaggtaaagcagtcccttcacaagctaaaaggtgaatcttcttcctaaattatagctttccaagttcttggattctgtgtcaatgaacccattgaacaaataagataatatctctgttgattttccttctaattaaaagtgctctcagctttcagcacaggta

SEQ ID NO: 94035 - DNA, 2396 bp, Homo sapiens
gcaataatagcaacatttcagtacacaacacctttcctatttttatatactcatactcatttagaggtatacgtacagttgtttaaattatatgataattacacagtataaagcgagtggttctgaaatagggaaagttgcataatcactgtggttgtgtatggcattggttattatttcactgatcttagatactttgaggtaactatatgagcactgttcaactatttctgaaaagatgatcatcctaaatcttttagaagatttctatctcgggactttttaaatggcactttaaaaaatttttactcttattcagtaatgctaaattgctaagtaatagaaattttaaaataaaacagctttctaaggatatattctcctacatacaatgaatgcaacatgcaatgagtatccagtttctgtacatgtataacagatctttgaaaaagcaggaaacatttagtaagttcttcagaagtcagaagcaggtaacagtctgatgcttataataccaagtcctttggaagacaaactgcattccttcatctatgacaggaaatctttctcttgtcatttcttttttttttcttctactcatatatgcaggaggtgctccaaatggtaccaagaaataacatttaaaacgcccccacccatgcccagatagctgcatgcattttaaaactatattctctcatcagagtctggaagagctttcagaacaacttcatgactttctgaaggggttacatttttaaaatgtttatcttagtatgttaatttactgtaaaaaaacggtctcagctgtaagttctactggataattctttgccctttctgtggttgattattatgctaagaaatgccatttaaatattattttcactagatatctgttagcttctgtagtacaacaggtagttctgtgggcctctctataaatgaatgatacttgaatttataattacttgtatattttgcaccagcatagattgttaaggattctggcctatttcagtatcttggtttaacaaggaggtaagacatttgaaaatgccaggtgcagtggctcacacctgttatcccagcactttgggaggccaaggtgggtggatctcttgagcccagaagtttgaaaccagcctgggcaacatattgagacctcacctctacaaaacatttttaaaaaataaaaattagctgggcttgtggttccagctacttgggaggccaagggaggaggatcgcttcagcctggaagtccaaggctacagtgagctgtgattgcaccactgctacagcccctgggtgaaacagcaagaccctgtcttaaaaaaagtttgaaaagattcctcagtgatgattaaaatgcagttcacattgctgtccctttgatttgactgctagaacagcccctatggtgaagccagcactccttctgtaagctaatctaaataggtactgtgatattctcagctgtgtaaattcagctcctctgtagatagcataaaggagcagcaggttttcctcgtttgccacacttgaatttatattcaatttttaatattaagagcagtaaatttgaaaatagtaataaattttaaagaaatgtatacatagagtaacatatatatgttatatagagagaaaatatagaaacagtaacagatttttagagtaacaaattactactgaacttgcatttatgtcccacagtttacatagttttttagaaggccagattttcttagagtataagctttctttttaaattattgaatatttaacctgtattacagattaagacctgctctgtctacctgtacctattcatttctaaaatgatgtgttcttgcatttaattttgtgcttgttgcgttactccattaaaactgagtaaagctaatgggtaaaaatagacaagtaggaaagtctcttgaaagtgttgagagtgggtagactattagatgtactttgcccttatagcatggttcttggtggagttgtaaatcatatgttttgcccacaaagcacgtactaatattaagttgtttttaaagtgattgtgttgcatcaccatggttcttctatgctctgtggggtatcatgttgctttaatgtaatgaaccaagtcctcagctcctaaatctccatgctggaaatgatgacataaaactgaatggccatgtctgaagtcatgaatcttgagaatttcttattctttgggaaaagccttacaagacttttcttattctttgaagggaaaagccctgcacttataacaagtttctgttgaaaatattagccattttaggttatatagcattctgtttgaaaaataagcattaactctgctgcaaggtctgtattttaactttgtgcagatgtgtgct

SEQ ID NO: 94036 - DNA, 1032 bp, Homo sapiens
ctaaaatataaaaatgttaagtggacagattgctaaaagttaattttgtttttaaagatacagcagtctctctatgttgcccaggctgtactcaaactcctgggcttaatgaccctactcctcaccctccctagtggctgggactacatgtgtgtgccactgggcccagttttgtgtgttgttgttagtagttaaaacctaagcatcttactctagttcccaagaagtaacattcatattttcaaaagtgcccttacaaatgagaaaagtgaaaaaaattcacccacttgagaattagatgatcaggctatggattgattgtcatatccaatgtcttacacactgttccaaaacacagcccacatgacgtttctggcaaagctggtagaggaaactaggaagatcaagaacctgagacttgacataactttcccctaactcagtctggaggcagtgaaatgtcagactgcctggattcaaatcatggctgtttgaactgggaatgttatttaacctctctatacctcagttttcttgtctgttaaatgtgcgtaataatagtaccatatctcatggggttatattaattaatatatgtagaatacttagcacctggacagagtaagctagtgttaatatgattattattgctgttatttttgttgtgattgaggaggggctaagctaagccataaaagaaatgggggtagttggagggagtgggggagagttacaatggttggtccccaagaaaaaaagttgttttttcatgtgatctggatgtaatttgagacatttaacattgttaatgaatattaatattgggttttgagactggagaaaatgctggtttctctcctgtgtttctggagcaacctattagtacccaatgaaggaggagtgtgagggagttgctggccaatcataaagttgtgcttgcttcagcctcttccatcttcaaaatatttgcctgtccttctcctttttttcttttcatcaagtttagaccactcagtctggagcctgaaactc

SEQ ID NO: 94037 - DNA, 1076 bp, Homo sapiens
ttgagtttaactggctgtccagtccaaactcggctagaagaagggaacacgtgtataaagttgtcaagtagagaacgtctatgggtttatacattgctttaagtaatcagaggggaagacatcatttaagaaaagaattataacaattcacattatcatttttaatattgcaggtctaaagtgaagagcatatggtaaccattgagtgtattagtgttgctaatagaatttaaataaggttaacatggaaaagagctgtttcccaccacgtgagagtagagatttttcactagttaagcctcttgcatgcatctgtcaaacctggcagtaaccaaaagataaattctgagggttcaaggtatggttaccatatttttaccctgattccacaagaaacctgtcaaaatttttatcatactataatcgcatgttatataatcttcttttcccccatggttttagaagagctgcttttttgttcacagttttgcatttattacacaagtctgctaatgcagcatgaaattccctgatctggaccgttttcactgaaacaggtatagcagaaactgtcccttacattttaagttgttgattttctaacacatctacaaacatttcataatttcatatatggaattttataatagagttgagattctctgaaataatcttttgacaccaagcaaactacctaatgatatagtctttgtatataatttatactaaccatgacaattatagataagggcctttctgtagttcagctctatattactgagaacaggctaacacacaaaaaaggtagtacaacacagttgtagctattataacttcttctaactcactttgtatgtatgctgaaaaaaataggcaaaattattactttatccagaaacataaggaatgtgaatagtatagaaaaactaaggaacatttttttcttgcatcagtgttagccttcttaccagcatctttatgacagctgttggttttgtcattatttttttattctgttgtccttctttcctcttgcacaactctttttttctccgttttttttttgtttttttttt

SEQ ID NO: 94038 - DNA, 1232 bp, Homo sapiens
aagtgtatcaataccaggatttgaggatcattgggaaccatcttggaagctgcctagcacaaagtatgaggcaactaaatgcagtatgtcatcctaggttgaattatggattgggaagaaaatgctgtgaagaaaaattgagaaaattgatgatttgagcatgggttgaatgttaggtaatattattacatcagtatgttttctaattttaataattgtattatggatatgtaagtcaatgtttttgttatttggaactatacgctgaagtatttatgtgaaggaagggtaataaagttttagtactattcttgcatgccttctctaaatttgaaattatttcaaagttaaaatttaaaaatgtcaagagagattgttttaaaatgaaaacaatgtgagtctggttcttaagttcatacatactgaatacattatatgtatgtcgtgtatgtcaatccttttaataggctgttggatttagtttattagtattttgttgaggatttttgaactggtattcataggaaatcagttcaaatgtaggtttctttcttcttgaggtatctttggctttggtatcagggtaatgctggcctcatagaataggtaagaagtattggctcctcttctgtttttttaaagagtttgagaaggattggtgttcttcaaatgtttggtagaattcaccaatgaaactgtatggttctgaacttttttttgttgggagagttttgattacttattgactgtacttataggtttgttcagattttatatttcttcttgagtcagttttggcaatgttggtgttcttagtaatttgtccattttttattctcctaccatgtatctggtttaatgtatatggaacaataatgtgtttttgcattgtgtaaacacatctgatttaattttatgtgaagttacatttaaaccatataaaataaatcctccattaaactgccttgccttgcatatctaacctaaaatgcatttatcacttgagcattccatttgcttcacattcacatcaatatttgttattttccattgttttcattttagccctgtggtaggggtgttccaagtgattttgttttttaagtttgaagttttatttcaacactgtcatctacaagaatatcattaccaacaacacatctggggtccgtcatttttattgttttgcacatttataaaaccatgttttaaatcaagcttattttaaagtc

SEQ ID NO: 94039 - DNA, 1067 bp, Homo sapiens
tggaaacagtatgggattttgttcagtattccttccaccaaatagatatgatttttagttttagaaaatagtgttggccaggcgcagtggctcacacctgtaatcccagcactttgggaggctgaggtgggcggatcacctgaggtcgggagttcaagaccagcctgaccaatatggagaaaccacgtctgtactaaaaatacaacattagctgcgcgtggtggcacatgcctgtaatcccagctactcaggaggctgaggcgggagaaccacttgaacctgggaggcggaggttgttgtgagccaagatcgtgccgttgcactccagcctgggcgacagggtgagacaccatctcaataaataaataaataaataaataaataaataaataaataaatacttttaactctttagtactttcctaagcaaaaaattggggaagaatgtaagcaaagtttatatttacagctgacctgacggcagcgtttacagaagtttctattacataaatagctgctagaagagtttttaaaacttctaaattcagtgagttaacttggaccttttttcttgtaggatgttttggtgaaataactggtctactggtttgtttttgttttttttctattatactttaagttctgggatacatgtacagcacatgcaggtttgatacataggtatacacgtgccatagtggttcgctgcacccatcaacccatcatccacattaggtatttctcctaatgctatccctcccctagccttccaccccctgacaggccccagtgtgtgtgatgttcccctccctttgtccatgtgttctcattgttcaactcccatttatgagtgagaacatgtggtgtttggttttctgttcctttgttagtttgctgagaatgatggcttccagcttcatatccctgcaaaggacatgaactcattcttttttatggcagcataatattccatggtgccacattttctttatccagtctatcattgatgggcatttgggttggttccaagtctttgctattgtgaatagtgctgcaataaacatacg

SEQ ID NO: 94040 - DNA, 1187 bp, Homo sapiens
aaaaaaaattgtttgccaaatgttaaggtgcacatatgtaagccaagatccaatgagggctgggacagaaaagctgctaaagatttgtgaggtgaatggagattccaggggttacacagtgtcttgggaacataagaattgaggccatccagaatggggagacctcactgaacaacatgggcactcatttgatacccgagaaggtccatgacttgagtaaggctattgaagccctggaatgttgggttttaaaaattagtttacatttgtcttgtgcagaacaaataagacaatcattgtcccaaggatccttctgtcaagttggcttgataattgataataggttcatgcaaatctgatgcttaaatactgagttagcagtaaaggaatcttcagcgtaccttccatatgctttatcagaggaggaggatttgcaaagagaatgtcttcctgtttatttttttccctcttatgaccactggccatgcttcaatctgtgtttctggatctggaaaaaatccttccagtgctgatgccctttgccatcttaatcccagagccttataggcacaatgaattatttattttacaagtttatgcatctacaaaataaaaatcttctgatgtttgaagtatgtatttttaaaagaatgtgcttatgaaaatatctttttcaaagtcttcttccaatattatttgttctatgtacttgtctgtgatcaggagctagaacacataggtttttaaatagctaactaaagcatttctttagtgctgaacattgtctttaacgggagtatataaagacctcttgtttaccggatttgattaattggaggaggagctttcttaagcacacactgttttctcaaatgtttcccagcctcctgtcagttctgtctgtcatgggtcattcagcacacactcgtttggatgactcttaaaaactgtcacatgtcaatcaaaggaaaggagatgcaaaatgaagaagtaaacttgcttcatttgaaattgaatagactgttcctgtaaagctttttttttcctgggttaagcttaaatttattttttttaatttgacaaataacattgtatatgtttgtcacatacagcatgacgttttgaggtgcacatacattgtgaaatgattaactcttgctaattaacaaatgtattacctcacacag

SEQ ID NO: 94041 - DNA, 1477 bp, Homo sapiens
tctgacttttcttactcaagacacctaatactgaagttttgaggcaaacgtctgttcctagccattgaactttctctagtagcaggtacatcatagaggatttggcaagggaaaacaccctggcctttactttttaaaccatgtttccatttttgttgaactttactggggaaaaattgtagaacttgagcctttaaatttaatgtctgttgagatgaaaacgtttcataggtgagttatcagtagttgaaaagtatatatgactcttagtaatagctattattaaaacaatgatggactctggcatggtttaagtcactgacaacatggtttttctatgctgtctaacattggtttctttaatatgtttctgactttgttccgtggcttgactaacactaattccttttctactttttttttttttttttttttttttttttacctctgggaagatattgcttctgtgcatttcacactatagagagaaacttgcctcattgtgacccctaacctatgtagtaaatcctctaaaattaattttggttccttctgatctgtgcccccatgtgactccccccaagatttcattattagattttgacagccttttaaatttgtaaatgccacaaatttgtcactagagatgaatgggtaaaaagaaaattccttgcagtggaggatatgggtaaaatatttcaagtgacagatctgcatcaataatgttaatgtttatggggtgatgaaaaccatgtaagtcttaagccagaatcttttttcagctgagtcccagaaattttgaccacagaagccaaggcacattccgtttattccaacaagtgttttttcacatcctttccaactgtctgaaagacaattgtcactcttaaatgcctgaaactttagatgctttttctactggattagttaaaagcaatggaaacattgtctactgtggtcgggatgacttttgtcttgccttgagttcctaaaatggagagcaaatttgacaatgttattttgccctctactttttatgttcatcatctggcaaagttttcaagaaattttgcatcattctttctgactgacttctgaaggcttactttcatgccagaaggttgcctttgctgaatgaacgttgagtggtcacagggccagaggctttgtctcttactgataccaaaggagttccccaacttgagtggcttctgatgccagtgcagaagagcattagtatttgagcagttgagaagtacattcagaggaaatttagagaaaaagattattgaaattatcccaattatgatgccaactaacatatgtatgtgattatttttaactaaagaagaaggataaagaactttgaaccagtatagtgtggtcctttgtctatttatttgcatattttgatttttaaataatgaacaaaaaggattcattcaaagcaaagctattttaaacttaccctgaaaag

SEQ ID NO: 94042 - DNA, 3255 bp, Homo sapiens
attatgtattagcaagtctgaaacaatatattttttaacattggttatatgacagtagccattaatattttctgtccctcaattctgaataaacatttgacatgagaaccatctaacagcagtagcatggaaagttttttttaccatcacttaactgtcaagaaaacaaaagggttaacttacttgctggacatttgaccacctgggatagcaggccatcctgtctgattcttacagagcttattttcagtctctcacctcggtcagcagaaaaatttctatcaaggtcatcttaaaacatagaatatattgattgccgttttctaattgtttcattctttcctgtttaatactttttttccccttactttccagaaaggccagtgtggaaaatgaaataagcagaagtctttcagttaaacaagctttcccccactgctttttatattctggggactcagaaaatatgagcaaaccaaatttagcttttcttttgcatttgccaggaggttatttagtaaggtgattttttttttctggttcacagaactctataaaacatatagtgtttattactttatgtatatttatttaagtcactaaggtgaaactgtagtgatggtggcaatgttacagttttaacaagtggggcttattttataaatgtgtctttgtggcaatagctttcaaaaatgcacagggttagcagtgacatgctcttttggaaagaaaatttgctgtttaattccagggtaaaagtactactagaacacaaaatcaccactgttatttttttattttttattttttggttactatttattgttaaagtcaactttaaaaaaatctgtactcgcaggatttaactaactacatacattgcaaagttgtgtcagggagaaaatgtttgcttgttatccctatcagaaggggggtgacagggaagtccccttccctatgcttcagagggtttccctctgagtggccttcagagttaggataatggctttcctctttatcatcatcagacaaaatgaaaagattacacatgtcaagttacgcacatttatgtttttgctctgacctaaatatagattgttgtacagtcaggtttaagggaaagcagtctttcaaaaataatttaggcagcccaggtgatgattattctaaaaactctattcctaaatctactatcacatacctgcaatacgattacatataaatacgtatgataatgctgcatacattcttacacagtttttaaaaaatgcttctgccttctttctgaaatgaactggtttactttattctggttttgaagtggaaaagtaaattcacccttatagaaatttactaatattaatctgcatttaatttcagaatatattctcttaaaaattaaatttaaatgaaaagagtttgtcatgtccttcattaacttttgtgtcaaaatgaatatcttagaaaaacattttatagcaaactaagaagtgtagaggaattgtgtgtgtggtgggtgtacacaaggagattttaagagtgtggagaaaagagatgctaaatttgagctacataatatttacccaaaactggcaaaggaaaactttgttaaaatatataaaaattatggattcaagaaacaaagcttggagaagtaaaattttttacttcttactttctgtgattattctgttgattcaaattagaatagaaacaagattttgtgatagaaatatgaatgtgctttttaaaaatttataatgttaagatataacaatgttcataatttgctgaatgattgtgacacatgaaaaaccgtgctgtttgtgagaagtagacaaacaaatgttcgtgcattgtaagaactctgaggaacttagagcagactatcgcttgagtttggtcaataagactttattttttacctgcaagcagagtgtaagtaatcataattattcctaaattgctccctaaagtgtggtaaaagtggggtttgcaaactgctgatatttgttggacaattagattgatgttttataacatgttactattcaatggagtccttcacagtgccgttgggtggaaaagtaaatttgtacctaaagaaatgtacaactattaatttgtattatattccacactgttctttcaaaacactaaatttaaataagtttacacttctactcacaaagggaataattaaattaaggtgatatatagaaagataaaatggcaatttaccaccacctgagattgacaaaactctcccaggtctttcaaagtgaatcatgctcccagtcattatctcacagtaccacgatcttacacattgacaatggggtaaattggattacatttttgcttttactagaaattcaaataaaatcttaggcaagatagggaataccacattgtaatatcctgcttttatgcttctgttagggctgtacattagtctttggctaatagatcctgctagataacgctttttccttttgtagcaccattcatagtttgaggctgtcttcaatctgacctgtaagaactctgcttcgaaagactgtgtatataagaatgttggaataatttaatactcacattttgataggtttaaaatgaactggagatttatgttaattgcagtggacgaattgccacatttgtcctactaaagttgcttatcagaagaggaaaatgagcagaagaatctttaaaaagaatgttttgtctccaaattattttatatttgtatgttaacccagaactttttctctagtctctctctgtatatattagaggagtaatttctgagttttgtttttcatcagatttgcagtgaagattaaaaacaaaaacagaaagaacctctttgcaataaacatcactaccacatttaagtttgtaatttttataagaaaggaacactagttagaagctatttttttttgagttttaatatttaccaaatttataggaactctcaacatgttttacattttttctctccatgtatgtaaacagaatgaagttaaatttagtgatttcttccctggagtgattaaaagtaatgtaatttgtttgttaataacaaacttaaatttattttgacattattgtattttctgtatactataatgtggaaaaaagtacttaaggaatggagagaaatagactgttctagctaataaaagtgcttaactctggaggggccaccaaggagtctgtcatgattgacaagcattctagtggagtctt

SEQ ID NO: 94043 - DNA, 1048 bp, Homo sapiens
gtgttgcacagggaaagataggcatttaaagttgaattggaaagtacactttaaacttctgttagttattacctacagaattttttgtaagtctatagtgttttacttgttatccttgtgtatctgattcttctgttgtggttcacatctaaattgactcagtattttggaggtgggagtggaagagggtagaatgcttaaaaacaaacacagcagcaacaacagaaacaaactctgtagtttgttgggatgcatgatctggttatcggttggcaataagaaacagctgtttgtttgttgacagcctgcctttcctctcccctaatcaagctgtttctcatcatgtaattaccaactctttagtatttgagacttgtggatttatagttggtcatataatatttgccaaaacgtcatagtttacataaaaaattagtgattcccctgtagtcattctactgaaatatgaatgtgagttgtaataaaatacctgaagagacttctgaaattcatttcagacttaagggaatgtagagggtgttttgtgtgtgttctaaaaaggaagtattggtgtaactcttccctctcttgtagactccactgccaatctgaaaagcattctgttttcaaaaatgtagtaaggcagcactgatgtggataacaggacagattttgttctgatgaagaaggatatggttgcttgtttctgtctttgtcttttttcttaaaacactgttctaattttgaagccaagtgtgaaaggaaataaagttgtcagagggtccaagatgatgtttcagtcttctgggtagctttagtagcagaaaaatagctgaatgtacctcctactctaaagagacttaatttaggccattttgtaaacagactactttcagtctggcttatgctgagtgaagcccattttgaaataaaggtaatcctgtgttttaggaaaacaagccagaaagggtgaggcttctgttgtttcatttagttttacccttcaaaataaaacaaatgttttctaatcacgctcaggtcacagctt

SEQ ID NO: 94044 - DNA, 1056 bp, Homo sapiens
tttatctttgtttgatacagagccctaagggagtttttagtgtactggttatgtgtggatgcatatattggttgtgtgtggatgcatagtttgtagactaaaaatagtagaataagattactccaaaaatgtttaatccttcataaaggtattactgctttgctaaattttgggatataattatatgtggataaccatttggcacactaacaatcttggatgtaatgtttaactttactcatggaaaaaaccatgtaatataataatgttcacattagaaaaaatgttgagaacccaaatataagattgtgctaggtgattatagcaattgagaagagaaataaaatgtggaagcactatggggggccacttatgagaatttcaaaactgtatcctgaatatctgatacttgctatttttcaggaatgttgattaactcattcctttatatatgtgtgttggagtgtgagttgatcatgatctttaagaatagcacaggcaaatgtaattacttgtaagattatgttacattttaaatttaaggggaagacatcatcattattatagggacagtatgcattaaatgcataatcctgcaggaaggcctaaggtataagagttgaagtgggaaataaaccctgcctgcaaagtgattttataatgtggtacagagacaggaagggtggcctcgttgaattatggtatgggttcactcatggcaaagttctccgtccaatctatcttatgctatagacagttgtgttacattgtctttctttctggtgatcatggaaaggaattctaatgataaaagtctgtagtgagggaaaattatattgacaagagagatttccccccccccccccgggttattctcaacaattaaatatcattaccatgtaagaaaagttacttatcctggattcgtgtagaatgaaaattgtttttcagtccacagaaatgcatgtgttgtcgttttgaacaactaaccttaaaaaatctatttttgggtgggatagtaggcaggttagcagccttcttagtgtactttttttt

SEQ ID NO: 94045 - DNA, 1031 bp, Homo sapiens
aaaggatagttgcatctgtactgaacatgtacagactttttttccgtgtcattgttgcctaaaccatacagtttaacaactatttaaatagcctttacaccgtattaggtattataagtaatctagagatgatttaaagtacacaggaggttgtgcagcataggttaaatgcaaatactacaccgttttatatcagggccttgagtacctatggatttgggtatctgcagggagtcctagaaaaaatcccccataccaggggatgactctgtgtgtgtgtgtgtgtgtgtgtgtgtgtgtgtgtgtgtgtgtgtgtgtacaatctcaaccatgacagtttctttttaacagagtattggtactcaattaattgagaatagttatgacaaatgtttaaagatgtcggtaaaaccacttcattatttcataaatagcctttttttcttattttattaggttgtatttggcatacaacttactttttatacttttgtatacatttttagagctttaatgttcagacttcagttacctgaaaatattctgtctcatttacacattctgtgatctggaacactgatccagtctccaattttgtgtctcagtgttttatacctgtgtgaatttcaagcccttgggtttagttgatagtgaatggctggccttgtgaaggcctcgttaacatattcaaaatgtaatctgtctcaaagctgaggtagtgaccagaataaccaatgccacattctttcccttctttgtgatagaatgctttgtgtaattcagtgtatggaggtgacacttacagctctttattaattgaccttttatgagggctgttacttgtttattatatttgccatctaaccaatgatctgaggacgtgaaatgtcttttcaaaaggtaccctagaacatcgtttttctgtgaattggcgagcaaaagtttcttgaaacctaataggataggagagagctatcttgcatacctcatctcttttctgttctcttttgacttggatctttctgtgggag

SEQ ID NO: 94046 - DNA, 1016 bp, Homo sapiens
ttcaatcatatttataatatcttatttcttaaactggttggtgttgcttatactctgtaacttttgttaaatatttcataattttttaacaagatgcaggaaagcttggtcaaatgctacagatgctttaactcgggaactttggctttcagttggttttagtgtcttccctatatattgatgagtgtgtgtgtacatgtgtgttttacaatgagaatttacttataatcagaaaaaggtaagctattttcattgttagtgaaaatttaaatatacatttcatattatatgttacctttcccttcataatattcttagaaatctttctcaagcccctaatgttgcacgaagtcaaatgctttgtaaggcacagttttgacactatcttaaaaaatatcttatctcataaatgcaggtttttcttctgtgaattttaggaattaaataattatttttcccccatggtcattttagacagatgtggcctacgacaaacctgtagactgccaaatttctagtgcttatatacagggcagagttgggtagagcagatgtttaaggaattatggtatcatatgttacagtaatggtactgtcatttaactagcatttatcgtatactattttcttttcgccactacctgcttccctcactcttaaattatttaaatgagaaaccttaagattatgcaggggagtttttaaaaatacctaggctacatctccagagtttgtagtttaattggtctgggggtgggccccacatgccaacaagcttcttaaaattcacatgtaattcaaatgtacaaccagggcggagaatcactagttctgaaaatacagtcagtagactagcagcatcaatatcatctgacaatatgctagaaatgtgcattctttcacttgcttcccagacctgtaggatcagaaattcagggggattggaccctgtagtctgtgttttattggcctgggtttgagaaccactggtctctaatgctcctcaaacttgacta

SEQ ID NO: 94047 - DNA, 1050 bp, Homo sapiens
tcctttctattcccctgtgaggtatttattattatccccactttttaaaatttatttatttatttattttattttattttattttattttttttgagatggggtctcgctgtcacccaggctggagtacagtggtgcgaactcggctcactgcaagctctccctccggggttcatgccattctcttgcctcagcatcccaagtagctgggactacaggcgcctgccaccacgcctggctaatttatttttttgtattttttagtagagacgaggtttcaccatgttaaccaggatggtctcgatctcctgacctcatgatccacccacctcggcctcccaaagtgctgggattacaggcgtgagccaccgcacccagcctatccccacttctaaaataggaaactgaggcttaaaaaggccacatagccagtaaatgtgcacataatatttgtgtacctaatttctatgataaaagggtactttcatttataaaaaaataaaatccagaatttctcaagttgctattgagaaggtatctcccaatagtgtgttggaaaaaatatttagaccatattttctgagaggtaacaatccctcaggcctcccgctgctgaagatactgctgtttcttcttaaccactggcccatgtgtgtaaataattgtcacagtattataggtgagacagaattacaacattccaacaagattctatgaaaatagaagataataaaatggagaatcattctatgattctaattactctaatttcaaagtctagctgtgtcatcagtgtgtgattcattttaagtatctgtgtcttccttctgtgtcttagctcacttctatgtggcaatgaccatgtttaatatatacctagaaactttgagtctttaaaatctggtcctggagtcaaatattcaaagagcttggagtctctactcttggttttccagagtccactttcttttcaattcctatttctcattgggagtctttctttttcctggtgattgatgccaggggtgactttttacgttatgtgagatct

SEQ ID NO: 94048 - DNA, 1632 bp, Homo sapiens
tacaggagaggctatgtgcattctgaatattttgaagttggcatcatgggagagtattcattgtattaatctataaaccatctattgttaccagtgacagagaaagcaactgatttctctgattgaattcattatggatttaagtctgtgtatttcatatgtgaaaaaaacaaacactgcataatcattttatattaatgaaatattagatgctgtcagtatcattgagatatgaagagaacagtttgccctgttatttttttttttctggtaatgcctggtttcattcatttattttctttgaccaggcaggaagttaggaaagtgatattcccctttttctgtcttctcagtatcgtcagtgaagcaggagcatcaatctacagtgtcagccctgaagctaacaaagagatgccagggctggaccctaatttgagaagtgcaggtaagaaactatggaccatcacaaaaacatgtgattttgatattttgggcagcatgtgtggcatgctaaatattctaaatatcaaagaaaatttaaaagttatactacatgcataagaattggcatattagaaagaaagtggttaattggactaataattgaaattatggaaaagaagaggaagaatattgtactttttaaaagaacactactgttctatagtggaaagctaacccacaaagtctttagcaaaattaaatgctagagagttcagtaataaaaataataggccgggtgcggtggctcaaacctgtaatcccagcactttgggaggctgaggcaggtggatcacgaggtcaggagttcaagaccagcctggccaagatggtgaaactccgtctctactaaaaatacaaaaattagttgggcatggtggcaggtgcctgtaatcccagctactcgggaggctgagacagggaattgcttgaacccaggaggcagaggttctagtgagccaagattgtgccactgcactccagcctgggtgacagagcaagactctctcaaataataatactagtaataataatattaataataaaagatcctaagatcttttattattgttacaaaatattattgaagctttttattggcaaaaagtaatacagtaacataaaaatatttgtaatacaaatttatgaaagtacacagactttcagtttattgccaaatatttgtcaaatgaccagtctctcatcttgctaatagagttgtcatttgatcatgttttgcttaaaacagcttgctttgattttagttgtatttgattgctttgatttctataatgtggaagagtcaaaatcttgtgtgtaaagaaattaagatactatgatgcatctaatgaaagcagttggtatcataagcaatatgttagatcaggtcagtgcatttttctgtataataagtgaatatttagaccacttggttagtaatggaccttttatttaattttttccttaaatattctcatcagatttcatcggctgttcttgaaatctatacctggagagatatatatgaaatttttacagtaatctaaagctaaaagcgttcttacgtccaaaagagcttgtagtttccctttagttgtttcatgacataattccctctctaaaatgatcatc

SEQ ID NO: 94049 - DNA, 1023 bp, Homo sapiens
ttggagaaaatgcagtattaccttttaattttgaagctggtctctgaagttatggaacgtatttgactcctgtatgtcctcaagttctgctttagataagtaaacaattcactttaccttttgatcaaagaaaaaggcaaaggaagagagatacgagttcttctagatcttttgtttgagaaagtagctcttccttagaaaaatatgttgcgttggttgtttggcacaaaaatatgagttctcattttattgagagtttgagaaactatttaagggttacctggttgtgctggttaagggctcagacttggaaatcaagcaggttagggtccaaatctaactcagttcctttccagctatatgatcttgggcatactacttatccccaaaatggaacctactccattaaatgagataatgtctgtaaagtgtttttttgctttgtgtataatatgcactcagctgttattgtatcatgatgatggtgatgatgaaaaacaggataagcagccttgcttttcagttgtagtgtttatttttttctatttaaatttaagagagtagatcttggttgcagaaagagaagttgtcacattccccagaataatcttctcaagttgtggtggcttacatttgtcataaaaatttattcaagaattctccaaagatggggatagcaaactaacttttccacattttacttctcaatgttcagttgttacagtggggcagtacgttacatgtcatccattaaatttgcctcatgcaattgaagtaaatactgaggagcagagaaagggagaggttgctaagagtgaattaaaaagtgagccctaacatgtttctggttttgaatattgacacctacatggtcacatggtatagagccacatgtattgtgtatacttagagtagatgatgtttctttgcctgtcatgtcataaaggagaactctaatgtaaaaatttttcataagctgtacaaaatggcaatccccatacaaatgtcagctgtaagacagta

SEQ ID NO: 94050 - DNA, 1010 bp, Homo sapiens
atttttgtactgggcgtagtggctcacgcctgtgatcccagccctttgggaggctgaggcaggtggatcacccgaggttgggagttctgatcagcctgaccaacacggcaaaaccccgtctctattaaaaatacaaaaattagctgggcatgatggtgggcacctataatcctagctactcgggaggctgaggcaggagaatctcttgaacctgggaggcggaggtaatagtgagccgagattgcgccattgcattccagcctgggcgacagagtgagactctgtctcaaaaaaataaattaattaaataaagcagcatttttaactcaatagggtttttgttaaaaaatttgaaagtgaatgcgttgatattgtaggtactttacttgctttttactttataagtgtgtggtttgtttccttaaaataaaaatcctaaaaatagtgcttaaataaaatatcttaaattatcaatttaattatagagaattggcatattaacttttagatctggtaaaatgtaaattcaatgctagcttctgaagtgtactttcttatatctaaagcttgaaatactaatgtattggtttaggtgaaggtctaaactatagcaatttgaagggccttctgagtactgtaataatctataaataattagttgaattacaactgtggcagttaaaatccccccagatgataaattctgctcagtcatctgcttcatggcaaaatacataaaataatcaaattgctaggattttgaggctaatttgtttgtactgctgagaaatttgttttgtgaaatgtaatattaaatcgttagatatatgaattttatataaagttcatttttgctttcttcaaaatatattagagataattggaataatttcccaatagtttattggaaaatttcccatcaaacagaaagtgttttcgtaaatttagtgtacttttggcaagtgtctattcttgaactcttaaataggaatgaaaaagggagggtatta

SEQ ID NO: 94051 - DNA, 1043 bp, Homo sapiens
agatttttgaggatgggcttctgttacgatcatatgtcatacatatgtacacactggtgaccatcaaatctaaaagggccaggcgtaagacctcctgtttaaggtccttgccgcttcctcttcccttttccccctcgagccatctaaatgtcctaagtctagaggactgattagtaataaaggacagaaaaagtgtttacttgataagtgataagtttttgccttctagtaattgatagctacctgtttaaggaaggaaattggtgaaaaaggaaggcttaaaaaactattattattttgcatattattaccttttaatattatggttaaattataattggctgtatgctttgagtaaactatttcctctgtttctcgtatgttgatctttatcttgaatctctggtctgattacatcacagagatgatgatagtctaatttggtgtaatttgggaaagaagctccaatgactctaatctttttgaattgcaaaaaacataaagaatttggatgaaaaaatgccctaaaagtcatttttttgggaaccagactgtgttgaaagtttgtgggtcagatatgaagctacatcctctggcatcactttggaaagctttttctcaagtggctttaagtggcacgtggaaaagggagaatgaaggattggccaacaggcttgtaacttatagggtaatttgtgaagactagtagataatttatgaagactagtagatatgtaaaatccatcttgagcaattagaaggcaatgaggactaatggcttttatgttatcaataagatccatgaattggaacataaatatttgaaaatattttatagtaaaaacttggtagttcttcagtaaagaaagcttcttgcttagggctttatataactcaagactgacttgagttatataaagaaggattcttgttgcaaatttaaactttctttatcttttaactggattctgcctattataacagtttttccatagaattacagaatatatgtcttaggttatagaaatagcattcatataagc

SEQ ID NO: 94052 - DNA, 1598 bp, Homo sapiens
ggaatatataccattgaatttttgccgataacattgtttctcgccacagttaaaattgaaactttgatcactctagtagccacaggtcatttgatgatttttgccaaaccgtaaacttaggcaacttaagtacctgcctcatgtaaacggtcttatatgtgagcatgtttttcctgttatttgtatttctattccttgacataaagttttagaactttttgggggaagttcatgaacactcatagctctttctggtagatgaacatgactcttacttctgtggataaattataaatgtactataaaaattcatctggagtggcaagtgaaaaagatacagtatgatttgctgccaagaacatcttattacatctgcatatttatgctgctaatgaacggatactgctaacaagtcagtttccgaagatacgcagctttggcgaaacaacaaagtgaacaggaaatgtttttcttagaggattttatttgctcatccaaagcaatagaaaaacgttaaatgattggtggtagattttattttcctggagcaccttgtacagcctgcaattcagtcggttattgtgctaagggatgggtgcactgaccttgtcaaaagagggagcaaggatttcgtttgactttggtttgttggttcgcaatactcatggatatctggatctctaaccttggctttttataactataatcctaggcagtcattcactatgaaaacacttgtgcttctctttttttctttgtatttgttcatttgaaaagcctttcaaaaaggagttgcagcctgcatgtgattatagctatcagtagcacttaacctaactgctgagatgaaacttttctttttggaacctgctaattttacatatcaatagaaaaaaaatttcttgtactgttaaaaggcccgactttactaattggtagctactctttggattgagctagaatccttagggacagaatttgatagaataatttttgacattttaatttgacaagaaacaattcagggaaacgattttagtcttgggcctgaagtggagtcttctcttgctgtttgtgatacttagtgtggggaatgcctttgaaacagcactttataaaccctgtgatccatttaatgtgatagttcaagctgcttggctgtttttttcataggagcctcacctaaaatagtctaacacagtggaaagatttttctgtattttagagggtaatgcagtaaattctaatctttgtgagaaaaacatagctttccagaaggacaataaatttaggtgtaaaatgtgtgaattgtatgctcctttatcctttaattgtattatagtctacatctttctaactcaaaaagtactctttgttttaaaaatatcccttcccacacttgaaaatggtagaataagactaattttagttacaggttctttgtgtgtttgtgtgtatatctctatataacagaaaacttacatttttaaataatgaagttaaagctttaaacaagtagagtatatacacacataaacatgcgtgctaatttgtttctgaaaaattatcttagaaatctgtgtttctccaagtatttg

SEQ ID NO: 94053 - DNA, 1104 bp, Homo sapiens
tgaactggaaatttgtgaaaaatcaggttataggaaataatacacttaattgtaagaatttcaaatgtactttttcttagagatgaataaaagtagattttagtaaattctttaattcagacttttcgtaatcatatcccatggctttactgctatttatcaagtatttttatacctattcttatttatttcttactttaaccccgtggttgtaagtgttgttcacagttgataggtgaggaaactgaactgaaaactgataaactaatatgatgaaagagtttggacttaagtccaaatcatctgattctaaatctcaaagtcctagcacaccatgcagcctttccacctctccattgttttaatatggtagctattaccagaaagtttgaattgagagaataaacttgtctttagcatcctttaatttttaccttttatctttggttgaggagacaatagcaaaaacaaacaaacaaaaaaaaactgttttgaacaagaccgaatttacattcagattaatgaattttcatctttttttcagcattaaagaattttcgtaaattatacatgatacggtatttgagtcagaataccctcaaagatctgctctaactcctcattttcttgaagggacctgagggctcaatgatcaagccagccagagtttgttctttataggtcctaaactctgccaaatagtttttattaaggttgtgaaatataacaccttttgaatttttcatcttcttcaacttttatgcactttagaattcagcatgaagagaatttgtctcagtgctaggctgaaacgaagtattttattaactggtcagttgttttttttttttccttaaggggcattctggagaagaggaactttcagcttgtaatctagcccttgttacataactagactactagactacataccatatattctcattataactggacatcttttttgagcctgaaatctcagcagatggcaagaaatagttagggattacgtttgggctaacacagtttcgtatgatgaagaatgtggggaaagatctgtccagctctctggcatgctatcctatggatatgttcttgctggag

SEQ ID NO: 94054 - DNA, 1034 bp, Homo sapiens
aggaatatgtgaattaaataagatatctacgctgtactgaatatagtatatagctcacaatatgggttaagaatatgggttcttgagtaagactgtctgtgcttagatcccagctctgccacctactagttgtataacctttaacaaattacccaacctctctaccttcgtttcttcagctactatatgggataataataggtttgctgtgatagttaaagaaattaatacacatgtaggataacagtgtctgaccatagaaactgcaaatgttaacactcagtagctaataataaatctcctttaattctgaaatggttccacatgtatataggatataatttcttctactctctcttgttcccatgttctcatggaatttgctgttcttgagcttgaaacagtattaatttccaagtgtcttagtcatattgctcagtgttatgttttcttatgaaatacagaaattccttttaaaattaaaaagtgacatccagtgattaaaagactgaataagaatatttgatcaagaatatggtctgttacagctgttcatagtctaagatagacttggagtttttgtttgaaaatgctttgaaaattgttagtgccattaaatttgtaaggtataaggaagttgttagtaattttaaaagtggtttaagtgcaaattggaacactttcaaaagtatttattccagagagactgggatgaaaataggtgtttcctctggaaatcctgactgagcctattcattgagttctgtaatgatagagccagaagaactcagacagtttcagtaccctccccgccgccatcccatatgattctggctgagaaggatccagaagtgtgacacgtttgttttcattctagccatgtattatgtaggcatataagaaaattatttttctgccaaattttagtttaaatgttagctaaatgacttgtgttggaatgcactcagtagcactttaggagttaaacgcagtggtaaagcagtcgtttttttcccttttcatagataagttgt

SEQ ID NO: 94055 - DNA, 1031 bp, Homo sapiens
tgccatataccatatatggttcagcccctgtatttggaagagtgacctctgggctttagagactgatactaggaactgggtagtagaaaaaaggttggaagtgctatacctttctattcatgccacatttcctttcaacctctgtcctgctccccttcacagttaatagcatcttctttcatatataggatgtgtgtctttaataatttgatatgacccatcatagtcatagacaggagacagtgaagcatgatattgcttagaaagttaagatcttattttgtaagcactttaactttcctgaggtggacagttgtggagtcctttgattgacttttgattcatgctgctgctgttgcttttttcttttttaaatattctgaggttttgtgtatcctacgtaatttaggatcagcattgttatagcacatgaattggccttagtgttgtgttgtcattcaaatatattaattacaggctagtccaaagcttgattaataagagtccacctagtcaaggatcgtaagatattacttagtgataagcaacttgagcttgcaaatgagtcatcaggttagcagttaatgggtatatttttgactgattcttctgtttactcaattagtccatttacctgaaattcccactaccttttgaagcatttttctttttcctttcaacataatggttttcctcaatctaggactacataagaagtttggtaggccactcttctaattcctggtttgaatttagatagttccattgtttaaaccatgctgctgccatcattgccattgtcatattctacttcctattttaagttatgtccagcaatatattaggaatatttctggctcagaattcagattttggtatcaccaaaaatttgagggatacagatgcaaagaagcctttgtactgtctttcataaggagaaatgctttgaggaagtctttctattcttgtatgctgtaatttctagcatttaatgatttccttgtcttcaaggttctaggcttaatttgagt

SEQ ID NO: 94056 - DNA, 1061 bp, Homo sapiens
gaattccctggtatttaacactgtctgtcaaatgtttcagctggtttgcatccttttacaagctattgcttgctgcatgaaaagaaatttaaagcagttgttttaagtcttggggagggtggttgtgatggtgctgatggtgctgatggtggtgatggcagcggcatggcaaaagttagccagagaagagagtaaatgagaagttaagaacatgttctttttcagctgtgcccctcccaagattgtttttgtgtttttctttgggttggagagtctttaatacagtgcttatgattaagaggaggaggcactcatcttggttatcagaagattgaagagggtggccaaagaaaagtcatcaaactttagtgaaagaaagaataacaggcagtgtcagtatcttattcagagattgttcaaccagtttaacttccagcctgtttattctttattgagtcatatgagaagaagctgtaaagtgggaaactgagtctgaagaaagaacaaaggaaaaaggactcagagaaggcttgccatatgtattacggaatatttattttcctgtaaacatgttttagaggctgttgtctgttctaggcttaatatatggggtagaacttcttacagctaagttttgaaaccctggttacttctttgtttcataaatattatttggctgtttctcccaacttaagaaaaaaatatttaaaagcattttattttttggattatcaccatgattgtctttggatctattcctatcgtctttactgtagaactttcttaatctgaatagtggaaaatagaaattatggaatgttatagaagatatttacttgccttcaaatatatactttattttcagtttactgatgtaaccttgacctgtagagatctttaaaaatctattgtaataaaaacttttttgtaaatagtatttttaatgtgcgtttttacgtattgaaatgctttaaagtcatatattctcttgacattctgtaatattgttttcacttacctgcttatctttttatttatatacggtgagtatggaaataaat

SEQ ID NO: 94057 - DNA, 1098 bp, Homo sapiens
caaaaaatcagtagacttagctatataacttaagatctatttagctatgtaagttcataatgttatgaagttaatactgttttatatggaggaaaagatgtggttggtgttattaatttctcactagtgcagtattttccgtttcacaagtggaatttgaaatcaggatttttgtatttaaatatcctgtctcctctatatgcagttttctaggaatgataaaaaccataaatcatccttggaacttgggatagcctaaattgttttctggatattaaaactaatatccagattatcatgcctaatgacaagttaaggtgctgtgttatttaaatttctcatttctttctacagtgatggcttgagatgatgtactgtgacattctagaattttgttgccttttctttattgatattcatctccatttcggtgactattatgaacactgggctcttgtttatagtgtttcctttctaggatgtttgtgatataaggtaaattaaaaaataaaactatgttttacagtcaatacaatttatgttcattttgttgaaaggcagaatgtttttaaaaatacatatttaaatagaccatttcagtgaagtatgttgggaaaggagacataaggaatgaataatttggatgtgtgtgtatgtatatgtgtgtgtggttttaaaatactatttggatttgaattcagtttgactgtttttgatcaaaataaaatgttttaccagttttgtaacccatgtgtttttgtgttcgtaagtccaatttaaatatctgcaggagttaccccaccccctcactgtagcccctcttgcagatctttgtttattgacttagattagaaatggcctaaagcccagtgatggtcatttcttgttttaagatttttggttacaaatctgcttttgttgccagatccaataaagattcttgattgtttttgttagttttaagttcttgccaaagatacaatgtattataaccaaaacagatgtcctgtttagacaagtatatttaggctctaacagaacctaaaatgtaaattaaacatgttcagcattaatgtagcaattgatgaactttgggat

SEQ ID NO: 94058 - DNA, 1842 bp, Homo sapiens
catgcagtaagctaagtattgtctcatgaatatttgttttggttacatgtatatatgtgtactgggttgtgatgtgtttcttatggttgatcataaaagtttgaggaacattgctctatgaaattacagttttcagcctttaaaaatgcaaagttaagagagaagattggcccgcaagagtctttactgagaagttagaaagcttttagaaataaaattcagactaccttatacaattgcaaaagatcctctgaagggaagtaaatagaggaatggttctgagaacacattgggatatgtaagctggacaaatgtactcttccagtaaaataatgagccatgatccttaccatattccttggaaaaaagttaaattaatggatagaattttcccaatctcaattaaaattcctcatgtcaaagaaaactttacaaatactttagttattaacacatgataaaactttattataatcttatttcaaggcaaaaggtttttaataggccaattcagagatgcactctttgtaacaaaattttatggaaaagagaacataattccagtagagaaaaacacaaataaaaatgtttgggtgattggtttgctagaacaagtcttctacctattagagtatgtcagaaaattgcttaagtattctatcaagtatgtttttttcccctagaagaaaaaaaagaaaggaacctttcttgtatgaattatgtcattcatacaagaaagtttctttgccaaaccaagtttggaacaatttatcttacatttatgtatttttcttaatttgttggtgtctactagtaactagtatctgatttagctcttatatgtttaattatattatataatatgcaaatattctgttgtgttctcagtagagcacattgacttccaggggctttgcaaccagaaaaagattaggaactaaaagtaaattaatttgtatgtattgactgcatactccctgccaggtgtggattttacaaggacatatacaaagctgaaagaagtgtaagtaaccaagaatgtgtgtaagagggaagttactgatctgttaaaaatagttctggaagaccaaaatttaagaactgaatccctccttttcctgcttccccccatgtatagcataaaagtcttttaatgattatctttgggtaaagagagttagaaaagaaatctcattgcttctagataatatcataatcctaatcagtggataaaagagtagacttgttcaacttctcttttgatttgtgagataggatgatttggggggctgaaaagatgaataagtatcaataaaagaaaactaaaacataattaaaataagatattaagagatcttctgtttcttattttatcttctggcccagatgaaacattttctggagttctgggtggacttgtacctaaaattttgataccactattggtaattgttgagaaattgtggaagcttggagatgaactgatgttattttgttgttccagagggaaaataaaataggttgtatagatgactgagtgtaatcttggacaggtaagattattattaaattataaaggaatggttgatgagcacttaggtaggaagggacagtagaaaaataaccactggacatcaccatgcgtttcttacaaataaaacattttggtcttaacctatttcattttctgttaggaaaattagactggtagaaacatctggacctcagcacagctattgatagtctcttaatacccttatggacaaagtggagatttggttatgtggctcccaaaaagatgttgattagctaatgtgttgatgtctggtttgaggtctctag

SEQ ID NO: 94059 - DNA, 1020 bp, Homo sapiens
tgatgggaagaaagctgacttttttgagatagtgtgacagtaaaatacttctctgctgcctcctataccaaatgcagggcagtgtcttttattccatataagtctgtgttttccttatgcaacagtggacaggttgcttgtatatatgagagaataagagaatcatataatagtatttgtgcattctgtacattttctccagctgatttcaaagcatgccttgaaattcagtttgtcattctgtttctgccttgaagctgcagcacagtagtgattggaaatggaactgcctgcagggaaacagaagcttactttgctgacctgataatgaagaattattttgcaccactggatgttgtttactggtaaggctattacatatatctcttttcttggagaagcatgggaactttaaagttgcttttgtgatgaatcctcccttctctttttaagatgtacatcttctttgccctccagaccacctcttggtgttcatgagaactttgcaggataatgtaaagtgtctgactcttggagaaatttgagacaggaatgattagagcaggacagagtccagaaacctcttacagaagcagcacgttagggctcagtttcattggattttctaggctatacattgtgtgagggttctagttaactattgaataataagtagaatgatgtaccaggctagcagctagtagactgtgaataacttagcctttttctcccaaagctttgaagcctatgaatcattacccttcagaactgagagccaaggtaagtattatgaattaaaaagtatttccagtattctttcctcatttatcccttggtcacaaacttttatttcatataggcatacagataacttgtgaatagctttggattagaaagacccaatttctctagtcttgcccctgcatttgtagtagttctgctttctttcaccattgtttccctacttcctctttggatctcaatagtcatgtcttccttttccaaactatagtagaatat

SEQ ID NO: 94060 - DNA, 1859 bp, Homo sapiens
tattttctattagcctttactattttaattttttaagtttagattttcatttctgaaataattttttctttcatctcgaattcattcccagtttatctcatctaatttctgagattttctaattttgacttatgttattcttttatttatttaacttttactgagtcagggtcttgctcttttacccaggctggagcacagtggcgtgatctcagctcactgcagcctctgcttcctgtgctcaaactatcctcccacctcagcctcccgagtagctgggaccataggcacgcaccaccatgcctgccttttttttttttttttttttgtatttttagtagagacggagtttcgtcatgttgcccaggctggtcttgaaatcctgagctcaagctatgtgcctgccttggccttccaaagtgctgggattaccagcatgagccagaattaacgttactcttattttctgtaatgtttttttttaagaagcttgttctcatacattaggcacatctttctgtaaggacattatattagtcttttaaaaatttttttgcttaaaaaaataatcattctatatagaatttgactatcatgcatttcttttgtttagttttacatacgttagtttgaacttttagtagaagctgggtcaggcaagttgttctcactgtatatctctagaacttgctcttctgttttttccaaatcattaaaaaaaaaaactctgtgtggattgagagatagtttatagtttctggaatctgcttctctgttgctttcctttattttatctgggctttctttttcctttgctgttgctatctttactttgctcagtttgaatgtgattaccaattgtttctcctcagtgtggaatttttgtctttaaaggtatcttttactagttagtttcaagagttcatagggatcagtgttttccaatcctttcagaagtactggatcccctttgtgctgaatctctctcagtttcagctcctgttctcaaactgactgttgagatttccagggaagtagcctttgacatttttgggattctcctgttctcagttccatcatatattccactgtttctttctgcttccttccatgcagatgctgatgcataggtgtcttgtcagtacattgttcccacctgcttttttggagggtgggggtttgtggggatattttatctatgttctagatatagtcgtgactttttgtttttgttatcctagttgtctttttatgctgttcattttacagccagtgggaaatatattttatcagtgttttttttttttgcatctgttcatatatcatgtggcttttgtcctttactatgttgctgtgattaattatattactagaattttttaaaatgtcaagtcacactttccttagattaatggaacttggttatgatactttcttttgggtgtgttgttagatcagttttcagttattgtattgcttataggataattgttctaaaaatgtcacaaacacatctatattcttaagctgttttggtaagatatttctaattatctgttttcataatttaatataaagttgtttataatggtagatatcttttaaacctgtgttcaatctctagttatatcttctttttattcctaatataattcctgtatttgtatcttctatcctttcttttacttgattggtattgctaaaagtatgtttttctcttaagtgatttgtaactacactttgttgatcttttctgttgcatttttttctgttaatttttgcttttaacttcaacattttctatcttctgctttctttgggttattttgctgttcttttcctaacttgtaagttagtct

SEQ ID NO: 94061 - DNA, 1017 bp, Homo sapiens
gggacacaattcagtctgtagcagtggtgtaataattttttggtgactttcttgtatcttaagattttggccattattaataatgctttggagaccctttactgaagaggaaattttttccttgttttatatctgaccatagatagttactaggatttttaaaataaaaactccagatgtcatagtaataattttcagataccacagcctttcctcacagattatgttactttggcttcaataaaggttttccccgcttctgtattccatctcccttctttttgggagcctttttatggccttatttattgttgcatcagttttagtgtgggcttttctgttttgcaggtggagaccacgtagctttgcaaggccagagttaatgaagatcttatataattcactgaatgattcctttaaacgccttatttatcctcttctctgtagagaattcaggtatatatcttgtcttgtttaattttgtgtactgattattgttatatgatactagtaccattacagtgtgtagctaatgtttgttgattgattaaccaatcgaaagaatttagtcagcatcacaaagtgttaaagttaaggcttgatttcaatctgtagatgcattcacatgcatagatcataaaaatagttcttaattatgatatgtttttcaaatcttgaccacttaatgtgtaccccttgaaatcctgcaatactagtcttgcagctggaggcagtttttagaggtaagagagccaaagaaagcataaggaaatcagtagggtacatgatgaatcaattactttgtttttaactccaaatgggagttatttggatgaaaaattatcagcaatgataaatattaggagattattaaaatggcaatgtgaacggactaatagaaggactaagtaatatagatgaaaactgcaaaagaggtgaggtgcagaattgttttcaggacagaagatggaaagaaaagaaatgtagggaggcaaaactcctctctcttgcttctct

SEQ ID NO: 94062 - DNA, 1432 bp, Homo sapiens
acttatccattcaagttatgtgctagattttggagattcccctgtaaattagacagatatactgcttatccatgatgacagcgtagtttaatgagaacaacactgggaaaatcattacgagtatgttgagattatgaaggaaaagtgtagtaagaagaagaaaagtgcttgtaacagagccctgagtagtgtggacttgacagctaggtaggttggagatagaaggagaaggaagagaagtgacatggaatgaagattgagatgttgacacaggttagatcatacatagctttcaggtatgctaaagatttttttcttttaaggatggtgggaagccaataaggattttaaatacaggagtgtgatgatcagattgcattttaagatcactcaggccacagtgtagataattatttggaaggaatcaagagtagatatggcacaagagattatggtagcttagactagggtggtagcaatagggaataagtagatagatttgggcaatatttaggaggtagacaggggcaggacaaggtatctgattaaatggtgggtggattggttagggagaggtgaagtgaagcatgaaatttgtgtggcggctgggcgtggtggctcacgcctgtaatcccagcactttgggagaccaaggtgagaggatcacctgagatcaggagttcaagactttgagaccaacctgaccaacatggcgaaaccctgtctctacacaaaatacaaaaattaaccaggcatggtggtgcatgcgtgtaaccccagctacttgggaggctgaggcaggagaattgcttgaacccaggaggtggaggttgcagtgagccgagattgcgccattgcactccagcctgggtgacaagagtgaaactccatctcaaaaaaaaaaaaaaaaaaaaaaataattgtgtggcttgaacaataaggtagatgatatagttactatcacactataaatatattaagaactatgtaatagggcaaatagtgatttaaatggcagtcttgtcattacataagttaattagcataacaaggaataatttaaagctaatgtattagtattaaaactaatatttaggtccagattcagcaaatgaacaattcctcatttggaattgtatgttactagtacaagataagtatgaagaggatttctaagctttttagatgctgaaatagttgctgtgtttgtgagaacctcagtaatttaagtttctgcatttgctctctaaataaaaacgtatctaaggaaattttttttaaaaaattaagaaaacttctttttagagacattatctcactatgttgctcaggctggtctcaaactcctggatttaaacaatccttctgcctcagccttcaaattagctgggactgcaggcatgcaccaccacacctggcttcagaacttgtc

SEQ ID NO: 94063 - DNA, 1226 bp, Homo sapiens
gaagtagtttttctgtcttattttgtccaccttttatgttgatttaattttattgcaactttggaaaaacattaatgcttttattctgttaaaacctagccttctaatttctgcttgaaaatattttattgggctctgcattttaactagtgtgtgtagcaaatgtggcattctgagttagtgactgaatttaagattatgattgacacaggcttctgggtgtgacagtattcaggcctgggaaagcagagcattttggaaatgtcagttttgaaaaacagcactgctgttttacgaactttttagtttatcatgtacaggccggagtgatgatatgctaggttacaaaaacagcttcccaattcctatagtgctgagacctcatgtcctaaatctgaaccttacttttcagcctttatgtagataaccccagcacagtatcacagaacacagaaatgaatgcaaatgatgaaagacagtgtggtgaaggaaaattactgtggaactctctccaagtactgtgggaatagccgttaatagctgcttagtaaattcttccagctgcatctttttttctttctttttcaaattggtccttagtgtgatcttttctaccacatgaatttgtaactcagtcttcacattctctcatgggactttctgttccttatctttattggtgtgtctttttactgacgtgcaatttcctgtgtcttaactacctatttcctgttcaatgtcaccatctgcagtaattccgctttaacccactactcactttcaatttcagtttctgtcccaagctttattatttctgttaccttattcccttctccaccatgggtcttcctgtgtgtcaggattttttgtaagtttgacgtattacattactaggtatggtgaaaaagagcaaaaaacctccaataatgtattgtgatattatggtatacttatgtaaatcggaattaaataactctcctctatattgttgtactctacttaatttattagagaaaatttcttgtatgaagaacttctgtttactaagctggcacagcctatagcaaatacggaagtctctgctgagctcaaactgaagtttattttgtattcacaatttatttctttatagatagttctgtgcagtattattgaatatattgttttatgtaagcttacttttttttttttttcttagacagtatcttgctctttcacccaggctg

SEQ ID NO: 94064 - DNA, 2139 bp, Homo sapiens
tgacgagaggcaggcacccttgttccaacttttattgtaattaatccatgtagaagtgcagactggtgcagtggctcacgcctgtaatcccaacactttgggaggctgaggggggcagatcacttgaggtcacgagttcgagaccaggctggccaacacagtgaaagcccgtcactactaaaaatacaaaaattagctgggtgtggtggtgtgtgcctgtaatccctgttacttgggaggctgaggcaggagaatcacttgaacccaggaggcagaggttgcagtgagccaagatcgcaccactgcactccaacctggaagacagtgagactccatctcagaaaaagaaaaagaagtggacctgtacccatgttgtttaaaggtcaactgtaaacataattacttcagtaggtaacatagctatcctaacacaaccaaactagatattttctatttattaattatgccataacaaatatcttcctgtcctctttggcttttgtaccttattacttattaaaactttacttacaggaaaatatacatatgatatgcagtgcttgtgtaattcaggtttagtgcaaaaaacgtttcatgcaaatagaatgataaagacaaaagaaatgaaacaaagcagtgcaaatgatctctctcagtgtaagttgatatcagaaagaccttgatttacaagattcattgctataaattagcaaattagaaatgcttaaagagaacttaatgctcatctgtagacaatttaactgtgaagaggaacaactgcatgaaaactcttgttttgtgcttttgagatttgtgaaattcaaatgggtcgttgaaaatgtgaaaaaatgccccataatccaaaatagaaattgcttctaaaggataattttttaaacaaatggagtagtgtcccttgggttttgactctattaatatatatttcccataacatctttagtatttgtaatcacttcataaaggaggtactgttatgattccatttttataggaaactgaggtacagaggagtcaagtaggttgcccagtgtctcacaactggcaaatggtagaaccaggattcgacaaggcagctggctccagagatgcatttttaccactgggcagtatattatgtattatgtctgtattattgcttttggagacttgtttttgttacaaagggaagctagtatactgctgcaatatctttctgtcttaagactgtcaacttaaggttttattttgactggaattaatttactgtgatttagttatagaatttaaaaccaatcgtatactttttgtttttgttttcctttttacccttctcctaaagggctttcaacgcttcaggatattgaaataggagtgcagcatattttagcagatatgattgctaaagacaaagacacgcttgacttcattcggaacttgtgagtatctcttttatggagttttctgctttatggactcatgctgttaagggtcacacggttagtgctaataccaatgttcattaaaaactttgttttcagacttttttttaaagtagcaaaactctttgttcaaacaacagagcccaaatatataaaacagataaaagtaaagttgttttaattgaattctggacagggagcctggaactctgcctactcaccctccttacactgaggcatctcagtggaggggcctgatgagtttaaaaaccattgccttacacaatatatacgaagagagattcatgtcctttagagtggcattgctttttaaacatgttgattgtgatgtatgcttattttatagtatctcgtttctggtgtttaccagtgattggctttacttgagaatgtgtaatatcagatatgaataaaagtactgacctccaaatgatttttagctgttgaggagagcagcttatctatggcatcacagtcccaatttatcagacattaaagatctttgacctagagccttcttgggcttatggattttatgcatcattaaaaaaacacattaattaaaaaccctatttttgtattattttgttctttttctgctgtgtatcagaagacaggtttctgctagaggtttgttcttcctctctctccctccacatatctagctgtttgagctgtg

SEQ ID NO: 94065 - DNA, 3508 bp, Homo sapiens
gactttgcagtccaagcaatgagtttttaagatgagtgaaaccaagcaactaatttagcatatagaaaaatataaagaataagataaagcacataccatcttcatacagtaaagcattttcaaattagttttaattcatctctgaaggaagaggaaaagattgagaaaaggatttctttagcattctcagcatgtcctctaattttgtaacctagttttaacttttgtttttttaaaacataatcatatgttttctgtctttattttctagtctgctccatataaaactggaagcaaagggactaaagcccagagagcaagacagttgggcttagaaggagcagccagggcactgcttgagaaaccaggggagctcagtctgctatcgtacattaggcctgacgttaaaggtactggctttatttacagagatcaactttgtttctttttttttttttttaatttaaaaacgtatgttaaaaaactgttttgttaagtactgattatacaaaagaatattacagcgtatgtagaataattgaaataaatcctgacatacctattgagtagccattcagcttttctcttttgatgaagtgcctgttctagtcttttgcccgtttttctattgtattgttctttttaaaattattattttaaaataatttttgtcatttatatgtgttgcaaatcttttttcccagtttgtaacttgtcttttcactttctttatggcatcccttgataaataggtattagttgagttttattatagttaatcatcttttaagataatagctgtattttctttttaaagaaattccttcatatcccaagtttataaagattctcctatattgtctgttacagcttttatttctgaaaatttgtttacttgcaaaagtcataaatactctttaaaaatgtcaagagttttgacatccaggaagtgtaaagtgaagctccactctcacacttctactgtagaagtaaagtgtatttttctgaaatttccctccaagtgtatcttcctgttttgtgtgtgtgcatgcacaacagagaataagagagggaagaagtaagggagacatatttctaagaaaaactcaagggaaatgacagttgataaatgtcaagatgcattggttttattgtaaaaatgagtcttagagtgacaactttggttaagagtggctttttctcaggaattcgctgttaggattgagtggggaaattgatgttttggtggtctctactctcaaaaaattatttttttaatattaaaaaattatatagttaacatgtgcaacatgatgttttgatatacatatattaatacatagtgaagtgagtattatagtcaaactattctatacatgataatcaagcaaattaacatattcatcatctcacatagttaccttcttttgtgttaagagcacctaaaatctgtcttagcaaattcacagtatacattacgatattattaactgtagcccccgtgttgtatgttagaactctagtctttttcagcctatgtagctacaactttgtaccctttgacctacgtctttccaccccgcccccacctccagtttcttttgtccttctgtggatcccataggctgggacatgtaaatgtctgtagggggcagtctctgataacaaaatccacagtatgtactaatctgtagaaaattatagcatactatagcctgtttttattttacataacccagcaaatgtgaatttgtgatttaaaaaactgagtgggtgtgtctgtaaaatccaaatatctgttcatacccaaacacacttaatcttaatgtttggagaagggcaataatgaaaaagtaaaaaaggattatgtgaatttagagatgggttgaaatgagtaaaattcaagtttgtttaatttttaatgtgtatttatagttagatttccaaatggttgcaacacttaatattttaataatagctaagactatagctaagcattaaggttaaccacagtgggaaactgtctgtgcccagtcatcatatgttttattaaaatggaatgttgaaactttcagaatgttagatgcacaaaggcttatcgactgcttttatttttatttttctccttgtggttgattttctttccttctacttctcactacctttggtaccaaggtctcttgagttctctcatacactgagttcctactgggtaggtttttgataaccatatctctttggattgtcctacatggtgatgctgctggaatatatgacaatggacacttggtgatacttcttataatgtggatagttcagggtctagcacagttacagtagtactgtactagcagacgtgtgaggacttttgtttgctttactccctctttcttttaccctgatcaaaaatgtagaattattattagtaagtctatataagctaggtactgcttttttttttaagtttgataggaatgttttctctttctctttgtctcctcctcctttatgttacacacaatcatgatcatccttaattttacttgtttttcgaaagaagtttcataattcctatcattcctgaaagaaatatttaagaaaccagatagttcagttttttttttccccagtagaagacacttcttgcttgcttgccacagaccagtaagcatttggtctgaatcataaagctatactgtgccacaaatggactatgtcctgggagatccaaaatactactttcgtgtccaagaggaagttctgtcatacataagaagaggtagcttaagtgcggagaaagtgaaaagaaatgttggcctttcggtttttgtttacaggtgtggaggtttgaagattctgtagctgggaagatttcattgtaaggcaaaggatatgattttctggttctgtgtaccatatttcctcctgatttaactgaggtgctaaacttttggaacatctgttatcttggctgtattaaacccacaagatctattccctttgattgggaaaggagctttttcaaaacacagaagactttccttttaaattatttttctccctggttggactgagaaggggaatgtaatttgaaagagtgtcccaaatgattctgataatttctatctcccattgagaaccactgctctagaagtagctcaaggcatttccctagtggcagttttttaaagttgaatgagtatcagagttatctgggacactccgtgaagtacttcatttccacagtctagccattcatagttttaacaagtacctggtatgattttatttttgggtccttggactacactttacaacatttctctagcgctctagcacaattttaattagattcattaattacataaagtttcaaattatattcccctcttatgatgggggattttcaaaggccctttcttattgcaaagtctataatttcttctgtcctctgcttccattaatggttctccctgtaggttccatctttactattgagttatcaccc

SEQ ID NO: 94066 - DNA, 2113 bp, Homo sapiens
ggccaaatctggaaaaatttgaacattaagataaatgatagcaatggattgtagcactaagtaaaataaaaaaccattaaatctatagtgatataaataaatcagtgaataaattcaaagtttaatgaggaatgggataattatatagtctcaaagtacctctccacaaaatacttataattacaagaggaataaagagtacctgtgtcttggagaaacccacagatactaccttaatcaaatgatcaaagttaattagtaatgagacaaatcaaaatcatttgtcacctaataacgtgtagtaagaacacagtatgacttctatgatatttctgccaaagatgctccatcggtatttaattgtgaggaaacatcagagaaacccaagctgcaggacattctacaaaataactgtccagtagcgttcaaaaacatcaaggccttatcaaggagaagaaaatcaaggagagactaaaatattgttttagcttgaaggagactgtagttgcatgccaactacatgtaacccataattcttaactgaatccactataaaggatattattgggacagttggtaaaacctgaatgagctctgcattagatggtagtaatatattagtgttaattacctgataatgatggttattttgtggttatgtagaagatttgtatttgtaggaaatcacactaaagtgttggagtgcagggatgttaacttattctcaaacagttcagagacaataaagttccttttactttacctgcaacttttctgtaagtttgaggtagctttgaaaagaaagttttgacatacagttttggtatattacaaaagtttctcttttcagggctgttgcaaagaaagttcatagtacaatccagaaaattaagaaggaagggaagatgtctgagtgcttgttaaaagccatgctgaattgtaaaacttttgaagaactagaacacgtggtaaggaatcctttttatcttttaatgtaatacctgaatatattgcaatttgggtcttcttatgattaaagaacaccaagaaataaaaagctaacgtcattagccaccattatttaatgcaacaaaatatttattctttattcaataaatatttatagagtgttttttttgtgctaggcacttgggtttacaaagatgaataaatacatagtctttgtctcaaggaatttccagtcaagtagggaaggacagtagattatacaaacgtgaagcttatcagagagggctgaactagagatccagatgtggatgtcttcagcctgtagttggtacgtgaaaccatgagaatggaagaactcaagaagtgtttgttagcaggtcaggattgaccactggaggttaccaccttttgaagtgtggatggaggatgtgagagcataaggaggtaggaaaaaaatagagaagtatgaggagaatcaggagatgatggtgccctggaacagcagggaagagagttttagatggaggtcatgatcagcagttatgtgtagcagagaagtttggcagaatgaagactgaaaaaaatatatatatttggtaattaggagatcatcatggatttttgtgatatcatttcctgcaaggtatgtgagaagagaagccagatgatggtgggttggagagtgagtggattaagaagtagaagaattggctgggcgcggtggctcaagcctgtaatcccagcactttgggaggccgaggtgggctgatcacgatgtcaggagttcaagaccagcctggccaagatggtgaaaccccgtctctactaaaaatacaaaaattagctgggcgtggtggcgggtgcctgtaatcccagctactcaggtggctgaggcggagaattgcttgaacccgggagtaggaggttgcagtgagctgagatcgtgccactgcactccagcctgggctacagggcaagactccatctcaaaaaaaaaaaaaaaaaaaaaaaaaaagaagtagaagaattgaccggccaggtgcggtggctcacgcctgtaatcccagcactttgggaggccgaggcgggcagatcacgagaccaagagatcaagatcaccctggccaacatggtgaaaccctgt

SEQ ID NO: 94067 - DNA, 1221 bp, Homo sapiens
aaattattataaataatattttctagaggcatgtatatgttatgataaatttccagtagtagaattgctgctgggccaaagtttgtttatgcattgtaaattttcatagatattgccaaattgctcactagcaatgactaaaaatggctttcctttgctctcatgctgacaaagtgagttaccaactccttgctttgctaccaatatgagagatgaaaagtatatcattgcatcattaaaaagtgccctcattgaacactggaatttgaatgatacagtggtttggattagattttattgaatttgtgaaatggctattttaccattatgattgtcaatggatacatgtattttatatggctttcttttttttaaaaaactatagcaagtagtttctaagtcactggagaacattatttgatactatgttttaaattatacatgatatagatgtttaattttcagcattttaaatcactaagtatctttaatttgcaggttttatctgagagaactaatattgaaccttgggtttgtgccaacatcattcgtctctttaatgatgataacacaattcccttcattatacgttatagaaaagagctcattaataaccttgatgctgattccttgagagaagttcagcaaaccctagaagagctacggtaagaaacctaaaaaagaataagcctagtgtaaggggaaaaggccaatgaggaacagtgagaaagtgaatgacggtatatttgacaatttcaacattttgtttccttgaattattgtaatctggatatagtcctctttatttagcgagtgtatggagtccctctgctggtgtgtttatgcatagcttgagcatgtattagcaaaaaggtcatttgcagtaaaagtgtgtgcctcagagtttgactgtcatcttctttcatagaaaaggttgggcataatggcaaaattaggactgccagcaggaaactcagaaagtacattttattctaactcttttaaccactcacataaatctgtccttttaatttcataaagttcctaagtggagagttctttggcagtatagagtttggtaggaaatatgtatatttccttttcccatcttttttttttttcggagacagagtcttgctctgtcgcctgggctgaagtgcagtggtgcaatctcagctcactacaatctctgtatcccaggctcaggcgactctcctgcct

SEQ ID NO: 94068 - DNA, 1050 bp, Homo sapiens
ggcatataaattgaatttttgaagaggttatatagcttgtggaattttgggcagtttactttttcggccctcagtttttgcatttataaaatgggaacaataaagtacctttctcatatagtttaaatgagtttatattgactgtgtaagagtgtttggaacgtaatagactctatagaggaattagcctaaaacaacagtcaaaataagtacctctgtcttagaagtacaaaaaattctcgagagtgccttttttcccctttactctcattcctatctgccagttaatttttaaaaaatataaaagtaataaatgtgaatcgcttataagtgaaaactatggtagttctttgccctaccccttcccaactctaagacttgttctctgtttttagctcttttagttgtttctttgttgtttgcctaatttttctcaaacacacgttattaaacccccaccccagagtttctgattgagtggcttttgggtgggacccaagaatttgcatttttaacaagttctcagatgatgcttatgctgctggtttggggaccacacattgtaaaccactgctgtagttcatagatctcatcaactcttgaaaagggggttgactcaacaggtgagaccaaacaatgagtggatccattgttgaatggctttgttaccagtggaaggtatccaagttactgatgtcaaatctgtaagggtctgcagcaacctcagtttttgcctcctcctccaaagaattcgactgaggggcataaagcaagagagaccaaggcaaacttcagagtaggagtggaagtttgtttaaaaggctttagaacaggaaagaaaggaaaggaaagtatgctcggaagagacccaagcaggcactgaggtcaagtgtggtgtttaactttgatcctaggactttataggccagcccctttcccgtgattcttcccttagagtgggctgcccgcatgtgcagtgccctccttatgcttgggaggtgagtacatggtgtgtgtttaggaagttgtacatagcccatctgaggcttt

SEQ ID NO: 94069 - DNA, 1030 bp, Homo sapiens
cctagtgttgcccttttatagccacacccacctccccccatcatctctgacccttgccaacctctaatctcttcaggaatgttatataaatgtattcatatagtatgtaactttgagattggctttttttcccactcaacataatttacttgagattcttccaagttattgtgtgtatcaataatttgttcacttttatttgtgagtaatagtcccaggaaattgctttttatcttctaattctcatatgttctctttgtggtttgatagaatagctctgtggctattgctgatactgctttagaagacagaaaaaataaattggatactgtacagactctgaaaacagccaagacaaaacagaaatgtgcagcgcagccacatacagttcgaaggactaaaaagctgaaagttgaagaagaaaccagcaaagccagcaacttagagggtgagagtaatagttcagagacaccatccacaagcactgtgtggggaggtacatgcaagaaggaagagaatgacgatgactttacatttggtcagtccgctttaaagaaaatcaagactgagacatatcctcaggggcagcctgtcaagtttccagcaaatgccaatagtactaaagaggaggtggaaatgaattgggacatggtacaggtatgtgcagcctttttctgtcactttagttgttttgagtgctttctttttgactagcataggggttgtactgtctaagggaagggctgggggttttcaattctctcttcagttttgccagtgatttctggaggctttcctacttgtaactttcttgggtacactgttttgtgttgtagctaatcatcagttcttcagctaagatgtgtggcctctcttggcctttgctatggtgttttagtgaacataaactatatagacagattgtaccaactggttgggcccccacaggttcattgttaagtttttgctttgaacttggactgtattttcctataaaagcagtgtaggtgattaggtcactggctgttca

SEQ ID NO: 94070 - DNA, 1073 bp, Homo sapiens
ctttcattgatttgaataacttaatacaatttaaatgaatttgattagtagttgggaacttatttaagtgcttttcactgttaaaattgaaaagctcacattgactatagtttgacatgacccagtaaattacttaaggtaataaatgattttctatgtcttgaatgaatgtgtgtatgtgtttgtcagttaggtgagaagagaatggagagacagagctgtgatttacagcatactgcggtatttttatactggtccgtcatcaactctgttggttcaattcttagcaataactgttcacagcctgtactcaatcactccattttatattaaacacctcctactttatcattttttcaagaatcttgcatctcttttttacctttgacatttgcttttatttttcctggagattattctgttgatttacttctagatcatctgcctctgaagaagatgacaaggaagatagtgcctgggagccccaaaagaaagttcccagaagccgtaaacagccccctcccaaggaatccaaaccaaagaggatgcctcgggtgaagaagaatgccccacagatcagtgatggctcagaagtcgttgttgttaaggaggagctggtaggtgctacagctggatagagggaactctgtagtgtcttcctgattggtgatgttattttcttattctacagagtaggacaaggcatgtaaatgacaaaaactgccagcaatggcatcccctaccctgggtcttaatttttgggtctgtactgtgtttctttgtctattcccttttccctctcctaggagttggtctgggtgtggtagtgctggtaatgatggtggcattagcaaatagttgagtgcttaccattagccaggcaatgtgctcaacatttcatttaaatgatcttaatctttataacaaccattgaggcaagtgcttttatgctgattttatagatgagaaagctgaagaaagatgttaagtgacttgctcacggtgtacagatagtaagtgatggaactgggtttctaagttaggaacatgattttgtcaacattttgggaaca

SEQ ID NO: 94071 - DNA, 1004 bp, Homo sapiens
cagtagctgggatttcaggtgcccacgaccacacctggctaatttttctatttttagtagagactgagtttcaccatgttggccaggctggtctcgaactcctgacttcaggtgatccgccctccttggcctcccaaagtgctgggattacaggcatgagccatggtgcccagccagctactcttttaattggcagctacatagcagaggaaactgatgtttgggcttgtgaataaacatcattgtttttgtttttttcctatgaaatgttagttttgaatgacccattacttgtagccaaataaagtgataagaatattcaagtgttgctgattttattttctgtttcttctagatgtcatcattgccaagaagagcgaaagtacaggtccaggatgtggtactgaaagatgaattttcttcattctctgagttgtaagcatactggtttaatatgtgggtaggggaatgatgaatattttaataaggagtaatgcattctgtcactttctaactccttaagtgatgtgggtagaaaaaactttttttattcattcatgcaacaagtatttgttgaactcatgctgtgttccaggttctgtctagtgttgctaataaagtatcgaaaggagagagaaagtaaccaactaaatatgtaacataatacttacactagaatataagctccatgagagcatagagttttatatattgctttagagcaggatttttcaacctctgcactactgacattgtgtgcaagacaattctttgttgtgggggctatcttttttcttgtaggatttttagcagcatccttggcctctacccactggatgccaatagcttcctgctaagttataacaattaaaaatgtctctagacattgctagatatccccagttgagaatctctgctttagagtcatattaggtgctctgaagatatttgttaagtaaatgactggtaatatttatagtaataagtactataaagaaaaataa

SEQ ID NO: 94072 - DNA, 1050 bp, Homo sapiens
ttttttaaaaggatttctgaaacctccattgtcatttaaacacagtggggtgggaagggactactaagggggtaaggaggtagggaagggctggcaattgtccatacctccttcgtgtgcgcctataccctgaattatttccccagcagccaagggtccctggatctccctttcccctactcccataataccatgtaatccaatattgctctcattggtccatagctggttgtttaacaactacccaaaggattcattcttggcccagtgctatcacagacaacctcttggcattgggtccctagagttaaggacctgagttagccttcaacttcatggacagtcaagcgttgtttgaactgtttcttcttcttagtgtctttgaccagcagcagatttagtgaatatttgagaccctgaattccctggctcctcaatggaccgctctccctggattcagtgagttctaactggaaggcatctccaccactcactagttgtgtgactttgagcatgtgacttaggctttttaagcccgtttcttcatctgtaaaatggaaatgtcgtaggtcttgactttcagagttgctatgagaattaaataaggaactataaagcttgtagcaagtggtctggctataatacatttcagcaattttattaatatttgaagagtcatttgtgtgttcatagttttagaatcttaaatcagaacatatggtccagtgaaatatatttttctccttgatttgtgaatgtatttatatgaaaagtcttacatactctaaaaataaatttgacttagttatacttaacaaattgccctttggaagataatagaattacttgaaatgagattgttctggaaagtctagaagctgcggtcattgtagacaaaggttaattatttattgaagaggtatgggtaattggaaatgaggatatttgggagctggtgttttggttttactgtgccaatgtcatctagtttcatggatttaaatacactttcagtgctgttgacactaaattcctaattccagctcatgc

SEQ ID NO: 94073 - DNA, 1047 bp, Homo sapiens
gcccggctaattttttgtatttttagtagagacggggtttcaccttgttagccaggatggtctcgatctcctgacctcatgatccacccgcctcggcctcccaaagcagtgaaggttttttaagcagagaaataacctgatcagattcaaattgtatcaccctgtgggatggactagacatggattagaacattaggaaactgctttaggtatttagcctggtaaagatactctggcttgtggtcgggtgttatttgctgggtgggctctggcttaaaaggcaattgctttagatcgttgtggaaaattctgtttcagagacacaaccgcttcagatgggcagtgaaaaagacgatggaaaggccaggacaccacggaagttctgaaggggtagtgggaaccggtaggagcatatcagtagctttccctgcccttttgtctgccactgtgatgtaaatatcaacttgattttacatggagctgaggaaccttttagaacccaatcgaagaagttggtggttctacaccgagccagggggaaaactttgtggtcacatgggaatttatacttacttggtttctctgcctttctcaccaatttctttttggtttcttgagagctggttgtgtgcatatgtgaatacatattgcatgttgaaattttgggttttcttttttaaacctttaatgttctacccatttcaaatgcattcaggatgtatgatgctgtttttatataatgtaaactattcttacaatgtcttttatttaattaaaagaatcaaagaaaccaaagttaagaatttaaattttattttggcatttgttactggttgtgatatataattttggtaacattagtgagggatcaggtttaaaaaatttctccaatgttgtcttctgcagattgcaattgtcttgcaactgctgttggcaaactaaaaatgcttttgctggttaaggtaaccagtcatttccgaactttttttcagttgtaagggcatagaatgaacgtgcacgcctgatttagtgtattaaaactaatat

SEQ ID NO: 94074 - DNA, 1034 bp, Homo sapiens
tcactttattccacatcaattcacaaatttttatagcatatatactctgtgaaaggtgatactgggctaaagaaaataattctgccctcagtttgcaatctaacagggaaaataaagtccatatatattaaaatctaagtctgtttataataagtgccaagtagacaatatggacaggaagtactgtggatctaaggaggtcaagctcatgggtgtacaggttgtaatagttatgaagccttttcagtagcagtagaacttgaatgatggggtggatcgggataatgcacagagtgggtgcatgtggaacacttacaagaagaggggatatggggagctgatgtccaccaagaacagggagcctgtagtctgcgggtgtatgtggggccctgctgtagtggtgttgattgacctctgtaggcactttgccttccttcttctgtgttccctccagctagggtagagaggactggttcagcttggctcttccgggcctgcccaaaggaccatgcaacatgaaggtgaagtccttgtagagcaaagggcatgagaagtctctcttctaaacctaggctctgccctgtctccataattttatttcatgatgttagatctgggaagagatttagcacatttctgtattagtagagcatttgagggagatgataactattaaacaagagaggtaaagagaaacattcagagatgaacaggtttattgggataaagagtgagggtacagatttgaggctaccattcacagaccagggctagctattctagaaacaatagatgtcattagacaaataatgacatgatggtttgatattggtgttctaaacctccagaggttaataactttgttggatttcagtggtggacaccagcaatcttaggaggtctagcagcaagactggttcttgccaagttaggagatgttagtttgttagtgctgattggatggaataagcatacaaccgctctgtgtgcccccttctttcccctctgcagggtgtgagaatggaaaaagagaa

SEQ ID NO: 94075 - DNA, 1063 bp, Homo sapiens
cctggtgggaagtaattgtgattgagtgtctagggcaatgtagttatcctaaattttaaccaggtgattttaaaatcaccatttggaaaatggtcccattatatctatttgtaaactgagtcatgaaaaagttgtcagagtacccaggtaggcgtttatgatgcacctaagtacaggccagccaaaattgttttggttttggtgcttccacctgtgattaatgtcccacttgactccttgagctgtttcatctgaaattatattcctgaaattcatctggctctgctgattatctctacctgggcctgtggatgagatcagagagaccagagctggggctatttcttggtaatgcaactgccattccccatgcgtggacacaaatagacaatgcctgtgggaatccaaaccccaaggactgtgagaggcatgcatgccctgtattaaagcagcagcctggcttggtgctcactaagtgcatggtcagcagtcactactcctgtgacatgtattgtctgagtcactcatttggcacttattacatcctgtcttgggttattagtaacctttgcatgcatttgtttctcctccccagccacaccgccccagtggtgcagactcagggttctcctcgccattcaaattcttcaccagtgctctttatgggcagtaaacttggtttttattttaattatgaaatggtagtgtttaagcttattaaaatataagtgttgtttatccaaacaatcataaatgaacttattaaattttttacaaacagctttactgagacatctctgacatacaaactgcccatatttaaagtgtagaatttgataagtttgaacttcataatatgatttcttattctttttttcagataacatgatttctaactcattttttacagataacatgatttcttactcattttctttttcaaaatgatgtttgatgagcaccgattttacagagggtgcctgtctgagagtacgaggtaggaacttttgaaataacacactggtggtaagggggtagtttggttcccagataactttgagat

SEQ ID NO: 94076 - DNA, 1044 bp, Homo sapiens
tattatatagtagaacccttcttttttttcccccaaaataaagctctaggggtaccccagcatataaagtgaatctaagaagagcttctgctattgcaagcaggacacgaaccacctctcttttccatttctttccttcactgttcctcagacataccctacaaggagccatttgaacaccttactctgggagtagaagggctaaaagctctgctagaactgaagtttgaaaagagtcattccacagaaagacttctgggcttagtgttccggagatcagctgctaaggccatagctaacagcctcggcagataacagcctttcctattatcaagttttcttgagaaagccttttttccccccccgtcaggaagtcagtccttattcctaactaaaagttgtaaaatttagctgtccttagtaaaggtggaacacatggtcctcagcttctgttttatttattttttttttttgtatttctgatggctgttgttatgtcactcctacctgagttagaggccacagtgctgtttgctttcctcctatattttattctctagcccttaaaggaataatcaaaactccttgggctgggtgtggtggctcacatctgtattcctagcactttgggagcctgaggcaggaggatcacttgaggccaggagttcaagatcagactggtcaacatagtaagacccccatctctaaaaataatttgaaaaatgtagccagacatggtggcatgtacttgtagtcccagctactcgggaggccaaagtgggaggattgtttgaacccctaagtttgaggctgcagtgagctgtgatcacaacactgcactctagcctgggtgacagagtgagaccttgtctctaaaaaaaaaagaataaagaaaagaaaagaaaaaaaaaggaagctcattgacggtagaggcaccttttttttggagtctccagagaaccttgcacttgaaggacaaacatgggctctctgcatggaactgattcttctttggattttcctttattgtcctaaatagacatc

SEQ ID NO: 94077 - DNA, 1052 bp, Homo sapiens
ttgccaactgctgtatagtgtgatcttaagtaattctcagcccctttcctttgtccctcccatcttaccatctatcaggaggggagcctgaatggtcccctcttccttgcaggggagctgtggggcacagatgagataaagcaggtggagtacttcaagaagtttaaaacttacaaatgccagagacttactatcatcactatcatttggacatggaataattcactttcaattccttattcagtatcacttttgtgggcatgtcttttaccaccatatttcatgcatacatgtgcccagttctgtggagctcggttccgagcagcgctaggggcctgaactattgttgccctcttaggacacaattttatgtggggagaagcagcaggctttatttcacctgcttgaaactctagttgcggagaaatttggctcagactttccaaaataaactcacctttgggctgaatccaggagtggaaaattttagctgaaaaggatggcttgtcagaaaacataggagtgactgccagttgggggtatatgtactccagaggaggcggggtgtaaacccagctgtaccattccctgcaccgcatgctccaaccagaccaacccagccctccgtgagtagaggttacaggcttattggaaggagggaggcatgacaaatcttaaggattgtctgtttttttccactgtcagataaacctccacgctttggcttctagagtgatgggtgggcttgctttccttttgtggacttgatggcatttgactgtataattattcttctcagctgaatatccctgagtgtcctttgacatgatggtggtataggtagctttaccaggcataatttctataatccatagagtgtcaagaaggtacttattttcctatcaaatgctgctgacctgattaagccttctgcctggctttgtagctgaagataatgagtttgtccagtgcagtggctgttgggacctggggtctttctgaagatgattgtaacctgggtgtggagtggggccttttgtcagttgctttaa

SEQ ID NO: 94078 - DNA, 1033 bp, Homo sapiens
gcagacgttgcagtgagctgagatcacaccattgcactccagcctgggtgacagaatgagactgtctcaaaacaacaaaaacaaaaagataagttaacagtgtatttgttctctgtttgctaactgtggaaaatagaatatgggaggccacttctgccctcctgggactttcagtccacatggtttacacgtggttattcttcccctagagattcttgtagaaaatgccgtgactcctccctgttaaaatatgcaagggaggaggagaggcccctatgagccagcatccagttcacatgtgtttccaaggtagtcattagagggtgcctgtaataagcctcaggaggcttccagggcctgaggttgaagtgttaattttcaacacagatgtgcttctaggctcctggacattaggttaagtgtgtcctgcttggagctgatctgggacggtgttgcccttttttctaacctgtttgccctgctaatagtcacgatttaccgttccttctgcccagtgtggattctctgctactcaggacagctcactggtttaacattccaatacatgttcttttgttttgttttgttttttgagacggagtttcactcttttgcccaggctggagtgcagtggcgcgatctcggctcactgcaacctccgccttccggtttcaagcgattctcctgcctcagcgtcctgaatagctgggattatgggcgcccaccaccacacccagctaatttttgtatttttagtagagatagggtttcaccatgttgtccaggcttgtctcaaactcctgacctcgtgatctgcctgcctcggcctcccaaagtgctgggattacaaaggtgagccactgcaaccagcccaatacatgttcttttaatttgttcattctgtgatgacatagtctgttcttacattctttgaggagaccctgctttcagctctcattttgagcagctagcagtctagaacctccacttttcacttcctggcttcagactctgggcagtgtgctggcatctt

SEQ ID NO: 94079 - DNA, 1017 bp, Homo sapiens
gctaggtttacagacatgaaccagtgtacctggccaattcctggagctttttactgctacagactgccatgtgattcaaattaggctttcagaatgacctcctactccacagaactccattttcactgtcagccacagtcctagaaattccacccttagaaagtctttcctgtaagttaaaccttgttatgagtagttaaaatacagatgtcctagagaagggccataccatcttatcagtcatgtgaacctcagtataaatgaaatttatgagagcttttttttggaacagactgtcattggagagggaggaaagaatatgggggccctggacatcctagggcaggcaaagggctccatgtcgggaggctagggacagacatgtctcagggactcaggtttttctataggtgagccctgaatgccattttaagtacattctacccaggttgttagtgttaaaatatttggatatgttgaggttcttcatatgttagtatcaactcacagggcagatttatgtttcagagtacctatcatataaccaggagcttactaaataatgaaatacagtattattggtcattacctgtattaaataggtttattcatccattgatatccacctttttgaaaaaaggtttgaagtcagtctataatatatattatatgttttacttatagcttactttgggcagtagtagtagtggtaacaataatcattataatatcttagatgctgcttcctccaggaagtcttcccggatcctccaaatccagctacacatagctttctatgtgcatctgtagtgtgttgcctgcaccttcctcagccagcacctaacacactatttggtattttcctatttgtttatctgtctctttcactatctttctcaaataagattcctcatctgaccacagaacaacaacaacaacaaaaaaccgacatgagtgaactgttttctgagttctcctaaagatggtacatgattggtaattttagataaacaggag

SEQ ID NO: 94080 - DNA, 1102 bp, Homo sapiens
tgcaggctatcaggacttcaaaaacagagagggaacaggatttttttttttttttctcagactgagtcttgctgtgtagcccaggctggagtacagtggtgtgatcttggctcactgcaacctctgcctcttgggttcaagcaattctcctgcctcagcctcctaagtagctggaattataggcatgcaccaccatgcccagctaatttttgtatttttagtagagacggggtttcaccatattgaccaggctggtctagaactcccggcttcaagtgatctgctcacctcagcttctcaaagtgcttggattacaagcgtgagctgagtccctgacctgggaacaggattttaatgggttcttgaaccatcttccctgatccaccatgggtatgtgctcagaaaagccaatctatttaatattaggcagagcaaaacctatttaggaagaataaatgctataagcaaattctgtagtgcagcccatagctgagagatgtgatcttcagctcatacgttattctagctcctgggcctcagtttacttgggaattgaaagagcatcattggcatgtggtttgcagctcatgggtgcagttctgctacaggacacagcccaatctcttggatggatgaatgtctgacataaactaagagaagttattgtaagagggcttcaccagcctcaaagagaattcacagtactaaatatgaaatgacaatcatacaatgtggattgcatgattttaatgttatagcacacataatgaaaattagtgataagcatgttatgaacagtgtctcatttaatttttgaaagaatgctatgaagtgtaggtactatgattagtgaggcaaagtgaattctccagagtttcacagctggtagatgatggaaccagaattgaacatgagtctgcttggtttctaaagtctttgctctcaaatgctgcactaaaccccctgttcattacagctgctacaggaagacaggacataggttgataaactaaagtataaatgccacttatcctggctcacacataacattcttccagaggtatttagaggagtcaagaactgcataaaaggataaggcctt

SEQ ID NO: 94081 - DNA, 1009 bp, Homo sapiens
atcagagtccattgacaatattgatgttagaagaaagttctgatagattatgatctttttaaaacctagaattctatatccagctaaactatcaattatgtgtgagaacaggcatgaaagatttctgattactatttcaatcagaatgtactgtcctagcaaaaacaagggaataactcagaataaggaagataatggatttccaagacagtggctgcacccagcagaacagtgaggagatatgcagtgctacagttgtgcagcagaccagagagcgtcagctcagatcagggagaataggacagtggggtgtcctgataggtacaccctccgagaaaagaatgctgggaagactcaaagatctgagaaaggcaattggtagactgtaagatgaagaatccatttgaattagatgctaggtatattagccattgagtggcatgtgaattgttacattgggcccatgggaaagaaggtgtatgtaacaccatttacaaagtcataataaggaaagacgattagttttcagattttagaactaatgtatacacaaaacatggaaattaactatggttagagaacagaatgtcagtgttgtcaaccttgataggttaagagtaaagacaaaaatttcagaggtggctgggatggagggtggcaggcagaggatggggaatgctggaagcactaatgtcctctgggtacaatgtggagggtcaagggatatattctctacagttgatggcataagaaattggcattttaggtgtgtgagtttttttgtagttgtagagaacagagaataaacagaatttgtgatgtataacttttgtggaggggcaaaagaggagggaagtggtaagtaaactgaatcctcttctatcatagcagcaaggtaagagaatgtctaaaataagaaatcaggaaattgaggcatacacattttatttagggacgcagcagtgaccaccagagaaacctatataaaaattactaaaattggtccctc

SEQ ID NO: 94082 - DNA, 1017 bp, Homo sapiens
actggctcaaatattaatctcctttggcagcaccctcacagacacacccagtaacaatgctttgcatccttcagtccaatcaagttgacactcaatattaaccatcgcaggagccatgagtaagatgtgtctggtgtattgtgggaacacagatgaggggctaattaattctgactgggcatatctggatagatttcagagaggaggtgataattgaccttgactttgaaggaggaggagatatccactagactgactgttctgaagtaattcttgctaaatgcttgcctgctctttgctggggacagtgaaaaaggaaaaggagggggatagtggttcctgccctcaagatattcacagcttgttggggagagagcctggcactatgaaccaatgaaagctctgtgtagacagatgggattgtggaggcggagaggctagcagggggacttggtgatccagggtttccagagttactactctcttatagagagaacacagtttctgtaaggatagttcagtccttgcaaagatgtctttaactacaagaggcccagccctctggcttttgtctcacccaattatttcaccaccttgtctctgtatattataagtagttagctggatttgaggtggggagggaggaagtgagggtgcctgtgctgtttcttacgccttgcataccttcccttccctcttcccttccgtcttctacactgatttcaggttcgtcagatactttatcagttcttctctgtccttcatcattaagctggattcagcattgttccccattttttaactccacaatgagatgataaacgccataaaagcaggagtagtgtcttcctgcttctcttatttcccctgggagcagtttctgtggtataaagaacatgggtttctcaagacaggcttggcattgaatctcagcattaccacttaccttggaatttgggcacaatttccatatctgtaaaatgggataacatagggctttctcaacctcaacatcat

SEQ ID NO: 94083 - DNA, 1102 bp, Homo sapiens
gacatgcatggacatgtcaaatcccctggcagtgcacggagcccagaaaacaacaaaataacaaaatccagatgttcaacaacattgatcttacaatatgcaccccacgttaccacaccccaccccggcataacttcttcctgtggctgattctcagacccagggagcaagcctctgtgtcttgggatttttggctctatttttggtcctgatggaataaattcttgttcccagaagtgactatatgcaccagatgagaccaaggggatcagctggaaaacagtgagcaccaagcccccatcaaggagtttataatgtcacaaagagacatcgctaagatgcttgatgagacataagccaagaaaccctcatttccttccaaatagcctctagatgcacagcagtgcctctgaaatgaatcacccatggttaacaacgccaaatgccaaccattagcagatgagaaacagaactgaatcttgagtgtttggagagcagagctcttttgatcacaactagagcctccttcccctctgccattacaggagcgtagatatatatttccttttgactggtgtgcctgtcttaccaataaaataattgaaggaagaatagttacagtgaagaaataagcttattggaaaggtggatttctaatagatccttggtcaagaagtgggtcccacatgacctctagttctatctccgttgtcttgctgtgtatcatttctgtgtcctataaagaagattgtttctggaaattcctgtttgcagctgagatcatactggcccaaaatgggttctaatttaatcatttattgttgttgatgtcttcatgatttggcttaaaagaaagggtatttccattcatttaacctaatttagagttgtctgtctttcaggacctattactttattcttttatccagttgaaaatggccagtgctaacagttttattgattttccttattacctagctttgttgaaacatgcatgttttcacaagcaagtgcattcaccatttttaatcgagctgttgacactggggcttttatcttcctcctttatttaaacctttggtgtgagctcataggggccagt

SEQ ID NO: 94084 - DNA, 1065 bp, Homo sapiens
gttgagaaggcatcagtgttgttagagagctgggaaatgcccaggccttggttttttcattctggctttcatagtttgcagtttccattctgagaaggtcaaaatggacaacatcagtgttcttccaagatgagaacaagaagcaattataccaggaaaacaaagcactaagtaacccttttaaaagcaaccagtcaggatattgaattttttgtttttgtgtttgtttttctataaatatcctgaagtattgagtggtgcctgaatttgatcccactgtgctaattttttcctggttcctggggctttaattaaaataactcacccagggaccttgctagaacttacctctatgtgatctcccctgaggtaggcaggtcgcacctgctttttatggaaggggaaatgcagagttctggattaggtgctgcgtacacagtaggggcataatttttacttgctggataaatgaatgcatgactaaatgaaaataacaggaaaaactgtcacttctaaaggaaactactgagataaacaaggtgtttggcctgactttgctttggataatcggttctttcatattccactgtacaatcaatttcatgagtgggcatggatctgaatgtttaagcttactgtatcggatacttactagggactttccaatgccactcagggcccgcatgcacaccaagtcctcagttataaaaccctgtcctctccctgtttatttagctacttctttattctcaagtttgccacctcctgggagccttcccacacacgggcccatcccaccagcattcccctggttcatgacactggatttgccccccacactcctctgtgtctttctatacaaccatgtactcacatatttatattgtacctataattggagtccaggttgtgccctgcttgccccatctaagggcacaagtcattcaagggcagaggttcctgtactggtccagaactgagacctggcccggtgcagtgtggctccctgttggccttgcaatgtggcattgctgagccgggagcaccatcctaccattctgacta

SEQ ID NO: 94085 - DNA, 1086 bp, Homo sapiens
ccgatttacaaaaatcaacgtatggctgatagatttttaacttgtcatttagaagatcagtctatttcaccttggaaactaaggctatttaaagctgtgagtgtaaagtttgaaggatttttttataattcacctgagatggaaagaaatatgctgctgggacgatgaagtgtgtgcacagctgattcgtacaatgtgtttacatttcccattatgtatcttagagactctcctgttgttgctcagatttttctttttaactcagtcttggggtagaagattaaagttccctgaagaatatggaaatgcagttgaattcttggaagtctgtaccgtgctggccttggtttgtgatgaagctcacacacgatgtctgtaaaaccctgaagtccagccaggtgcggtaaaagagtatggtgacttcagagtttaagagcaggtcattttgcaataactttttataagagtacatggccatctttgccttaggatagtgaagtggtattttccaggacagaagaactgaaatcatctgaatttctaggttgtagatcccacagtccttgggaattttgacttacaaactaggaaattatttcaccctcataaaaatctccaaccctctcaggtctttcccactcccacttgggtttgaattggagtgtttgcccagccatggtgatgattaggaggtgtagcaatatgggcccagaaggcgactttgggattcatctctcatctctcgtagtgcatgagagaagccagctcacggctctcttagaaaacatccattgttcctgaaacctgcagtaattggaacatgagtgtaatacatacagtaaacagaattctgcctataagctcttaccaaaagcctgccaatgcccagcctgccaatgcccagcccatcttgaactaaggggctgtgatccaacaggaggatattgcccacaggtagctccaagtctgcctgaggagctaagatagaaatgaagtaatcagaaaatactagcaaaagtcaaatcaggatatttggattaacatcctgaggacatgggatgtgtgaaaagctgtgctggggaaaag

SEQ ID NO: 94086 - DNA, 1041 bp, Homo sapiens
ggatttcagtctgaaagcctatgtttcagtttagagaaagccgtaggctttctaatgtacctaaaacaggcaccaagtctaggcagatggccccagcccactgacagtgggtaaggacatagccttaagccatgctggagatgacaacactctaggcttttagaaatttggctctgaaataaaggatgtcttggggcatcccaagagccaagactgcggtctgtgagagtccaaacctgagtacttatacctcaatgttacttgtaaagtagttacagattttccaagcactcacttccatgttatccttagataggggctgtcacctaccccatagggttgtagggaggattaaatgaaataaattgggtaaagcacttacccaacagcaccaggcccatagcaagcatttaataaatgatagtggtgattagggctcttccccctactttcgtaaggagggggctgtgtgcccgtgtttgcatatttggtattgtattcttccttggtcggagtatcttccattccaactcctaattttgaaaacattgcatatagatctctagccaccaatccttcaaacctcaagcaacaccagaattggctgcttccttccgaagatcctccctcccacatctaaggacaccacagtaactcagtctctgtcagcttcccctcctgtagccttgggagcacgccgaggccatgggcttaggagaggcaacctagcatgctggacagaacccagggcggggatcctgtctgggctctgctgcccaaccacagggagtcctttggcaaatcaactgctctgacctcctttggaggcttgttgggaagattagagatattatttctggcatagtgccatgcacgtatcagaggccaaacagtagccagattcattactgatggtatgttctgaggtttgcacctttgcaaaccattctgagactgctagcttgttggcatgcactgcctacaccttagagtgatagccctactatgtgtggtctctgtacatcttggttctgggaaggg

SEQ ID NO: 94087 - DNA, 1053 bp, Homo sapiens
acacggtggagaaagaaactacccaaagttggccaaagagcttgtcactgttctacaatgatctcaaattggtaaaggaggttttcacagcttttccaaaggtttgaaaaagaaaatagctactggtggctgtgaaaacactgcattggctgcaaaaatcagtgtgatctggtatcagaagcaaggtgttaaatattatccaaaaaatgcagacacaatatactcttcatggaaagccttggactaacaaaagagaaaaatggagatgagactattatatgataatcactgcctaacaactggcttcaataaggaggctccccatgctgttgtaaccacagaatacagagcatgaagaaatggacttaagttacagccaaagagatggaggatgagacctaaggaaaaagactttcttacccttcttgaagataaagcataagaatgaagatccctagagatggatgggagtcgctgtggaatctggcagtttgggcgttgacctgtccgatagcaaacccagagcaatggccccagggagtctgggagcctccaagaaagcagagacttcacccaagagtctcattcgaacaacctgactgaatctcagcctgcaacagatggagcaaaagttccatcttaggatgctggagactaaatgggttagaagtagagggggaagtgcacgaactcggctccaggaggaagagagcaaatggcccatggaagttttcctatctctggctccttggaaccatggagtcaacacgataaaattagcagagctaagtaggcagatttgtggggttggaggcataattggtcctgtttttctctagtcttgacctaactgaagttcactgggtatgtaatggaaaaaaaacaaccagcttgatataaaaatacaggaaatgcctgcaatcactgctgattacagtagcagctttccttctgttatttttgtgaaagagaaaaaaaaagggggggttattagggtgtttttttttccctttcctaaactttggaaacaacttgggctattagttcttttta

SEQ ID NO: 94088 - DNA, 1056 bp, Homo sapiens
catgtaagctttagaaaattggaatctaattgatttacagttacacttctctaaatattagtagagaagtctttgggaagagcatttgggaaaatgaattgatggtcagtactatagttcatccagtctgtagagctcagtaatacaaactgataggaagggaaaataggcgtcatccccggtatgtggttgacaaggaggactgtttggttgctgatgtactgtgcctctctagaaactcctttgtacccagccaataacagtgactttggggggacattttaggtaacagtgactggatttaaaataaaagtttgaatttgtgggagtcaatttatctgaaaaagagaaatattttctcaagtcggtatattggacaagaggtggctgttacatgcaggccttaagaagaggctgggggaggatggtcggtttcctagatatggttaaccatacatcatcaggagagaaatgaactggtcattgacttcatctagccaaattcaactgactgatggaatttttccacttttcagtgtctttgaataattttcttctcttaaattcatgcatgccaataaatacaggcataaatataccttcacagtatatacagacacttagtaggtacataagtgagaattctgagaaaaatcagtgttctgcctatgacaatgagtcattcttaattcatattagaattaaataagcatgaaaatcaaagtccattgcatacatgattactgccagagcagaatggagtgtgaatcaaaatccagttgtacgtgtcttcgttctgagtgaagtacctgtttaaaatgattaaaagtgatttaagacaagttaatctgctccaacagcatggcagatgtaagcagcaggcttggaccgccaagccagagccctaatactccaacaggtcagttcttgccgagtgggctcaggcagtgttgttttaccagcctggcatccaagctctggcacaggtaatgctgtttccagaagaaaagtacttattggatgtttctttggtaaatactccaaagtgcctgttgt

SEQ ID NO: 94089 - DNA, 1070 bp, Homo sapiens
acagcacagagaacccccagccaacctatggtagatgtgcagagtgagcaagaaataaacctctgaagtttgaaatcattgatgttggggattgttcattaccatgacaaaaccttgcctctacagatgggttcatgacaaatacaaatcgattaaacataaatcaggtaggaagatatcacagaaccaaggaacacttacagcgtgggctgagtgccctcaggaaggtggtcaaggaagatggagaaggagcatgcatctcccaggttacatctgagcctggagtcgccaggcttcaaggacctgagggaagcttgtcttgtctctgggacattgagataatcttcaacgaaaccttgttaatagtttcccccaaatggacacaagtggtaagttttcctttctgcactctgacctttcccaactcctgtcaatctctatctatggactaagcataaactgatactcagcctggtgccactgccttccagaacaaggtgtattccagacctagatcacgtgaaacctgtgggaagaaaaatctaacctgcgagaaatatgtaaaagtgagatagtgcagagctgagtgataaactgtgcagtctttttttctttttaaaattgtgataggatacttgtaaaattaccatttttaccattctaagtgtataattcagtgacattaagaatatttacattgttgcacaacatcaccagcatctatccacagaacgcttttcatcctgcaaaactgagactctttactccttgaacaatacttccccattctctcctcccccagcccctggagccactatttcactttctgtttgtatgtgagcttgactacactaggcatctctagaacttcttgctcgtgctgaagaagagtggtctccaaacctttttaaccatgaactcccactgttaaatatcttagcacacataccaccagtatgtcatagttattactttataaattaatacatttataccactttactaacatatgatgtatatttgaaaaacatacagagagcagcaaagcatttattccttctttttaaaac

SEQ ID NO: 94090 - DNA, 1023 bp, Homo sapiens
cacagtcgatgtggtggtcatccatgggatgcccctaatagcatctgtaattttcaagtagatgttgggtgtaatttggtgacccttgtctgttcccactgttggaagccccataactgatctgatgaaagcataaagtgaagaagagtggcgagaccctttgtgagatacctggagctgaagagtcaggtgtggaatggacaagaatgttatccacttctaagtgaccttgttttttctaatttcttaagaaatacctgtttgcttgactgccttaggctgtttgcaggggccacttgtacgtcagcaaaactcttactagatgacatcactgccagaagttccacatgtttccaggaggcacatttcccactgcccccactcccccgaacttggaaagattcctcagttttaaagttataagtaatttccatgccagataatgatcctgtgaacagatccttttctcatgtggaaaaatatttcagaaagggtgtcttgtcaatgagaaaaatgaccccattgaaacatatgtttatttgccatgtactcatctgacgttttgtgaattctataaagccatggaagtggattgttagaagtgtctcatacacccctagtgacttcttgaactatccccccatccccagccatggaactctcctattaaaaaaactaagagataagtggtagcaatcttaacaaattagtgattttatctggttaggccgtgtaatcaaacacgtgggcaggaaagtggatccattatgttgtactcatgattgtggtgctgaaggtaacccccattgccctgtaggctgcccccagaagcagggggtacagccaatagtattcttagaagttaatcaattctgtaacgggttgagtgttttggtctcatttttagtccgaggtgccctgatgctggcctgtgactaaggggagtcagtggcttgttatgaataagaggacacatgagctgaatctgagaaagttcagaagcattttataagttgtttaaaa

SEQ ID NO: 94091 - DNA, 1035 bp, Homo sapiens
aacaatatagcatgttcctgaaggccaaggatgtctgattttctgatgtgccctaataccttgcttgcttttttttgggggggggggctctgaaatcatgcttagttttttaaaaaaaataatagaattgctttgttcatgtcccttgggttacttggaaagcctgcctcacaagctctgctttctttattcatgtagatttgacccctttacttatttccctttaaaaagaaagaaaaaggaaaagaaaaaatttgggggaccacagtcaggtcttattgatacataactttatatcagatgcaaacgtcaggctagtattatatcagtgcttcacttcaagaatgccttatacactaatgtgagtacagccaaacagaatactccagcttaatctcaacgttaaaagcaagatggggaagttgtgcaagagggcactagctctcagttcagagatcatcttccctgggaagccttccctgattaactgcacattggttacccctgtgtttatagatggtcttcagtctgtattttgttatttgtatgatgcttttacaacttgcttttgaaggttgggggtggcgtatgtccctgatcaccactcaagtggtaagcccttcaagagcaaagacccagtcattttttcctgttcttttttccccacagaagtcagaatagaggtctcttgaggtgctcagtaattatttgtagactgagtaattctgtctatgtcaggaactttgggagtttggtgtagagaactggaagcacaggtagacactttgctcacatcaacctaacttatcctcattgcttatccaccatgcgtagagcagggtttgtgggaatcatcactgtgtgtagatgtttataggttccctcccaaattcaggtgctatgctgtacggtgaggttacaaagaggcattagatggaccctgcactcaggatgtcctaaaatgatttgtttaagcaatataagatgatttatgttaatggatgtccaagctgcctttacaatgttgccatcttg

SEQ ID NO: 94092 - DNA, 1032 bp, Homo sapiens
tcttttctatatttctgaccagtgtgttagctatggtgccccagaaatagctgcaaaataaaaggttaagtgccatgtaggcctttctctaggcttagaataattcacttgattacataggaagaggctgcaatgatgacagcttccagggctgggccagaccttaccctgggtaaaatgatcctccagtgtggcccatatgtatgctttgagccaggagctgctagctgggagaacaagtttttcttcagtggtattcctgtgaccaagatttcaaataagctccatttttaattttaattggttattgtcctcctgaaattttatgacacaatctatatctttaaaaaggcactctttcttctttatacagttgttttcatgatgttaaaaactttaaagaaagtatcattcagatttgctgacagttggaagattattttaaaaatccaactagtttagctgaaaaaggtgctatcagtgtttctgtctcatccttggaaattgtatatttttaaggcttgtgattagctttttctcctccattgctgatcgtggttggaagtgtggcatagatttacagtaaactttgatataatggtgattcctctttgttttggagccaggtgcctgcggtatttgcttattttctttgattcatttttaaattgagttgaatgtttgatttaatcagaagtgatagtatgaggctggggatgattgcttgtggttgggaattgcttgtaaagtttactgtttagtcaagacaaatcgtttcctaaagctctctttttcagatttcttgtctatgtgggaaagcatgataatgccagtcagtttaaacatatttaagagttcccaggcatcttcgaacagaaaaatttgcaacaaaatttggcaacggcagaatgcgaggatttttgcctcattttgtttatagttgtctgctcttcaggcaaatgatctattacaacaatctgaataattacagtctctccttcaatttattcaccctggactcctttttctaga

SEQ ID NO: 94093 - DNA, 1003 bp, Homo sapiens
gctaaaaattagaaaccataacgaaaagcaataagggaatagtaaaatgcattgtggttcagccacatgatgtgatattgctggctattatgaatattttgaaagaattcttaatgggatatcctgttaagtaaaaagagcaaagtattaatttataaatccaatgagatctcagctcgttttcttcatacctttttgtatttttgaagttgcttatactaaatatgcattacccttatcttcaccacggcatttttaaaaaggaaattatgtgttgggaaaagctaggttatatgatggacagataatgaaggtctgtttctaatcgtgccacatggccagtgctgcttgtcagcaggcgctctgttcacagggccttgaaaaagccagaactcggggcttttgttccagttccacatactcccattacctttctaaacctcagtttttccttatctctaaaatgggaatgatggtagctgctcttcctagcctactgtgtgaaatttacaaatttagttacagatttccagattcactcacgagtgttttagactgtagtgtgtgatccaaatgtaaagtggtattattcactaatatgtagaataaagaatgccccactgtcttagcccatttgggcagctacaacaagataccgtaaactgagtggcttataaacaacagagtttcatttctcatggttctggatgctgggaagtccagtgtccaggtgccagcagattcagtgtctggtaagggcccactttctggttcatagctgtgtctccacatggtggaaggggtgagagggttcccctgggcctcctttgcgagtgcactaatcccattcatgaggacttcactgtcatgagttaatcacctcccaacggttccaccttcagataccatcacattgggagtggggatttcaacataagtattttgaggggacgtaaacattcagaccttggcacccactaaggcttgggcttgatgaagctaa

SEQ ID NO: 94094 - DNA, 1063 bp, Homo sapiens
tgacccaagatggcgacatgatctttctgtcagaaaacatcagcaagttcatgggacttacacaggtgacaccctcctctatctctttcaaaagaagaaatgtttccatttgggggtagaaatgagtggaaggtgctagccacaatcccacttgacctctccctgcaaatgcccacggtgaccctcgctgacctcaggccacacgcctcaggccacgctcccacccccaagcattgggtttggctttgctcatgtccatcctggtagacagctctctactgactcattaacagaccaagtctctgtcatcatcagtagtccccgattacatctttctgtctgtggacctgacactggactgggattatgagaaaacccaattcagtctcctccctgcctccaaatctggaaggtggctcagcttactcttggagtcttttacttcactgttaggaataatgatgcctaaccttgtttttgaaacaggtggagctaacaggacatagtatctttgacttcactcatccctgcgaccatgaggagattcgtgagaacctgagtctcaaaaatggtatccttaattgtgtttacttccttcttgcccccactgggtgggaatctgcctcccctttgtctacgggtataagggagatagctcatggcccttgtgatgcaggaaaaatggatgtccttaaaaaatttaagtatgtagcctgtgagatgagattggggcattgagaggatccagtactcagaaatatctcctgctggccctgcatggtgcctggtgtcccactactaggggacacctttgggttaggacactgtctctaggaggtttcatcacccaagagtcaagcatctctgccaaatgacaccacccaaaccaatgaggaactagtctgtgccaaagtgctcatagtaactactgtagttatctattgctgtctaacaaaccacctataacatagggctttgatgattatctcccagggttctgtgggttcagtgggtgggtcttgtactccatgtgatgtcagctgggctgcagtcatctgggggc

SEQ ID NO: 94095 - DNA, 1050 bp, Homo sapiens
tgtcggagagacatttctaacctgtgaggaaggcttacacccttggagtaactgtggcctcactcagactgtcccttggaatttctgcgagaagacctgggcctgccccaggaaagggtggctgagttagtggctgataggcagtcgttgtgtcgctgctctgaaggcaccactgaccatgttccagatgcaatgggaaatcaaatgatggagcagctcctcccttgtgggagtttatgctccagttgaggagataagcttgagagtgggaaccattagttcacaggccatgatggagctcagtgttgatggcagaccacaggtgctaagagagcagatatttggaaaatataaacaataggctgccaagaaaaactgcagctgggcccctctcatgaatatccatataaaactgacttcagctggttcttcccatccttccacatccaggctctggttttgggaaaaaaagcaaagacatgtccacagagcgggacttcttcatgaggatgaagtgcacggtcaccaacagaggccgtactgtcaacctcaagtcagccacctggaaggtagggcaacatcaggcctgggttggagtcccaggtgtagggtaacggcggtgcaggggatgcctaaggccctacccccacccccagcactctcggctccatgtctgacccttccacgcctgtctcaggtcttgcactgcacgggccaggtgaaagtctacaacaactgccctcctcacaatagtctgtgtggctacaaggagcccctgctgtcctgcctcatcatcatgtgtgaaccaatccagcacccatcccacatggacatccccctggatagcaagaccttcctgagccgccacagcatggacatgaagttcacctactgtgatgacaggtagggggccatgggtgtgtatgctgtgggcagagatgggtcttacctgtgtgtgtggggagttgtgcctgtattaaaggtgtggaactgaacatagacgtggtattgccgggtgcatgttcgtggacctgtgccactgtttcattg

SEQ ID NO: 94096 - DNA, 1154 bp, Homo sapiens
gccctgagctcagaaacccatagctagcaaagggacaaacccatagctagccaagggaaatctgcttgggttggaaattggattaatgacagttatgacacgagcttgccccttgcccccgacccctgtctctcattcgtccttgaggttttgcaagtcaagtttcactacagactgacacacatgctctagactaactggaggctcaggtttgagacaggtccagattcacacactgggatcccccatttacacacatgtatgtcttagcctgtaaaggtttaccgttgaaatgcctggagaagctcaactagatttagatcattgaaagctgtaatttccaaatggattaataatttatacactgttactctgggcgtgaggttaggggtcagtctccctttgttatatgaggatattatgtgcttttaggctttttatggcctttaatcttattttcctatctattaagtagcaggcccttcaccaaggctggcattaatgaccagatgattagaaagctggcgttaattatattctactgacagagcaggcccttgcctgcaattgttagaaatgcacttaaaacctttgcttgctgcactgtttgatcaaaaagagtaagagccctgaatttggtttgcattaaggaccatctaaataagttaaatacaggcacttgaaattgtgcaagaatcattttactgcagcagaggagcctcagtggcacagataaagggagagcagagaggacaaaagttatttccttggttgagtccatgatggtttaggacagcggcaacagcaagtttggtcttcccagtgatttgtggacccaggtaataaagagaccattgtattaggagccaccagacatgttgtgtagctcagactctgtcactattgtcttgtaagctgtgaagcaaatcataaccctctggccttagtttcctcatgttaaaagaaaatacttatcctccctgtggcacagggttttgtttaaaagattagacaagatgatacaaccattttggaaataatttggcagcttcttataaacatatactttacaggtaagccagcaattgcactcctagctgcacccacgagaaatgaaaatatgtccatacaaagatttatacacaaatgtttat

SEQ ID NO: 94097 - DNA, 1059 bp, Homo sapiens
aatgctttgcagaaacgaattcatcttatcagatagttctgaacactgcaaagcactatacaaatgtaagttacaggaattcttgcactttgcaggtgcttgttaaattgtgaagaagaaagcaaaacataagtgtaaaggattaccaaactgcactagtatgaagagagccatgttcctcagctgtacagggctgatgaatggggaggaggcctgcgagcctaccaggagaaccggggagactctctgtctaccgagagcctggatatcctcccgagtggcccctcatgagactatctaccaacgtgtaacagactgtctgtgacaggccatgggcataatatgtattagtatctctaagaaagaggtggcttttcctatacaaaatttgttggtgacagttggtcaacacttatgtacctgataagccatgtgggtacagtcgatcctcagtacaaatggcagtggtatgctgggtagctaatgatgacagttattaccgttactactattattatcaatatcctgttttgcagaggaggaaaccaaaaccaagaaggattgttcctttccccaaatcccaagctagcaagatttcccgatcctccctccatgccctttcctaacgtctctgtgatttgggagcttctgagctggagttctgtaaattcccaaggaatgggcagttcagaaaaataccaaaaattctaacattattagactttaaagagatttattgattccttttgaatggcagcagatggaacattctggactggggaaggacagtctgtgatgtgaaacccttccccaaggtagacaacaaaagcgttttttaaatgaacacttagtagaacaatctagaagaggaaaaacctcataagtaggaagcctagctgggcggttgggagaaggagtataagtgatttattacagcttatgaagagactgtgtgtgggctgccagggtcccagctctttctcagccccaactgagaaagggtggggtggtttgcctctgcctttgctgtgggtcacaaaccttcagtggcccaaaagg

SEQ ID NO: 94098 - DNA, 1037 bp, Homo sapiens
ttctgcgctttccctggcatctgtcatttatgccatgcatctgacccaggtggggaggcagatagcacacaatagtcaatattttctgaatggggaaaaaggaaagagaatcgcttatgcttttgggaaaaaaaaaagatgtcatgccttcactctatagtacctggaaagaaagctagaggaagtcatttctagttgtttctacagacagagaaaaacaaaagcatcaggcctcatatataccaccccactcaagtgcaataatatttaataaaacaggatccgaaacagacatacattcagaggatacctctgttgtcactacctccatggctcacacacttctattgtatggttctttataagacgccaatgcctggagtcctacccattttttgtcggagagcttagctatgagggtttccatgcatctaggggagcagaatttttctagaaaatgtggaaagtctgaatggctctttcccccccattagtgagattgagaagaatgacgtggtgttctccatggaccagactgaatccctgttcaagccccacctgatggccatgaacagcatctttgatagcagtggcaagggggctgtgtctgagaagagtaacttcctattcaccaagctaaaggaggagcccgaggagctggcccagctggctcccaccccaggagacgccatcatctctctggatttcggtgggtgcttcttagctaagccaggcccctggaaccccgttggggctgggaagagttcttactataacaggcctccctggctgcagctttttcttaaccagagctaccccagccccccaagtcttgttaatcacctgttagaggccaggccctgctgagcacaaaagaacaccacacgctcctgccctgataagaccatcccatatccgacctcaccaagtgctgtacgaggaggggttaagagaggacacccccctgagggtcgattctccaccatgggtggtgagagtctgagatgagagggaggggagaggtgagggatctgctc

SEQ ID NO: 94099 - DNA, 1050 bp, Homo sapiens
agagccccctagagtggccgtgacacttacctaccaggtatcagagctgttttcttccttttagtgttcatcccccaactccattgaaataagctccttgaagggctttgagcccccagctcagtccccatacagggcagtaacatcccgtatgtggcacagagctgcacagtttgcacagccctgctggccacagcctgtatcctgtttggtcctcaagacaggacaacctgtgaagcgacagtagcctcattttatgatgaggagactggaatttagagaggttgatgaattgacctaattcatacagcttgttaattagcagcccctctacaaatagttgtgtggtggaatggaattgaacctttgggtccaggaaggtatttcttcttccatgctggacttctggggagaccagtgccatatctttgactctgtccccctccttcctggcccctagcccaatagccctgaagactattacacatctttggataacgacctgaagattgaagtgattgagaagctcttcgccatggacacagaggccaaggaccaatgcagtacccaggtagatggctgtggagatcaggctagggtgtgtgcctgctgtctggtggacagcaaaggctcacatccattcttgtagcctcatccctttgttgtaaagagcagtggagacgtttggccaaggcccaggtcccctaaagaggtaggggtacagggtaatggagcctgtggtcaccccctcctcccactgtcaaatccagctcttccagcatatgtgtctcctacttagatagctttcttagcacacatgaaaaccgaaatgataccactgcacctttctttaaacaggccctacatttaacaagcatagccagatgtataaaacatgtataaacataggggacaattaatccctttataaacacattcatcttgtgattttaaaaaaataatcatttttatatgaaatgcactttaaaataaataacatctgtttgacaatttttcatttacataaaacttttcaggaacacatttatt

SEQ ID NO: 94100 - DNA, 1042 bp, Homo sapiens
caaagagaaacaaaaatgattttgctttccaagcttggtttgtggcgtctccctcgcagagcccttctcgtttcttttttaaactaatcaccatattgtaaatttcagggtttttttttttttgtttaagctgactctttgctctaattttggaaaaaaagaaatgtgaagggtcaactccaacgtatgtggttatctgtgaaagttgcacagcgtggcttttcctaaactggtgtttttcccccgcatttggtggattttttattattattcaaaaacataactgagttttttaaaagaggagaaaatttatatctgggttaagtgtttatcatatatatgggtactttgtaatatctaaaaacttagaaacggaaatggaatcctgctcacaaaatcactttaagatcttttcgaagctgttaatttttcttagtgttgtggacactgcagacttgtccagtgctcccacggcctgtacggacactgtggaaggcctccctctgtcggctttttgccatctgtgatatgccataggtgtgacaatccgagcagtggagtcattcagcgggagcactgcgcgctatcccctcacattctctatgtactatgtatgtatgtattattattattgctgccaagagggtctgatggcacgttgtggggtcggggggtggggcggggaagtgctctaacttttcttaaggttttgttgctagcccttcaagtgcactgagctatgtgactcggatggtctttcacacggcacatttggacatttccagaactaccatgagatggtttagacgggaattcatgcaaatgaggggtcaaaaatggtatagtgaccccgtccacgtcctccaagctcacgaccttggagccccgtggagctggactgaggaggaggctgcacagcgggagagcagctggtccagaccagccctgcagcccccactcagccggcagccagatggccccgcaaggcctccagggatggcccctagccacaggccctggctgaggtctctgggtcggtcag

SEQ ID NO: 94101 - DNA, 2450 bp, Homo sapiens
ccaccgtcttcgaccactacgcaggtaagcctcggaactgctgactaaggggccgctccccgggccgggaactttggagcaactttggcggagccccctcgccgcctccccagagcgcactcctctcccctcccccgccgcgccctctgccaggcggccggccccacccccgaagcttcgctcctggcaacccctcgcccgctgatccaccccctctcccacccgccccctacgcggctcctgctccccgcacttcctacccctcggcgccctgggccgtcctccttgaccttcccacatcccctttcctactgccccaaggccccgggggaaatattcgaggggaccgagcgagacgtggctacgggacttgggagaagggggtggacggctggggaccacatcacaccccggccctttgccggttcacagtgagctggccgcacgggaaaagggggtgacatctcgcggggagcgcccccacgcctctagctgggttgggagaggagggtccgggtggggagcgaaattgccccagagcccaggtcactgtgagcttctctccccgcccccacttctgtccttgcagtcagcgtcaccgtggggggcaagcagtacctcctaggactctatgacacggccggacaggtgagtgtcttggcctctggccgacgcccccctcctgttccccagttctttgtggctgcgaagggcctttggaaaccgaggtgtctaggtgggagggtgtgtctgcgacgggcttcccctggattaggtctttatttcttgtaacaagtcagcaaattaggaaaacaaacaaaacaaacagagccggataagccccccccatgtgaacccctgggctgtgaaagtttttgcctgtgtgggtcgttctgtgtggcgcctggtgtgtgggtcccaactcctgttgcaaagtggcagcagccaatcatgaagcgcccttatttttagttgcagatgaccaggtctcccccccacagcctctgtctggtccctcattggtgagtggtctgcctgcccaaggagcctgattggtgggaaatggcatcatctaatatgatgggaaggcatttggtcctggttatgtttattacaacatcattgcactctgggactccagtccctgaaaacgtaatttgtggtgttaccaaaggaccacagggaaaaaagaaaagaaacaacaaccatgtagccactccctggggtggggaggaagggttaggagtttagagtgaatcttggaggaggaggggttccccccggccctacttcagaagggccaggtgactttgtctgggttttctttgggagagattaattgtgcagaaagaagatgcacactttgccctgcagcctctggccagggtttgcacatcagaggtggccaggctgtgcttctaaagggccaaggtcttctctctgtctccctgtcccagcttcagcctcttcccaaacccacttttgctctggggataagttgtgtgtgatgaattttgtagaatccagcactatgattagagttgaagactctggcagaagtttccacatgtcatacagacttacatccttgagaacacaggagcagctgaaagtcttagagaatgtctttgggggaagtccagtagtagaatttccttatctgcaaaatggggtttaaaaaaataagatgatcccctggtgcagatattgtatggcaaatgtttagcattgaacctggcacacactaggtgctcaataaagggagtgatgtactttgaagcttgtctagatttggatttcagaactgtgattagagtttaggttggattctgaaacatgccttattgagggggagtgccttgatgtgacctctggtttctaaactgttagaggaacgtctgaagatagagaactgctggcagttcaaggtccctgagaccaccccctttcaccaaaatggcccaggtcagtacagccagttctcagctctcctgggcccccattggttgcctgccctgtagtcgttattccttctaccttcattggaggatgtggagggcaaggggcagagcttgctcaatcaactaagactgacttttaagtcgtattattgataaacaagaggttgaccttattggttgaaaagaggaagcttttaaaaaatcgcctctaatttgaacttctcactaccttcctttctcttatctcctttacttgtgaccatgataatttttgaccgcactccctgttcaacaggatgtgtgtagtcagagctgttctgagtatgtttaaaccctgctagtatttactgagttttttcctacatatggggccagaggcagacacatgcaaatattattttatttagtccataaaacaaccccatgagataggtggtatttcatctttgcggtgaggaaacaggctcagagaagctaggttgcttgcct

SEQ ID NO: 94102 - DNA, 1033 bp, Homo sapiens
aaatatcttttactctggtgtcccttggtgttgctttttcaatgacaagtgagatttgttttacacttgatataacccagcagctgtggctgccctgcatgccctctgggtgcccacaaggcacttcccctacagaagggaatctccaccggaggcaggcttggcatgccccaccttctgcattttagcagaagggcctggcatgatgagaaaagggaaggagaaagggccatgggatcaccactcaccaggctcctcccacctccaggcaagtcatcctcacaacacccttcaaggtagacttctcccagatgaggaaattgggaacaagtgggcttatgggaaccagacagagatgtgattaggaaaaaggttttctactttggagaaggcctgcagggaacattagtagggtttaggaaatgccactcacaacatcagactctgggtccttgtagccccgtgttccatccttgctcagcccggtgagcagagcctgggaggagccccagggttccttccaggcatcagctgcaacaggtgagatgctggcactgagcatcctggtttcccttagtaacctactgtagatttgtcatgtgtgcattttgctaacctttttagaagctatttatatctctagcccacaccgcatcacacgggaatgctggtttcctcctctgcgttgggaaggtggatagcctttgttgactccaaagcctttgctgtgttcgctccaaagtctgaatgccctgtgttcccctccttgggactctgatgtgggtttgggttatgccagcttagactgtgggctggcaggcagggactttagggtgggggcagtccccaccagctctcgttggtctacaattatgcctcataatcgggcacataatctgtgccccatccccatcctggacctttgatctgtttggcttctccacttccatcatgattctcctgaggtttggtgacattcccacgctttgaacgacagcttccccgcaggtatctcaagcatgagtgttacagg

SEQ ID NO: 94103 - DNA, 1652 bp, Homo sapiens
cttcagctctgccacttcccagcaaggggcttaaccttcggaaacctgtttccttatctgtcagatggagattatgatagtacctccttgtggggttgttagatatgttggagcttcccagctcccagataagggatttcctcagccctcagggcagctgggtagggcctgggacaagccatggctcaggttgtcctagcttgagcagtctcacctcaggcatgcagcagtggctcctctactccacccgatgtgtgctgaacacatcatctcattttctctgtgtgccatgaggtgaagatttgggaagcattgacctaaatgagttccagcaggcagaggggtgtggagagctcatattctgagtgggaagaatagtgtagggaggaacggcagagggggtgaccccaaagcgtctttttatggaccccagatccctgctatcagtgtcaacatgtggagcagggttgataactaaattatggagtttttcacctggtgactgacaacttggtaattaaagagatattaatctggtgctgtgttgctggttgattttaatagaaagaaaagaatgtggggaaaggggtctttattgctgtctctgttcctttttgagtgaatggtgagagcactgaagcagccgcctctccagatccctagattttcctgctctactcaggctcagggtagactgaggggcttaaaagtggcaggctcatcatcaaatgacatttttacagcacataaagcatgtcgcacctggtaccgccttgagttccctcacctgctctgtgagtaaaggaagccagtggtggctgtctcattttgcagatctggggaggttaaatgactcgctccaggccacacggttggtaaaaggcaaagccgagatcaccaggcaggctgtcggactttaagccctgggttcttgatgttaagtcactctccctaatcatctggcccatgttaaatgcctcttttatcacatgcactgttgttcagcgtttcatgtaaaaggtacattccaagcgtatcgcttttctagctagaagagatggtggaacattgtgtataggtggaacacgtagggacggctgctaaaacggctcctacaaagacttctgccccacgtgacgttacgggtgttttgtcactttgtccctaaaccaccatgcttcctcaaaaaggagcaggcccgaggtggcgctgatggccccattgctcaagtacgtgtggaagaagctcatgccatttgcctaaagctgtggccccttcccagaagagagggacagggaaatgctgtttggggggctgccaggcgggccagctttagcctgcaaatgacgggtgtcgtttgtgtcccatgggggctacctcaggcctttcctttctcccttcaaggattttcttattcaggggaagcctacctctgcaaaactgtttgtccctccttcatctgaatattctctaaatatggcgcaaaacttcctctgccacctgctgctcatattgtttgccctcttgggccatccccattgccaccacctctgcatgggctcccaaatcctgcctggctgcttcctgtggtggctggcaagcctagaagagaacattcatccagtcagtcaacatacatttcctgagcacca

SEQ ID NO: 94104 - DNA, 1037 bp, Homo sapiens
atgtcaggtgtgcttccagagtggcctgtggccctctgtgataagtcggtaggagggggacatggtgaggatgctgacctgctcacttgtgtcttgactgggagaccggaatgcctcctgttgtctgaacaagctagtatggaagtagcatctaggcaagctggtgttaagacgcaagtaattactcagagaaattgctggtgtgtcaaactgcttgatatgtaagtttcctcctctttcctttgttttattttttgaggcataattcagagaacactttcatcaccccagaacgaaaccccatacccaccgacagtcactccccaccattcctcctcccccgtctcctggcaaccactaatctgtctttctgtttctatggatttacctattctggacatttcatattaatggaatcctgcaatgtttgccctttgtgtctggcttctttcacttagcataacgttttctaaggttcatccatgttgtagaaggtatcaacattccattcctttttatggctctgtgatctttctctttccattttattcctgcccccgctctttttcagttgttcttccatggccattctttcccgggctctggggactattttcagggtttcaaggtacaaagtgaagttctgctagttgtgcacttgtggtgctgccttcgcccctggctcaggtagaggcgagggctgatctcttctctacccttctgatattctttttcttaaaaaatttttttaatttttttttttttgttccttttaatgcttgggtctggaccttccagtgttcttgttttctctgtgcctctgttcatatactctcccaccccaaccacaccctaatagctttatttatcaaacatataaatatccattaaacataagagtgaggtgaggaacacaaaattccatccgatcgggttcttcccccgtaggagtttacagtccagttggaagatgaatagagctggccagaatgcaagtagaaaatgggatgtgcatataaatcatgaaatgtgagtga

SEQ ID NO: 94105 - DNA, 1050 bp, Homo sapiens
ccacctagaaccaaccactttaacattttgactattttgttctgatttttcctctgcatattatacatgtgcattttctttaaagttttaatcatactatacatatatatatggttttgattcctgctttttcacacttaacacatcattagccttttcacatttctttaaatatttgttgaaggcagtttttaatggctgtgattattctaatataaatcattctgtgatttagcaactccctttttactatgcatcaatgtgtttataatttatcactattataaataacattgtgaagaatatcattttatgtaaatctctgggtacactgaatgttttctaggcataaattcataaaatcagatcactgcaaaccaaagagtctttggcaaattaacctccaaactggttgtttcagttttcattcccaaaaatggggcagagagtatttactttcctttctccttttcaacttgataggttgaaaaacaaagtttttattcacatgtctttacagagtgtgttttcattggctatttgtttttcttctcttgtgagctattggtttatgtcttgtccatttttccactggggctacatggtagattaactctttggcaacctcatttataggctgatctcttacgagttaacataaatcagacccatgtacctgatggtccttgaaagccccaataaaattgtttctgaatctaaacggccccacagaaaccttgcctatctgggaagctcaggtcaaacagccgggtagttgggcacctttctaacactcctcactcacatttcatgatttatatgcacatcccattttctacttgcattctggccagctctattcatcttccaactggactgtaaactcctacgggggaagaacccgatcggatggaattttgtgttcctcacctcactcttatgtttaatggatatttatatgtttgataaataaagctattagggtgtggttggggtgggagagtatatgaacagaggcacagagaaaacaagaacactggaaggtccaga

SEQ ID NO: 94106 - DNA, 1115 bp, Homo sapiens
agtttggaggttaatttgccaaagactctttggtttgcagtgatctgattttatgaatttatgcctagaaaacattcagtgtacccagagatttacataaaatgatattcttcacaatgttatttataatagtgataaattataaacacattgatgcatagtaaaaagggagttgctaaatcacagaatgatttatattagaataatcacagccattaaaaactgccttcaacaaatatttaaagaaatgtgaaaaggctaatgatgtgttaagtgtgaaaaagcaggaatcaaaaccatatatatatgtatagtatgattaaaactttaaagaaaatgcacatgtataatatgcagaggaaaaatcagaacaaaatagtcaaaatgttaaagtggttggttctaggtggtgaccatgaataattttagaaatttacttctttatactttattgtgttccctaatttttttaaaaaaactcatttttatcaaacttctatatgcagatggtttaaagagtcagcagttctggaaggagttattatgaagaaataaaatattcctctttacttctcctgcagaaaagacatttcccactaccctgagacaaccactttcaactctgctgtttattttgataacaaatattctctgttgaattcacatgatgactgatgaggcctgagctccctttcacacatatcttccacttcctatccacctttctgtaggagctatattgtaatttcagtttgaccactgatcagtgtttatatttttatgactattcacagctgagccatgtagtgtactatgattatattttttttcttgtaccactttctgtttctcaagtgaacaattatcttgttgcttctcttacttggttttcactgtatgtctcagctatttcatgcaaaattcaccctcccatgcagcaagtcatatcaagtattctgtcagtttcttcttttgcagccatccctcctgcaccttctaacctgctgtagctgggctggtgcctcttgcctgctgcacagctgttatcctgggatttcccttcaggtttattaggattctctttgcctctatctcttgtattagatccctgtttc

SEQ ID NO: 94107 - DNA, 1070 bp, Homo sapiens
gacaggatttcaccacattgggaagactggtcttgaactcctggactcaagcaatctccccacctcggcctcccaaagtgctgggattacaggtgtgagccaccgcacctggccatgtgtgatatttttaaagtaaggttgtcattatcacatatcgaggactcttcaacaagggacagcctgaacactaagctgccagaacacacttaaaaacttgatacttctggtacttagccaattggtaagaagctaaagagtctgccatgcagtccaacagccatgctgactaaactcaccagttctttcattgttttgatgttgaacagctgtctttaatacacttttctgtactcctgagaatgttctagttaccatgctgaaatgtttaaatacctacattttaaaattagaactaaaatataatgggtttgttaattaggaggacactggagagttggctgtgagaagttgtgactttgataagtcgatcttttaaaagtaagggcagttgctctacatttgacttctttgtgttctcaaatttaaaatatatggctgaagatgaaagattctgcacacctccacttattcattcccaaatcccacatttcatattaaattcacacaggatactatgtgatgcatatgaaccattttatatgatgcagggtacagtatgcacaggggataatttattttctaaatttgctattattagacttctaattactcagctggatagaagcagaaaggtctcattcttgtactaactgccgattttttttttttttttgagacggagtttagctctgttgcccaggctgtagtgcagtggtacaatctctgctcactgcagcctccacctcctgggttcaagtgattctcctgcctcagccttccgaatagctgggattacaggtgtgcaccaccacggccagataatttttgtatttttagtagagatggtgtttcaccacattggccaggctgatcttggactcctgacctcaagagtcccacctcggcctcccaaagtgctgggattacaggtgtgggccatcatgcccggc

SEQ ID NO: 94108 - DNA, 1242 bp, Homo sapiens
agtgccttatatgtactttctgggctctactgcctgtttcaaactgcaagtccataaaagaaaaaaaaaaaaaagaaacagtatgtcatcttagcatcccacccagcaactccacacttctgagcaaacatgcagttgtcatggccgggaaatggggtgttctcattaaaaagcactcctcatccatatttagatttccaattttcacagaaataggaatggggatactatcccttaggattatgaggaataaatgaaatagtgcaactaaagcactccgcataacacctcgcacatcgaagaactctttcaatgcttaaacataaattctctatcccatgggaaaccaagtctcttattcctctgcaaatccacgcagggtcccctgagtcccacacttgcctcagctttgcagctccctccaatcacagagaagtcttttagtaagaaataaaatcaaaacacacaaaactcaggtctctcgagacagtataattttcagatgaataaaagagaatgatatattattactgtactcattagtcacttagccttaagactatttaaaatgtaacaaaaatagatttatatttaagaaagccaaattagagattttaatggaaattttacttttcaagcaagtttacctcctcagggaaacagaagtgtgcgctctttctctagtgagagatgacaagaaataaaaactaattgaatgccatgttccctagagatgcttaacaatattaatccaagtattttacagaaggtaaatatattgtacagattcctttcataaccacagtgaatcctgactttcctccatgagagacgtgagcacaaaggaggacaattggaccaatcatttctagatatttcttaaattgcaggttttgtttgattaattaaaatgtgaagaactggggctattaaaaaataaaacacacatatgtttagacctccttggaaagaaatgttacttcttaagtctgaacaatctaaaatgaattccttctgcctgtcatctctggctaaataattggcagttagtggccgggcatgatggcccacacctgtaatcccagcactttgggaggccgaggtgggactcttgaggtcaggagtccaagatcagcctggccaatgtggtgaaacaccatctctactaaaaatacaaaaattatctggccgtggtggtgcacacctgtaatcccagctattcggaaggctgaggcaggagaa

SEQ ID NO: 94109 - DNA, 1036 bp, Homo sapiens
gaaagtttcttgtggtttggtcagcatacacacttctcatttcatttgatgtacacagccaaagtgggaattaaaaaaaaaaaattaccaactagttcagagagctaaattgagtctatcattatggcaaagtctgacccaaaattttaatttgtaattttagcatgtgtctcatgcactttggggagcgtcaaactaaatctacaattgccagaagccttgttacagtttaatgcacattaactaaaatgtgtacatttttagtgttcatgataaatgcagttatgaccttattacacttttggcattctttaagaaagcacattaagctttaatatagaaatatttaggttacacttgtgctcaagtaataataaaacatttgttcttttttgatctcatacattctctcctcaggtatggcccatctcctgtacgcttggagcgacctttggctacgtggctggccttgttatttcaccactctggatatactggaatagaaagcaacttacatacaagaacaattaactggagcaaagggagatatttctttgtgcagattctgtaagggctgggcagaaatgtgtatggtcaaagccaagcagttccatttacagctctgttttttacgtagttacaacatgatgtgattgtagctttttaaactatgaaacccctgagagattgtaccttctagttgaaataaagtatttataatagattgtggcttcagatgctgcttactgcttcttaaacctttaaggaacattcttaatacactttatagaattctgaggacaggttttgttttctttcaagttttgaactgcttcattacctataaaaggtctgggtatagctgtagcatttcatttgctttctgagagaaatggacagtttccttggccactgaagatgtttctcacgtaattaaacaacagtttatacatcttgatcctattcttttttttacagtgtgtttctttggagttaaaatggctatgatagcctcatcaaaaacagtcttcaatcc

SEQ ID NO: 94110 - DNA, 3349 bp, Homo sapiens
agtgtattaagaatgttccttaaaggtttaagaagcagtaagcagcatctgaagccacaatctattataaatactttatttcaactagaaggtacaatctctcaggggtttcatagtttaaaaagctacaatcacatcatgttgtaactacgtaaaaaacagagctgtaaatggaactgcttggctttgaccatacacatttctgcccagcccttacagaatctgcacaaagaaatatctccctttgctccagttaattgttcttgtatgtaagttgctttctattccagtatatccagagtggtgaaataacaaggccagccacgtagccaaaggtcgctccaagcgtacaggagatgggccatacctgaggagagaatgtatgagatcaaaaaagaacaaatgttttattattacttgagcacaagtgtaacctaaatatttctatattaaagcttaatgtgctttcttaaagaatgccaaaagtgtaataaggtcataactgcatttatcatgaacactaaaaatgtacacattttagttaatgtgcattaaactgtaacaaggcttctggcaattgtagatttagtttgacgctccccaaagtgcatgagacacatgctaaaattacaaattaaaattttgggtcagactttgccataatgatagactcaatttagctctctgaactagttggtaattttttttttttaattcccactttggctgtgtacatcaaatgaaatgagaagtgtgtatgctgaccaaaccacaagaaactttctttaagttgtgttaaagaggaaagacctagaatccaagcgtgttacatgaaaattgtaacagagcagctgcttccacctttcagatatagatgttggaaccacagcagaagttatagagcgacaacttatatacacacctagaatgtaagttaaacaaaataccggcttccagagaccccttttctccagccatattacatcaggctagaagtaattaatgttgatttatttcatctacaagcagttggtccctaagtgaaaggctctgcttgaaaaaaaaaagaaaaaaaagttggaggaaaattttcatgttcttctgtgaagcttatttggtacactggagccatttctaatctttctctggggggaacaggccacagaactgtgttagaggtgaaccatcttaattactagttctattacctaattcagcttccttgtttggtctgctgtggatctgccttattgcatatgccatgcatcagataatggatgcatcagataatggtgttagacaaagcttcattgtgaacaacctaatgcattttagagaaacaatctcatcacattttttctagcctttcctacatttaaacttgctgttgcccaaattataattttttaaatgtctttggtgggcttctgttaattcacatgacttgagcttatagctatgtctactgcacagattgggtaatggaacactaaacttttatacttgaaaatgacagccttaaatgctcatatcagtcacaaatctaggatgtactgtcttgttgtatgtgagctttgtagagatttttaaaaatataagcatcaccttcccattgaagagtggagagagtctactggatgactggccaggaactttctctctgaatcggacatttggatgtcttctttcttccaagaaatggtggttcacattaaagtatcatggccttatgtatgctcaaatggaatcttatgtaactttcttatttaattttggtctgcttatttttagataaaattgaaaggaattgtataaatcaattaacatattagctgagttgtccaacacatggtataaacgaattacaacagtaaactattacacatttccaacttgcctttggggatttatgaggattttttttggtggggggagggggctccaattcatatctctgaaacccttcacacttggtttactaattcaaagttagaagtctagaatttgccctgccctaacagaaacagattaggaatttgtctacacaaactggtgtcacctgtttcttgactgggatttggtttcctcattataaatatgggaggtagaacagagatctccaacgtctctcccatttatcacagtaattttcttattcacagtaatcattgttggatgttaccttttcagcttcacattctcaagatggtaaaaatcatgtatatagattatcagaactctaagcaaagatgactgtcacatctgaagctgaggtgccttaggtactctactgaccttgatgggtttggagttccccattgcttatcaagagctttttaattgctttggttctttagtttttctttttgcaaaaatccttcctgtcactttaactaaaaaccaaagatttgttttctattgataagcagactagagaaaaactgccttattttcagaagcatgtcttcattcaaagcttaggcttcaatagaaattcagactaatcactgaaatgactatttcaaactagtgaaatatctgggaaataaactgcttcaaaaatattttactgacatgaattttgctagtgaatacaaatacactgcctcaaataaggccatgtatgaatgaacttacaagatatttgagttaatcagtgtttgcatatagagaattagttctaaagttcttaaaaataaatttaggggctccctgaaattttatttaatactttgctaacttacactcttgttttatctccacaggtacattttaggttagctcatggtgaattctatttacaataagtggagcttggattaatgggttttgttatgaattatcttagtgactttagacactgtttccatttgatttttaactatttaaaataccaaattaaataccagtttgttggttgttacttttaaatgattgttactttaacagtgtcccttcttaacacatggggttacaaataaaatactatgcatagtttactatctacgtaaagcactgaactttttaccttagtagtttttatttattaccctatgtaaacatttaggataatactctttcctctatttatgctgagagtctactaatcattggcaaagtatgagtccctatactctgttaaaaaaagctcactgttaaagtatagggagaatagtaatccctcatgaatcccagctagattccaatttgggttactaaattgtattttaatcattttgtaatttcagtatggctctttgttctcaaacacatacataccaccacgcacattcttttaaacagctgccacacctcacctccaacagaatgccaaaaatgaaatgttaaa

SEQ ID NO: 94111 - DNA, 1046 bp, Homo sapiens
gataaggaaatagttttaaaggaaaaccttaggatctaattatgaaaatacctgattaagctaggatttacaaatgaattctgttgccatagtgtagtttaaaaatttttagaataattataagaaaatcagtaggaaacttgcttgaggaatagttcttagtgggcagcctccctccttttgctgttccctattttgataatctattttgatcttcaaaaatcatgaaaacggcccttaaagaaattctcttttaaaaaaatgacagggttacgattaagaaatgcttatttcaggaaagccaaggaggtactcttgtaagtacaaagcctgacccatcattaacagtcttcaaagccagtccacattttaatttgctgatggcatgcacttcttgatttacataacatgaataaccaagtgttccaagccgtaacccttcattagacaaaattttttaacatttcatttttggcattctgttggaggtgaggtgtggcagctgtttaaaagaatgtgcgtggtggtatgtatgtgtttgagaacaaagagccatactgaaattacaaaatgattaaaatacaatttagtaacccaaattggaatctagctgggattcatgagggattactattctccctatactttaacagtgagctttttttaacagagtatagggactcatactttgccaatgattagtagactctcagcataaatagaggaaagagtattatcctaaatgtttacatagggtaataaataaaaactactaaggtaaaaagttcagtgctttacgtagatagtaaactatgcatagtattttatttgtaaccccatgtgttaagaagggacactgttaaagtaacaatcatttaaaagtaacaaccaacaaactggtatttaatttggtattttaaatagttaaaaatcaaatggaaacagtgtctaaagtcactaagataattcataacaaaacccattaatccaagctccacttattgtaaatagaattcaccatgagctaacctaaaatgtacctgtgg

SEQ ID NO: 94112 - DNA, 1011 bp, Homo sapiens
cttaacccagcagttaaaggtgtaaactaagattaaattatttaattttggatacattttagtataaattcttaaaaatgtgttccaatataataaatattacttataattttgggggagatttacactgtcacagataacatggagaaactgacctatctgcaaatcagaacacctacagacatttagaacaactcacaaccattaggattactgtctctctcgagataaaaaggaagataaaatccagttctcaatctctcatgagctacttttcaatatgtttgttttgttaattgtgcttatcacaaatttgcatttgcatgactgagagagttcatctttcaaagcctgctgacctactggttataaataatcatttatattctcctccaaaattggtcttgaacagtatgtttttccagatattcctaaagtaaatgttattgtctgatacaggaatacatgcacaaatgaatctactcattgggatacatttctctagttaaaaatctacactcatccatgtatacactctcctgtgactaagaatactactttaggaagagttatttgcgaaggggtgtgtagttcctggtctggaattcttgtcaaaatgacactaaaaggttctggtcacaactcgtgcaaacgagttaacttggccagcattattctctctaacatgaaagtcctgttagcagagcattatcaacatgattaccctacgatgaacacgccttttcaatccaaaaccatttcatgccagttcaatgttaacacatttttctcatgcttgaaacatacaaaccatattcatataaatgagtattttattttggtctaaaacacagtatcatccctttggtaatggaaataccaattaacgtaaaaacctgcagctcttcaatcaatcaaatccataatcttagttttaatctccctccagcattttgcagtaattcatgtagttataatcctatgattcctagtttcaacttatgaaagaat

SEQ ID NO: 94113 - DNA, 1022 bp, Homo sapiens
accatgaggtttttaaactcacgttttattaatgggtaggcaggtaacatgatgattaggagttctggcatcagattactgggttgaaatcctggctttgtcacttgctagtgaggatgaaataataaaatccctctaaaatacctagctcagcacctgacacatggttattacttaattaatgttacaggcatttgtgacctagaaaagacatagtttaatgactatatttttagccttcaaaaaatgcaaattccatgatttatttgagttctcatatattagagaatatgttaattgtctcagtttgttgttttattttttctgcccagcagtctttcagttggtagagtggactgttaatttatctatttctctggtatttagttatgccaatttagggtatttggatttcacataattttcaatcctgtctgacatttcagatgacagtagaaagaaaacgtagcacttatagatctctccatgtaccctgcagggggcttggtactgtgaaatgagtaacttaatcctgacaaccgtagtgcaaggtaggttttactcccattttatacactagaaagtccaagtgtgagaggggaggagtacacatcttgcttagcattactcaggtgggaagagggagacttaagattcacatgagagccccactacaccatgattcttttcattgctggaaactaaaacatagcttttctttttaaaaaatggtcatagcttaggtctctttggaatagctaaattacttattatatttcatttctttccccacattgttttcattacatgccttgaccgttgtggtggtgtctgtattttaggccgtaatttatttgtaggagaatatttaaagctaatatgcaatgattttgtccctaacaaatccacacatgcctttaaactatggacttcagtgctacaatctttaaaaatatttgaaccaaataatcaagtctcggctaggatgcttatttcttacgaaggtaaaaaggaaaattgat

SEQ ID NO: 94114 - DNA, 1026 bp, Homo sapiens
caggttctcactctcttgcccaggctgtcctctaatgcttgggcctaaacgatcttcctgcttcagcctcccaagtggctgggactacaggtgtgtgccaccgagcccagccagtataggaatttttaaaaactaggttaatagctgcagaaatttcctattttcaactttgatatttattgcccttgtggtcttatattcatattttctgaacttgattgatggccaaattgaatgttcctcttgaaatttttagaagcagatagcaaggtaatttttgcagcagcggcctgtgttatcaagaaagctcacaaacatcagatttttcgtcttgtatcacaataagataaagctgatatgctaggtaaagcactgtgaggtaagtgctctttttatacccattttacagatgaggaaactgacacctagagggtatgtaacattcccaaggtcactgaacttacagtgatgactgtatctttatcttaatattaatgactttgtagtatgccattatatactttataacttatttaacaaattcactattgatcatttagattattgccagtattttgtgataataaacactgctgtgataaaatctttgaatctatagcttcttgaatttttctaattaggttcacagagtaattactcccaaaaagaattatggtattaaaaaataaatgtgctttctttttccaacatgaagataatttttttctgatcacgaagataatgtatatttatttagaaaattaaagcaatattagtaattctaaggaagaaagtaaaaattactttcctccccaaccacccagaggaaacctccatttgcttttggtgataatttttgcagctgtctctctccatgcctgtaactataatattcatgttgtttttaatctgctttttcccctcagcagtatattatggagctcattctatgtcaatgaaaacttacatatatgtaatattcgattatttgtgtaaaatattgtaccagttttttattaaagaaca

SEQ ID NO: 94115 - DNA, 1049 bp, Homo sapiens
tagaaagatacatacatcaatctttttttttttttttttgagatggggtctcgctctgtcgccaggctggagtataatggcatcgtctcggctcacgacaacctccgcctcccgggttcaagcgattctccgttctcagcctcccgagtagctgggattacaggtgcctgacgctgcgcccagctaattttttgtatttttagtagagatggggtttcatcatgttggccaggctggtctcgaactcctgaccttgtgatccgcccgcctctgcgtcctgaagtgttgggatttcaggcgagagccaccgcacccagccacataaatcttattgaaacatctctgatcgtaaagttgcgttgattgaaaaccttcatggttccttagtttgatatttaagaattttctaaaatcctaaccctaaatctatcaccatgataccatttcacaccaattacgatgactgtaataaaaaaaagataatgacaagtgtcaggagggtgtggaaaaattggaatcctcatacactgctggtgggaatataaaatggttcagccattttggaagagtctggtagttagttcctcaagtgattaaatataagagtttccataggacctaacaattccactcctaggtgtaatcccaagagagatgaaaacatatgctcacacagaaacttgtgcataaatgttcatagcaacattattcataataaccaaaaagtagaagcaacccaaatatccatcagctgttgaatagataaaatgtggaatatcccttgaagggaatatgattgagccataaaaaggaatgaaatattgatacatgctgcaacatggatgaaccttgaaaacattatgctaggaaaaagaagccagtcatacatgctttatgattccatttatatgaaatgtccagaataggcaaatccagagagacagaaagtagcttagtggttgcctagggctgggaggaaggagaaatggagagtgattggtaatggttaaagagtctggggatgatgaaaatgttctaaaacttacagt

SEQ ID NO: 94116 - DNA, 1187 bp, Homo sapiens
cttattagaaaataacatccagtcctcaaaaggcagcttcaagacagggaaaattggggctagttaagataggatgtgtgcccatgtgaagtgtgagcaagagaaaagaaacggcatgacaaccctaaaaatgcactatagaagaaggaaaaggggtgtgcagaagatgaagaatctggcctgaaagaaagtgctaccctagaagcaaaaataaacaaaaaaacctccacacagtttaccatgaaaaatagtactaaggatatgaattgaataaattaagagcaaagatgagatcatgaaacaaaatgacgtggagaagaagattgcagaattagtgaaataaattgagaatgcaaaggtcactattacaggacataaattaaaaatatcaagaaacagacaaattagaaagtcaggttttagcatggaagaaaggtttgagctaatcaaaatgaatgcggggtagggagggggttgggaagaataaagcatttagagaagatgtgataaatatagaggagaaatgaaagggatgcaaacaagactagttagtgcctctaaaatacccaacaaaaaatgattcaaagatgtgatagaagacagttttcacaaatgaagggattctccagtttgtacatcaaagggactcactatatcaagaaaataattgaatgaattggagttgtagaacaatgtaaataaaaactaatacaagcaatggaagttgaacagtgcagggaggagaagtgaagaaaatataattgtacccttcatatcccagctattctagctgtccccagatactgagcctgttgggtacaatctctttggggaataagttttaaacgaaatcctacatctcaaaccatgagttcccaccttacacctagcccctttcccctggttggcccaaagtactgggagccaggcttataccatctaggcagaatattgaaatatttctttcgagggaaaatggtactgacattttgggattctctaaaggaaagtcaggttcctaccccgtccctagttctgtgcatccccgtgcttgaattataagcatccagtcagctgttttaatgtttcattttgttgttgctgttgtttaaaaatagtgttattgagatataactgtataccatagaattcactcaaagtgtataattcagtggtttttagtatag

SEQ ID NO: 94117 - DNA, 1043 bp, Homo sapiens
caggaggcagaggttgcagcgagccgagattgtgccactgcactccagcctgggcgatagagcgagactcagtcttaaaaaaaaaaaagaaaagaaatttccacagcctccccaaccaccaccctgatcagtcagcagccgtcaacatcaaggccacatcttccaccagcaaaaagattacaacttgctgaaggctcagataattattaacatttcttagtaataaagtatttttaaatcatgtgcatttaaaaaactaatgctattgcccacttaatagactatgatacagtagaaatataacttttatatgcactgggaaaccagaaaatacatatgactcactttattgtacaatttgctttattctggtggtctggaaccaaatctgcagtatctaaaaggtatgcctgcacccaaatattacaataaacatagcacttttccttggaaaaggtttccttggtaaaggtttgcttctggaaatagacatgagaagggttgcctattgtgagttattgcgaagtgatgagatggttgttggaaatctgagggaaaattaacaccagatgtgcgtatgtgtggctcatgacacgtagtaaactgaggtagctgggaggtggttattttttaaaacagtattgagatataattcacacaccgtacacatcatctatttaaaatatacaattcaatgactttttgcaaccaccaatctacttactgtctctatagatttgcctatcctggaaatttgttataaattgggtcttatgtgatcttttgtgactgcctttttttacttagcataatgttttcaaggtttatctatgttgtagcatgcttcagtacttcattcctttttgtggctgaataatattccattgtatggatatatatcaaattttgtttacccatttatcagttgatggacatctaggttctttccacattttgcattttggttgttgtgaataagctgcatcaaacatttgtgtataggtttttttatggacatatgtgtttatttatcttgggtatgc

SEQ ID NO: 94118 - DNA, 1626 bp, Homo sapiens
tgagcacttagtctgtgctctgtgttattgtgttatgctaagctgtgtgtggtttctgaagtattaggaggaatctttttttttttttttgagatggaacctcgctctgtcgccaggctggagtgcagtggcatgatttcggctcactgcaacctccatctcccaggttcaagtgattctcctgcctcagcctcccaagtagctgggactacaggtgcatgccaccatgcccagctaatttttctatttttagtagagacagggtttcaccacactggccaggatggtcttgatctcgacctcatgatccgcccgcctcgcctcccaaagtgctgggattacaggtatgagccaccacacccggccttattaggaggattcttttgctgaggagcttatctgttcaagggacaaaaatgagcaaataacatcagattacaaatgtgtaaatccagcaataagtggtgtaggaactcaaagggacagagcatcagtaaagaatggagggggagatgggaatgatctatgatggacttaagtcaagagtatatgatttggtgagaccaagaaggaagagaaaggcacctcgtgcaaggagaatggataaaagcattgaaactgaaatgaacagggtatttttgtgtgatttgaaaggtaacagcccaatgagagcaaaagatgcatgctgagtagcttggcttcataaattaccgacttattccctttgaaatcagtactgtttgggacgagtgtggtggctcacgcctgtaatctcagcactttgggaggccaaggcgggtggatcacctgaggtcaggagttcaagaccagcctggccaacatggtgaaaccccatctctactaaaaatacaaaaattagctgggtgtggtggcgggtgcctgtagtcccagctacttgggaagctgaggcaggagaattgcttgaacccaggaggcggaggttgcagtgagccgagatcgcaccactggactccagcctgggcaacatagtgagaatctgtctcaaaaaaaaaaaaaaaaaaaaaggaatcagtactgttttcccttggaaccgtcttctaatattcataaagtctctagaaaacagaagtgtaacaactgaaagcattttctacattattaccataatatcccaaatggtattaattgcttttagccttttagtttgaaatttttaaatagtgaaattggattgaaatcttattactttggattagtgatttctccagttttcaagtctatgtctaataatgggtgtatttgggggaaatactgtcatgtgattttacaattagttctgctataatgtggcctgtgtgttcctaaaaatcactacgctgtacaaaatgggcagtaaaaaccacagagcttatgggaaagatggggttaggtcataacactaaaacaattcatcagtgacatgtagagagaagatgggaacttaataaaaatggtagcacagttttacacgtttaaaatggttacaaaatacaggcatacctcattttattgttcctcactttattgtacttctcagatattgctcagatcagatactgttttttataaattgaaggtttgtggcaaccctgcatcaagcaaatg

SEQ ID NO: 94119 - DNA, 1100 bp, Homo sapiens
gtacacacactaaactgacaggttattcttttctagatgggagagaacaagacctttgtaatggaaaatggtggttcctgtctaatccattttaaagcagaatgaatgtgtctggcacagtggttctcaaaatgtggttttcaaaccagcagcatcagcattttatcaaaatgcaaatactcaagcttcagtcagaaactctaggggtagagcccccaccaatctttagtttatccagctctccaggtgtttccaatatatgttaaccactagttgtagagaaccactacaactagtattcaatagtggttcaatagtggttcaatagtgtattgaaccactagttgtagagaaagttccagagagactattgagcagaaagctaactatctagaaatggattttgtttgtttgtttgtgtttgcagtgaaagtctcagcatggatcctagggtctttaacacttctgaaatctatcattaaagcgaaatacttgctagattgttttttaaagctacatgttggtggtaaaattatttatagtcatcattttggtggcattcatgttacctttcaaagtaaagcataggaagatatttcacattttatttatataataaagattatgtatgtgtatgtttacctttaacacttttttaaaaagtaatctttttttttttctaggttggcattggaaacatttttatttgcagttattttgtctacttttactactgtgccttgcttatgtttgttaggaccaaacctcaaagcatggctaagagtgttcagtagaaatgggtaagttttaattttatattataatgatattgaaattaaaaaataattaatgaagtatttttctattcatggcagtttgctgattattctgagtgcttctcattgctgatggtgctcagagatgccttaaggggtcactgcaattagggactggggacagggcaggcagaactacaagcccctccctccacgttagcaagatcagctctccttttttctgtatggtagaattccacctagccttttgtttgtttaaaaaaaaaaagaagaagaagaaataaaaaaaaattctactattaa

SEQ ID NO: 94120 - DNA, 1016 bp, Homo sapiens
gttcaggtcttttttcatacgggttgtgtaatatgagtgtgatttcaagaattatttagtattttgctttttcagtgcagttttcccaggaattttgttttaaaatgaaaaaaattgttattttctgcagatatttcctctatcatcgcataatactgtattttttgtatcctagctctctgatgtcaatcagtatttgataaatattgattaatgacatagctctatattaccatggaaacagaacctcttttcgactcatgtaggtcggatgggtagaatatgggcggaaggtggtatttgccttttaggcttttttagtctgtatcgaaggctgtgtatgtgacggtacaggacatgtgatctgatttgagtatacccaagaacatttgaactgttttacacattatgggaacaagttgtgtttgtagatgaaatggaagaatttattgtcctttaagcattatcttgaatcttcaggttattcatttctcttttaggtaactggatttttgaaatgctgtatctactttcttatgtcttgtttctcctttcatgtaatttttgttctgtatggagcaccactgatagagtaagtttgaaatttttaccctaaatttatattttaaaacattcatttaccaaactgtgtgctaattcttagcaactagagaaaaaccatgatgtgcatcattaatagatcaagtaaggacaccaacatcattagcagtgttattcttttttaaaaaaaacagcagaataacttaatttattaaatactcttgttacctagccttctagtatccaattgcatgttgagagaagggagagtagagaaactatactataccaataagtatttggcccttagaacctctgaaagaacttactatgattatatgtgtaagttataattagcatatcagttcttataaatgtgattctaaagtacttgaatggagtttttcttaacaaaagtcaatagattcctgtattcaaatactgaataagctggt

SEQ ID NO: 94121 - DNA, 1221 bp, Homo sapiens
aaaaaaataccaacaattcagcctaagtatatttgtggagttgttggaattataacctatgcattctagaaaccgcataaataaactttggttataattgcaacaggcagtagataatttaatccacacagttgatttcatctctttgatattggccaaaaaagtttaaatgaattgctttattggtcctaggacatgacccttttgcagaaaccagtcacaatatttaagaaattagtaaatttgttctttttaggctctgagagatgtttgtaccatattaagaaaatcaaaggtagaatagaaagctaagtctgtatgtgcatctacacgtctgcatcttttgtgttttgaaacaaatacattgctcatagaaaattgactttatgacctatttttaggggtcaaaacatttaagacaatggaaaaagtcgttattgcatatgctcttcttttcttgttttttgttagctagccatccaagaaaacaccatgaaagataacgatatcaagagactactgtatacccatcttttatgcatattttcaattatcctaagtgtcttcattccatcactcttcttggagaacttctcaatattggaaacacacttgacatggttgtgcatctgttctggttttgtaactgctgtcaatctagtactatatttagtagtgaaaccaaatacatcctctaaaagaagttcattatcacacaaggtaaggcttatgtctcaataactgatttttggatggagctagtgtttcttttaatggaagaataaagtattcatcaagtctttattagcttatttatagtgagcaaagggaacctgatatttttccccccaaattggtaggctgttacttggtggaaggctgcccacaatgtttgattgatccttgccttgcattaattatggaattatgacttcttcagagcatattataatattgtgagcctatatagtcattgttttatgtcaccattgaaaataaatacgtgtgacagtctatctttaaaccttactcaataagacattgcagtttatttttattatttttgcatttctgaaagccacttagtgggattttcagaaattgcaatataagcctgtggtaatgcttgtttccaacatggccttccttgactaaacaattttcagatattagaatcaattttccagaatattcactgcagtagatattcacttggctatt

SEQ ID NO: 94122 - DNA, 1065 bp, Homo sapiens
tagagtctgtatttaatttctgcactcttctgaggagaaatttttttaatcttctgatttttatattcttgaataaatgctttaacccattttaccttcattatcattaattacttatgatgaagtatttaccttcattattattaaatacatatagtaaagtatgttttcaatgggtagaaaaataaacattttcattatattcaaggtctatgacactgatatagtggcttctagattttatgctatatagagtaaatatagacccattcctaaagtactcccttgagtctgagaaataaaatgattgtattttatacaaatttttactgtttccctaataaatattttctttttaagcagtatcttaataacctattaaatgaggatttaaaaattagatatagactactattttggtagaaagtcaaggaatgaacttcttaatattatatgttaaatgtatagaaataacccactaaaatatcttttattctgatacagaaagtggtggaagaaagctgaatgaaaataaagctttgacttcaaaaaaagcaaggtgggtaagaggatccatcgatgggtcacataaatttccttcttttagtattaagtctgctggagtgaatttgatgtgcatcattccatttgcaataaaacagagttaggtggttcctagcactcagaaccaagctatctgttataatcctgctggttttaccttattcctcctcactgtatcaatatatgaagatattagtgttattctcttacagtttcaccagaaaacatgacttttattttatctccttcttaattatcttatgaatcagagacagcaggcaaatgtggaaagatcataagctttggagtcagacctaaatttgaatctagactcactgtctagccttatgaccttaagcaagttaagcatgtttcgtgacctttctaaactttactttttcctgagaattgcgtaaaaagtgtcccatcttaaaaacaagtgtttgataccacactttattatatccagcttaaaaattcggctgggtaaggtgactcaca

SEQ ID NO: 94123 - DNA, 1084 bp, Homo sapiens
ggtgccccagtgcccgcgcccggcgcattccgcccccggctgtcgcccccgcaccgcggcggaggcagcgccggcctctggctgggatgggctggccgggaaaaggactgctagcccgggccgcgagccccgtgcagaccacgccgctcacagtgggagcttgcgcttagtaggctctcgatgcatttctgtggaattgtttttctggttggaggaacgtggggttcctaaggggaagggggtcgtccggggccagtaggagggcatccgtgatcggggtcgtggtgggtcgcggggaggccaccggagactgaagcagttacacaggctgcagggaagggagcaccgaccaagtcacttggggctccaagagcccgatctgggggtcttcaaggtcgaggagaaaagatcctcttggggatgagggagggaaccaatgagtacatatgtgggaaatgaattgagtgccccgggaggtttaactaaccaaggtgggtaagggatgcggaggcgggagctggaagacccctctgcaactacttgggctcctaagagtctttgatgtggggtttgggcatccgagtagcagaagcggagtgatttttgtggagagggaattgcatttaaagaaggatgctaaaaaaacagtgtaaatacatcttggtttggttccgaactttgaaaggcttgagggattggagtcacaaggaaattttgacattttcttgtggcattccaactaaagggtgcctggctgctggactttgtcagttatcttttattgaaaaatatatgtgtatgtttgatggtattctatcagtcacaagtttttctggaaattatcataactacaccttgaaattcttgtagcaacctctctatccatagtggtggcttacttcttccctatttaacgtttagaatggattgtgctattatgtactactgacttttattctagaagactaataagtaattcacattctttcttttccttactttcgtttctctacaagatgatgcaaaattgaactacggattctatataagttttaaaatattttaacttgtgttgactgggaag

SEQ ID NO: 94124 - DNA, 1145 bp, Homo sapiens
aggagaaaagattggagacatttaccaaataattactgagcaaatacaaatgctcctcgacttacaatggggttagtcctgataaacccatcctaagttgaaaatatcattaggtcagaaatgcatttaatatgcctaacctaccaaacaacatagcttagcctagcctaccttaaatgtgctcagagcacttgcattagcctatagttgggcaaaatcatctaacacgaagtctgttttataataaagtgttgaatatcttatataatttaatgaatactgtactgaaaatgaaaaatagaatggttgtgagtttaaccaaattgtaagtcagagactgtttgtaatacacatggcaaggtgagtgaatgaagcaattctctttggcttgtggtagatagatgacagtcaaggatgacatttaaggctctgctctagttcaagaaagagactaattatatgatggtctgaattaaggaatttgtagtggggttggaaacaagagcactgctgatttcagagatacttaaaagtttgagtcctccagattttgttaatgttagaaggtgttagaagttgagtatgagtctaaggttcctggcttggcaatagaataatatatgcaagtttgggagagagagaatactgagtttaatttcagataagtaataatgctttttaggtaagtaatgataccacaatatcagttggaaatacgggtctggatcaggagcgtggtcaggattatagatatgattttgaaggcatatattttgtagctgaaaattatgaaaatagatgagtaatgcccataatatctaaatgataatgcgttcagaacaaaaagtaactgccattgctggtacttagttcaagagtttcataatatttacctattacccattgccaccccaaactctgttacaaaaaatgtagaaaaatatttgctgccagaaagccagaaatatttgagtgtccttgaaacactgtaccagttgggatctttcttcctgccttcggaatcctggctagccatccagtacaacacaggattcttaggcaaatgcacttccttatccctcaactagagtttctttttggaatccatgtttgcttctttgggctggtgaagtggtctctgaaca

SEQ ID NO: 94125 - DNA, 1778 bp, Homo sapiens
tccagtgaacatttcctttgagcattatgtaggcactcaaaaagtttcagagtttggaccattttgaatttcagatttttggatttagggatgctcaacctgtactcacatagcttcttgaaaggaaatttaagaaaagtacactcacctatattaagaacttatttttctagcaagtaatttatcacctctcccaatcttagcttctgaaatgtaaactaagaaagttatgaagaacattatccaggtgttaaatcttaaaagtagatccaagagtggaattagagaaatacagtggcctttcacaataaaagactagattttaagagtctcttaattatttggtgagagacacaggacagtacaatctgtgaatttctattcttttgaactatggagattttatcatgactggacaatgagaagaaatgttatagctgtagcttgatggttttgcttttataaaattcttctggtattgaagagaaaaagattattaatgggtaaagtaagaaaaattaactccattcctactgggtgacttttattatcagatagcaatctgataactgattattattagtttggtgacaataattatttttggatgcttggttgctaataatttgcctgatgcctagaaaattctgatttggggtctgtattctagtgggcatatagcccaaattagcaatcagattcttctactaaaattatctgatcaagctttcagataattcatgcatttacatagaatacatatcagtggtttaaacagaatttcacagacgctttcccattgaagctgattgtttggcaaaatggtgagtcatgctttactggccaactcacacaccagttgttgatataatcagttacctgagccaagatcaaagcagcagaatagaagatagtaccttggctctgatacctttctgtcctttctaaaaaaaaaaaaaattgggatgtaaatttccatccctctcctatgtgctttgggttttaagaagcaatataagaccattttttatctttagaatcttacagttgtagagataaaattgatatgcttgaaatgatctgaaaaggtgagaacaaattgtggtgttaactataaacccttttagagaaatcaacagggagacatttgaacttgatgtagatgttaaaattagaattgaatggtagagggccaactaagggaggtatttcagagtaaggagaaattagtttggataaagcagggcctgattatgggtggtaatgagtgaatgtgaggcgcaagatgctcaaactgttgaatgttcctaaaagaaacagaatctggcagtataatgagtccaggaagacaggagagagactaaggtgttgtagaaatctaggaatgagacaaaaatctggacaaagttactggcagtgaaagtagacagaaaaggtacactggagggacatcttgaaaaaagaaactgttgaactaggtaacattaaatatggtggtattaagtggaggaagagcaagatactctaagattttcccaagaaatcaagtacaatcctggtaaataacatttcaagtacaaacctggggagacatattgttaattttggatatagttaatttgaggtccgatggagaatagccagattgggacagacttttaggctgttagtggactgaagagtgtgtgttgaatgtgtggacccaagtgtgtttcccatacacatccagttgtatttgaggaggtgaaaattggtcctagagaatatttgtttataac

SEQ ID NO: 94126 - DNA, 1060 bp, Homo sapiens
tcctgggctcaagcgatcctcctgcctcagcctccaaaagtgttgggattataagcatgagccactgtgtctggacaaattttcctttttcttatggtgtcagggagggtagatccaaaaaggggcacgcattgtcctgatcagtttctttctttgtttctttcttggattcattacaagttgtcaaattattttccattagttttttttagagctaaaatttggcataggagacagtagtatcttttaagtttgttaaagattagtaaatgtattctaagcagttttagataaaaagtaaaaaagttgttattatcaaaacattattttatttattttagtccttagagtcttcatatttcttgtgatacttgatctaaactgctggggttataaagtggttatcctccctagagaaggaaatggtgcagattccatttgctcacttaccattggtaactgaatattatttgtaaattattagcagaatcataatgagctcactgttaagtagttcccctaatcagagactcttttctggattaagctgtctgctaaattcctcaactgagagttgttttactttgttggtatttttgtttatatttaaccaccttttatattaagggagatttgtgggaagcattgatgccctgtgctctagtaagcatgatcagtagaggcagtgctgacagtactagtcacatgtggttataatgctgagtaaaatgttatttactttactaagttggtttgcctaacggaagtagtctccctggagatgggatatcaatgcagaactgactcagcaataatctctccctagtcataaaacagccttactttttgttactgtcactaacatgaactaacatgctttggattggttgtatatcagaagctatgatttttgtcgccctattatatacttagttgtttttaccttatgtcatgttatcctggaaaggccgagacttaggtctctaacacagctagtgggagcttgaatttgattttaggtcctgctaaatctaaggcttatgttgtttgtgttatacca

SEQ ID NO: 94127 - DNA, 1043 bp, Homo sapiens
ttatttcgtgttttctctctgaaacagcatctctattcatgcatttgcctaagcaagactcctagtgtcattttcaataccactctctcctcatttcccattttcaattgatcttcaatcctatagatttgacatctgaacatctcatagccatctctcctatcaccatcctagtcaggtgcttgcttggactcctgcagtagtcttcagtgccatatcagcatccacccttgctctcttatcatggattatgaggcttacctctccaacttcatcttgacacacttcccttcactcactgggttgtgttaacttcagccattgttcatgtcatgctcatttctgcttcaggacttttgcaaatgctgttccctctgcctatagtacattgtcctgattcatttcttcttatccttcaggataaaattttgaaacatcacctcctcagaaaagtcttccttgctccccaaccccgaaactaggtcacgtttccctgttatctttaggactttgttacttgctactcaatcctggtactactacaaattttaattatgattgttaaggaaggcttatctgattcagtcagaaccagttgtctgtaaagtctaataaagcaatacatcatagaagggatacataccttaagtagtttattctaattttaagaatataactatgttcatttgccagtcttttgattaagaagctgttatcagaaaggggttcgatccagaccccaagagagggttcttggaccttgcgcaacaaagaattcagggtgagtcaatacagaaaagagaaagcaagtttattaagaaagcacaggaataaaataatggttactccataggcagagcagcagcatggactgcttgactgagtatacttatggtatttcttgattatatgctaaacaaggggtgggttattcatgagttttccgggaaaggggtgggcaattcctggaactgaaggttcctccccttttcagaccatgtaaggtaacttcctgacattgctgtggcatttataagctgtca

SEQ ID NO: 94128 - DNA, 1045 bp, Homo sapiens
cctctacctaattcagcagcagaagtatttcacttttattgagtatttcagagtcattcaactttataaaactccccactcttccatacttcattaggttagttgacatttaattaaatcacatagttacactaatataaatggcatgaacaggtttggaacctaacataactaaaagtgtaactcactgctgggaactggaagtgtctgggtatactagattagaggactgcacctctttttgagtgtacatggtctactgtattaatatatcatgtacactgtaatagtgtaactctaaggttgaattatatgtttattttttacccacaaaatagcaattttatatggttcaacctaatattaaataacagtataaaggataaatggccatccaattagataataatagatcctgtcacaatatgacgtgtaaataacaattaaaaataaatcatttttaaaaggccagaggattcttagattattttaagaagctgtagttatgacagccacacattcctgaaattctgggtcagttttactgtcaaacgtattatctttttctaaaaattattgaaatgccaccaaaatatcaatcaaaacttgtctcctaaactgcctcttgtgcctgaatttgatacagaaatacttttaatcagtctacctgtcccaatttttgttactgtaactgaaggactttctattggaaaggtgttacagctgagaagtctagatagactgaagaagaggaaggatttgagttgtcacattcttcgtctttatggcattcagcattaagaatataactgttatgttataactgtatattttaacaatataacataattaggtaagtataatagttctctctcaatgtattcttaaaacatgttaaacttaatttatttctcataaagcatgggttaagtcccattgaaataaactcctgggaattatttcaattattttgttttgtgtaaattttgtaatagatactagttggcattaagaaggaccattgactgtactatttcatttttat

SEQ ID NO: 94129 - DNA, 1032 bp, Homo sapiens
ttttgaaaagttgaatacaaatgtgtttcaacaatatggaacatattttgcctttgtaatattcaaattaaggaaacaggttgaagcacgggaaaaagaaaccagagtttaagagcgtttattttctttcacctgagttcagaatattctgcctgaaaggacttgggaagtaatgactggcttgaacaaggtcagtgcctaaaaggcccggtggccttcctgctgcccaacagaacacacggcctcatcacttcagcagggcagcgtaggtgaacgcttggccagtatcactgaaattctggacgggaaggggtgtgggcactgccttagctaccttcacatgctactttgattaatttatttttctctttttgctgttttgtctttagattttataatcaatggataaagtgggaaaaatgtggaataacttcaaatacaggtgtcagaatctcttcggtcatgagggaggaagccgtagtgaaaatgtggacatgaactccaacagatgtttgtctgtcaaagagaaaaacatcagcataggagactcaactcctcagcaacaaagcagtcccttaagagaaaatattgccttacaactgggattaagcccttcgaagaattcttcaaggagaaatcaaaattgtgccacagaaatccctcaaattgttgaaataagcatcgaaaaggataatgattcttgtgttaccccaggaacaagacttgcacgaagagattcctactctcgacatgctccatggggtgggaagaaaaaacattcctgttctacaaagacccagagttcattggatgctgataaaaagtttggtagaactcgaagtggacttcaaaggagagagaggcgctacggcgtaagttctgtacacgacatggacagtgtttccagcagaactgtaggaagtcgctctctaagacagaggttgcaggatactgtgggcttgtgttttcccatgagaacttacagcaagcagtcaaagcctctcttttccaataaaagaaaaatccatctct

SEQ ID NO: 94130 - DNA, 1014 bp, Homo sapiens
caaattacagggaatccctgttactggggagtgatggaccgttatgaagcagaagcccttctcgaagggaaacctgaaggcacgtttttgctcagggactctgcgcaagaggactacctcttctctgtgagcttccgccgctacaacagatccctgcatgcccgaattgagcagtggaatcacaactttagtttcgacgcccatgacccgtgtgtatttcactcctccactgtaacgggacttttagaacattataaagatcccagttcgtgcatgttttttgaaccattgcttactatatcactaaataggactttcccttttagcctgcagtatatctgtcgcgcggtaatctgcaggtgcactacgtatgatggaattgatgggctccctctaccctcaatgttacaggattttttaaaagagtatcattataaacaaaaagttagagttcgctggttggaacgagaaccagtcaaggcaaagtaaactctccggtccccaaaggttgttaactaggtccgctttcatgtgcatcagacagtacacctatagcaagcacacgtagcagtgttaggctttttcatacagtatgtaagcttagtgttagtatctgtcagatgctacctgctgttacttattcagataaacatggtgcctattggaacaatagcggatagagctacaggtgttcagtaagactacaaaaacattttgcctatttcgctaacagtttggtttttaatggctgtggtatttgagtgaggcaactctggggcatttgttatgaagaattctatttcttactgaagaacaaattattaatattggatgagtatttcaacagtgtgactaatgtttgaaattattttttctaagagtttttctataaccttccaaaagtcgtgatgtttgtagttactataaatcaagctttggaagtccaaaaagaataaaagactgccttccttttagaaaaaaatgcaattttctggccacaagggcatagtgcag

SEQ ID NO: 94131 - DNA, 1046 bp, Homo sapiens
aataagctaactctaaatttaatgctctacatcttatcagtcataattatatatactgtggaacagtatctgtagttactgcaaattactgtacagtttaggttataacagaaaactgacagagaagtaataaacctattgatttctctgcttataaatgaaagattgaaactatccaatgacatattatagtaaatgagtatctgtaacctcccactgcatcagaagcaggttaaatgaagtcttgtgaatttgtaatagatcagtaccatttattggtttggggaccatcttaattaaaaataaatgcccaaaatgtagaactttaaccaaagacttgtcccttttaaagcaaaatggggattgaagggacttataatttctgttgtttctaattaaagtccctgaagatcatataccaaagtgtttgagaacttcatccaaacctactttaaagcattatgtgcaattaagttgttatgacataattatattgcctaattgttgggtcttttttcttgagcttataatgtacctggaaaataaacctcttgagaaaaagaaaagttcatactgattattggaaaaggactatatatgtgagcaagattgtgttttagagaggaaacttgaaactccaagaaagcacttgatgtttttatatgcttgtagcaaattgatgttctaactgtagttttatagaaagtattaatgcttttatgtatttcaaaactttcatatgttaaatggaaattgttttaaatgtgtttgagtttatgtaagcatgtatacactgtgctaaaagtcacatgtttcagtttgtgtataatattaatatgcaatttttggtttaaatttttgtcttaaaatattagtggcttacattttaaaaaagaaaaatcaccagcatgaacttgcacctaagtctatattcactgtgtccttttctgaatcccattgtagcctgtcaactaaatttgagtgttaacggtctttttaaagtgcatttaaatacaaaccaggaatttctttagaagttgagatac

SEQ ID NO: 94132 - DNA, 1328 bp, Homo sapiens
gctatttcaaagccacagcataagaatgtcagcctagccacagagtctgagattctgagttcagcctagccacagagtctaagattctgtatcctctgacattttggaaatgatacactactggcttaagtgatgactctttcagattttcagtattttatacaactactgccacatccttatactttattgcttttctgtcttcttcaacctgggagagaccctgaatttgagtgtgttctctaatcaatagtggtttagctttcttttctatttcactcgtttctagggttttttatttgcagtttaggaactattaggaatgtcaggactttatcagcaggggtaaaactaccacctggcctagcctaagtaggaagtgaaaagataattcaccaaacaatgattaatcagatagaagttctagtcaagagggatattgttgaagttacctcttttagcctagatacatggattcttttcaaatcaggaaagattagaaaaggaacccaaaaaaccctttaacagtgtgaatctttatagtatttgaaaatgagaagaagcagcagattgtaatttggtttattggatgtgatggacgttctgtaatagaaaacctgaaacgatgattgaatgggaaaaagagactacaaaatttgtcgtaggatgtatacagacttattttctttattacagtattataagaaaacatatgtatttgtaaaaatggtttcctgtgtcaagtatttgtgcagtcagagctgacttgtaaactattcttgtaatagctcattattttgaaagatttatatatgatgaattctggatatatgaccaataaaactgatgaagcaaaacctcgagcagttgattttgttcacatcagcttctcctgccacatgcagggtgtgtttactacaaatgttcacatgtgcctgctcttatcatagttcctgtgactatcttcggctataccctgctccttttgcaggagtcaattctcagaattcaaagttactttccccttttaggcattttttcttctgaatgaaatcacttttggatcttcattctctggtcaaatttaaattatgacaccattctctaggagactgcatagcgttttcccctggtctggcgactgttttttaatttgatagcattattgaaaacataccagacccaagcaaaaaaagtctcccctggcattttgagaagacacacttttttctgccttttaaaaggaaattatcattgcctccctccgtaccctctgagaccctcggaccttgcactgacccttcttcatccagaactacccctctgga

SEQ ID NO: 94133 - DNA, 1093 bp, Homo sapiens
tcgtcactgtttctattttatcaggcaaatttgtgcacagagctgaccctcaggaggactggcacttttccaattaaagaagaatgagccataatgaaacaaataagcaaaagcctattttgaagggccttcttttaactggcaaatgtaatttctaaactggattatgataaattgactcaataatacatattctctctctatatatctagattcctagaagtagccccatactccattgaaagtttttggacacatatgagcgtggatattttgttgttttgtttttccttttttttttttttttttttaataaacagtgccatgaaagaacatggatattttggacgttagttaagcacttcttccggtaaaatgcgcaactcatcattgtctaatttgtattttgtaggaagggagtgaacaggcaccactaatgagtgaagatgaactgattaacataatagatggtgttttgagagatgatgacaagaacaatgatggatacattgactatgctgaatttgcaaaatcactgcagtagatgttatttggccatctcctggttatatacaaatgtgacccgtgataatgtgattgaacactttagtaatgcaaaataactcatttccaactactgctgcagcattttggtaaaaacctgtagcgattcgttacactggggtgagaagagataagagaaatgaaagagaagagaaatgggacatctaatagtccctaagtgctattaaataccttattggacaagggcttgcttcaagcatctgtattagtctgtattaatgctgctgataaagacgtacccgagactgggaagaaaaagaggtttacttggacttacagttccacatggctggggaggcctcagaatcatggcgggaggtgaaaggcacttcttacatggcagcaagagaaaatgaggaagaagcaaaagtggaaacccctgataagccatcagatcttgtgaaacttattcactatcacaagaatagcatgggaaagactggcccccatgattcaattacctccccttgggtctctcccacaacacgtgggaattctggtagataca

SEQ ID NO: 94134 - DNA, 1043 bp, Homo sapiens
gcgcgcgaaacgcaccgcctcctccaggaagcgcgcccagacagtcctcggccgacagcgggcgcctgccagcccaccgtgctagtcttaagagcagccagggcagttaggaaggtccttctgccgcgagagaaaaatcacatgtggtttgggggcttggagggaagagaaacggcttttgctctgtgtcctttaggataatgtggctaactctgtctaccgtgaaatggtggtatctgcatatcatgagatcagtgcattggctggactctgccccccaccgcggtccgagggtggggtgtccctaaactccatcaggtgaagtgtgtctgtgtcgtctttgtccatagttctcgcaagtgacgttgaaaacggagctccgtccgaagcagacaggggcgagggtttgacgagctccagggtggggtggtggagaaatggggaagaggcttggccagcctcagtttcctcatctgtggcgatctcgggacacatccagctctagcagtcggtggctttagcagtagggctggtttggctgggccgggctcttgtgctggggcgggaaagcaccctgatgtggcagcggggaacaccccgccccagtctctaacctcaaatcctgttcctggggccttcagcttaccctccctgagtcctctctgtgggcacaatcacttaggaggctttgtggaaggaggcagggaataaatgaatacagatataaataatttttaaagactgctcagcctgttgaaggctctgagagggacagatcgtgatagtaatagtaatagtcaacgcttacttcgtgcttcctgtgtgccagacactgtcctgagcactttaatcaaccccgtgaagcaggtactcttgtttgtcccactttacagataaggaaactgaggcacagagcaactaaataacttgatcagctagccaataagttgtggaaccaggatttgtgcccaggtttctgagtacatcctttaaatcacttgcactattacctctcaaagatgtacagcacaaaatccttgccc

SEQ ID NO: 94135 - DNA, 1216 bp, Homo sapiens
tcagaactcacgtgccagggtggcacagcccagggccagcacagcctccctcaggcaacagcacaggatcccaagccacagtaggggtgatcatggctgacaagaccactgcaggccctaagggaggccctgagagttcctctgtgggatggagattgagatgtaagcaacttttgaaaaaggaggggaaagaaaacacgtttaaattcagccactcttggcctccgtgattctgcactttgacccatttctgataggaagaggatggtgacgcagcaggccctctcctcctcaatctgtccctctgccactgtagggggaggcataagctttagggtcctcacaggctgtttctaaggcctttcacctaattatgatttgcatatacatgtacacaagaggactcccaaaatgagaagcctggggctccacaaaacttaactccatctctgactccccacttgtgtttagaataaatgcctgagcttctgagtgccccctggggctgcagtctttggggggattcaggagagggaagacagggcctagtctgcaaggtctctggagtcttgctgggggcataaaacgcacacacatgaaacaattagggactcataggagaattttattgagaaccacaatgtaggctgcagaccatgggtgagagcggggagctgtcggcatgtgcttgagcatcaaagaaggctttctggaggaggaggggagttctgagcaaggtctgaggcaaacaaggtccaggttcagtgggggtgttcaccccaaggtaactttggggcaggcgctggtaacatgtccttgtcatttcagccacagtacatgtgtgaggccatgctgatcctgggcaaactgcattacgtggagggctcataccgagatgccatcagcatgtacgcacgggccgggattgatgacatgtccatggagaacaagcccctgtatcagatgcggctgctgtcggaggcttttgtcatcaaaggtagctgtgggcaccagcctgggctcccctccactgtgtgcagctcgttgcactctgactcccagggccctgctgggctcgtgtccagattcttcacccctggtagtgcccatgccctggcactggtgtctaaggtggatgccggtggcaaccggccatgttgacattgcctggtgcctgggacgttaggagactcagattctcgccctggctctgtca

SEQ ID NO: 94136 - DNA, 1042 bp, Homo sapiens
gctaagggcatggagagtgactgccatttctccagccattcattctaccttgagcctggcagaccttagtcattggtgcctaatttagggttcactgtggctccatggatggagcacaggccccttgagaatgggtcctgcccccagcgtcagcctggccggctcgcgttctccttcacctcacacccagcgccagggaggtcctgatgccctgaccgtggtgcacatgaactgtgcagtgcagtgacatgctaggttgtgaagctgctgtgcaaagtcaaaaggtgaaatgccctcagcagccagaaggattatgatctgcagattctcctctccccgcccgttgaagatgggcttctttttttactgttctcttttggtcagtgcaaccccaaggtattctgctgtcacctggaattgtgtggctgattaaaactttttaaaaagaaagaacactacgctgcttccaggacaggatatgatagcatacttggtttttgtgtttttagccctggtatggcgggaattcactgttgattttggcttccctctccaaggggtgtgggctgtgtgcctcacatggacaggagctcagtccctgtggcactgctgtcttggccccaggtgagaggctggcttccagatggagaaggaggagcaggctgctaggggatcaggcctcatccagccagagacctggagctagtcgacactgatgcttttagctgaggggtcttggaattaatccgttttccctggattcattttttttttttttttttgagacagtctcactctgttgcccaggctggagtgcagtgatgcgatctcggctcactgcaacctctgcctcctggcttcaaatgattctcctgtctcagcctccagaatagctggaattacaggcacgtactaccataccctgctaattttttgtattttcagtagagatggggtttcgcaatgttagccaggctgttcttgaactcctgacctcaagtgatccgcctgcctcagcctccaggagtactggagttacagg

SEQ ID NO: 94137 - DNA, 1108 bp, Homo sapiens
gggttctgttgctgaggatgttttctgttttctacctctgcatccagggcccaaggctccagggttccaagggtggggcttcttggaagggcggctgccttggatgtgatgagtcattcagactgaaggagttgggaccagcctggtgttgggcctgaggctgtgccaggatcagcttggctccaaatcgaaagttctgagttaatgaaaaagcaagtcctcctcttgcaagggacctttcctagagctgggtattggcacagaaaggcccttgccggtgggaatcacaaggcagtgcctgccctgcagggctgtgttacaaccctccgatgcctcaaggactgggcgcagggcagcccaccttcatcctggattgagcactgtagtctggccgtttgtgcagaagcgctcacggggcagaaggtaaagaaaagaaacccaagcctgcagcacctgggtgggcttccagtcagatgtttgtggacaggaaaatagaccttatcaaccaggggacaaatacaaggttcccggcccctttttatgggcagaactgggtgactggactgtgaccttgcttaggaaaagccactgccagctccagaaactttttggccctgtgtatattggaaattgctttatagaggaccgcctccgtgaatgtacccctctactttgaacttttatttctctgaatcatgacagctcccttcaaaaaggcattatctccattatttttagataaattttcatatggtgacatgtacaaatcttaactgtataatttcatgaattaggccagtgtaaatatccatgtgaccagtaccctaataaagatacagaacatttctatcaccacagaaagtccccttgggctcttttctaattggtctccaccccaggcaacctctgttttgtttttgtgttttttttttttttttaagagataaagtctcgctatgttgcccaggctggtctcgaacttctgggctcaattgatcccctgcctcagctcccacagtgctgggattacagacgtgggccaccactcctggccttattttctattgatatagattaatttgcttttttgaataaatgaaatcataca

SEQ ID NO: 94138 - DNA, 1337 bp, Homo sapiens
ttctgtgcacagggcccggctgactttcttagctggcggtcttatctgataggctacactgcccacagcaggaatcctgttactgagctgagcccctggggatgctcacgccctgcaggtgctgtgtcccagcttctggtttgaaaactttggtgggtgccctcaccatctggaggaagtaagggtgaggccctggggttggaggccactctgtggccctgaacaggttccccctctgcccctctagttggctttctcccctctaagatggggcttctgtttgtccatgtcccagagggtgtgagggtccaatgagagggaaggaatgcaaaacacctggagtattttcacagctgttaacttcctctccattgagagccccccgacagccacctctaggggctgcctgctccccttccccacaactgaattttctgcaggtatgactttaatgtgaacatcaaggacagccaggagggaaagagggagagagaccagtggcagtcatgctttgcttctgctgggggcctggctgaaccatgtgcttggtgtacagtgctctgggaaggccaggtgaccccattcactagtgagggaggcttggagaggttgagtcacttgcccgagcttacccactgtgattccagcttcgggcctgagcggcctggaaactcatgccatttccaaattttggggcgtggaaggacagcctgggcagcccgtgggtgtgtgggagaagccagggcctagtgacagcggggagcatagagctgatgcacggtgcgctgactcccacccctctgggaccctgaatcaccattctcaaaggatgtctccttgcaggtggtcccaccctccctagagcctgcttccccctgtctgcactctgtgctgaggccacgcatgagggttgtgggtcagtgggtatgcagtgctgcagtgggtggaggtgttgactgaccgtcaccccccagaaagcccaagtgctttcagtcactttctgttcctgtagctccaccccctcccttcctcttctttcttcctgaggcacatgttttggtccttacagccaggatcctggctccaccctgccccaacctcaccaccctgaagaggggtagaaattgagtcatcatttcttttcaaggaaacagcccaaacatttgaaagtcttgaaagtcttggcgtgtaagtagcagtcccaggacacgtggcagttactcagcccctgtgtctgtttcctgtggcccatccagcccagaggagctggagttgcagcctgtgtggctggactgtaaataatttctgtgcacctttcctcataattgtggctaata

SEQ ID NO: 94139 - DNA, 1053 bp, Homo sapiens
ctcaaacccagtcttccccaaatatttttttaacacttactgtgtgcagaatacttggctaatctctattgtgaacagagctgatgaccaggcacttggtaggcagctggcactttgtaaagacttagcaaattgagtcccaggagttctggagttcacatggccaggaaaagaaaatgtaaccatgctgggtcaagagacaggtgttgtctttctcaggggtctcagggtgaaaagagaggaaaatctgaacccttttgtgcttgccgtaagcctgcctctcccttttggtaagtgacagcctggaaaggcaggcatcttccaggctctttttcctgttggaacatagggatttatttattcagtgatcatttcttgagcaccttctatgcaccacacattgtgctggtacagggataatgaagcctgtctccctcaccagcctcattagaagctgcacggactgagtaaggtaaaggaagggctccgcgaaacgtgtagcactgcctgctgccacctaggggactggggagcttgccagccgcttgcacatcccacccagaggctcccctaagatgaaccgtgtccttgacccatcatcacacccacatctgtctttctgttcctggccaaccaggctttacttgacttggaataaatggcttcctggcttctccccacgcaggctgtttctgggccagggtttgtttgaggccctgtttggatattgttaaaagtgggcagctttgctcagaaaggtcagcatgagagacaagaacaaagagatctttcaagctggcctctggcagggcagccagcaatggctcggaaaagccccagctccacctggcactggcagcttcagagctgggacgggattgctcaggctcatggccatctgcagagccctggagaagccccgtgtgctttctcatttctcagaggagtaagctgaggcagaggggcattctcaggtcagtgttagctgggaccccagatctctccctgtacagccctggccactgggacctctctattttttttttttttttt

SEQ ID NO: 94140 - DNA, 1139 bp, Homo sapiens
cagtggtttcatccctgcccagggttactgtgaggccagatgagacggtggatgtgacaattcagcttctaaaggagtaatgcaggccgggagcggtggctcacgcctgtaatcccagcactttgggaggccgaggcgggcggatcacttgaggtcaggggttcaagaccaacctagccaacatggtgaagccccgtctctactagaaatacaaaaaaattagccaggcgtggtggtgggtgcctgtaatcccaactacttgggaggctgaggcaggaaaattgcttgaacccaggaggcggaggttgcagtgagccgagaccacaccactgctctccaacctgggcaacaagagcgagactctgtctcaaaaaaaaaaaaaaaaaaaagagtaatgcatgtcacacgcatagggctggctgtttgaccaagagtagtccctgccttgggtttctcatgggccagcctgcctgaggcctttccctaaggtcccatgtttgcttcatggatacttggtcaaagaccagaaatgtgttatgctagcagtgctgagctgttgggtgatgggtgtatggggactagcgttgtttctttggcttctcctcttctgacctgccagaaggcttgcagtgaatgttctttaattgaggaggggctaccctaggagaacagccggaaggacaaaggctaggagcaggacaactacacaagccctaggtttaaatcctgggattaaatgcatggattaaacggagcagtgcatccccagcgctgggcagccttggggtgggtgtgggggttatggcagtgcacactaggcagggagaaaccagaggagaacattctgccattattctaagaacagtgaggaagagacggtgagaagatttaatgttcatgtattactttaagggtcacaagtgcattcacatctgttactgcatttgatctagaggattttctaatgaaagaaagcaggattctgaggccacttcaatggtggaagggaaagagtgtggctgggactaggtcagagctactcccagagcatgggggtacaccatgtggcctgagggcagtgagccagggaggagggagcaggacagctgggggtgctgggaaggaactgatgctcccat

SEQ ID NO: 94141 - DNA, 1016 bp, Homo sapiens
tgagggcctatcaccagcctgaggatttgtgctgctgctgctgccgctgctgctagtatgctcctctcttctgttcctattcttctgacctaattaacgcccggttctgaaaatccacccctccctctgccagacacaaattcagacactgttctcttaaaggtcaaggtctagggtggacagggggaggtttccactccaggcccagagtctttctctcctgagtgtcacaccctgcaggttgagtcaagttctgtgcgtgaggctgtgcctggggccaggagtctagccatgagcaagaactggtgaaccagacgggggcatgtgagctgaggcatgggctgggttgggggaggacaggagaggcctgacctctcctggtgagatgagttagggatggtgctgtaagagggtggtcctgaatggggttgtgaggaggtagaaggtgtccaggttgatagagggaactgcagcatgaccgaagatgggccatggtgactgtagggaccagcaaggggttccatgtcactggagagaagcccgccagttaggctgccccagaaaggagtttagattttatcctgatggccatagtgatggctcgcagcccactatcccctgaacaagattggtctgcacagacaggcaggagggtccccagaccctggatgtgcccagccaagcttcttcccacccctgcagactgcctggctccacccgctcccatcataacctcttgcttccaccagaattccaggtcagcctccactcggggatgtgcatcctataatgctgctccttcctgttctccccatgggcagggcctctgtgcccccgtcctctcacacccgagccactcttgcctgttggaggccgcccctgtgggtccccaccctgggtggccagagctggggagctgctggaggtggtggagtgggtcagtacatcgccggggacagaacgagggctgtattcctagttggctcaggggactagctcctgccaaccctctccct

SEQ ID NO: 94142 - DNA, 1001 bp, Homo sapiens
agattgttccaggagctgtaaatatccagagccctttcatggggctgagggaattcctcgcccccctggcccatctgtgccacgttccatttctggccccgcagccgtctctgaggagggccctcctggcttgccagtgcctcctccacgcatcaagggcgtgccagccagctcggggcctcggcagccgaggcaggccaggccctggcagggagggggaagaggagcaggtgctgcagcctgagtgcggggagaggcttgctggggagccttccctacccccatctgctgggcatgtgtctttccaaacctctctcctctcccccatcacatcggacacctcacagagcatcttgaagtcacagcatgatctccttggctctgtgctcagcagggtcttgtcaaggctcagggagaattcagaacacagggcaaggccctggccctccaagggttagagagtgagagaaaccctcctacagaactgcaggcaaaggagacaatgtgggcaacggtgaaggggctggaaaagacgagctggccgtggggatggggacaggaaggtgttgaaggcaccggtcagcctggggtagtagggacagggccgggaggaggtggggctggatcttccatggagcctggggagacagctcacagtggcatgggcaggttcttcctacctctgggaaacacagaaagcccgtctaatcttgggacagtgagtacaggtgggagaggcctagggccagagcagtggttcgcacccttctgtgggtcctggactcctttcaggaggtaagggaagctgaggactcctgctcagaaaaattcactgcacgtgcaagttagctttaaatccgagagaggctcctagacgctctccaggctcagtcaaaggtgtcgtgatagcctgggaggtaaggagtcttctgcctctgactagctggactcagagagatccagacacagcctggcaccatcccagcatccagggagctggt

SEQ ID NO: 94143 - DNA, 1038 bp, Homo sapiens
cccctacctggagcaccccattttcatcatctcctcctggaaggcagggtctcctgatacatcagcagaactccagggtgacgtttccacacatggctgcctcaccctgtggcttccactcctcccatttaggaagtgcttcctggtggctgccatggtcctttgtgccacaccacaaacctgcttctcttcattcctgagtgtggcagcagacccctcctcgccaggccatctggggcaggtgttttctcacagcagcctccctgcccccagtgcctggggctcccttgagttgagtgtgagtgcccttgttgactggcacgtggctcctgagtcccagggcagcatgtgcctggggaaggctaacctggcgggttccttcaacagatctccagtgccatggagcagctgcaggaggccctgaaggtacgcaaggatgatgcccacgccctccacctgctggcactgctcttctctgcccagaagcaccaccagcatgccctggatgttgtcaacatggccatcaccgagcaccctgagaacttcaagtgagtgccctgggaacactctggcagtgggggagctggctggcctctgcagcaggcgcccatgcacacctgccctgccatggtgtcagccaacacacatgaagtaagcacccgctgcatgcacaatccctggtggagagacaggggtgaggacaggtggggtcagcagacagctgtggtgctctgcaccaggaggtgcctggtgggtaatggggtgcacatgctgctcctcagcccccatgaggtggggtctgcatgggccacaaaggagactgcttgaatgcatgtgtttgggctgcttctgcctgccctgggctctgcatcagcctcaggatgacagtaacttgtgtaagttaatcatagccctgacacagtcagccaaggatgggattctaacatgagctgggctggcagctggagacgggttatggccctccaaggtggtcctgctccttcatacctccccacctccctcatttactgcatcagc

SEQ ID NO: 94144 - DNA, 1051 bp, Homo sapiens
aaggtacagcctgcctttggtagaacttactgtgatgccagctcagttttcatccacttctttgccaggcacatggtgtggtcgggtctgccctagacccattccggccctcaaagatgaagaaaatgagaagggggctctggcagagagaagtgtgatgcctgcagagggcccggggaatgcagcagggctggcctgcccagggagctgtccccagggagctgtccccaggaaccagcccagcccaggggacttggctgactgagggaggggctttcccacctcactgacacctgctgcttcaaccagctgccccaccctccacaccggagcctcttctctctccctgactcccagccaagtcccactccaccctgcttttcaccaaacaccagctccagcaagacccctttcctgtttcttcccctgtactgagtctgatccaaaaattcagcccttgattctctgggcagtgtgtcatttatagcgctctaattgttgtctcgaaggcagccattgtgttttcttcttcatattcccgaaagcacaggcccctgatacttatggagtgttggatcctttgcaaacctgcggaaggagagtacagtggcaagaccagttgtccccagcagttgcccactggggtcattcctactcagggctgtgtcctgccagctgtgcactcaggtccgtgcagtccatgctagggggatcccggtttctgcccttgggacctgataggcaagccaggtggtcgttagttctatgttccaagatgggtgcagggcatcctaagaattgagagaggtgggatttaaagccaggcttgggatggatgaaaatgaagaggagagttggtatctggggggcaacccgtgtgcagggtcaggaaaggcattttggggatgcagtgaggaagaaaaatacttgtccagaaatcccctcttctgaaaatcctggggcaaattccaccctcttcattctctaccaagttgcaatctaagagacaaagtatggaaagatgggcagagagtaaggacatcagagggct

SEQ ID NO: 94145 - DNA, 1066 bp, Homo sapiens
ggccagaacttagttatttgactgcccctaactgccgagggctctggcagatgtcattattctgggtgtcccattaaaagtcaggggatcaggccgggtgcggtggctcatgcccgtaatccgagcactttgggaggccgaggcaggcagacgacttgagcccaggagttcaagaccaacccaggcaacatggtaaaaccccatctctactaaaaatacaaaaaaattatctgggcatggtggtgcatgcctgtagtcccagctgctctggaggctgaggtgggaggatcacttgagcctaggaagtcgaggctgcagtgaactgagactgtgccactgcatgccagcctgggcaatgggagtgagaccctgtctcaaaaaaaaaaaaaaagtcaggggatctatcctgctagaagaaggggagaatacactggtgactggtgcacaaccgccacggccaggaaaggaacatgagaaggtgtcctagttctttcattctgagcatgagagaattccagggtaatttgcaccccctgagccctctcccctcccctggctgccatcatcactagcaagcatctaccaagcacctgttgaatggagggctgccaggaccagatcaccagggcaatgatctccctaaaccgcctcccccacctgacccaggctaagaatacaatcagcatccccccgccaaaccctgcctaatgactccaccagctgcagcaaatttgcaggaagggaaaaagatgccttgatcattttggaaggagctaatccccctggtttggttcaagataaattgcatcccaatctgtatggcagtaagttccatcgtgaattcactctttggttgaattcaaagagactgtcgtagccttcctctctcaactcttgccctcctctcctcccttcttcaagcctccttccaattccagtccagtgcgagaagctgatgaatggtacccacttgagagacgggctgcagggcaatgcctcttgggcagcgggtctgtgtgagagtgggagaggcacagagtcccatagatgctccaggatctgagtg

SEQ ID NO: 94146 - DNA, 1036 bp, Homo sapiens
tcaggaagacttccctgaccacaccagcagcatcgacctagcccctcttgagtgcccataacactcagatgtggcacttgtcattccactgtcctggtctctgaagtggtttagtggctcagctgctcccactcctgtccccactctttctcctccttgtggggagaccaggcacatagtcagtactcaaaagttgtatgttaagcactcagttatgagggcagcctgttcagatgccccagcagcagctcaacagcaaagcggagagggagagctgaggctgagagagccaaatctctgacccctccccctaccagccatctgcccctgggttcaaagaccccatttcctctgctctctgccttgggaatctccatttcaggctgtccccagggactagagcccgcatttctctcccatatccaggaagcctggcttctctgtgtttaattctctgatcctcccaagttctcatctccactagagaaaaaccagagtcctctcactcagaaagcgttgtattttaggatgtggcaggctactcgggttgcacaatgaaccttaggcaatgctcgtgctaagtaccccagtgcctgtgttgcagtcaaggttttagttaggcctctcctgctgcctactgggacaggaagagggaatgtctgggcctggtttctccacctctttctgggagcttcccttgggcatctctgttctctatcccaccccagacataatctgaactagggtaacctcagctgtcagcttttgctaggcagggttcttggcaaaaccacaagtcagactctgctggcccttctgcgttcctcatctgtgtcttgatccttctgtgccttcagcataggctcagccccaggagtgggcagccaagcctgggggctgctttggacaaaggctgagtgcccagtgaggccgaagagccgcgtctcctaaagtgcctaccgtggggtgtgcctgtgccacgtgggtctgaaatgtgtgtgtgtgggggctggcctgggttggagaaactgcccca

SEQ ID NO: 94147 - DNA, 1083 bp, Homo sapiens
cggaatgccagagagcctggagctgggctggaatgccagcctccctggaagggtgtgtctatgttccagggtggcgttagggagggccctttctgtagagcaggctcctcccagcagccctggtgtccccaaacgcaggctccagggaccagaaggctcctgcagcttccagctgattcctggcttcccagctggaaaggctgttacagaatcccaggaatgtgccctgagctcagaaagaaaattcccaaaataacttctataaatacttgagggcaggggtggggagggagggctcagcctggcccacagctggcctagcgccaaggctgcttcccagggcaggcccccctcaaaggaagaagaagcatgcacacccctagacctttgtgctgctctgcccttggagggcatcatcaggcactgaacttatgggctgggatggtgtgcagtggaattctgaaaaggcaaggcccttttcccctcatcccctcccaggccacagcccctggccacacactgtgcctctgcagatgacctgggtcccacagggaggctccccactgagtgtgagcccagaccctagcaagaccttaggccccttaggttctgcacctgcgtggccgtaagaggcagggcttgccaagctccacgtgggcagcatccctgatcggaggtccacatctgtgtgtgtgtgggtgtctctgggttccctggctctgcatttgggctacatcctgagctctgagccttgttgagctgctgtcctttggggaataacaaagcaggcaggaggctggggcgctgtccctctcagcctggggaggggcaggacagggatcacatccatgagccccacagtaactaagcgtgaccttgaggcggttgtgtggtcaggaggagctccgccctcagggaaggcttcctgggagagcagagtctcgagcacttgagatgtggccacacatccccactccctgagatccaggaagggagagaaggagggtcctgaggtgggaatttctggggacttcccccagagccctgcacctccctggaatcatgtctgtggctataaccagc

SEQ ID NO: 94148 - DNA, 1094 bp, Homo sapiens
ctgttgtctgccttatttatcaatgcccactacctcatatagtgctgaaaaaatgtgttgaattaatgaatgagatctatgtatctttcccttatttatttcttctactacttaaaaaattccctccagagacatattcactttaatttcttctaatttttacttgtgattttttttttttttttttttttttgagatagtcttgctctgtcgcccaggctggagcgcagtgacataatcttggctcactgcaggctccacctcccgggctcaagcaatcctcccacctcagcttcctgagtaactaataggtgtgtgtcatcatgcctggataatttttttggtagagacaggatctcactatgttgcccaggctggtacttttgattttcaaaaaagttttaattctctaattcttctgaaatgtgttttgcattctaaggtggtagtgtcatttgagccctgttgacttagaataggctgcctcaatgttgatatatgtgaaacctacaatcaccagaaatctgagctgtagatctggtgcaatatagtagatacctatagacattcacctagtctcttcaaatacttttgagaatgaggctagttataaaagatacaaacaggcacccatctttcctttcttaacatgatcagtgaaaatgagctcgctgaaatactttagtcacttatacatacaatctcaaaggttaggccaggcacagtggctcacgcctgtaatccagcactttgggaggccgaggtgggcagatcacttgaggtcaggagtttgagaccagcttggccaacatggtgaaactgcatctctactaaaaaaaaaaacaaaaattagctgggtgtggtggtgcacacctgtaatcccagctacttgggagaatgaagcccaagaatagcttgaacctgagaggcagagtttgcagtgagcggagatcatgccactgcaccccagcctgggtgacagagcaagactccgtctcaaaaacaaacaacaaaacaacaacaacaaaatctcaaaggttaacctatgaaaaaatgaataatgaccatatgaaggcatatcagattactactta

SEQ ID NO: 94149 - DNA, 1031 bp, Homo sapiens
caaaaaactagccgggcgtagtggctgatgcctgtagtcccagctacttgggaggctgaggcaggagaatggcatgaacctgggaggcggagcttgcagtgagcctagattgtgccactgcactccagcctgggtgacagagtgggactctgtctcaaaaaaaaaaaaaagttaaatttcaactctaacccgtttgctttaattcagcaattatttcagaaaggaaataatcatgattttgaaatactcttctgtcaagagtgtttactgtatttgatataatttcattaaacttgaaaacaaagagagatgttacttgggagcttcccatccaagaatggtgttttaggagaagttacatgtttacacaatcttaaaactgatgtcaattttccacaggatactcctatacctggcacttaccacttgaaaacttttattgaagaatccctattaaatccagtgatagcaacctacaattttaaaaacgaaggaaggaaaaagccacctcttgtgcaaagaaacaatccagtcctaaatgatcttccgcagtatatgcctcctgacttcctggacctgttaaagaagcaagtggctacttactcattcaaagacaaaccacggccaagccccagcacactagttgacaaagatcaggtaaagcgctactggcagattgctttgtgtgggaaagctactaagagcccctgaggaaagtatttttatacgtagagtatatcttcccccaggagaaatggaaaacctttaagatgtcttatttcccgtagaaatcaaacaaggactgcctgatttgcaaatgtttccagtaagatttttccctataacatcttcttaacctaaggggagtacatggggagaaatgttttcctcttgggcaactcttggtgggattcccctagcctggagagcacctgggatcttatctgtcattgggctatgctcttatctcttcaagcagtatatgtggtgaaccctcttcttttaaagagaaaaccctgcctctcggggag

SEQ ID NO: 94150 - DNA, 1061 bp, Homo sapiens
agtcttggcattttgattttacaggaaacgagtagaatgattgtataatttaactgtggtcataatgagctgggttcaaatctgttccaatgcttcctacaacataatcctattggaacccaggactgtgatatcaccttcaagttgtgtttttgtttttgtttttgttttttttagatggactctagcactgttgtctgggctggagtgcagtggcgcaatctcggctcactgcagcttctgcctcccaggttcaagcaattctgcgtcagcctcccgagtagctgggattacaggcgcccgccaccacgcccagttaattttttgtatttttagaagagacagggttttactatgttggccaggctggtctcaaactcctgaccttgtgatccgcccacctcggcctcccaaagtactgagattacaggtgtgagccacctcgcccagccccaccttcaagtcttaaccatactattagtgttatattaataggattttggtaattgtaccaaccataatactgtctggcatgtttgctctcagatgattctcccaataaacaactattgcagttaaatatcacccttggtgtaacgtattttcctaaaatttttagaagacggcaacaattttaaagatctgatatgtaacagaggcactgttgagctcaattatagatatgtattctcaagagaaatgcctctccccctttttgaaacttacaataatctggaaataaatctcagtgatactatataagataatgttttcttaaaggaacactatgtttatcctacgtgcttaatctgctttgtggatagtccttgaaatcattgacccatgctgtttctatttttgagatacttaaactattttctcatctagatgttcccatctctaatgtcacaccttgtatgggtttctggacttctctgtacctttcatattcttttagtctcgagggtaccagtccctagtctgctgagccagttttacaggctcagccaaaataagaaaatgaaatgaggcacagggaatggacttgattaatctcttaa

SEQ ID NO: 94151 - DNA, 3363 bp, Homo sapiens
agaaacagtttaattactctgtagaaatacgtatttgggtaccagtagtcttatttttgttttgtgagtgtaggttaggtctgtaattttgaattatgttccacagagcagcttcagtgacagaggagccagtcatttggggatttggttcttttcctctgtaaacctaggataattttacttaggtcagcatgaaagtacagtggtatgattggtcaaagatatatttgaaatattatcataaggtatcataaagattggttaatctttaggagtcaaagtcacatttcaattgctacctccattggtatttttccgttaaaagtttttgggtttttctgagacgtggggtcttacagtttggccaggctgaagtgcagtggctgttcactggcacgatcccaccactgagtaggctttaagagttaatacgtttcatttaggttacattttattattaatctgtgtatttggattgtggtctttctttcaaacagaattcaaagaagctttttcactatttgacaaagatggtgatggaactataacaacaaaggaattgggaactgtaatgagatctcttgggcagaatcccacagaagcagagttacaggacatgattaatgaagtagatgctgatggtaagtcttcaattttgtggggctgggaggggttgaagaagtgatacttagatgtttccactaaacctttgctgtttgcttatatgtttccactaaagctttgatgtttccactaaaccatttcaggtaatggcacaattgacttccctgaatttctgacaatgatggcaagaaaaatgaaagacacagacagtgaagaagaaattagagaagcattccgtgtgtttgataaggtacgtcaaggactggatatgttaaattttgaggatgaaatgaagataccaggactcattatgaagacttgtgtttttttggttgtttttttttttttttttttttttttttttgatgatttaccaacatattttaattaccaagcaaaagctttttaagaattcagtatagactttctaatatatgtattgcgttcatcttgtcaaaggaggtgtcacttgactttgggactaggaaataatgatttcaatgtaggacattttgcttggctcttaatgacatttgtaggtcaactgtgtagatttgtatgcatttctaaagtatgtttttcccccaatgtgaaatttagtagtaaacttaataaatttccattccaactctcaagtctgtaatttgactcagaaactatactaaattttttgctaggatggcaatggctatattagtgctgcagaacttcgccatgtgatgacaaaccttggagagaagttaacagatgaagaagttgatgaaatgatcagggaagcagatattgatggtgatggtcaagtaaactatgaaggtaaatgtttcagtctcacgcctcattcttcactttgatttttaagataagaggctctttgttagggaactgatcgaaattagtgacccttcccctgaaattaggttgctaaaacagttacttacatttaaccttcttaaaattcagagtgttgtctgcagactaggtaacattgctctgacttgagaacttaatttagaaatatttactatcaggttctatccctacacctggaatcagcattttaataggattcttgggtgattcatgtataaagtttgagaagcactgttcagtgtttgtgtgattgtggaacaatgtggaaagcaaacttattccaagtttcctaaaatgaaattaatgtgactttctttccccgcactgtattgtcttttttctttaattggctttagtctgaaactgaagtttacatgtgcttcaaaagtatcgtatctactaacttttaagatggccatatcaggaagcaaggcatatgaaactgaaggattttgagtaaaactctgtatttttttcatgatgtaactacttaacttagaaaagagcataaaatgtaatgttataaaaattaaacctagcccatagcattgaatttacaatattgtcttgtaatccagcagacttaaaattcaagtctaaactaagagccaagaatgctcttttttatattggcctatctaaagcgttaatttggctcttactaataaacctgaatagttatggttaatgaagttccagcctgggcaataaactagcttccctctgtacttaatggtaattctgaggaaagagaggaatggaaagagtactcagtaattgagtaaatgtgattttttttttttttttttttttttggtcttttgctattgactcattttttgtgtacttcttctttttcagagtttgtacaaatgatgacagcaaagtgaagaccttgtacagaatgtgttaaatttcttgtacaaaattgtttatttgccttttctttgtttgtaacttatctgtaaaaggtttctccctactgtcaaaaaaatatgcatgtatagtaattaggacttcattcctccatgttttcttcccttatcttactgtcattgtcctaaaaccttattttagaaaattgatcaagtaacatgttgcatgtggcttactctggatatatctaagcccttctgcacatctaaacttagatggagttggtcaaatgagggaacatctgggttatgccttttttaaagtagttttctttaggaactgtcagcatgttgttgttgaagtgtggagttgtaactctgcgtggactatggacagtcaacaatatgtacttaaaagttgcactattgcaaaacgggtgtattatccaggtactcgtacactatttttttgtactgctggtcctgtaccagaaacattttcttttattgttacttgctttttaaactttgtttagccacttaaaatctgcttatggcacaatttgcctcaaaatccattccaagttgtatatttgttttccaataaaaaaattacaatttacccaatggttgctctgcatctgagtcatttaactgttgaagtctaataattttgaaaataaaatatggcattggtttctgcttggtatagtctagataattttttctcgtgtggggaagcatatggagatgggtggcagaaatagtgaaggtgggaaaggaaggagaaaaggattggaaaagtgagaaaagagggagagaagcacagaaaataagaggaacaaaataaggggtgtaactaaggagagattgaagaggaaggccgaaaagatggggatctatgggggctggcttagtgtagtcaccttttgggggccaccatcatgcgtgcccacaacattcctccaccaccatgtgtgtcgtactgtgctac

SEQ ID NO: 94152 - DNA, 1494 bp, Homo sapiens
tagattcttattataaattgaatagccaacgtcagaataagagacttgtatgaaataattgactttggtatatgtcatggatactaacatatgggtataatataatacagtaattcaacctgctttggcaagtgggattgtaaacttgccgatggaagatgtgcagggctaattgtagttaaagacatgtattttagtctgcgtggatatactttggagccttgtggtgtagtggtggtctttgttttgttttctgaagactaccttagtataaaacaggaattctgggctagctaacacgctagaaaaggaggccaagaagtaactaaggcaacttgaaatggagaatcaaaaaaggaacaattgaatttaccctagttaaaattagctaacattttaacctaagaattgcatatataatcagtcagggaataaccatttctcaagtgaaaaaatttaagaagttggcattctattctataaatgtcactgtagcaatgtggatttttctcttaaaaaacagtgacagctgttgaaatgaagccgcttaaatcttgtcccttttagtttgctatggaagtatgcaaaattattacataaaacctgatgtcatgttctctttatgccatgccatagaacattaatacttttgatttatccttgtacattgagatggctggttaatgtcaatgttggggaaacttttttttccccccttgccggagttgttttttttttttattgtagtgttgaaatgctttgcaaactattcctttgttttcattagacacttttattagcatgagcaccaagcagtttatttgccacagttttcacagtaagcaggaagggtttgataagagctcaaaagcacttgagcactttttcttaggctggagaaaactgagaagcccagttggaactatatagcccatttaaagcaagctccccacttccataagcatatagaagtttgggggataccagaattacactagtcacctcaaatactatttgataggactgtaggtagaaagctattagtattaaagacaaatttaagcaggttttatttttatttattgtgtaatttgacttaaacttagtttttactttctgaggttggtaaattacatgtattgactgttatgaacaaaaagcaaacagttttgggaataattttttttttgttgagttacactgttttaaaggtatcacctatttgatctcatgtctcctcaaaaaaaatagactgggcctgatggctggtaatcttatcactttgggaggctgaggcagcaggatcacttgagcccaggagtttgagaccagcctgggcaacatagtgagaccccatctctacaaagtaaatgtatcgtcaaaatgtttttctgaagtagttttttttataaatatactgtctccttcccaaattgtctcaggctgtctaatactttcactcttaaactctgaccttctgtaatacatttctta

SEQ ID NO: 94153 - DNA, 2474 bp, Homo sapiens
aaacctccagcctgtatgggtgtggggagacgatttcaccttaaataaaactagcgttcattgacgtttgatggatttgcttcatcttgatgcttcaaatgttattctgaatttgaatgtgctggttacatttgctttcttaaagatgtagttacaggcatatgtaataaacattacaagttgtggagtaagcttttttttttaaataaacgaagggtaaagttttctttaatcagttttgataattgaatcagtaattcgaatagattttttcttggtagagttggtatctacgcatttgtggtcccttgcccagtgttaagcttttgtagttactgtttgcatcactggtgctttgggggttttctgttaaattgacagctcttactataagagacaaagtcgaaaaaaaaaatcttaataaaaattgacagatatcattatttgtgacagatacagtaaatttgaaaattgccttcacataactttataattagaggactgagattttacattaggaatccaattaaaaaaaattagccggacataatggcctgtgcgtgtagtcctggctagtcaatgggctgaggcaggaggatcatcttgggcccgggagttggagactgtagtgagctatgatcacaccactgcactccctgggcaacagagtgagaccctgtctctcaaaaaataaaaaaaattaggaccccaagttaaagtataaaaaattttatacggaagtaaagtaagattgctcatgtaactcttgagtttacatgtaatcaacatatgctcattgaaaacgggattgcttcaagaggactttgagtgcagggtgattaggtaagtaaaagatgtaaaaaggtagaaaatttttgtcacttgagtctaaataattgttcttataagtgccaacgcctgtttctgttaggctcagaagatcaaaggatttggctcttttaaaatatagaaagctctagcttcagctagaatttaggcctttagtaatagccctaatttttatgaagccattttgttccagtgatcttttggtgagagatgctatgtaagtactattcttcagaattaggtgtctttttaccctaatgaaataatttagattgcttttgatacaggtaaaacaaatatcctggcttccataattgtagaaaaaacttcatataggaatccttgttgtatcaaagtagcacctgatgggaatgaacagacaggaatggatgaaggatagcagtttgcgttccatttcaagcctatgggctcacacatttattcagataagaacaccacctttcactagataaactccaacagtattcatgcatacttttgaatggcatgtaggaaatgtttgataggtacataatgtattcacttcaggtcactaatgtaatacggggtcgtgctccttagtgttgacagatcacctatggttctccaaaatgaacattctagtacaggaggtctagggaggaacctgagagtatactaatgcctaggaactttctctggagtggcaagagcagtgggaagaattatgtcaatagctacagaaataagggagtaagaacaagtcatctctctagtgaattcttcttcactttactgagataaacatacatgttaatgagcttgagttttcccaaaagtataattcttctggttcttctaagaaaatggcactccctggaaacaaggaagaaccaaatttattcgcctttgtagcagttgggaaagttagtgctaggaagtcttcttgatttatagtaggctttaatctggatattgctggtaaaagtttattctaaaacctgaactctggataagtaatacaaaaagcttctcaaccttccaagcaaaattgagagctttcaggttatgtgagtaatttggtctcttgggtgcttaattcattccttgaagctcatttttgtgatctcttccaagattgcatttgcttggaggtagggagttagacaagatggtatgaggtccctaaattttgactttccaagcaaaattggacagtggttcctaaattgctaacatcctcgtttcttcctaaggcttctcatgtttcatatatagtagccttcccaaagtcccatttcccaccccccccccccccccaacccatgtagagagaacgaacctgtctcccttcctgtacagagtacgggatccttcaactttcacacaggctgcagtgtctgccacacatttagctcaacttttttttagccttaaagtgatgtccgctgcatctgtcgctgggttgcaccttgtggatttagtttgcataaattttctcagcttaaacaaagttaacattgaatagagtaagcttaccataaagggcttaataaatgccatgcatgtctacattcggtgtggaaattgagctagtcaggttgatatttaacattgtaggttctttgttaatttatatgaaataa

SEQ ID NO: 94154 - DNA, 1019 bp, Homo sapiens
accgcgtcccggcggcggctgcgagtcccagtgacgcattgcaggtacaaaccagccaatcagaggcaggctcaacgaccaacgggggacgcatcgccgccacgatgctcctccgcgccgcaaagtagcgcccctcaggggccgctccaccggccttttaacggctcgctggaaatgaaacccacttacgtcatccgttcgcccactttccttgatctcttgcctcatcgaccaaataactgtgaagaaaggggtcccgagaagagtttgaggggagggggttggccgggactcgtttgcgatgttccgttatctggatgcggcggagggatctggcggagggaggtgtttatgaggcgctgggggcggaggaggcgaattagtccgagtggagagagcgagctgagtggttgtgtggtcgcgtctcggaaaccggtagcgcttgcagcatggtgagtgcatcgctgagctgccggcgctgggcctgtggggggaagagactggagcgaactgactaaacaaaggaaactcgcctcccttacaccttcaaggagtggtttctgccagagggatggcgcgaaagaggccagggatgccggcgacggttgtgtcgcaggtgctcccccacccccattctcttcaggggggcttcctctagtgagttgagggccggacgcacagttcccgaggtggtgaagctcctcgggggcttggctggaggaggatgggtccgggatgagggacagcccagtgcacgggaaggagagaaagtgaaggaagggagagagggagcgtagagagccttctgtcgggcgtctggaaaggtcaagcagggggcgaattcaatccacccgaccgacggttagtgcgggcgccaggaagcgcctttgtccgcttgcggccgccatgcgcccagggggcgggaggagcgcgcggggccctggggcgagcgtcggcgtcgcagttagcccgcgtcctccgcgtgccgggatccagggggcgcgcgggcgggcgggcgg

SEQ ID NO: 94155 - DNA, 1251 bp, Homo sapiens
atttcaaaggagtataattaaattgccaggtaaaagctcaaaggtcttttttatagtgttctggaaggttctctgcctgtgtttgtatttcctttagcctccacgttcctctatccagttcccgcacccttccccccaggccccattcttcaaggcttcagagcagcgctcctccggttaaaaggaagtctcagcacagaatcttcaaacctcctcggaggccaccaaagatccctaacgccgccatggagacgaagcacctggggcggggcggagcggggcgcgcgggcccacacctgtggagagggccgcgccccaactgcagcgccggggctgggggaggggagcctactcactcccccaactcccgggcggtgactcatcaacgagcaccagcggccagaggtgagcagtcccgggaaggggccgagaggcggggccgccaggtcgggcaggtgtgcgctccgccccgccgcgcgcacagagcgctagtccttcggcgagcgagcaccttcgacgcggtccggggaccccctcgtcgctgtcctcccgacgcggacccgcgtgccccaggcctcgcgctgcccggccggctcctcgtgtcccactcccggcgcacgccctcccgcgagtcccgggcccctcccgcgcccctcttctcggcgcgcgcgcagcatggcgcccccgcaggtcctcgcgttcgggcttctgcttgccgcggcgacggcgacttttgccgcagctcaggaaggtgaggcgcggattggagcagagttgtggagctgggctgggctggggggcagcggcccccggccctcggcccccgaaacgggcataatagggaggggaccaagaggccgcgctttccagcgtggagaccggacggtgcggccgtgctccggctcaggccctccgcgcggtaggaaacggcgagggccgtcccggggagcagcctcacttcgcagctttgctcgccttggtagggaaatggccttgggcggaggcgggggacaggcagggaacggagtggccacgtccaggtttcctgcggccaccgaaccggtgcctcgcgccctggcgcacccacgtcctcggttcggggtggacttggggttccaaaacagccccagccggtggcggagtctttacgacagggaccagcgggctcgcccttgtccttgcagcgggccccggatgtgggcctcaggcggggacaggcgcccgcagggaggcctccagggccgctatgca

SEQ ID NO: 94156 - DNA, 1596 bp, Homo sapiens
cccagcactttgggaggctgaggcaggaggattgcttgaggccaggagttcaaaaccagcctgggcaacatggcgaaaccccgtatctacaaaaagttaaaaattagccaggcatggtggtgcatggctgtagtcccagctacttgggaggctgagacaggaggatcacttgagccctgtaggtccatgctgcagtaaaccaagattgtgccactgcattccagcctgggccacagagtgagaccctatctttaaaaaaaaaaaaaaaaaaaaaaaaaaaaaacaggaatgcatgcagattaaactatgtgtctgtatacagtatgcaaactttagcaagtgccaggcacttaggcagtagtctatagctgaaaaataaaacattcagaaccactttttaaggttttgtgtccttgtaactttaggcattattattacaatataacttagctgggacatgagagttaatagatccacattttaaagtagattttttttttaattttctagaatgtgtctgtgaaaactacaagctggccgtaaactgctttgtgaataataatcgtcaatgccagtgtacttcagttggtgcacaaaatactgtcatttgctcaaagcgtgagtaaaatatcctaattacctgtaagctttattttgacttaatacttctttaattgatgtgccttgagttggaaagagttttattggcttaaatctgaatcatgttacaaagtaagtgtgggaacacataaatttcaaataatctttgaccctggaactttagagttaattttttttttcccgtaatcatgaaatcagttatttttcagtttggcattaaggtttctttttcagtggctgccaaatgtttggtgatgaaggcagaaatgaatggctcaaaacttgggagaagagcaaaacctgaaggggccctccagaacaatgatgggctttatgatcctgactgcgatgagagcgggctctttaaggccaagcagtgcaacggcacctccatgtgctggtgtgtgaacactgctggggtcagaagaacagacaaggacactgaaataacctgctctgagcgagtgagaacctagtgagtggggctgcctatactacttgttttcatgctgttcagattcatttaattaaatttatttttgattatgtaatatgatttcatggtttagaattcagaagatatgagtgtccagtgaaaagcttccttctcattccagtccccctcgctacccattggacctccacagaattgatgttattgattattctataaccttccagagatagttgatgaatttgttatatatctgttttattatttttacataaatgatagcatactaggtataatttttcttttatatctttacttaacattattcagtatttcattgttgcattagtagtaaatgtatgtaatttaacctatgtatttgcttattgattgtgttttaaaagtgagatatgcttgttttagggattgtttaatgaaaaggcacagaaacccactcaagctagcttaagcaaaaaaagacttcattggaagggactagaaactggaaaggatgtcaggac

SEQ ID NO: 94157 - DNA, 1049 bp, Homo sapiens
ctcccgggttcaagcaactctcctgccttagcctcctgagtagctgggactacagctataccacacctgactaatttttgtattttagtagagatggggtttcaccatgttggccaggctggtctccaactcctgacctcaggcaatccacccacctccacctcccaaagtgttggattacagttgtgagccaccatgcccgggcctttcatgccttttcatctttttagttgaacagggcatgacactgccagctaaactttgacttaatgtgactttatgtattgtgtccagagaacagagggtcaatattagaaaaggtgttccctcctgggtgtgtcctttatgaaggatgtgtaagggaagaaattataggaatagctactgcataaattttttttctcttagtccttataattcgagaattttaggattagcttattaggaaaatagtatggaagactgagttatagtcaactgacattgtctttttactttatagctggatcatcattgaactaaaacacaaagcaagagaaaaaccttatgatagtaaaagtttgcggacgtaagtgcaattaaatgcatcatattcttgcacagttggtggctcaaatcttccatcctacaccattagaaaaagcaagtctaaatgcttttttatatttctgaaaaataaagttacttgaaatagagttgcaagaatagcacagagattctgggaatacacttcactcagattcaccaattaacattttggcacatttgctttttatatgtgtatgtgtggatgaatatgtgtgtgtgctttacatcagtgtatctatgcatgtataaatatttttcccagaagcacatgagagcaagttgtagacatcaggcccctttacccctaagtacttcagtgtatgttttcctaagaacaaaaggcattcttttatataaaccactatacaacgatcaaatttaggaaaaatttttttttttttttttagacggagtctcgctctgtcacccaggctggcgtgcagtggcgtgatctcagctca

SEQ ID NO: 94158 - DNA, 2038 bp, Homo sapiens
aggctggagtgcaatggcgccatctcggctcaccacgacttttgcctcccaggttcaagcgattctcctgcctcagcttccctggtagctgggattacaggcaatgtgtcaccacgcctggctaattttgtatttttagtagagatggggtttctccatgttggtcaggctggtcttgaactccggacctcaggtgatccgcccacctcagcctcccaaagtgctgggattacaggcatgagccactgcacccggccttacctttcatttctttagtaatttagttttaaagtagttctaatccaaataaaatactttcatatcttatttaaaaatcttttcaatataagaaaatcctcttaggaaaaattgtacattgtaattatgtttggttgcatggctgtcttatttccctttgatagatttagagacctcccaaagatttcttgattagtgataaacttagttatccactaatggaaaggaacagtgatgcatgtagattatagaaaatcaaacactgaatattctgattctcaattaatgttattttcaaatgattttgattatattagtattaatttgtattattcaatttttttccccagtatgagaataatgttatcactattgatctggttcaaaattcttctcaaaaaactcagaatgatgtggacatagctgatgtggcttattattttgaaaaagatgtgagtatcatcttctttattcctgtgttcaggaatgtagtctatcatgcctcaatgaattaaatatatttcatcacctttttatccacttacagatcaaccaaatggttcgctgctgccgttaattttgtcctccctgtcactcacatgcatcttgcttgtttgtatatttatgcctcttatcaaattgttctgcctaaaatatctcccctctttcttataattcttatttattatctacttggtggttacttagtttgtgcatatatgctcccctatgatatttataatttacacaaataaaagtctgttaaaaaagactgtaactgatatgattaaaatattttgttgaaactttaatatattatagtgaggtattttctgctgaaatatgaggtttgcttcaaaataatctgggcgggggtgaaaggatgaaaggaagaaaagatgaagtaagagaggctatgtgttgttggccttgcatctgggtgataggtacatgggcatcattgcactactctttctactttcgtgtatgttgaaaggttcctgtaataaacagttttttaaagttccaataaattagattgttatcactaaaaccataaagattcttggcagcggttcttttggcatacaatttgtatgtaattatatgtggccatggttggtttccttaaatatttttaattccttttctccttttcaatacaggttaaaggtgaatccttgtttcattctaagaaaatggacctgacagtaaatggggaacaactggatctggatcctggtcaaactttaatttattatgttgatgaaaaagcacctgaattctcaatgcagggtctaaaagctggtgttattgctgttattgtggttgtggtgatagcagttgttgctggaattgttgtgctggtgagtacagaacaagtaaaatttcatttaagggtatattttttcaagaaaaagtaatagtggctgggcgcggtggctcaccacacctgttatccctacactttgggaggctgagacaggtggatcacttgagcccaggagtttgagaccacactgggcaacatggtgaaaccttatctgtagtaaaaatacaaaaattagtcagatgtgatggcttgcacctgtggtcccatctacttaggaggctgatgtgggagtggtcagttgagtccaggaggtcaaagctgcagtgagccatgatcacaccactgcactccagcctgggcaacacagcaggaccctgtctcaaaaagaagaaaaaaggaaatatgaaaaagtaacatccatattccaaaacattcagggaaaaaaat

SEQ ID NO: 94159 - DNA, 1127 bp, Homo sapiens
aaaaatagtatgcatttaataaaaatcttattcttaatgatctagcttacctccaacttgccctagtcactttggcgatcttgtctctaaatagaaccttgaaaacacttaaatgtgtgtttccttgcaatataactttttctttttttatttaaataagtcttataaatgtgggaaaaaattatcttgtgttcctttaatttcatttttatttaatactattttcagaatgaacaaaagattgaaaaattatttagaatttttttctgtgctttttcctgtttcagataaaggagatgggtgagatgcatagggaactcaatgcataactatataatttgaagattatagaagaagggaaatagcaaatggacacaaattacaaatgtgtgtgcgtgggacgaagacatctttgaaggtcatgagtttgttagtttaacatcatatatttgtaatagtgaaacctgtactcaaaatataagcagcttgaaactggctttaccaatcttgaaatttgaccacaagtgtcttatatatgcagatctaatgtaaaatccagaacttggactccatcgttaaaattatttatgtgtaacattcaaatgtgtgcattaaatatgcttccacagtaaaatctgaaaaactgatttgtgattgaaagctgcctttctatttacttgagtcttgtacatacatacttttttatgagctatgaaataaaacattttaaactgaatttcttaactttgacatttcaaatttcttcttctttttcttttcttttttttttttttttgagatggagtcccactctgttgccaggctggagtgcagtggcacaatctcggctcactgcaacttctgcctcctaggttcaagcgattcttctgcctcagcctcccgagtagctgactacaggcgcccaccaccattcctggctaatttttgtatttttagtagagacaaagtttcaccatattggccacgctagtctcgaactcctgacctcacgatccacccacctctacctcccatagtgctggggttacaggcgtgagccaccgcgcccggcctctttttttctttttgttttgttttttctttttttttttgagacaggatcttgc

SEQ ID NO: 94160 - DNA, 1026 bp, Homo sapiens
ccacctaaatcccatcttgaattcccatgtattgtgggagggacctggtgggagatagttgaatcatggggatggatctttcccatgctgttgtgatagtgaataagcctcatgagatctgatggttttaaaaacggaagtctacctgcacaagctctttctttgcctgctgccatccatgtaagacatgacttgttcctccttgccttctgccatgattgtgagacctccccagccatgtggaactataagtccagtaagcctctttttcttcccagtctcgggtatgtctttatcagcagcatgaagtccagctaatacagtgcttgaacatgtaatatctcaaatctgtaatgtactttttttttttttaaggagcaaagaatctgcagagtgttgtgcttagtaaaatgaattttgaatcttttgtaaaagatcttcttctggttcgtcagtatagagttgaagtttataagaatagagctggaaataaggcatccaaggagaatgattggtatttggcatataaggtaattatcttcctttttaatttacttatttttttaagagtagaaaaataaaaatgtgaagaatttaattgtgttttagtattttaagtagattgtgatagtagaatggtttgagacactttaatagcaattagcatgtggtttttaaaaagttgcagtttggctggtcgcagtggctcatgcttgtaatcccagtattttgggaggctgaggcaggtaggttgcctgagcccaggagttcaagaccagcctgcccaacgtggtaaagccccatctctactgaagataaaaaaatttaaaaaaattagctggggctattggcacacacctgtggtcccagctaatcaagaggatgaggttagaggatcacttgagcccaggaggttgaggttacagtttaactttcagaggccaaggcaggaggattgcttgagtccaggagtttgagaccaccctggggaatgtagggagatcccatctctatagagggatagat

SEQ ID NO: 94161 - DNA, 1055 bp, Homo sapiens
tcgagaccagcctggccaacatggtgaaaccccatctctactaaaaatacaaaaattagccaggcgtggtggtgtgcgcctgtattcccagctactggggaggctgaagcaggagaatcgattgaacccttgaggcagaggttgcagtgagttgagatcgcaccattgcactctagcctgggtgacagagcaagacttcatctcaaaaaaaagagaaaacattttattaataaggttcatagagtttggatttttcctttttgcttataaaattttaaagtatgttcaagagtttgttaaatttttaaaattttatttttacttaggcttctcctggcaatctctctcagtttgaagacattctctttggtaacaatgatatgtcagcttccattggtgttgtgggtgttaaaatgtccgcagttgatggccagagacaggttggagttgggtatgtggattccatacagaggaaactaggactgtgtgaattccctgataatgatcagttctccaatcttgaggctctcctcatccagattggaccaaaggaatgtgttttacccggaggagagactgctggagacatggggaaactgagacaggtaagcaaattgagtctagtgatagaggagattccaggcctaggaaaggctctttaattgacatgatactgtttcatttaaggaaaaataataaaaaaactcttttttttgtatctaattaaaataatgttctgatgtttacagaaactttgtatatttaattggacattagaacaagctgtttgttgtgtaagatttattttacctcagatcttttctcccccctttcctttctgtcttgtgttccaaaagagtaattattacggtaaatattactgtaattatggatttatcaaataagatgcagttctttagcattttttgataaatcgagtggaactttagcctgttattttactatttgttttattttaactaaattctgattgtgtcattttttttttttttttttgggaccgagtctcgctctgtcgcccaggctggagtgca

SEQ ID NO: 94162 - DNA, 1004 bp, Homo sapiens
tcacaaggttgaaagggcctaatttttgtgtttttagtagagacggggtttcactatgttggctaggctggtctcaaactcctagcctcgagtcatccacccgcctcgtcctcccggagtgcttggattacagcatgagccactgcgcccggcccccattttagttttgatggacatttgggtaattttcttttttggctattctaaataatgctgcaattactgttaattttcaccttgtaaaaaccattttcaaatctcaagagattaacctttagttttcttggtttggattgggaaggaacaccaaggaaaatgagggacttcagaatttattttcattttgcatttgttttttaaaatctttagaactggatccagtggtatagaaatcttcgatttttaaattcttaattttaggttgcagtttcatcactgtctgcggtaatcaagtttttagaactcttatcagatgattccaactttggacagtttgaactgactacttttgacttcagccagtatatgaaattggatattgcagcagtcagagcccttaacctttttcaggtaaaaaaaaaaaaaaaaaaaaaaaaaaagggttaaaaatgttgaatggttaaaaaatgttttcattgacatatactgaagaagcttataaaggagctaaaatattttgaaatattattatacttggattagataactagctttaaatggctgtatttttctctcccctcctccactccactttttaacttttttttttttaagtcagagtctcacttgttccctaggccagagtgcagtggcacaatctcagcccactctaacctccacctcccaagtagttgggattacagttgcctgccaccatgcctggttaatttttatatttttagtagggttgcggggacagggtttcaccatgttggccaggttggtctcaaacttctgaccttaggtgatcctcccacctcggcttcccaaagtgctgggattac

SEQ ID NO: 94163 - DNA, 1077 bp, Homo sapiens
ggagttgagaccagcctgggcaacatagtgagactctgtctctacaaaagaaaaaattagcggggcttagtggcgtgcgcctgtagtctcagctactcgaaaggctgaagtgggaggattctttgagccccaagggttctggcttgccgtgagccaggatggcaccactgcactccagtctgggcaatagagtcagaccctgtctcaacaaataaaataaaactgtagtaattataaagtggttttggctgggggagaaatgtacagttgaacatacggattaagaggttgaaagttggtcttaggaagaggaactttttgtggaaatttcttaatatttgaagaatattatgttattgttcctctgtttttcatggcgtagtaaggttttcactaatgagcttgccattctttctattttattttttgtttactagggttctgttgaagataccactggctctcagtctctggctgccttgctgaataagtgtaaaacccctcaaggacaaagacttgttaaccagtggattaagcagcctctcatggataagaacagaatagaggagaggtatgttattagtttatactttcgttagttttatgtaacctgcagttacccacatgattataccacttattgtaatatgcagttttggaagtatatgttaccatttaactgtacagagtacatagtaatagagtggtaattatttagattgattaaagaactcatttttttaaataagttttttttttttcactataaaagtttattttatttgagatggtatggtatcgaacatgttcatattgtgtgtaatcgtgggtaaattactcaacctttatgtcatagtttcttcacctttaaaatgacattaataaaagagctacttaataggattataagcatgagatgatttaatatacataaaatacttacagtctgatatataggaagcacttaactctttatcctagaaaagatttaaggtgaccttaacatatatgtcagaaaatctttaaaattgtggaaataaaaggttgtataattctgctatcctaaaattactagta

SEQ ID NO: 94164 - DNA, 1118 bp, Homo sapiens
gtgtgagctcaggagttcgagaccagcctgggcaacacggtgaaaccccttctctagtaaaatacaaaaaattagctgcatgtggcggcgtgcacctgtggtcccagttacttgggaggctgaggcaggagaattgcttgaacctgggaggcagaggttgcagtgagctgagattgcgccactgcactccagcctgggcaacagagtgagactctgtctccaaaaaaaaaaaaccccaagaatttgattaattctgttggaattttaagagttaactgatccccaaaatgactcagctgtatgcaatttaatgcaatattaattcgcatgttgactctcagaattgcatacagctgagtcattttattgagtaggattgataagtatactatgttatgccaacagtaactgtgatgcttctaaaattgtgatttttaaattggcattgtcacagaaacagcagagtagttgtttttttctttaagcttcttttagccagaaacataaactgaaactgtaattattactgcaatcgtatgttgaatagacttgtgaaactagcaatttattaggcttttaatgatatctggaccaaaggctgagggagctgtgctgtgtgtatgttgctttgtgctttgttttttagaagcttgtcgtttctttgccattttacttctttctttttttttgagacggagtcttgctctgtcccccaggctggagtgcagtggcgcagtttccgctcactgcaagctccgcctcctgggttcactccattctcctgcttcagcctcccaagtagctgggactacaggcgcccaccaccacgcccggctaattttctgtattttttagtagagatggggtttcaccatgttacccaggatggtcttgatcttctgaccttgtgatccgcccgcctcggcctcccaaagtgctgggattacaggcttgagccaccacgcctggcccattacccattacttgtttcttaatgttacattctctttccctctttttttttttttgttttttgagatggagtttcgctcttgttgcccaggctggagtgcaacggtgccattttggcccactgcaacctctgcctcccaggttca

SEQ ID NO: 94165 - DNA, 1169 bp, Homo sapiens
gatctgcccaccgtggcttcccaaaatgctgggattataggcgtgagccaccgcacctagcctagattcaggctgcttctttttttttttttttttgagacagagtcttgctcttgttgcccaggctggagtgccatggcatgatctcagtgcaccacaatctctgcttcccaggtttaagcgattctcctgcctcagcctcccaagtagatgggatcacaggcatgagccaccatgcctggctaattttgtattttttgtacagacggggtttctccatgttggtcaggccagtctcgaactccctacctcaggtgatctgcctgcctcggcctctcaaagtgctgggattacaggtgtgagccactgcgcccagcagattcaagctttttaaatggaattttgagctgatttagttgagacttacgtgcttagttgataaattttaattttatactaaaatattttacattaattcaagttaatttatttcagattgaatttagtggaagcttttgtagaagatgcagaattgaggcagactttacaagaagatttacttcgtcgattcccagatcttaaccgacttgccaagaagtttcaaagacaagcagcaaacttacaagattgttaccgactctatcagggtataaatcaactacctaatgttatacaggctctggaaaaacatgaaggtaacaagtgattttgtttttttgttttccttcaactcatacaatatatacttggcaatgtgctgtcctcataaagttggtggtggtgactcactcttaggacacattcagatttcttttttttttttttttgagaaggagtcttgctccgttgccaaggctagagtgcagtggcacaatctcagctcactgcaacctctgcctcctgggttcaagcgattctcctgcctcagcttcctgagtggctgggattacaggcatgtgccaccatgcccggctaatttttgtacttttagttttaccatgttggccaggttcgtctggaactcccaatctcaggtgacccacctgcctcggcctcccaaagtgctgggagtacaggcgtgagccacagagcctggccatgttcagacttctaataacaggtttgtattgactcttagcctcatggcagaagccaagagacatgagaca

SEQ ID NO: 94166 - DNA, 1273 bp, Homo sapiens
gcagttctcctgcttcaacctcctgagtagctgagattataagcctatgctaccacgcctggctaatttttgtatttttagcagagatgaggtttcgccttgttggccaggctggtctcaaactcctgaactcaagtgatctgcccacctcagcctccgaaagtgctgggattataggcatgagccatcatgtccggcctccccatcatgtacccttaaataccatcaagcacagttccattgtgtaaaaacttggcttgatttaacctgttaattggaacactgtcattaatggaaattaggaatatgaggtaagctagaggttttattttaatgactttgggttattaaatctataagaaatgaaattcatttagtcataattaatgtcatgtttctgcatctatattacttgttgggtttacagacgaggtagtgtattattagtgggaagctttgagtgctacatcatctccctttctataaaataaattgagtacgaaacaatttgaattaaaacacctgagtaaatagtaactttggagacctgctgtactatttgtaccttttggatcaaatgatgcttgtttatctcagtcaaaattttatgatttgtattctgtaaaatgagatctttttatttgtttgttttactactttcttttaggaaaacaccagaaattattgttggcagtttttgtgactcctcttactgatcttcgttctgacttctccaagtttcaggaaatgatagaaacaactttagatatggatcaggtatgcaatatactttttaatttaagcagtagttatttttaaaaagcaaaggccactttaagaaagtttgtagatttttctttttagtatctaattgtagcacctttgtggacagtggatgtaatattaagtgacagatgggaaaaggatttttaaaaaaatagcaactgtttcagtggatgaaataaagattattagcagagaaaatgaatattgggcataactgtcctggtgaaagacaatctcataaatgaacaatttcataatttcgtaaatgcaactgcattttattttcaaagagaaggaaaattatagtcactggaaacggaaagagaagttagaggtaaacataggacacacaagaaaactttcattttgtttattttcttgtttttcttttgagacagggtttccctctgttacccaggcttaagtgcagtgacactatcatagttcactaacccctcaaattcctgggttcaagtaatcctcctgc

SEQ ID NO: 94167 - DNA, 1029 bp, Homo sapiens
taaggctgtcttttaaataaatcagattccctgttaaagatctgttctagattccctagggggttgacctcatatagtatcttctttttctttggttacaaacttttaaacttgtctgaggttataaggtgaattcaactgtccactgtcaatgtagatatttttaatggatttagggatttaaattacatgattcagaaccactttgaggaagtctagggaatatcagttgtttctgtataatttctgaaagcttcactgttttctaggtgtgcacttaattcatgtgatgaagggaacagtatttacatgagtggtttggttaatttttcccctcctaagcttagctttgtgtatcgtgcgtgcttccagtgtttttgtggctgctttacataagtcttttagaagtattttctatttttgaagtaaatgtggatcaaaaccaccccaagacaggattgaaaaaaagacagtttttcgcaagaaagtaaataattttatttagcttgggactttaaatgatatgtcttaaatgtaaacatttctatactgcattttggccatcttttgatactagttttcagatgcatattgttatttcatttattattggaaaagtagtaactttaaacaaatttttattgaaaatgctgacagaggccgagtgtagtagctcacacctgtaatgtcagcactttgggaggccgaggcgggcggatcacgagctcaggagatcaagaccatcctggctaacacggtgaaaccccgtctgtactaaaaatacaaaaaaattagccgggcatggtggcaggtccctgtagtcccagctactcaggaggctgaggcaggagcatggcatgaatctgggaggcggagcttgcagtgagccaagatcgcgctactgcactccagcctgggcaacagagcaagactccatctcaaaaaaaaaaaaaaaaagaaagaaaatgctgaccaaaaaaaatgaaatagttttaaagaagccacagttgtgtgatcctgatacaacta

SEQ ID NO: 94168 - DNA, 1062 bp, Homo sapiens
tacaagtatgagccacgatgccagtccaattcttgtgtagttttttaatcagctgaatttaacattcaaattcttcttttaaatcttccaataggcagttatctttataaagatcctatataatcaagactttgtttctgaatattttatgtatgtttttgctactgtaaatgagatctatttctcattgtggtttcttgctgttattactggtaagaatttagtgaaacaaagtacttaagagtatgtctttaaattgtgagattttgatgaacttttaagaaataaaattctttagtttcttagagctttttgagatttctaaggtagatccttggtttgggcaacatataactattacaagttttgcacattgaacgttatttggtaatttttagagaggacattttaaatgtttaggaaaaatataaataaaatgtagaatactattgggggcatatacatcatcagcactgtaactgtttcatatgaatcatttttgtacatatagaactctaaagtcctaatgaacagaattttacatttctataaatagaaagtccttaatagttgtgactgaataacttatggatagcaaattatttaactgaaaacagtaaaatttaagtgggaggaaatatttgctttataatttctgtctttacccattatttataggattttgtcactttgttctgtttgcaggtggaaaaccatgaattccttgtaaaaccttcatttgatcctaatctcagtgaattaagagaaataatgaatgacttggaaaagaagatgcagtcaacattaataagtgcagccagagatcttggtaagaatgggtcattggaggttggaataattcttttgtctatacactgtatagacaaaatattgatgccagaattattttataagttccctgtccccaagatgatgacttcacatctctgtcaaacagaaatcgcccaacaggcccttgtatgatgtcatttaaacaagccctattttaaatgtcacctccactggtaacaggatactcctaggaggatcaccaagcccaat

SEQ ID NO: 94169 - DNA, 1050 bp, Homo sapiens
tccaaagaaatacctttggttaagaaaagaattctcatgcataactcctcgagggtggggttacaccttaatccatcctcaggtgctcatggtaattggggcaaatatgttgcccagtgctggtgctctgcagccttggatgggtttacccagaaagcagctttcaagtcagaaactaacattcataagggagttaaggattttataaatagatatccataattcatgtagttttcaagtaagtagtatttgaatcttttctggttagataataattgtgagtatgttgtcatataataacagtatgtttttcactatttaaataattttagaattacattgaaaaatggtagtaggtatttatggaatactttttcttttcttcttgattatcaaggcttggaccctggcaaacagattaaactggattccagtgcacagtttggatattactttcgtgtaacctgtaaggaagaaaaagtccttcgtaacaataaaaactttagtactgtagatatccagaagaatggtgttaaatttaccaacaggtttgcaagtcgttattatatttttaaccctttattaattccctaaatgctctaacatgatgtgaatgttctatgataagttttactaatgtagtcatcaggtaagagtcaagctttcttccatagagcagtcagctgtcgcaacaccatttgttaaatagtccgtctgttctccattgactgaagtggtactttgggtctattttaaagactctacttttacctcgtctcaccattcttttgtctacacaaaatatattttatcgcttattctgtgttaccatatctattagagctagttccccctcatatctctgctttagttattttcacatgtttcttttatcttttttttttttggagatggagtctcgctctgttgcccaggctggagtgcagtggcatgatctcggctcactgcaagctccgccttccgggttcacgccattctcctgcctcagcctcccgagtagctgggactacaggcgcccgccactgcgcc

SEQ ID NO: 94170 - DNA, 1047 bp, Homo sapiens
gcttcctgagtagctaggattataggcatgcaccaccacgcctagttcatttttgtatttttagtagagatgggttttcaccatgttggacaggctggtctcggactcctggcctcaagtgatccacctgcctcagcttcccaaagtgctgagattacaggtgtgagccaccgtgcctgacccacatgtttattttttctaagaaaactttactatcatttatcaagttaagaaaattattctgatatttcaattgggtgtttaaattagttgagggaaatatgaggccattcactagatgataggttttttttgttttaatcatgtttcatgttgaaacaaaaaagttttttcctgccagttttctggctaatctcaggaagtccctgaaacaaattattgataagtaaaaaaaattatttaaaaaattttaaattatatttaaaatcttctgtgacttatggtggggggaggctaaagcctttctccttctgtactgttctggaaactatggcctgttctactccctcccctcctgaattttcccagaactttacaggtagcttttatatatatgatcccctgtcgtctgtttaacaagtactttgagtgtctattatatgcagacattctaggtgttcagacaccctagtaattagtttgttcctcataattctcagtaaagaagacatgtatatttctcattttataggtgaagaagctaagactttacttttcctcagttagacagctagtgctggtgggtgcctaaacttagatcttccattgccaaatctaggtgtgttgtttttccagcacactagaatcctcctggttcaagaaatgtatatattttagcttggataagatacaacttttggagtgttctaatcatcttcaagtttttcgtggattagttataacatatgaaaaaagatagggctgaatgggccacatgatgccaaaagtgaaaaagtcactcactagattatgacctgcagaatctggtccttgcctgcctctgcttttatattttgcagcttgtcc

SEQ ID NO: 94171 - DNA, 1333 bp, Homo sapiens
cacattgcttctagtacacattttaatatttttaataaaactgttatttcgatttgcagcaaattgacttctttaaatgaagagtataccaaaaataaaacagaatatgaagaagcccaggatgccattgttaaagaaattgtcaatatttcttcaggtaaacttaatagaactaataatgttctgaatgtcacctggcttttggtaacagaagaaaaatcatgatatttgaagtgtgttttgttattttcgcaagccattacattctgactatttaatatgttaggtttcctatataaaataaggcatggtatgttacagtaggacacataactggaagttactcttgcacatagaaacaaaaaatggcagaaaagcacaaaacttactatagttgtaacagggaaaggaaacactagggcctacaacgtactaatgtcttgggtcatctatgggctcatgaggctctaggttatggaagtaaataccactgaaaagcaaatattaattacacatgaggcaagcctttttgagttctgtatgtcattttgtagattttgagttcattctagtggcaccatttgagatcattttcatgtaattaaaggaacacagcaacctggcactgtgttattgcccttagaatggaatgaatatatgtttagcacaaggtaggaagtgatgcgttaagttggaaggctttgccgatcatggtgtgtatgttgactaacctttattgtgcctttaaaaaatatactcaagaactaccttaaccaagtaattaaagtcaagattaccagttgtgggacaaatgacatgtacttcctggtgtgatatagaaggaaggacacagtatcacctatatagtattcttgaccagaatatttaacctgattttaaacaagaagtaaaaattcaaataaatttagattgtggtgcattcaaggcctgaactttaataaatgtccatgtcacggcagcaaaaaagaaatcaacaggtcttaaagagacagggcaaccaaacgcagtaggcagtagttgattagatcccaatttagaggttggagttggggaatagctatagaggacactattggggcgaattgagaaagtttaatatgagacaatatggtgttagtgtcagatttcttgtgtgaaatggtagtgttatgattaggagaatgtccttgttctcaggatatgcatgctaaattatttaaggacaaatatttttttaaaaggttatgtgcatgagtaattctataaattgtgttgctattatgaattgtcatggtaaatcaaaaggaaacataaaactcaaaaggttttattt

SEQ ID NO: 94172 - DNA, 1234 bp, Homo sapiens
aatctcagcttactgcaacttccaccttctgggttcatgcaattctggtgcctcagcctcccaagtatctgggtttacagacatgcaccaccatacctggctaatttttgtatttttggtagagatggggtttcgccgtgttaccaggctggtcttgaattcctggccccatgtgatcccccggcctcatgcgatctgcccgcctcagcctccctaagtgctgggattataggcgtgagccacccaacccagccagtactctgtttttgatagctattcacaatgggaaaggatgtagcaacacattttaaccctatgttgagttttaggtgggttcctttgaaattttgttaaggctaacttttgttaatttttttaaaaaagtgtaaattaggaaatgggttttgaattcccaaatggggggattaaatgtatttttacggcttatatctgtttattattcagtattcctgtgtacattttctgtttttatttttatacaggctatgtagaaccaatgcagacactcaatgatgtgttagctcagctagatgctgttgtcagctttgctcacgtgtcaaatggagcacctgttccatatgtacgaccagccattttggagaaaggacaaggaagaattatattaaaagcatccaggcatgcttgtgttgaagttcaagatgaaattgcatttattcctaatgacgtatactttgaaaaagataaacagatgttccacatcattactggtaaaaaacctggtttttgggctttgtgggggtaacgttttgtttttttttttttttttttaatcttggagtagaaatatatttaaaattgatggagaaaattcccagttcttaacattagaaagggaatatattattcttaccagttagtaatctattcacatttggtttagagggaagatttagaaggtgagataaaagcttgtgagagaatagtgtattcatgtgaaacttcttccatgggttcagagcatttagaaacaaacatcccttcacactcaaagcttacctttgagccagtcctccaatagtgaggtctttgaaggtcaggccaaattggctgtgggaggacctcaggttaggataggaattattttaagacatggcactatattcatgtgaaactcgcaaaaactagccttgcatataggctcatgtatcatgtctcagctgagatgtttgagagatcttaactagattctaga

SEQ ID NO: 94173 - DNA, 1142 bp, Homo sapiens
tcatgtcttcaggtttttgtgtggggtttaaatgattcgaaagatttgaccatactgatacattcactagtaaccttagttactaatgagtaatggttttgagttaatcagttaggcctgaactacttttctggaagttagtaaattatctcacaggcagccctgtgagccatgggaaaatgtgtatatggtctttctaggccacagtcaaattacaggtatatttgtcatggcttctcttgatgaaaggcccagtatcggtttgtctgaagatatataatagcattgcttttgggggtaatatgggcagtaactctgtccacatctttgggcaggctgtggttctgcctttatatgctatgtcagtgtaaacctacgcgattaatcatcagtgtacagtttaggactaacaatccatttattagtagcagaaagaagtttaaaatcttgctttctgatataatttgttttgtaggccccaatatgggaggtaaatcaacatatattcgacaaactggggtgatagtactcatggcccaaattgggtgttttgtgccatgtgagtcagcagaagtgtccattgtggactgcatcttagcccgagtaggggctggtgacagtcaattgaaaggagtctccacgttcatggctgaaatgttggaaactgcttctatcctcaggtaagtgcatctcctagtcccttgaagatagaaatgtatgtctctgtcctgtgagaaggaaaagtatatttgcagattctcatgtaaaaacatctgagaatgtttgtcttagtttaatagttgttttcctgtggactttatatactttgtattgtcttaaaagagtgattgatggtagctacggaaaactttgatttttaaaattgtctctttaagtagacaatttataagctactggtacgagttcaccttataaatctccactaccatgtttttgcttggactgttcacacttcctggaatggtccttcttgccgtttatccaacttctttctaatttttaagtccctaatgatgggaattctatttctgtagtgatttttctggtcatacgaccgtaaggtcatgggtgtttttctctgaattcctcttgagatgcctgtaacttgaaccacgttttta

SEQ ID NO: 94174 - DNA, 2106 bp, Homo sapiens
aaatagtagttatcacatgcagagtgacttatctgttgttgtttcatcctttcaggaaagtttgtcattcgtgggcttgggatctagtcagatccctgtattgatgagattcacatgttataaggctttcaaaggttttaaaaatcatactataaggattgatttcactagtcaccagaataactttttcagatagcgctctgattttccacgaacacgtttttctgcatcagttggttgcacatgagtgagataatcttggttctttatcctttgttatttgtacttcattgggaatccttttgagttagtatatttgagtcattattattattgctgtagaattcaggaacttttagtagatctggcagcataaaattttgcttttaaatcattgtttgtgttttgtatgctatagaaatgggttcagaatattttttaaaaggccagatgaagtgtgaagatagaaaaacttcatccttcactgtgaatgtttaacaaacatttgcttctactttatttttgtttgcttcctttagttgtgcaaagtattcagttctagaatgcatgagatatatgacaaagccaaaaaattctttatagttgataaataattgtggcaaaaacagctgtatagtaactttgcaagcatcatttgattaaatgcttaaaaagtcttgactcagttttaactatttcctgcaaataatcaatatttaattaaagctactccaaattagtgacactttacgtgtctgtctttctccctccccttctcccttctcccttcccccttctcccattctcccattctcccttctctcttcttcctttcctcttcccttcccttcccctttcccttcccccttccctcttctcttcccctcccccttcccatcccccatcccttcccttcccccatccctttcctttccccttcccttccctcctcttcctccttcccttcccccttcctccttcccttcccccttcctccttccctttcctcttccctttccccttcccttcccccttcccttccctcttcccttccccttcccctttcccctccccctctcctcccctcccttaccttcccatgaaatgagaaagcctcagagatagtggcttgattaatttttctttagattaagatatttgtctaagcctttaaggtttatctattgagcttttttgtctcctatttttatttttcctactatgtttgtcgaggataaaatacagcactgtgtgccaagtcataatcacttttcatttgagacttaattaaaatgcctttattttaatgatatatttggctaatgtatttgaagtaatccgaaattaagttttctaatgacaaggtgagaaggataaattccatttacataaattgctgtctcttctcatgctgtcccctcacgcttccccaaatttcttataggtgtctgtgatcaaagttttgggattcatgttgcagagcttgctaatttccctaagcatgtaatagagtgtgctaaacagaaagccctggaacttgaggagtttcagtatattggagaatcgcaaggatatgatatcatggaaccagcagcaaagaagtgctatctggaaagagaggtttgtcagtttgttttcatagtttaacttagcttctctattattacataaacaggacactaagatgaaggttttttgttgttgtttgttttcctctgtgtttctagtgcttattttttaatcagtttttttgatggcaaagaatctatctctgtgttattttgatttctgcagtatatacatctgcatgatcaatattcgatttcaagtaccaaagtaggagtaaaggaatattaacctaggtttaaaattagtcatttcactaaaattagttattatggacgatagatgtctaggtatatctttgttcataaacgaatatatcaagttcagttattaaattacacattaggtaagaaaaggacaaagaaataaaaaagcatgattcataattcctgccctctatttgtctagaatttagttgggaagataagaataacgaacgtgacacagagaataaagtggcatatgacaaatatttattca

SEQ ID NO: 94175 - DNA, 1992 bp, Homo sapiens
atggggtttcaccgtgttagccaggatggtctcgatctcctgacctcatgatctgcctgccttggcctcccaaagtgccgggattacaggagtgggccactgtgcccggcccttttttttttttttttttttaaattagaggattactagttctcttcaattataaaaataaaagaatcttatttcactgcctggtcctggaaacatgtactgcaatatacattgtgacaactttttacctgtcatgtttttagcttttacctgtgaatgtcttatcattgttcttatctgaaggatagatagttgctacaataataatagatggtgtgtatggtttttgagcctaaaaagtgtagttttatctgttgtacctatacaagcaggagaaatataacttgttaataattttaggtatggcaggctgccatcctaaatatgaagtggtctttgtatttgcactttaatgtgttgaaatcatagctttcagtgatccaggattaggcagactcttttatgcaatctcttgtttccagttagaatagaagtcgtgtacttttgataacattaattataatatattttgagccctgtgaggttggtaacattattcccattttatgaatgaggaatgtgtgttaaggagtttgcccaagagtcacatagcaagtcatagtcatgctctctgaagcagcaataacttggcaataaaataaaaatgaagcatcttctgtatgtgttaacttttcagtgactgtttatgccttccagtattctttgtaaaccttgaattctttttttcacagatgattaaagtttatcaattgtaaaggtggaggaatttgggaactagacagtgcacacataaataataaatatgttcttcaaatattgggtgggctaatgtgggaggagtttgagaccagcctgggcaacatagtgagaccctcgtctctaaaaatatgaaaaataaaaaaaaaattttttaaatgtgtgatatgtttagatggaaatgaaacaatttgtcactgtctaacatgacttttagaaaagatattttaattactaatgggacattcacatgtgtttcagcaaggtgaaaaaattattcaggagttcctgtccaaggtgaaacaaatgccctttactgaaatgtcagaagaaaacatcacaataaagttaaaacagctaaaagctgaagtaatagcaaagaataatagctttgtaaatgaaatcatttcacgaataaaagttactacgtgaaaaatcccagtaatggaatgaaggtaatattgataagctattgtctgtaatagttttatattgttttatattaaccctttttccatagtgttaactgtcagtgcccatgggctatcaacttaataagatatttagtaatattttactttgaggacattttcaaagatttttattttgaaaaatgagagctgtaactgaggactgtttgcaattgacataggcaataataagtgatgtgctgaattttataaataaaatcatgtagtttgtggaatttgagatgcattgtagttcttcgcagtgtgacttcaaatattttggaagaaacaaatagctcagagacctcgtaaaatatcttaaactggagggctccatggagatcattgcgagtgactcccccagaatgtccatctgttgacaggagccaggctggctgcatacgaattagctaaggagcttattatatatccagagtcctaccgtgagcctccatcccgtctgccattctcccatccctggtctatgataagacttagaaatctggattttaacaaaacgtttcagattgagaaccttgatttagtctacttctcctattttacaataaagagatgaagcggttaagaattagctaatcctacgcaaagtgagggaaaaaggacagtctttttaataaatgcggcgggctggtggggtatccatataggaagaaatgacattggacccctactc

SEQ ID NO: 94176 - DNA, 1135 bp, Homo sapiens
ttaagaatctcattaacaaaaagaatttgaatatttttccaaggaagatatgcaaatggactgtaagcacatgaaaagatgcagatcagggaaatgcaagtcaaaaccacaatgagctacaacttcacactgattacgatagttaaaatcaaaaagtcagatggtaagtactggcaaggaagtggagaaattgaaactgtcatgcgctcttggtgcgaatgtaaaatggtgcagctgctttggaaaacagtctggcagttcctcagacaattccactccaacgtatatccaagtggaatcacaacatatgtccccacaaacttgtacataaatgtttatagcaggattattcataatagccaaaaggtggaaacaacccgaatgtccatcagcagatgaatgcataaatgaaacgtggtctatccatacaatggagtatattattgagccattaaaggaatgaagtactggtacatggtgcagcttagatgaaccttggaaacattgtgctaaatgaaagaagctggttacaagagtcaacacgtatgatttcattcatgtgaaagttcagaatagagacagcagtagagacaaagtagcagttcagggttggtgccagggaatagggggtaggtggggtgaaagctaaaggatacggtgtttctttgtgagatggaaattctaaaataggtgatgtttatacatgtctgtgaatatactaaaaaccattgaattgtacacattaaatggatgaattgtataggaattatattttaataaagctatttaaaaaaatccagacacttcacccaagaggaaatctaagtggtccataaacatgaaaaggtctttaatcaccagtcagaaaaatgaaaatgaaaaccatgccaggccacctcccaccaccatagtgacaagcatttcaagtgtggcagttccagctgttgttgaggatgtggaataacactggtaggggtgttaagattatctggtgaaattgaaaagacgcatacgacccagcaattctgctcttaagtgcatactctggagatgcttttgcccattgtgctgcgagatgtatacaagaatgttcctaatacctccacactggaaacaactcatcagtgaaaatgaa

SEQ ID NO: 94177 - DNA, 1026 bp, Homo sapiens
catgagaagaaatgagattgcctagagagagaagaagaagagaaaagagtctccgctaacgttaatgcctggtagaggagggaaccctggcaaaccctgaacatcataggacttcccttaagagccacaggaagcaagttcaaggtgcttctacctaacagctctttggatatttgatgacaaggggtagtgtccacctctagattacaccttccaagttccctctgtctttccttgtaaggcataatttaaagctcttcaccatatgggtcattctcctcttaaagttcctttcttgaactgagtgtaatgctccagccccaggtagaaagggaccagctgagccatttatcactatccctgtttagtgataaatactaaacaggaggcagcatcaggacagggaggacagatgagccctgctcggttgttgctaagagatttttcattgcttttcccatccgtaggaaagggcgaaggatttcagagaaagcctcataaacaattgaatgagctcaggcactctgttactgcctgacagcctcagtggcagagacctagattgtttcccagaggaaaaaataaatagtgtaaaactttcaagatgtgcgcgtcaaagggctgtttgcctgctttacggtgagagctcaagatggatggtttgggaacagctgaaacctataaacacagagcagaaaagttctccatcttttgctcatttattccatgaactttttcattgctgagatgccaaggcctaaataaatatgcacgctatgccattgttccgctctgagtcccggctggaataggagacctacattcttcattaatgctgttcagattcacaggatgaatattctgctttggttactgcacatggtgcccagaaatcgcaggaacaaaaaacatatatgtgtgtctcatgtgcacattcacatacacacacacacacacacacacacgcacacacacaccccatgtacatatcctaagccttccggatgtggagtttgaaaacgtgct

SEQ ID NO: 94178 - DNA, 1023 bp, Homo sapiens
ataaaaattccatgagacataaacagctagccatcatcttaaattattttcttgctgataaatttttttttctggggcgttcctgagtttatttggggcacacccgggcgagggccctgcacctagaagaaggtgttgggcctcttggtggtgaagcgtggcttgtgctgacggcgcaggacccggtggggcagcgggaacttgatcttggagtcgtggaactgcttgacagccggccggcggcacttgctggccgcgatctcctccaccttcatgatctgaatggagtgggcccggccgccgtgccgggcgctcatgtctcggtagcaccgggtgacagcgcctgcggtggtcaggtcccggtattcccggtacatgttgtgggtgccgctccgggagtcatagcgcagccagatcccgaagttcttcacccgcaaggggaacttctcaaacacctgcccacagtagacaatctcccctgaagacttcttcatcttctttaactgagatacgaagtaccagaagcgggacttggcgacgacatgattaggcgcaaagattcgcatgcggtagaggggtggtgtgtggcatttgggggtgggcaggcagcgacccactactttgtactctcgtagtgtgcccgaggccttcatggcgtgctctccgcgttcgccgccacccgcaaaaggagacttgctgataaattttgtaacataaaaacaacaggaacggctgggcgcggtggctcacgcttataatcccagcacttcaggaggctgaggcgggtgtatcacctgaggtcaagagtttgagaccagcctggccaacatgataaaaccccgtctctgctaaaaatataaaattagacaggcgtggtggcttgtgcctgtaatcccagctactcaggagactgaggcaggagaattgcttgaacctgggagacggaggttgcggtgagctgagatcgcaccactgcactccagcctgggcaacaaaagtgaaactgtctcaaaaaaaaaaaaa

SEQ ID NO: 94179 - DNA, 1053 bp, Homo sapiens
tatgtcgcgacagagcaccctgtacagcttcttccccaagtctccggcgctgagtgatgccaacaaggcctcggccagggcctcacgcgaaggcggccgtgccgccgctgcccccggggcctctccttccccaggcggggatgcggcctggagcgaggctgggcctgggcccaggcccttggcgcgctccgcgtcaccgcccaaggcgaagaacctcaacggagggctgcggagatcggtagcgcctgctgcccccaccaggtagcggggtgggggtggggtcgaaggcgggggcatagcggcggggcgcttggaacccggcgaggggaggctcgcacagggggttgggggggtgcacggcctggccctgggctcggaggaggcggggccgcagagttggcttgaatgagtgcaggggtcgagtctggagcatttgggggtgtagcttgtaaacagggtcggaggagagaggctgtgcaggaagagggctgcaggggagacgcggagagttcgggccttttggagggaggagacgcgtcccgccaggtgggggtgctgggctaaggaaggggcgacgcgcgcagctccgggtggggagggggcctgggaggtgggagcactgggggtggggcgagaaggggaaggcgcccggcccacttggtgggcggggcggggggcggggtggcgggaaggaggaatgcctgcgggaggccgaacggggagagtccggtggtgtggggtgcgaaaggaggttcctcggccggcgcggagatagtgagttggggctccagtagtcgatcgaggtagacacttagaggtagttaagagccgcggtcgccgagacgccttggggacggtgggccttcggcctaggtgaggggccgccgagggggtgggccacgagctgcgagcgcgggggggtgtgtcaccatggggaccgcggggcctaattgggcggggcggggccgtggggagccgaagtgctgggatccggctgggtccttcggtaggtaggctgcacgtgcaccgagacgaagatagaatattttgacg

SEQ ID NO: 94180 - DNA, 1030 bp, Homo sapiens
ccacccttggctaatttttgtattttttttttggtagagatggggtttcaccacattgcccaggctggtcttgaattcctgacctcaagtagtccgcccacctaagcctcccaaaatgctgggattacaggcgtgagccaccacacctggcatatatatattttaagatagagatggggtttgctatgttgcccaggctggtcttgaactgctgggattacaggcgtgagcctctgcacccggcccttattgtttataaatacatttctttctaggttcaaaatcaaaggaagcccagaagggaggtcatttttacagtgcaaagcctgaaatactgagagcaatgcaacgtgcagatgaagccttaaataaagacaagattaagaggcttgaattggcagtttgtgatgagccctcagagccagaagaggaagaagagatggaggtgggacacggcaagcattcagttgttatttatgttagggtgatgggggaagaaagggggagggtgtattaacaagataccttgttttatatatgtgtgtgtatatgtattattttattatacatacatgcatacttctgtagttccctggactgtaggataagttaggttacttagaatctcaacagctagcatcgtttttacttaggttttcaagcctactggcagggtaagcaagaggtagtaccattttggtaagaagtagagagctagggacagtaaagatggagtaatatatatatgagggtatagtcaggccctagaaattaattatccagttttatgctttttataaaaaaactgagatggggtcttgctatgttgcccaggctggtctcaaactcctgagttcaagggatctgcccacctgggcctcccaaagtgttgggattacaggcatgagccacagcacccagccccagctttatgcttttaattctaaaactttttttgttgtattttgcattcataagaatagatgttaaataaaccttgaaatacaaccttggctcaaacgttaatggt

SEQ ID NO: 94181 - DNA, 3404 bp, Homo sapiens
catattaagagaatttacagtagtacagatggggttatcccatccacaacttatgatggggttacataaactaaaaacgtgtttaatacacctaccccaccgaatattgtagcttgggcgtagcctaacctatctcagacgtgctcagaacacttaaatgttagcctaaagttgggcaagatcatctaacacaaagcctattttataataaggaattgcctatctcatgtaattcatcgaatactgtactaaaaatgaaaaacagtggctgcacgggtaccattataaagtcaaaaaatcataagttgaactgtcttacattatggttttccaaattttgatttgtttttaaatactctttccttgcctggcaggtaggcacaacttacgtaacagataagagtgaagaagataatgaaattgagagtgaagaggaagtacagcctaagacacaaggatctaggcgaagtagccgccaaataaaaaaacgaagggtcatatcagattctgagagtgacattggtggctctgatgtggaatttaagccagacactaaggaggaaggaagcagtgatgaaataagcagtggagtgggggatagtgagagtgaaggcctgaacagccctgtcaaagttgctcgaaagcggaagagaatggtgactggaaatggctctcttaaaaggaaaagctctaggaaggaaacgccctcagccaccaaacaagcaactagcatttcatcagaaaccaagaatactttgagagctttctctgcccctcaaaattctgaatcccaagcccacgttagtggaggtggtgatgacagtagtcgccctactgtttggtatcatgaaactttagaatggcttaaggaggaaaagagaagagatgagcacaggaggaggcctgatcaccccgattttgatgcatctacactctatgtgcctgaggatttcctcaattcttgtactcctgggatgaggaagtggtggcagattaagtctcagaactttgatcttgtcatctgttacaaggtggggaaattttatgagctgtaccacatggatgctcttattggagtcagtgaactggggctggtattcatgaaaggcaactgggcccattctggctttcctgaaattgcatttggccgttattcagattccctggtgcagaagggctataaagtagcacgagtggaacagactgagactccagaaatgatggaggcacgatgtagaaagatggcacatatatccaagtatgatagagtggtgaggagggagatctgtaggatcattaccaagggtacacagacttacagtgtgctggaaggtgatccctctgagaactacagtaagtatcttcttagcctcaaagaaaaagaggaagattcttctggccatactcgtgcatatggtgtgtgctttgttgatacttcactgggaaagtttttcataggtcagttttcagatgatcgccattgttcgagatttaggactctagtggcacactatcccccagtacaagttttatttgaaaaaggaaatctctcaaaggaaactaaaacaattctaaagagttcattgtcctgttctcttcaggaaggtctgatacccggctcccagttttgggatgcatccaaaactttgagaactctccttgaggaagaatattttagggaaaagctaagtgatggcattggggtgatgttaccccaggtgcttaaaggtatgacttcagagtctgattccattgggttgacaccaggagagaaaagtgaattggccctctctgctctaggtggttgtgtcttctacctcaaaaaatgccttattgatcaggagcttttatcaatggctaattttgaagaatatattcccttggattctgacacagtcagcactacaagatctggtgctatcttcaccaaagcctatcaacgaatggtgctagatgcagtgacattaaacaacttggagatttttctgaatggaacaaatggttctactgaaggaaccctactagagagggttgatacttgccatactccttttggtaagcggctcctaaagcaatggctttgtgccccactctgtaaccattatgctattaatgatcgtctagatgccatagaagacctcatggttgtgcctgacaaaatctccgaagttgtagagcttctaaagaagcttccagatcttgagaggctactcagtaaaattcataatgttgggtctcccctgaagagtcagaaccacccagacagcagggctataatgtatgaagaaactacatacagcaagaagaagattattgattttctttctgctctggaaggattcaaagtaatgtgtaaaattatagggatcatggaagaagttgctgatggttttaagtctaaaatccttaagcaggtcatctctctgcagacaaaaaatcctgaaggtcgttttcctgatttgactgtagaattgaaccgatgggatacagcctttgaccatgaaaaggctcgaaagactggacttattactcccaaagcaggctttgactctgattatgaccaagctcttgctgacataagagaaaatgaacagagcctcctggaatacctagagaaacagcgcaacagaattggctgtaggaccatagtctattgggggattggtaggaaccgttaccagctggaaattcctgagaatttcaccactcgcaatttgccagaagaatacgagttgaaatctaccaagaagggctgtaaacgatactggaccaaaactattgaaaagaagttggctaatctcataaatgctgaagaacggagggatgtatcattgaaggactgcatgcggcgactgttctataactttgataaaaattacaaggactggcagtctgctgtagagtgtatcgcagtgttgggtaagactttgaacaagcttgttctcaggctttgataagtagtgctgtttgccagctgtatattatccctaaaaataagtaataaggtatatatggtacatattttgacatgcatatacatatttgcatcctgactaggctgcccacagcaatttaagttacttgaaactcgcttttatcttagtagccctttggcctttcttcagtttttttttttttttttttttttttgagacatggtcttgctctgttgcccaggctagaatatggtgacacaaccatggctactgcagcctcgacctcccaggcttaagtgatctttccacctcagcctcccaagtagctgagattacagatatgcaccaccatgcatggctaatatttaaatgtttgtagagagatggggtctcactgtgttgccaggactggtcttgaactcctgggctcaagtgatcctcctgcctcggcttcccaaagtgctgagg

SEQ ID NO: 94182 - DNA, 1422 bp, Homo sapiens
ggcatatgccacgtgtattaggcactgctaatttctgtatttttagtagagacgaggtttcaccatgttggtcaggctggtcctgaactgctgacctcgtgaactctgcccgcctaggcctcctgaagtgctgggattacaggcgtgagccaccgtgcctggcctctgctctatcttttagctttcccttggcacttctatggtccagatgttagagggtaagtattttgatgggggagatcgttggactgtaattgaaagttatgtcttataatgaaatgtgttatataaagaagacctataaaacacttaggctgataaaacccccaaacgatgaagcctcacttttaccctctcttttaacagatgttttactgtgcctggctaactatagtcgagggggtgatggtcctatgtgtcgcccagtaattctgttgccggaagataccccccccttcttagagcttaaaggatcacgccatccttgcattacgaagactttttttggagatgattttattcctaatgacattctaataggctgtgaggaagaggagcaggaaaatggcaaagcctattgtgtgcttgttactggaccaaatatggggggcaagtctacgcttatgagacaggtaactgattcttaaagttttgttatcagaaagtcatttgtgacattaggaataacatacttaggtgatcattttccaaacacagttacataaaagtcagccagtgacttaataggaagcaaagggaaattactccctgtgttataaaattgagaattatatttagctgaaacatcgatgcttaatgttaaggggaatatatgttaaaaaggggaaggaggtcagtcattcaggtcatgaggccctttgacttgaattcatttcctcagaaggtaggtatattcatagtgaacaaaaatacaaaggctgtatgaaaagatgaaaatgttacaggtttatccttaaattagactcatttgcagaaatgcaaatgaggtaagaaagcaaatatagttcatgacctctagcaactgttgaaaactgctctttagggatgacatgctggcccttttttttttgttgttgccaaggctgaagtgcagtggcaccatcacagctcactgcagcctcgaactcccaggttcaacccttcctcctgcctcagcctccccagtagctgggactacagatgtacaccatcatgcctagctcatttttaaaaaaattttttatggcattgtatttatcttctctttataaccaggggttgaccagccacagaacttgtaaagttttttatatttttaaaaggttgtaagaaatagtagtagttggctggtccccgctgctctcctgcattatagtatacttctgttcacctagtttgctagagagaggcagtatagtgtgt

SEQ ID NO: 94183 - DNA, 3062 bp, Homo sapiens
ttgtacaaataactatttttatagaagattatctgaagtacatttaaacaatatgaatgtttttagagcacgcactcaccattgtggcacagaccgatagttggagataaaaggtgatattgtgaaaggtttttgattacccattaattattaggccttacactgtttagttgtaataaaacatttgttatactacggggatgagaacactaataggaggactcaggaagtttatgaccttgagcgatactgtattttctttaaaagaaacctcactccccatgggctgctaagcagactcgtgtagctaaacaaggcctatttatagaatgcttttagacgtggatgtactaaccgatgttgcttttctgtcctagcatttttgttttaattccttttttgttttaattcctttgagttacttccttatgcatattttactttaacaggaagaggtactgcaacatttgatgggacggcaatagcaaatgcagttgttaaagaacttgctgagactataaaatgtcgtacattattttcaactcactaccattcattagtagaagattattctcaaaatgttgctgtgcgcctaggacatatggtatgtgcaaattgtttttttccacaaattcggttttttgagagggcacttctcttgctagcacatgtatcgctaatatttttctttcttaaggcatgcatggtagaaaatgaatgtgaagaccccagccaggagactattacgttcctctataaattcattaagggagcttgtcctaaaagctatggctttaatgcagcaaggcttgctaatctcccagaggaagttattcaaaagggacatagaaaagcaagagaatttgagaagatgaatcagtcactacgattatttcggtaactaactaactataatggaattataactaactgaccttaagtttcaaagaaacagtaaaaggggaagggatgatgcactatgaaaaaacaaaaaaacttttttttttttttttttaattttaagggaagtttgcctggctagtgaaaggtcaactgtagatgctgaagctgtccataaattgctgactttgattaaggaattatagactgactacattggaagctttgagttgacttctgacaaaggtggtaaattcagacaacattatgatctaataaactttattttttaaaaatgaccatttttccattttctttctaggaaattaaacccttttaattcttatctaccttctacataatggttattgaatactccacaatatattaagtctagatgttatggtacatgcatacactttcaggctgttttatacccactgtcaccaatacacataaatgggggaggaaaagctatgaaactgtatagggctgtatatatacttgtctcagcttaatgcaggaaattggtttaatttccagcagttttgtctaaactgttcaaaaaaaaactatgaacagagttcaaatacaggactgtttgttttgaagagactttctaaagtgtacttaaaacatagtagttttttacctttcacaaaactgagttacaagaatacttttgttttacagtgcatcccttcctaggaagtctcattaaaacactcactttttctaggggtgattttgaatgctgcacagggaagggaaggaaataatagtcttaacttttcttaaaggataccagaaacattgctggatataatttaagattagtgttttctctttcatagaaagaacgtacatactgggacatgagtacagttacagcaagtctaggtgtgctaacaaaacagggcacattcaagtacagtaagattttgcttgaaattaaaaacaaactacatgagattaaagcattaaaatcatatttctcaatctgaatacatgttaaaaaaaaaaaatcaaaaggaacgcagaagtgctagctcacatttttaccatattacaaaagcaattggtacccatgtccataaaggcagcaacaaagctgcttgtctattgaagattactactgcaaattggactgcattcaatgctagttgtaaaaacaccagcttttcagaagttggtatctgtacaaaattgcagcttattttcttcacttctgtcccttcaagtctttacacagtaatgctaaaacacccagctttgagatcctgagtcaatatattgccactttctttttggtagcttgagcttcatagtgtcaactgaccttgtgtatccatttttaatacagtctcttcctgtagcatgggcaaatattttaaatcttcttccaaaaaagtgttttaagttatgatgttacaatggcaggactttttctttagggaaggaattcagttgtgctgcaatgtattagattctataggtggagcagagtcatatagtgtatctgtatcatgtgtaggctcaccagctaatgtacaaggattagacagtgttccagcaccacagtcacagaaaaacctaaagcaaaatgaaacccaaatattagaaaagtgagggggaaagtaattgggtaatatatcaagcaagtgtgctacatacctatcatgtctaataaactctacatcatgtccctgatggcacttcttaatgcagttcacacatatggcatttcgatctgtggtgttacaagtatgacatctaaaaagcaaaagcttaaattacttttctcaaacatgtcattaatgcaaaacattccattctgtttatatattactatgacctttggctttaagaggaccaaaacaaaattctttgtggctccagcccagattaattctgaaaaggaactttaatggagtaagtgattttcctgtcatctgtgtcttcggagggaagagaaatgatttgtaaattgtataaaggcagttctttccactttaaaagcctctcaaatgtttctgggctgaaaacaatttttggaggcgtgaagagtcaaaactgtcacagtgactgggatatatcaaacacttaaccccgacatctttaccttgaaatttctaggaaaacattacacaacatgagttaca

SEQ ID NO: 94184 - DNA, 1365 bp, Homo sapiens
agaccataactatggaaaaacctaatgctacagtaactgatgtcattcatgtaactcatgttgtgtaatgttttcctagaaatttcaaggtaaagatgtcggggttaagtgtttgatatatcccagtcactgtgacagttttgactcttcacgcctccaaaaattgttttcagcccagaaacatttgagaggcttttaaagtggaaagaactgcctttatacaatttacaaatcatttctcttccctccgaagacacagatgacaggaaaatcacttactccattaaagttccttttcagaattaatctgggctggagccacaaagaattttgttttggtcctcttaaagccaaaggtcatagtaatatataaacagaatggaatgttttgcattaatgacatgtttgagaaaagtaatttaagcttttgctttttagatgtcatacttgtaacaccacagatcgaaatgccatatgtgtgaactgcattaagaagtgccatcagggacatgatgtagagtttattagacatgataggtatgtagcacacttgcttgatatattacccaattactttccccctcacttttctaatatttgggtttcattttgctttaggtttttctgtgactgtggtgctggaacactgtctaatccttgtacattagctggtgagcctacacatgatacagatacactatatgactctgctccacctatagaatctaatacattgcagcacaactgaattccttccctaaagaaaaagtcctgccattgtaacatcataacttaaaacacttttttggaagaagatttaaaatatttgcccatgctacaggaagagactgtattaaaaatggatacacaaggtcagttgacactatgaagctcaagctaccaaaaagaaagtggcaatatattgactcaggatctcaaagctgggtgttttagcattactgtgtaaagacttgaagggacagaagtgaagaaaataagctgcaattttgtacagataccaacttctgaaaagctggtgtttttacaactagcattgaatgcagtccaatttgcagtagtaatcttcaatagacaagcagctttgttgctgcctttatggacatgggtaccaattgcttttgtaatatggtaaaaatgtgagctagcacttctgcgttccttttgattttttttttttaacatgtattcagattgagaaatatgattttaatgctttaatctcatgtagtttgtttttaatttcaagcaaaatcttactgtacttgaatgtgccctgttttgttagcacacctagacttgctgtaactgtactcatgtcccagtatgtacgttctttctatgaaa

SEQ ID NO: 94185 - DNA, 1015 bp, Homo sapiens
atctttcatggcatattgcatatatttataggtatagcagactccaacatacctttcattgtcacattaacaccagatgctaaaaataagcctccaaaccggttgttaaaaatctgattgccttctagtgttgcagttgcgtgatttgtaatttcaatacctgaagtaaaatttacaaacaagtagatacatcactttatactgcttcttaaaaacctgaaattagcaagcaaatgtaaactgcttcttttatagaagtacattaaccctcttaatgtctactgaataaaatgtagatacctatttcaaccaccaacagtaacattcacttatcaatgactatggtcaaaactgcaattaactttcgcaccaacctaactgtcttaaagtttaaatacatgatacttggatttcatttgcatccattttaacatctctttttctgttgcagatttaaactggtaaattcatctgaggaattgaatctatctgtattcctagtggtaatacaagcctgcatttattctatcccaataaatgtttcataatcacgactaagcaataagagcaatatttcttaggagtctggcttagagtagaagaatccagaacttgattaggtgctcttgtaagtgaatgaacaggcattcagccacttcagcacactttgcacattttagttaataagcaaaacaaaatgaatatactccacatcaaacactttgcagaactatatataagccacaggtaagaaaagaaaatacaaacctgcggcaaatccatcaaatattctgtttttccttaagattggatgactattagtgctgatgagaacacctgcttgagcattcctgaaaatatcattttcttcaaggagacctataataaaatatttccttagattaaggctaatgcatataacagactactaacctttttggtggtatttaggtttgcttttagtttcttatttaactgcatggtaaaattcacaggactattttttcagccaaaa

SEQ ID NO: 94186 - DNA, 1050 bp, Homo sapiens
tccctgaaggcttagattgttatgagcatttttttagcgataaagtatttttaagttagggtatgtgcttttttttatgaaatgctattgcatacttaatagactacagtataatgtaaaccaaaaaattgatgcgactctctttattgcaatactcgctttattatggtggtctggaacggaacctgcagttatctccaaggcatgcctgtaattcagtccttcattttacatatgaggggaatatatgtcacttaatataaccccatttagtttacatgttaggaaactctacaataataatctgtagtaaagtatgttctgtgggaaatacaggattaagcaaaattaaaccactttcttctcagggcatcttggactccattgtatagttaattcttactaagtgacttatgtggatttctccactgtttacctcacgtaacatgaagatatgggagtagaagctattgaaatggtattattgtctattctgtttacaggactggaagcaaccccaaaattagacgcaacaaaatctggggaggacagaatggtggaattctagtttataattctggtatgtttaatctgtcatcttttttctgtgttaataaactttagaaatacaccttctaggccgggcacggtggctcacgcctgtaatcccagcactttgggaggccgagatgggtggatcacccgaggtcaggagtttaagaccagcctggccaacatggtgaaaccctgtctctactaaatattacaaaaattagttggacatggtggcacacgcctgtattcccagctacttgggaggctgaggcaggagaatcacttgaacccgggaggtggaggttgcagtgagccaagatcgcgccactgcacactccagcctggcaacagagcgagactctgtctcaaaaaaaaaaaaaaaaaaaaaaattaaaaagaaatataccttctagataacctacatttttgcatttataggtctaggctgtatagaagacaatgaaatatttgacaatgcaatggctggagtctgga

SEQ ID NO: 94187 - DNA, 2163 bp, Homo sapiens
tattcttaaactttttttttaattttttttgagacggagttttgctcttgtcacccaggctggagtgcagtggcgcaatctcggctcactgcaacctctgactcccgggttcaagcagttctcctgcctcagcctcccaagtacctgggattacaggtgtgagccaccacacccagctaatttttgtatttttagtagagacggggtttcaccatgttggccaggctggtctcctcttgacctcaggtgatccaccttcctagggctcccaaagtgctgggattaacaggcgtgagtcaccacgcccagccttaaatgtttctaatacttaatttttagatatgcattgaaatgttttttaaatggcatttctttttttgtaaagtaggctttacctacagatttaatttctgtatttttcagggttactttgaaagttgcaatatacacagaaataggatagcaggctttgaagtaaaagcctatgctaaccctacagtggttcgatgtgaaattcaccatgggcagactggaggaatatatgtccatgaaaaaggaagaggacaattcatagagaataaaatctatgcaaacaactttgcaggtgtatggattacctcaaatagtgacccaacaataaggtatttacatataattatgggtgaaaattactttttcacttcaaggtttgcttaaaagtcaagatattgagctttaactcttgaaagtttttgttagacatttgactactataaaatagattttcctagttaaagtctgtgcatctgaatgagccatagctattgcagatttattttttggtgtttttatttttctttttattagtgatataaaccatatgtgatattatgaaaaattgcaaatgctgtgatttttattttaaattcatcaaactgcattatagatgagtaaataggactgttacctccccttggagcttgaaggactttgtcttcttttttctgaagttagcaaatagaataattcaggaaaaatatctcaaagattcttggccagaaagactaaaattatcaaaaagtcaaaaactgcaagctgtcattttcccttaataagccaaaattgtagaaccaaaggtattataatctaatcagacactatgaattatttttaattgtcaaattttattttccattggctttatggaagtagattttgggatttccatcttgttaatagtcatcaaatgtttctagatcagctaaaaaattgttttgaatgtattagctgttttgaggggaatttttaagaatgctacatatgttctttcaaatagtagtctgacttttccaaagtcttaggccttagaaataatgaagaaattgaggccttagaagtttatgtaatttgttatatgaccatgaggggccttaccgttgtataaaacaagtaagtttggctgaatagatgtcttctttttttttatttcgcataattataggggaaattctatatttaatggaaatcaaggaggagtttacatctttggtgatggacgaggccttattgaaggaaatgacatttatggtaagcgtatggttttgttctataaaacttatagatttgtatgtcttcttgatattagcaaaatgatggaacattttgaaactacccaagtggaagcactgatccagctctttaatttttttcttttttaaagaaatgaggtcttactctcttgtgcagactggagcacagtggcacaaacatggctcacagcagcctcagacttctgggctcaaagcgatcttcctccttcagcctccctggtagctagaactacaggcatgtgccaccgtgccccactcatttatttgtggaggctgggttttgccttgttgcccaggctggtcttgaactcctggcctcaggtgatcttcccgccttggtctcccaaaattctgggattgcaggtgtgagtctcatgcgctgccctttaatttttgttgttgttgtttttgagacagagtctcactctgttgcctaggctggagtgcagtgacacaatctcacctcacagcaacccctgcctcccaggttcaagcgatcctcatgcctcagcctccagagtagctgggattacaggtgcatgctaccatgcccggctcaattttgctttttttt

SEQ ID NO: 94188 - DNA, 1002 bp, Homo sapiens
taaaatatcagtaatgctgagattgagaaaccctgttctttgtttctggatattaccggatcataacttgttttagattttacattgtactctgacagaaaattatttggaatagttgagaattatttttgatttgtaataaaagttgttcatgcaattgtacattaatttaaatataaggtttatgttagtagtcaatggttttgttttgtttttgacattttagtataaaggtgcacatgtaaagccaggatttgctgaacatttctacagtaaccctgcaagatataaaggaagagaaaatatgttggtatgtttgatttttatttttatgacttaaaatggtaatctttcagttctgtactgacacatttatttttttctagtattatgatactattgaagatgcccttggtggggtacaagaggctcattttgatggacttatctttgttcattctggaatatatactgatgaatggatatatattgaatctccaatcaccatgattggtgcaggtattttgaaatgcattgtcattaaaattttaatattttactcatttatgtgataggattttaaaaatgctagtgacttaaaatccagttttataatatcctgctggtaaagtaggaatgaagatatcacacatattttaagtgaaggaagtgaaaacataagagttcagaaattatagctgtatataaattctttctccccgccccccccaaccttttttgtttttttgatgcagagtctagctatgtcactcaggctagagtgcagtggcacaatttcagttcactgtaacctctgcctcctgggttcaagcaattctcatgcctcaacctctcaagtagctgggattataggcatgcaccaccatgcgtggctaatttttgtatttttagcagagatagggtttcgccatgttggccaggctggtctcaaactcctggcctcaagtgatttgcccatctcggccttccaaagtgcgggga

SEQ ID NO: 94189 - DNA, 1065 bp, Homo sapiens
attgacatcagtctgtagatttactacatgaaaacttggataagtgggctgggcacggtggctcacgcctgtaatcccagcactttgggaggccgaggtgggtggaccacctgaggtcaggagctcaagaccagcctggccaacatggcgaaaccttgggagacagaggttgcagtgaactgagatcacgccactgcactccagcctgagcaacagagtgaggctccgcctcaaaaaaataaaaataaaacttggataatttgtatttttttttctagtttacgctcttttatagtgacccaaggcaatgatttttttaaaaagatattttggcgccatctgctgttctttaatgcgatatttcatctactttggtaaagatttgaaatatatgtatgtgtgtgtgtatatatatatatttgcccatataaaggacaaaataatggcgatttttaaaagtctgctgcgtctgccttatgattcttgtatttccagctgcaaaggctgtcttgtaattttgatggtaagaaacaggcttgcctaaaaaatatttctgtagtcctgcgtctgccagttttgtatattcattcaatgactttgagttcctgaagacttccttctcgagtttactgtgacttctcgtgacaaagctcctgagttagctttgctcatttgttaatgtcccttctctctgaacatgtagtttttcatgtttcatggtctgtccttatcttacccctaaaccacatccctatccctgctatgaaatctaccccccatgattatttttattgattttctaagcttctatgtagatcagttgtactgcagatacagcatcttattttatatttgtagtctttacttgtctcacatgatctggttgcatatatagtatagctatatgtatgtctgtatgagaccataaaatttctggccaggtgtggtggctcacgactataatcccaacactttgggaggctgaggcaggaggatcacttgaagccaagagtttgagaccagcctgggcaacaaaacaaaaccctgtctctgctgatttaaaaa

SEQ ID NO: 94190 - DNA, 1037 bp, Homo sapiens
aatatttatctgttaacatttaaattcttgtatgctattaaagaactgcagcaaacaaccctatacaaatatctttacatgtttatatcacaattttagtagaaagattcactttttttttttttttttgagagtctcgctctgtctcccatgctggagtgcagtggcgcgatctcagctcactgcaacctccacctcccgggttcaagcgattctcctgcctcagcctcctgagtagctgggattacaggcacacgccaccatgccctgctaatttttgcatttttagtagagacgggagtttcaccatgttggtcaggctggtcttgaactcctgaccttgtgatctgcctgcctcggcctcccaaagtgctgggattacagcgtgaggcaccgtgcctggcgaaaggttcactttttaaaagtgggttattgggtcaaagggtttttctgtttttaagctttattgaattataattaatatattttaaaatgcccatgtttgattatacattttgatgattcggagggatatttgcattttaaagtttggtaaatgttgccaaatttgtttttaaaaagaaggttgcataatttataatcccatcattaatgcatgaggttaagtattgaatgaatgaatacatgagatacttgagagtaaagaggcaactagtgttagggttgaaatggtttggaaggactgttcagagatagtgggggtacttaaactataccttgaggaatgagtatccacagatagaggaaaggagggggaaaaggatattcttagtgagagagaatgggccaaaggccatagaagatttatcaggacagaattttactttgttgtcatactcctttcgtctcttggttcactttatgttggcatttttttggtggggggaagaggaactaggcactctcttcaaggctttactctaccacctgtggaacaatcttttccaagtcttgtatgctttggctgtttttcttttacaaaattcttccttagacaaactcatgtacacattgtt

SEQ ID NO: 94191 - DNA, 1217 bp, Homo sapiens
tgaaggtaggaggacaggtttaaattaaattatatgttgctagaatttaagcacctcaattgcagagataaaacaacattttgtttcctcataagcatgtttaatcccacatagcaagcagtagttgtaactcccaggatgcctttatgaatctttctgattctgcattgcagcatgtcagaggaaacctgtactctatttctgcatcatgtgagaaccttgtagctgaatatatctagagttgaaaaactgagctggaagatccggatgtagggaggttgatcacagtatgtaaagttaagtccctggttttagggggctaggaaagtgttacataccaatcagtgacatgtgttaataacacatgcaatgaaacagaaaatataccctttcgggtgaaatatctaaaaatttttggtgaaatgttaactaatatcttgagatggtggtggcgagttgatttttgttattcttttacatatctttgcttttcaaatactgtatatggaatctacagggagggaggctttgtgacattgtctttggcagtgatttcatggatacaacacctaaaggacaggcaacaaaagtaaaaatagacaagtgagacatcaaactataaagcttctacacagcaaaggaaacagtcaacaaagtgaaagggcatcctatgaaatgggagaaaatatttgcaaaccatatatctgataaggagttaatctccaaaatatttaaggaacttctgcaacttagtggcagaaaaactaataacctatttaaaaatgagctaaagacttcaatagacattctccagagaagacatacagatggcaagcaagtatatggaaaaagactcaacatcattaatcatcagggaaatgcaaataaaaaccacaatgagatatcttttcatccctattaggatgactgtttaaaaaaaacatagaagacaagtgttggtgaagatacgtagaaattgaaccccttatacactgttggtagaaatgcaaaatggtgtaactattatggaaaacagtgtggaggtcctcaaaaaattaaaaatagaactatcatatgatccagcaattcttcttccaagtatttattcaaaagaaatgaaatcaggaacttgaagaaatactagcactcccatgtttataatggcactattcacaatagccaagatgtggaaacagcccacaacatgtccattgaca

SEQ ID NO: 94192 - DNA, 1521 bp, Homo sapiens
gtgtgtgaatatggcatctcataattatgttactaaaataattggaaattattttattttaaatattggtgtttttcttgagtctcttggtatcctttaacagttcagtcttgaggcttacagtgttaaccttttccacaaaaaacagaggaggagactgctgtgttctttcccattttcacattttcatttttttgcagatagccacagttgttattaaaatatgttgggttatcataaacattgtttttgtgctaaaattttttatccacagatttgattgatttaaactttggacacacaaacatttaatagttcttttaattttaagtttttgcaagtatactgtctaaaaatctaaggaacttttttcccactagtcagaaagtttattcactaacttaatatcactttgatttcccctcaaagattgtaggttgggttgctttgaggagtggaagacatcttttttgtatttaagaattttaaaaaaatactgtggactttaatatgtgattctgggccttcattccaaaaacttgcttccttttgctgctgaagtggtgataagtaattttgtttctccacttaagtttggaacctgtttcttactcctttaaagtttatctctttaactcttatgaaaatattttgctattatttggacagttatttcatttctagttttctgcatattcttgactaccctttattgtcttacaataagcttattttaaaattgtgaaactttcacagaaaaatgggggcatattttgcttttagagatgtttttctggtccttgactggacctttccgttcctggtgtataggaggaaggtgaaaaagtgcctctgcccagcatccttgataagttcttcaagtgaaagcttgtactaaagtgctagtggcacataaacttgtattcctcatgatacaagtatcccctgagaatgacagggctctgttcatcaggaactacttgattgaaattgatgatatggtagccttagatagcaaaggaggaacatttcacatttgctctttcagcacttaagcagtccaatgttaatgctaccagttgatctttcttatccgcaaaaagcagtgtggaggagactgcccttgctttccattttcttttttcaacacatagccacattcagtaaatgttgccatttactgaacattatccctaaatttggggataaggagcctgagctgcttcagggtgacatttgtgtcttccctttttccagagtggtttcttaatcttatctttaaattagaggatttttgaataagatgacttctgagatgctctaaaattctgtatcatttgggttgccaatataaatcagcaaggtttgaatttgttaggttatcaccatgcaaacgtagttcttgcccttgtggaacttaaagttaagaaactgagtttaaataaaatttgaaattagtctgaattgcaagtaagcttcttggttttattttcattgtcttctggtttttaatttttcttc

SEQ ID NO: 94193 - DNA, 1617 bp, Homo sapiens
ggtttagatacaataattcttttttatatccaagcattgatttttctatcttccattcatagtatattaacatactgtatataagaacatgtggctttatgagattctaacacttagtaggaaaggggatggggaagaggaagagcatgtaactattttttattcccttgttatatattgagatggacaactttggtatgtatgttactagttattgtttcttcccacataattggtcataactttttgaaaaaagaaaaaaacaagctttaaagggaattagaagtgaataaaatttaacaaatgaaaagtaggagtctttccagacttctatcatagtaaagaagaaatatcaaagaagatttgttgagagaaatagaagttggagtaaggcactatattttgaaagctagtatttttagcaaagtgttcttatggtaaaggaaattatagactcactcactttatttcatataaggtcagcaatacataaaagtagccactatactacttcacacttacatatgaatgactgatgtcttcattaattctctgaaagacatttgcatttttaagagactgattatgataacttgtcaaattttggtattttaggccaagtaaaagagggaagcgaaattaaacaattgggcggggcatagtggctcatgcctgtaatcctagcactttttgggaggctgggtggggtggatcgcttgagcccaggagtttgagacctgcctgggcaacatggcgaaaccccgtctctacagaaaatacaaagttagctgtggggtggtggcccatgcctgtagtcccagctactcaggaggttgaggtgagaggatcatctgagccagggaggtcaaggctagagtgaactgtgattgagccactgcactccagcctgggtgacagagttttaagaccttgtctcaaaaaaaaaaaaaagaaaagaaacaatttggagaaagatctttcgggtaggagtgattcttcagaggcaaataaagtattgggggagggggagagtaaaggattcctgcaagaatcacttaacattacgtgtttatttcttttcctgatctttttctgacttttaaatttttctcttaaagtttcactttttagaaaatactcaaaagactaattttggggtgaggattgtgagggagagaagtagagtatgtatgaatcatttgtgttagcaatagttgtttgaattagaaacagtctatagtttttaaaatataaatgggctatatacatttaaaactatatagttatggctgggcatggtggctcatgcctgcaatcccagcactttgggaggctgaggcgagtggatcacgaggtcaggagttcgagaccagcctggccaacatggtgaaaccctgtctctactaaaaatacagaaattggctagctgggtatggtggcagatgcctgtaatcccagctactcgggaggctgaggcaggagaatcgcctgaaaccagaaggcagaggttgcagtgagcccagatcatgccactgcactccagcctgggtgaaagagtgaaattctgtctcaaaaaaaaacaacaacataaactatatagttatttaaattgtggaa

SEQ ID NO: 94194 - DNA, 2133 bp, Homo sapiens
atattttaacttcatggatcctgtgcagtcttaatagaggagttctgcacaagaaacatgatttttcctgttttaggaagtaagtactgtggggtactactctgtcatctggtggctaacccttccaaatgtatcccatgagaggagacagtgccactcaaccttttggaggcaggaagtatgggagctgtaaaaagagcctattttcttaaagcttggaacttacttgagggatagaaacagagtagtgttgctattagtgttaaagttgtgctgatgaggcctaagagctctgctgataaggcctaagagctcttatcctgcttttctccctttactggaaattctgacaaacccaagagaaggccaaccagcttggagacctactaggtaaggcaggaaccacaagtagttcctgatctgttagtgagaacccctagtttgagtattttctcaagtccccccgccccccaccgtttgttttaactttgaaaataaccagtttacagtaatgagctatttcaacatgaggtcttttattgtccccctatttatccctgatattaaagttactcttattttgtttctgtcttgtcccacttatctttgaagtattactctgttttagaccttccaattcactgatttatcagacctttgaaatatattcttatcttccacagaattatagtatgtgactttgttggcaaagtattccccaaattgtagttgctaccctgtgaaaataaaattatgaagatacactataaggaatgagacagtatgatgtaaagagctcagagttaaagctagctagatatgggttctaatcctgactacacatctgattagttatttaacatttggtgagcaatgttacctctctgagccttactttgtgatctttcaagtgggaatcacacctgccttatagaacatttgtaaggatgagagatagtaaagttcctagcacatgatagatatttaataaatgataggtcttttaaatataaaaagtaagggattgtatcagctgtatataaaattaaacccaagagataaaattcaatctgtatgacttgttacaacctcagagaaactgatttgttgaagcttataccaattcttttttttttttttttttttgagacggagtcttgctctgtcgcccaggctggagtacagtggcgcgatttcggctcaccgcaagctccgcctcccgggttcacaccattctcctgcctcagcctcctgagtagctgggactacaggtgcccaccaccacgcccggctaattttttgtatttttagtagagaccgggtttcaccatgttagccaggatggtctcgatctcctgacctcgtgatccgcccgcctcggcctcccaaagtgctgggattacaggcatgagccaccgtgcctggcccccttataccaattctgtaagagattttattactttttttttttaataaatgaagaagtagaggctcagctatacaacaatgaagatgcatagtaagtagcaaaaaaatttcaaaattgatttatatcacctaatctttctataaacaaggaaagataccaaaatacatttggcagaatgtttgtataactttcaggggatgcaataacctgccccttgaagcagatctgtcccctgttctataccatctgtcctattggagatggctgcactagtctgatgctattgattgttgacttatctggtttcacatttttcaagtaatcttctgattataattttacctctcatgtagatttgtctcaagatgagactctactgattgaccagcatgtttttccagtgtgttgatgagatcattaagcactcattatacaaagaagggtagatttcccctgaattactcataagttatgaataaagggtattaactgattttagctcatggttgtaggctggactatttcagaaggagaaaaatgtgcgttaaattagttttagatttcagtggtaattttgactggtttgtggactaaatattcttttctcaccatggtttggtgtgtttcttatatgtgtagcttggagtttttatatatgtttggttagcataaaaaatgtgcttaaacttaatccttagaaaata

SEQ ID NO: 94195 - DNA, 1945 bp, Homo sapiens
gagtctgttggtggccggggggaaggcgagcggcgtgatttctcccttttctgccgccttccatggtttagtctgcctctttctagtggtaggtggggggagcgactgggagcgatcgggtggtggggttggctggggaacttgttttccccctcttttctgtgttagcctaccccttcctgaggaggagcgggagaggggaatcggggtggtctgtggtgttggcaggggaacttgtttcccccgcccccccgtccctggtcacggggtagggggagcagcgactcctctcccaaccccacagtgtttgctgcgcagtttgtctttagttacgaacccctgggaaggacccattaaatcaagacctttaaataaataaatatagaatccatcggccatttccagccccctccctcgtgtgcagtgcagttacccttccgctctatcgacaccccctcgcctgtcctccccgagcgaccccccatgccgcggtgctactctccgtctcctagtggggtttgaacgccccttgcttagaactggccccttgggatattttgtgtgtgtgtgtgtgtgtgtgtgtgtgtgtgtgtgtgtgtttgcgcgcgcgcgcgtgtgtgtgttgtgtccaaggcctagtgaaatgtgtcatttggacccaactgtttagcactgtctggtaaccaccattgtctaagggctgaggctccccgaggttgaaatcctgctttagcaaaaataatgttcagttctacttggatgatgtggttattttgggaggtttatgagggggggtgttgcaccttggtctccaaacataaccattctctttattaattagctgttcgcagtagtggtagaggtcagaaccgtatttatgtgtacggttgttgttttaaggaggaggagaattgttaggagacattttgcgtgttttagttggcggattaaggttaattttacatgcgtttgttgtcacacctccattggttaaagggattgagattaaatgttttttaaaattatacattatttccttaaaaacggtttcattgttatacttgatcacaatatttaacaaatgaaggagggagatgttaatcggaaaatagtttaaaaggctttcaccagtcactgttaaaggtagtcttagagaaagcagtttgctatatgttgcttgaaagaatgtgatgtttcaaggcagttggagatcttgtgcaacataattggtaaaagtgttttatttctttgatacatttaccattttgggggtaaattttaaaaatctgtagtctcattatttcctttcacatatgtctatcagtgttcttctgatgttccgttcaaataatgttcttcttccagaattgccactgtatgcagtacagctgacaaatatgtttgagaaaacaatgacactcgattgaaattctagcctttaatattaaggattctattgctacagtaagctttttcaagatgtggtaattggttaataatattagcattggatcaaaacgtgtcaaacaatttagtctccttgtgtattttaaaatgtttactctgaattttcatttcaaggtttgtgtgtaatttcgaacttagttgatgtaattttgtcttggacacttttattcatttgttcaaaattattagctactgaggtctattttcatttctatgtgaggtaaggtgacttggttgttggcagtcacatgccagtgtcaattttcttctcattgatgtctataaactgtcaatattcatgaatccaaatttcagtatgtacccaaccaaatggtaaatgaaatttactgtagaattgttgcttctctgcagctagtacaaactgttttggagattctgtgttggcacagagcagagaggaaaagaactttagggaaaatagtgtgagtcttaaagagggcacataaatggccttaaa

SEQ ID NO: 94196 - DNA, 1017 bp, Homo sapiens
ggctgaagagacagatcccggtcccgccgactcgcgagcggcgtctccggcagcggggggagtgggcgggcgggtgaggaagggagaaaaagagagggagagaagggagggagggagcagggggcgcccggctcttttttttccctcttcctcccccccacaccccctgaaagagatttctgtgaggaatttttctctctttcttcggtctcttctctctcctcccccccttctctcctcggcgaaggggaaatgagtgtgaagggaggagatagggggaaaaagaggcgtcgtccttcctcctccttaaaggaacctttcctcctcctcctcgtcagccctgtcgccgctgcttctgctgctgctccgtggcaggaggagccattgacaccgccggagcctccactcgcccagtcggtccctccccgccgcggggctggccgggggcgcgggggagggccgcggggcggcggggggaggggtgggtgggcggggaaaggaggggcggggattccgtccaggcggccaatctaaggcgcccgtacaaccttccggccaatggggcctccgctcttatcgcgaagtcccttcaacgccctgtttcctctctcgggtttcctccctcccccgcctaggagggggaaagaggaaagggggagtgtggcggggcgggtgataatggggaggtatcagggcaaataatagagcagggggtgggcgaagagagcgccagtgcgtagcgacgattctgggagaggaggtgctcggaggaaagggcgggggttgctgatgtaatggggagaagtgattaatccttcggttcgccgtttcagcttcccccctaccccaaccttcacccgatttttttgagctgaaaaaaaagtggaacgagggagccaatctttggtaactcgggttttctgtggtaggtgggttcaaaatctgagctgtagggagcgctagagatttcgtgccctttagccaagctgagggtatttgcaaaccctgaagatttcc

SEQ ID NO: 94197 - DNA, 1048 bp, Homo sapiens
cttctatccaactgccaacttgacatttctacttgaacatctaatagcaagcaggctgagaattttgagaattgaataggcttctcaaacttaaccaaaaccaaattcctgattcccccacaccacacctgcttctcccacaatcctcccccaaaactttggcatcattgttgactcttctcttctccattctacactcaaaccatcagcaaattttgttggctgtcttcaaaatacatcctgaatctgacagtctttcaacacctccactgctgccagcctggcccaagccaccattatctctcacccagattattgcaatggcctcctaatctctctgcctctgcccttacccttatgcagtctttatactagtcaaaacaaatcactttatttacctgcttgacattcgccaactggcttctcctgtcactctgagaaaaactcgcagtccttaaaatagcccacaggacctgtacaatctgcctctcaacactcacctctctcatctccttccacacccttcctactctgtgctgcagtcacgctggctgctttgctctgtgaacatgcccgtgatgagcatgttcctatgccagggcctcactgcagtctctgaagcttcaagtggttaacctgtccaagatcacacaactagtcagtggcagagctgggattgattccaacccacctctgattctaaattcagtgttttaattagcgtaccatatggcctttctactgtaaacaatattcattcagtcatttaccaattgctgttccgggtcctaaaggatatagtaactgacaagacaaagctcttaactttgtggagctcatattctcgttagtggaggcaaacaataaataaattcaaaacgtggtacagtaagtcttcacttaatgtgtccacgagttcttagaaactgcaacttaagcaaaatgatatataacaaaatcaattttactatagactaattgatgtaaacaggagtgtacatcagttaagttcccatggcatatttctggttacaaaaacatcaccaaa

SEQ ID NO: 94198 - DNA, 1576 bp, Homo sapiens
aatccccaggccctgttctatggagcaaagcaaaatagaaaggcaaactcctctaatgggctacaaaacttagcatacacatttttctcttccacttgctcagcatttctaagttgctaatgacaaaagccagcatttgtgtctcatgtcttcctctcggctggtgtgacacagtctttaatctgggcaggctgccccttgggggccaggataatgcccttgtaatgcagggagcactcaatccactcacatttccctgtatcatggtgagttgcttcatcccagttaaaaatcaagaaatgatacagttaaaagactcttcaagaaccaagaaatagctcctaagtggggtcttcagttggatgccaaagagaaatggctcattttctccttggttgagtgaatttttgctgctgacctgtaaattctaaactatttgaaagttactggctgggaaattaatggaaactgagctggaaattttttctttcttacccttatgtgtgatgccttatttaaaataattcagactcaaagtgaatttctagcaaatggtgctaggctgctattaaatttattgatggtgaatacatcatccttgctttttatgtatgatgtcgctgatgtggtgattttttttaagcctcatggtaagactttttaaaaattcaccttttccatgtgccccatagtgctaagtgagttcaggttaagacgccatttagcaaattaatttaccatgttgatattttatggtaaagctttggaaaaccattaaagaaaccacatttactttttatatattgggatgttttttatgtgctaagattttatataaatttgttatttatcttgatgaaagccagataaataaatgctcctattgtgcctaataactcaactctttgctttcacaaggccagagcaaggctgaaaggaaattcatctcaaagctattaagaaaagccagatagaaggagagcataaaaatgaaatgaacgatggtgaaagggccagaccctcttccagcctgctctacatcatcccagctacccagatggaacaaagatttagagttccaaacagaattcaagaatagaaagaaacaatgcgggatggtctgagaaagggatcaatccatcctgtgttcataggagacacagggagaaaaagaaatcattcggtgaaaagtctcagcagcccaaagcagaaataatatgaccacccgcaaactgccaccatggcccccatttgaatacacctcaaaagcagcccttgcttctattactctctttattccccatatgtgtgaggagatgaaacaaaggaatgaagaaactacctgggtgcctcctccttcatacttaggggagggtttggtcccaacgttcaagtttactgaagcccctggtggccagaatgcaaagaacatgataggtgatacggactttgagaattttctctaataacctacggtaggtgagctttcttttttctttttctttttctttctttctttttttttttgagacagagtctcattctgtcacccaggttggagtgcagtggaacaatc

SEQ ID NO: 94199 - DNA, 1027 bp, Homo sapiens
cggtgcgggtttagggctgagcagggcaggggaaagcgggaaaatgcaaaggcctcgcatgtccgaggaaggacctataggagtgcggcggaggcgcggcgcggccgctgagtggtcgaggaggcgcgggggcggggctaggctgccgcagggcagtacggccctcggtgcctgtgcccgggctgaggagaccttcctcgacaccccacgttatgtgggtttccgcaagaccttccgccattgcctgggctttgaaagcgctttaggaacggtaaagcattgctgtaacttaaagtagtgttactctggcttgactgaaatgttctgtggaaacaagtcactgtgtttgcagtagggaaaaaaagacttacggatcaaatccaaaatttaatgtgcataggatttacagaagctaaggacttcacatccattgtcatatccataataataacatagctttgccacacgaaatacaggagagctcatttaaacctgaatttcagaaaaatggagattttttttaaaaatataagaatatcccgtttgggttatacttcctgtttgttttggttcgttttactaaatctgagaaccctatctaactcatggaaactttacagatacggaaacggaggcttagaagtggaaactttacagatatggaaactgagacttagaaaaatgacccgtcaaaggtatgagaagtggcagcactaaggctctagtttgctacgaatatgatcctgataattaaatctctgagtttctctatcaatatcttcaaaaactagagtagtgatacctatctcacaaaggtgttgagtagactaaaagaaaaggtatacgaagcccggatactgactgagcatgttcactgtgtgtccaggctctgagtagaaggtgagctgtgtgtgaaacaagctacctgctgacaataaaacaagtcaggctgtggggctgatagctgcagaagaattatgggcatcagaatatatttttaaaatataaacatttgatcccgtcattc

SEQ ID NO: 94200 - DNA, 2024 bp, Homo sapiens
ctactgtttcagcgctgcaatatggacacttcctgttcgccgcctcctttggggccgtggttacctttgccttttagtcctctttcctggcaaggtgagaggtctgcggtggaagaggccttcagcctttcaagtttgccccactgcagcagcagcctgtgtggaacccggcaggacggtggtagttagcggaaagcagcccatgtgctccgtgctccatcctccactacttaactccacccccttttgcacctttgcaaaatgcctctttttccactgcatctctcgggagttggggtgtctgcttcgctgacgacccacactctcgcagtgttcttgcactggatttctgctttaaagtctttttacagcagtctctgaacttcattttctccctactgggaaaaaagagttttagcgtgcaaagaaatgaccacagactttctttctcctaccccaactccgaggtgaggggaggagggcagttaagtatttacaggttagttgaagttgtttctcctatcttttttctgattgtgacagccacgtggccggctgagtgtaatagagtgcgctagcggcactaggggctgaggtttctctggtagccaggggctttgtaactgtgctgtcgcctcgcatgtacatttatcttggtgggagaagctgaaccattcatgcctgtacctgttccatccgaatcttaagacttacctctgttaccttgcagttctcctaaggtgtataccgacgttttttgccgttctctgctgttttgttgatccatctttaaaacctcagcattattaggtaccatcatagagtgatggggaataatagagtagtgcattatggagtttgccaactttgggaaaaaatattacttgaatttcaaaaccattaatgagagattctaatgcaatcagaagtaattgcattatctggatttctttttgatagttttagaaaaatctatttttttctttttacataaaaattgtgatctaaacatacgtaaataaaattaccagtgaaaatacttttttagggatgaagtagtgatttgatttgtgtatatgtgtgctttgtaaagctttttttgaaaaatgtgaagttaatatgaacgttaacatgaacagattttaagagaatgaaatataatttttagaatatataaaagtagaaggtcaaagagttgaagataaaaaatgaacttttggagagtttggaaaatttttgaatttaaggacaatccttgtttactaatgcatcgtttcattttgtgaatgctttggtaggtttgaattatttctgtattgtatgtttttatttgaatcaattttactggaagaatgttaaaccacaggaaccatttaaaatctgcacaagaactgtatagagaagttacagcaacaccattttattggaattttaattaccccataacaatggtgctcaatcagaaaagttaaataaagatattgaagtggtatctaggccttagggcagaaaagacaatacaattgagaaatgagtatatatgctaaccactgagagcaatttttagttgagaaagaaaagtaaatgaggtcataaaatacttatataaggctaaggcaggaggctctcctgagatcaggagttcaagtccagcctgggcagtgtagccagactcccatcccttgaaaaaaggattgctcaactcgtgcctgtaatcccagcactttgggaggctgaggtgggaggatcacctgaggttaggagtttgagaccagcctggccaacgtggcaaaaccccatctctaccaaaaatacaaaaattagctgggcctcgtggggcatgcctgtagtcccagctactcgtgaggctgaggcaggagaatcgcttgaacctaggaggtgaaggttgtagtgagttgagatcatgccactgcactccagcctgggcaacggggcaaaactctgtctcaaaaaaaaaaaattttttttttgaagggttgagaacaaagatttgatgctttggg

SEQ ID NO: 94201 - DNA, 1084 bp, Homo sapiens
tatttttagtagagacggagttttaccatgttggccaggctgctctagaactcctgacctcaggtatccgcctgcctcagcctcccaaagtgctgggattacaggcgggaaccaccacgcccggcttatagtattgttttattaataattttatatcctctaaatgagaaggctatccctgtcctgccactaatataaagggatcaaaagaatgtttattattatttgcttctaagggattttgatccatatatactttatttcccttaccctaacttttctatttaaataaactttttattttagaatagttttatagttacagaaaagttgcaagctagtatacagagtatacctcacccagtttctcctgttcaatttcctacattacaatggtacatttgtcacaattaaggaaacaaaattgttacagtactattaactacatactttattcctatttcgctaatttttccctaatgtcttttttttgttccagaatttcactttctatgacttctctttgttttgatgactatgacaattttaagaagtgcttgtcagacattttatagaatatccctcaattgagatttatctggtatttttctgatgattagactgggattatgagttttagggaggaagataacagagatgaattgccagtctcatcacatcatatcaaggatacaaactaacgacatgataaaactgatgacgcttaccttgatcaggtggttgaggtctttgtggagtttcgcccactttcctgcctccttccgatctctactcttttggaagcaagtcactaagtacatgccatactcaaaaaccttaacctaattttgattcatgtatttgtaatttccctcgacctaattttcctttctataaacgaatacttaaacttggacagatatttatttagtatctattgtatttaggtgctaagaatacagtggtgagccagagagacatttgttctggagtctgcctgatttaagtatcacataggatgtatctcctcaccttaggtcttgatttcgttaacagtttataaacataaaattactgaagccct

SEQ ID NO: 94202 - DNA, 1098 bp, Homo sapiens
tatttaaaatacactatttaattgtgttaatatcacccatacacctggtcctataaagctgcactttatttacagccatttcaactaatataagttattttccttgtattataaccattagtatcttcattatacaaatgttgtgcttaaatattatgtgggacaattgattgcaaaatttctctgatttggggatatttacatatgtattttctttttcccagagtttaagaatctaaagtattacattgataattgtttcctttgttgcagaactgtaagagtaaatgggtccagtaattggaatgactccagataagagagctgaaaccccaggagctgaaaagattgcaggattaagccagatttacaaaatgggaagcttgcctgaagctgttgatgctgccaggccgaaggccactctagtggacagtgagtcagcagatgatgaactcacaaacttgaactggcttcatgaaagcactaatcttctaacaaacttcagcctcggaagtgagggtcttccaattgttagtccattgtatgacatagagggagatgatgtgccatcctttggaccagcttgctaccagaacccagaaaaaaaatcagcgacttcaaagcccccatactcctttagtcttctcatttatatggccattgagcactctccaaataaatgtttgcctgtcaaagaaatttatagctggattctggaccattttccatattttgctactgcaccaacaggctggaagaattctgttcgacataatctgtccctgaataaatgttttcagaaagtggaaagaagccatggcaaggtcagtgtttatgaacattgctatatttggtgaggtggggggactaattaacatggagcccttaaaatatctggaaatcggggagacaataagtagtcaagtcaaattacttcagctgaactgaattatattcatttgttttcacttgagatgttttaaaatttcttaaatattgatataaatttagcagaattatgttttgtccactataggtacctagattagtctttttattattttagttctttgtttctagtttctgtagtgttcctat

SEQ ID NO: 94203 - DNA, 1072 bp, Homo sapiens
tgtagcccttgcatataagaatttgtaagtctgaggaaaagagtgagatacagtatatgtaaaactatgaataggaaataaacttttaagttcgttaacaaatagatttttttttcatgctatcataaattccaaagaagagaagtagtttttcccaaaaatattttaattcctggattaaaaaaagaactgttggtgtctttccatgaatatagaaagtttaattttatgtttattaataaaatcaggaacatacctgtttgctatcactaccaagtgttccttaaccatgaattttggtaaatgcttttatttttgtggtaatacctatattagtattatatcaaacttaagaatccaatgcaaaaccaaacagtaactatcatgtattatctatagttccaggcattttaaatgcattattattatttaattatcacaacagcctatgtgggagatttaattattcctattttacagatgaagaagctaagagattaattattttgcctaagaacatccaaatagttgtgatttacctcttttggctcctatgctctttctgctttggcagactttctaaattgagtagtattagcaaagaaaacaaggtaaaaatagtttgtttttggtggtacaaattagctgtatttgtgactaagttctataaaaagtgaaatagttgggtgcaagtggctcacgcctgtaattccagcactgtaggaggccaaggcaggtagactgcttgagcccaggagtttgagactagcttgtacaacatggtaaaaccctttctctaccaaaaaaaattaaaaaattagccacacatggtagtgcatgcttgtggtcccagccactcaggcagctaaggtgggaggatcacctgagctcagaaagtcaaggctgcagtaggctgaaatcatgccactgcactccagcctgggcggccagcagagtgagagagaacctgtcaaaaattagggggaaaaagtgaagtaaacatttttataagcatatttgcttttctgtttgtttttcagtggttctttatcacctcactatttaagctctg

SEQ ID NO: 94204 - DNA, 1822 bp, Homo sapiens
cagcattgatccaaaagaagatcacaattacagtgcaagtagcatggcagcacagcgttgtgcatccaggtctagcgtgtcttccctgtcttctgtggatgaggtatatgaatttatcccaaagaatagtcacgtgggaagtgatggcagtgaaggatttcacagtgaagaagatacagacgttgattatgaagatgatcctcttggagacagtggctatgcatcacagccttgtgcaaaaatctctgaaaaagggcagtcaggcaaaaagatgcgaaaacagacatgtcaagaaattgatgaggagctcaaagaggcagctggatctctgctccaccttgctggaattcgtacatgtttaggttccctaataagtactgcaaagacacaaaatcaaaagcaacggaaaaaatagaaatacttaaagtgtggcaatactctttcacttaattctttacaagggatatcaaagccataatggacttcattagttttagggtagggaagggatactaattacttatttctttcaaaacatttttggtttttggtttttaaaatttttattaaacaattgctgttaggatcatgcctgatcagaaatacatgatgtgaagtcctaaaagcataatttttgtgataaatgtgtccaagatttgaaaatttttatataagaaaatccccagcctctgtcttaaacttgtgggacaaaaatcctttcttctgttaatatgtcagaatgtaagatttggcaactcgataaatttttttcattttcttttccaatctgtaactatagttactgaaccagctaaaaattttgctgatgtatttttcatatacttctctcctgacacgcaatccggtaacataagattgaaatttttttactttgtcttaatttgtttctaattttttttttgttgtcgtgtgagcaaagacaaacataaattgaaaaacatcctgatgtttagaaagtttcttttggttacgtaggtagagaatacaacaaagagttctaagacttagaaaagacaattttgtggtgtcatttcatccaagaacactcccaattcctattagaatggtagctttgaagtgtttttacttcagagatcctgcatagcatttattggggccttttattctttcccaaagtgctttgcaaacattaagttttagccactagctgcctttgttgagtataagttatccagtgagaggatatagccaattaagtgtgttatggagtacacccattttgacacacttgtaataagagaatctttcatttgcctgccatgtgtactgtattatgagaatcttataatcggaatggagtgaaatgaaacattttgagtactgatggcatgttatcatacataaagtaggtcatttaggaaaaaacttctgtccaagctttgtatgaattaaattcataagtataccaaattaaatcttaatagatttaatgcaattttacagacacaataccttcatgaatttcaaaattcatataaaatttgatcttatgcaatacacctttttgaggaggcagtgtaacaacctatagtgccattgatccatgagaaaaagattttctggtactactccaaaagtgctttgactaagtatcttaactatttgaacagtctgcttatatgagacagtttttcatagtatcatttgtataatttgattagattattcagaaacaataggatgctaaactaattcattgtatcttttttttacaatggtggaagcaactttctgaaagttcagtcttatgctacatcctaagtcatagacaatgaccttg

SEQ ID NO: 94205 - DNA, 1150 bp, Homo sapiens
caacttagaaactccaaggaggttacatgttttccaacatatcctaaaaactgtgatataagctaacatataatttgccttacgtcaaaagaatatgttttgttgcagctgattccagtttataatagatccctagtaaaaagctttgattcaacacaattgttcatcttcacatcccaaacagaatcactgtttcttgaatatatatttttgaagtttttttgtgcaatatattactaaatcagttattattttacttttccaaattcagagaaagaaaacagattacctgaattcatggaaaaggtggatcacctccctttttccaccttcaagcctttcctgtcctcatagccagcatgacttcttttaacttggattcctttgtatatagtaaagtttagtatatatatatttttttctttttgctactttctgaggcattatgtaaagggctcatactagatgttcagttaaatatactttagcacaaagtcaaactagagaatgtgttaaggagggaatgtatatgtcttggtagaccaggaggcctttgccagcaatttaagcaacagatgtgaatacttcacaaagctgtaaagaccattgtcttaaatactacaacaacttaacacccttttgtgaagatcacagcatttatctaagaaactgtgaggctttctggtttacatatatcttacaggtgtttttttgtatttttttttttttttagtttgaaatgtgtaagctttgatttaaaccaagtttacttcagtatgttaatgatgtagtaaaaatatttattgaaaggtgaattcgagtattttaatgttatacctgccattttttttcttaaagcatattctttgcatctaactgccagtgccattgtcaaaacttattttttaaatcgttgtacatttcttattaaactaagtgcttaattttaaagtattatgttgccatcatatagtgtataaaaatgtataattgccaattgattgtaactattatttatttttaaatgaaagtgtaagaatgctttctgattcaacaaatttgttatcaaactgtttccttatcctcttttctgatgtagcataaaaattgtcccggtttgagttataactgccagtagatgaccagtcac

SEQ ID NO: 94206 - DNA, 1040 bp, Homo sapiens
caatggttggagcttcagcaaccattctgttaccatggatttgaagatggaaatcaacgctaaataggggtgttaaagcagaaaaggtaggaggcttggacacaccaacctgagactgctaactgccaaatttatcttatttgagagaaaaacaaacccctatcttgtttaagctattgtcagttgaggactctgtagtaatgaccaaaggtaattgctaatgaatggctttccatgggttgaagggcactgtactaagggcactttggaatttttttttagagagattgcatttttggttgtcacaatgaataggaaaactacttggatttaatagatgagagcctaggaggtaccgtcccagatgttcatgtgggttcaaagcaacaacaacaaaatattgataatcaattacctgtgccttgaacctaactatattttccatgtaaaaacaacatattttttgcgtggattcagacatacctaattttccatgaatttaactgttacataaaacaaataaatcttgaactttgctttttggacctttactaggatttgttcaccttttacagagttatattagcattggcaacactagctgtattcagtataacacacctgtattaatctgtgtttatagttgtcctgtttatggtggatgtatgaataagtatagaatttgactccttcatcacatcttctcgggtagctagttctaagcatttccttattgaaatacatattactttattataaattaactcccttttatttctcctttgcatctttccagggaaggccttacgctgattctatttttgagaagttatgtgtaggtagattatattatctataaacttaattgcaggatcataataattgccctacaaatttagcggggagagagctttgctcttgaccatgcctgttgttctaactgataccaatgaatacacactcagccctttgtctgccttctttgctttagtgctaagaggcagaaaggactgacaatagcgagctaagcctttggggtc

SEQ ID NO: 94207 - DNA, 1021 bp, Homo sapiens
tattcagtaccatattatttattgtattagtttttatttagggatgggacttggttttatagaaagagtgacacactagaaatcaggagactggattttagtcccatttttgccattgattttttttttttatttcattgggcaactcagcctgtgtgtcctccttatctgtaaaatggtgaattattgttatctactaccctctttgggtctaatacttttttgttctcatatatatgtgagaagctacttagttactcagtgtaatgatgcctgtaaaattgatgtgatttccttgatataaccaattgctttatattagaaattgattattgctttctctgttttcagcttcgggctcagaatcaggttctgaaaaaaggtgttgtggatgaacaagcaaattctgcagctttaaaggtgggcaacaggatatttgtgttgtgagggttaagttagcatttggtgttgctcaaagcaggttcattgggttttctgggttaaagttccaactctgacactgattcactagggataggggacagtaatacagtcttttgtggttaattttcctacttgcttaggtaagaacatgaggtactttgatttccttagctaaaaattataaaaaaaggtattatgtgactttgtctaatgcattactcctgtgcctcaaggcctttacttagctcggtttatctggattattaaggcttcttatcagttgtcatcacagacagctttctgagggaggctatgtcatattcctatttgaatccctctcactcagcagatggcaggtctctaataagtggattccattgtgtgaatcatttagtccctaaatcttgcctttagttgagttatttaatagtaataacctgtgttaatcaggacactctttgagtgatacattttaccatcagcatttttgttaactgaggggagaaatatgatagatgaaggaatttgtttctgcctcatttctagtaggcatgtagtaaatattgcttagtgatat

SEQ ID NO: 94208 - DNA, 1035 bp, Homo sapiens
aaaaagaagctttatagtcaggatttattagtcaagttattgtttcaccaaaattgttgaaaaaatgatcattatatctccaaatgatatttaaacttattgctggggaaagtctttccttgtttgtcctagtagcctgcgctggtgtttcataccctcctgttgctggttgtgtttgattaactctgtgatggcagtaatggtaggaacagtggtaggcgtggtgacagctggttctattgattgagcactcactgcataccaggcattgtgctaagtccattatgtccattatcttatttagtgttcacaacaacccgatgaggtcagataacattatcatccccattacagaaactggagtttagcgaaaggctgggatagatgttttctgaaattaatgattggttaatggagttggagcattagtttattttaagaattataagcataattatatattataattatataatataaattatgagaaaaataaattatttttttttttactgtttattacagtagtcattgtaattatagtacaacaagtgacaatttgccagtttgctagacaggaatatttggatttcctgtgttacaggaggcttttagttttattactgggtttaccctttcagtgcgctgttaggtgtaatcaatgctcattgatttgaatttttaaaatttgaaagacatgatagtttggacatgggctaggcctaaatttgcctttgaactacaagtaaaaattaaggttttactaaacaaatgtaggaaaaaaattattttctccttaatgggagcatattgttctatccctctagcacttttctcaacatgcaggtaatgtcagtagagtgtagacactagcctatggcttttaagttgctgttcctttttttttttttttttgagacagagtcttactctgtcacccaggctggagtgcagtggcacaatctcggcttactgcaacctctgcctccctggtttgagtgattcttgtgcttcagcctcctgagtcactgggat

SEQ ID NO: 94209 - DNA, 1045 bp, Homo sapiens
tgtagaacgagttcatattagtaaaaatttaaaggaagggattttaaaataatctttgagaattttcctatttatttataatagctttattttatatattttttaacttagaaatttatatgaacttttgtataaacttacctttgtggatgctgttacagaatttattacaatttcttatggagtttaacaactccgactcatgaaattgctataactctcatttcccaaaccaaaagatcaaattgaaatgatatttatgagcttattttatattgctggagctttctaggtctgctccgtcctccagcagaactactcctgaattcatctgcaaagaatagtaagccttatctgttcttttctctctctttttaaagctttcctgctccttacaatatttgcagtttcaacttgtgtcacataggaaaagttaaatgatgaactgtatagcttttgcaggattgtttgagaatggtgaacacatagaagagacaagcttctaagatgatagagaatctgtgtaccttaggatgtttctctaaaggatgaaagttatgtggacataacttattctttccatcagaaaagtggagaatcttcttctcagttgagtcaagagcagaagagtgtctttgatgaagatctgcaaaagaagatagaagagaatgaacggttgcatatacaagtgagaaaatctgtttttctatgtgaattaaaaaatgggtctgtgatctgttaatgtggaaaagctaatgcacatagagtgttttgtgtctgcgtgggtattttaatgtcttctatggtcttcaagtatatatgtcactgtcacttattcatttcttaaatatcacacagtcttaatgtggatgtgtgctttgaagtatatgcatttgttcagaagacagcagaatagctttataacttaacagtgcagaaatatactgagcattattcattttatatgggaagtgattacatgtatcatttaaatgggagcttaccaataaatggtatttgcttttttccctccccctcccttttt

SEQ ID NO: 94210 - DNA, 1951 bp, Homo sapiens
atggggttgttggagaagtttttgagccagggaacatcatgttgctatatgtgtactcacaaggttaatctggcaacagagtgtagattacctaggagtgggacaagggagtcaaagactattgtgatgatagttttggcgtactattgtggaggcttagcctggattggggagatgtggaagatcttgtggaaggagagggagcagactggtcctttcaaggagacaagggagaaagaggcagtcatggggaagatggtgatgcagttgaccgaaagaaaagaggtagacaggagcaggtttatgggagagacaacgaggttaactttgttgttgtttaatcttctgacagatgggttcatatgtatctatataactgctgatgtatgcctttctaaatgaaagactagactttggcagagaaactgatgtcaacactattgggctggaggagccctcatgttgggagtggtgggtgcacagtgcagtcaggcctgtgcagggtccttggtgagttctccatcccagtgatcaggaggcagaggggagctgtggaaacggggtgaggtagaagctggagaagggagtttcaacctgatggtgcaggtcagttctgcgcattgctgtggagaggtcagagggtgatgtatcaaggcgactgggtttggtgactggattttgtggcctcgagaggactagtatactttgcgaggagcgcttctgtgcagggtgtaggtggacactagattgccagcacagggagttgaggtgaatgggtgctgaggaaataggcagagcagtgctgttttttgagcagtgggaatgaaggaaatggagaagcatgagagcctgacagacgggcaaagtgaaagaaaaggctggggacaggagtcagggcagagaattaagtgtgattaagtaatggaagagactcactgtggacacaagagttaaatgagctgcagcaaatgctttatttgtaatgaggagatactgaagatagaagcagggagtgattatgtcctaaggtcctgagggggtcagaagcagaagggcccaggaggacggttagctgaggaaaggatatgcaagcagtagaccgaggtggagggtggggagtgtaagaactcttttgctttggctgtgattttcttggtggagtagggagaggccatcctatccattgggtagtggagaggagaggaggaatggtattaggagcttaaaacagaaaaggtttgggatagatgccatgggaaataaaataggcacacggcaatgaaattgtggattgctgagtagagttgaagccccctggagttaggcagagtaaattgtagtggactttactcgggattcgtgttagcaaaagcgttgttgaaacaatggaccaggctgggaagcaaaacaagcaaggctgaaagatggctgatagaagtgtccagaggtgttggtggatgggagatcaagctggtaatgtatagcccagtgagtagcaatggagacataaaagggaactgggtgactatgccacaggaacattctgaatcgtattttggcactggggtcattctgactgagaacctgggcagagaagggcaggtttgagtggctgaagggatgagtagagatgaggagagatgcagctcattaaggaggagtttgaggaggtatggctaggtaggaggaagctgccagaggttagtaacagaccagggtagagaggaagactgagaaagatagtgataccatccaggaaagttaggattgagtcattgggatccacagtggcagacagtgatagatttttccggtaatgtagtgtcaggaaaacagtggtattttttgctgattagcgtggcggctttgtggagggttattttagaagggagaatgactgaaaacagcaagaacgtcatgagcctttctaagtagtcctgataagcctgaa

SEQ ID NO: 94211 - DNA, 1048 bp, Homo sapiens
actaggaaactagctatagcccagtaaggactgtgagacagtgtggttgtgttggctattcctttccagcctggtgggttgtttatataaatacaagataatttctcctcaatgcctgttacactatcaaaacagtggtttttaactggtaaatagtggtttttaactggtaaatacaggatcatttacccaatgttagaattaatactccgacgaggaaatcttggtggctgtagtaaagatagccaagatggtgttcagagatccttacttctctctgttctttccatgtagatttgtgacctaattgatactcagtgcaatcctgacacttgagaccattctttgtcaaatttactttataaatttagaagaatagataggagaagtgaatgggctggttatctgtatgtgacttatatatagataataatgaattttcatgtaattgcttttatagatatttccaaacattatagtcaaaaagctgcaatagagcatgaacttccaacagcaacacagaagctgataacaactaatgactgtatcctgtcatcagtagtggcattaacaaatggagcaggaaaggtaattctcttctggcgtatattgatgttaaaactcttaaatatgtgctttttttctgagggacataggaaaatggatctgtaaaaggattttgtaatataagggtttactgtaaaataaagttgtctctctttcctctgcttcctacccagtatgtactctgacttattattttaagagagggatctctcgctatgttgccaggcttgactcaaactcctggactcaggggagtctcctgggtggcggggactatgggcacatgcactgcatgctgctttcctacctaatgtttaaagcaatgtgacagtgactgtttagcatttgtcttggatgtgtagatcactccctgtttatgttttaatgcaatattggatgattagaagattctaggtagtctcaatatagatcgttgtgtatatgaagggtctgccatatagaacactgggaacatacaaaa

SEQ ID NO: 94212 - DNA, 1042 bp, Homo sapiens
tgcctaacacggtgaaaccccgtctctactaaaaaatataaaaaattagctgggcgtggtggcgggcgcctgtggtcccagctacgcaggaggctgaggcaggagaatggcgtgaacctgggaggcggagcttgcagtgagccaagactgcgccactgcactccagcctggtgacggagtgagactctgcctcaaaaaaaaaaaaaaaaaaaagtcagttttgtggctaataaaagctggatggaggggcagggttccagtgggcttcccattacttcagttctgttttcttgaagccataacttcattctgaaatagaaagatgctaaataaaagaaatttggaatatacacttccctgctatgtctgaagtttcttcgagggggtaggaaaacagtgattccccatcaaagttcaagtgagaatgtacaaaatgttgtctttttttttttttttttctagaaatgcttcatctcactggtacttgtttatttatgtgtatttgtgttctatttaggttccagatgtggaatctcgtgaagacttaattaaaaatcactacatggcaaggatagtggaacttacgtctcagttgcagctggctgacagtaagtcagtgcatttttatgccgaggtgagtgtagatttaattagattggtggtttttttcctaacccctgcaggagttaggacactgtcctgttttcatgctgttcactgtaagagagaagtcagtgtcccaagtagctgggactatgggtgtgtaccaccacgcccagctaattttttgtatttttagtagagacggggtttcaccgtgttagccagaatggtatcgatcttctgatctcatgatccgctggcctcgacctcccaaagtgctgggattacaggtgtgagccacctcgcctggcccggagttcatattgactagtctgtataccaactaaaaatctttatttcaataaatataagactgatttgagtgaggctctgccttttttttttttttttttttttttttttttttttgaggtggagt

SEQ ID NO: 94213 - DNA, 2424 bp, Homo sapiens
caaaacttagctgggtgtggtggtgcatgcctgtaatcccagctactcgggaagctgaggcaggaggatcacttgaacccgggaggtggaggttgcagtgagccaagatcatgccactgcaccccagcctgggcaacagagcaagactccgtctcaaaaaaagaaaaaaaaagaaagttcttatgtattatatataaccactggtcatcaggctagagtgaagaaaaaaacattgatcttaagttggtagacttttttccccttactgaaatgacaaagctgggggccacttctttcttaggtgtactctgatgtgtgacacaatgcctataggtattcaacagattatttgtggaatgaatgagtagctttggctttgagaagtgtttttaacaaactttcccgaagcaaatttggttttagaaagtgctccctctagtaatggaatgttttctgattttacagtgccgagcactgtctaaaagactggccttggctgaaaagtctaaggaagcattgacagaagaaatgaaacttgccagtcagaacatcagcagacttcaggtgagttaagtgttacctgaatggttttaatgttttttcattgaaagttctttggtagcaaagcagcatttcttttccaaaggcatttgatctctagatatgctttttaagataaccactgtatttctgattcatttaaaaataacatcttacttatgttaggcaaaaagtagttgtattgtttctctgacttgattctaattgtaaatcattttatagtcggcttttgcttaaataatacttatttacccagaatttttctttccccttccttgtacatacccatcatggtgagctgtaggcttgttctgtacatagtactctgttccttttctttcctgttgcataaaacggatctaaactgaaaggtggggctataacattccttcttactcactgcctggttttaaatctttgttttcagaaagcctctgctaataaaaacatgatgccaggcaaggaaaaaacacagcactacagcaacacccacttcctctttgctttagattcatttatcagattaattaggcacacaggattagattttaggcagcagaagagagcatgagaaatgggaagagagatgaagggtgcttctttcagggacggtgctgccgggagggctgtaggccatcgaggcataggatggaggcaatgtgttgtaggcctcacctatggctcagcaaaacctgagggaatttggaaagataatgaggccatatggcttttcttacaattttatacctggcatagaaagaaacccttaaatttttgcaaagaaattatgaatctactttggaggctgagaaaaacttgttgccatttcttttaactttgttctcttgttaggcctgggccttaagctgcatgtcaattgatcagatagaccatctttataggttgcttttacaagtaaaagaatttttttaaaaaattgatgtaaatagttgtacatgtttgggggggacatggtattttgattattttgatacctttgtacagtgtgtaatgatcaaatcagggtcatttggaggtccaccacctcaaacatttatctttgtgttgggaacataataattcttcttttgtagctattttgaaatatacagtaaattattgggaaactataatttccctactccacatttttcttttgtgaattaaaaaagcttcagagtggtacgactcgtgggatgttgatttttgtctttttctttgctatttaggatgagctgacaactaccaagaggagttacgaggatcagttaagtatgatgagtgaccacctgtgcagcatgaatgagacattatctaaacagagagaagagattgacacactaaagatgtccagtaaggtatgtgaggtgaggtgaggtagtctctctgcaatataatatttaatgtgaggtattttattgttatgcatttcaggaggaagaggacataagatttaaagtgtttgtaagggccaggggcagtggcttaagcctgtaatcccagtactttgggaggctgaggtgggaggatcccttgaggccaggagttggagagcagagtgggcaatatagtgatacttcatctctacaaaaaaaaaaaaaaatgaaaaaataagccaagcatgagggcctgtgcctgtagtcccagctagttgggaggctgaggtgggaagattgcttgaacctaggagtttgaggttacagcaagctatgattgtgccacggcactccagcctgtgcgacagagtgagactctgtctctaaaaaagaaaaaaaaaagcatgtataaataattttccttaatatcatttgtccttttttccaaaagtattaagtgtctttggctgaattaaaagctgagaaa

SEQ ID NO: 94214 - DNA, 1039 bp, Homo sapiens
tgaaatcttagactctcttgtctttggaacaaaatgaatgtttgtagttttgataaatccaagatagttgctttcttttctttctttatttcctgtcctcagccccgagagggatagggtctgtggaagcagagaggagagagagtataacaaactgctttgcgattattgaataaaagttaacaatgcaaggttatcagctattctcctttttggaagctagtgttccaaagtgaaatatggctttcagacagcttggtttataaactatgtgagttatttttttttatgtttatgttcttattgttgatatttttctttgcacaggggaattctaaaaagaacaagagtcgatagttttgaaatagctggttggcgactgttctttccagacctgctcctgctgcacagagccgcagggctgagaccacgtccatgctggctgccttcaggaagctaaagtattgttggacctagtaaactagtcagtgttggaaacggccttgaaatatttaaaacatatttgtaaccagtgaggcaaatacagaagttgatgtcggcagtaaatggaaaacaatacgtatgtcatggatattgtaggtttccttatgctgtttttactgtgcactttttaaaattaggttttaatttcagtatgtaagaacaaatattttgtatactttcaaactcaattatatggtaatcgatttggtatctatggaatagatatatgtttctggaaaaaaatgcttaaattgtcaaactgtcattacttcttattatagttgaaggcattctccagattctttttaaaagatttgttcatatttctctctctctctctctctctctctctctcttctttctctctgagggagagggagccctccaaacttcagatcctgtgggtttagtatcattatcttcagctctttgataccctgtgttagagtaatagctaaaggaagttcatgtcaataaattcatacttatatcacactttcagtctctctattaaaatttgataaaggaaactgaa

SEQ ID NO: 94215 - DNA, 1011 bp, Homo sapiens
cacactgatacgtaaaatggaaaatgcctcccatctcttccagctccgccagtcacttctctttagaagtctttggtaactgctccagatttagaggtagctcaccccttccttgcaaaccagctccactcacaagaagaatcccgaattccatggaggcttcctggccagcctggaattccaggtaccttatgggattctggagcagtcctcagtacagggcaagatttttaaagtagatcaggcaaattatgtcttcagagctctgcagattacagggtgtcatcattctttgcagcgtcaggagagtgtgataggtagaaagacccagggaaagcaccgaggctcaaatgtacctgtgtgttacatggaatgccaggggaaataaagggtttaccatggaataagaaagagaaaaaaaaaacctcattgctggatgcttattactatgaacacacaacaataaattatctttcgaaagcttgcctatgtgggtgatcccatgcattggtgagtttgactgattgggtgaggtggaaatatttagtgtgagtgattctggggagagctctgggaaaaaatgcccacatcctgtactaccatgtcccctcacaggcaagcagctcctgggatcactcatccattctctttgtggaaggtaccttgagatccccagaaggatcagcattcttagagcccctggcccatcacataacaaacatgccttaagaagaaggctttcagctgggcgcagtggctcatgcctgtaatctcagcactttgggaggccgacgtggggggatcacctgaggtcaggacaagaagtctgatcacaaatgattgtcattttattataatctgccttctccctggtagcttttaaaattttctctaaaatgttccacaggtatgtctaggtatggatttagaaaattttatcctacccagcagtcagtgagcatttgtgattacacaaatttgtgtagctgggcacggtggttcatgcctgta

SEQ ID NO: 94216 - DNA, 1042 bp, Homo sapiens
ctgggcgaagagcgaaactctgtctgtctcaaaatagagaaagaaaaaaatctttctctattttgagtattgttcaagttgttacgtatttatacacatatatatcaatggaattccgtggaagtagagaggaatagaagcaaacatgctgttgttatgttatctgtaattcagcagtacttgcctgtgtccacagtgatgtggacatttccaggtgagcatgatggtcagcaacagcctaggactggccatggacaaaccaatatgcatttgattttgtggcacacacacaatactgctaatctctgctcagtggcttgtggcccagtttaggcagccagagaagagatctgccatagctatgatcacagtgtgtgtaattggattttgtatctgcttactggggtgaataaagccaggtgggagaaattcttttacactggcgttaactggcacataactcaaatcaacagaaacatgagcagagggtatagtggcaaagggcttgtttgctgccctatgtctttactcaagcagatgtcccttccccatgaagccttccttgctcctgagccagggctgcatttgatactgctcattcctaacctcccagtgcactttagcagagaaggatgagcacattttatctttcatttgttgttttctctggcctttcctacaaggttataaaagccttaggagcaggcatctatacaggttgagtgtccctaatccaaaatctgaaatctcgaaagttaggaccttttcgaatgctgacctgaggctgaaaggaaatactcattggagcatttcagattttggattttcagattagggatgctgagctggtaagtataatacaaatatttcaaaatctgaaaacatctgaaatctgaaacacttctggtcccaagcgttttagataagggatattcaacctgtagtaacaagagcttctatttaacatctcccccatgtacctggcattttacagatgttactttatttagtatgtgcaagaatcatttaacataactgtctt

SEQ ID NO: 94217 - DNA, 2072 bp, Homo sapiens
agccactgcacctggccaggaatggtattttaaatactgtcatagcaagcccttaagaaaattcttcacagctgcatgttaacacactggcctgtccctgactttggctttgtttccaggatatacagttgtttctggaatgtacagtagctagattgcagccctccaatcatacaaaaacagactgagggtttggaaatgctgctaaagtctagttacagtgttgctcttgaggagtctggcgctatagggagtctgagaattccttatttgaaaaacagccaatggaaccgcacagacacactgaaattaagacattctttctgtagattatgcagcattgttagagagcaaagaaaagccacaggaataaaggactcaattcagccctctgctgaaggagagggtgttcctgaggcttgagtaggaattgacccaacagggacagtttggttgggctgataccaggaggctactgagaggtgtcgatgatgccttcctgagctctgctgaatacctccttggcatcagtcctcccccaacatctagcagaaacagaggagccagacattagggaccacattggggcgtgcttttccccacagatgcatactgaagtggggacaaagtcttcagctgccatatgacctggattgctgtttcacctatcacatgcatctaatctgacttcaacaatctacaggagaaggtagaacttcatatttacattttatttgagtggtttatgaagaaaagtagaggaaaactgcaaagaacggcagaagtagactcttgaggttggaggggagtaggggatgatggtgtgggagggatgaactttgcagggagttacacaaaatttggaaaattacagagaatactggaatcgccactaaaagagaggcagggcacctaaatctatttattagacaacaattctgagaaattattcatcactaagggcaggacagtcagttgatgcagtcaagaaggggcaggaaatagggcgagctgagttatgaaagccattctcagaaatgacccaaatttgtactgagctgttgttcttgagcaaccttggggaaaattatcagtctgcttttcccacagcctgatgtccaaggggcagatacgtgtggtgggcttgctggagaaataggctcttctcacgtgagaacagcatccttccaatctagagctcctggctccaggaagtggtggtggctctaccctggtgctatttcattagtgaagggtggggtggtggaaagtgcagaaaaggcaggacccctgacaccagcaaggcattggatctctctggacctccgggtggtggactttgggactggacagacctggtcacagtctaggttctacatcttactggtcgagcaactttaggcaagtagcttaactcctccgaacttattttccttttctaccaaataatgataatattacttcatgagtttgtgagtattaaatgagatcatgcatatacagcctacagcccttagcacaccatgaacacatagttatttgataaatgtttgttagtgtggttaattgaacagaaagccttaaatgtcttcctaaccctaaaatccagtgattctttgaactggggagggcagtagagagatttaatttgtggaaaaatgaaaagaccatttaaaattattcaatcagaaatgtattaagctttgtgtatttgtgtcaggcatttgtagacagtgtggaaaatgtcttatccaatgattctttgaactgggagggaagtagagagacttaatttgtggaaaagtgaaaagaccatttaaaattattcaatcagaaatgtattaagctttttgtatttgtgtcacaggcatttgtagacagtgtggaaaatgtcttaataaatgagacatgctctttccttgaaaaagcttcagtctgactcacaaagagtatatgaattttttcctatgatggcttgaaagattttatcttcaaattcctttttgtgagattgtttttccataccagtgcttcttatttatagggcttgttgcaagtaatttgcaatattg

SEQ ID NO: 94218 - DNA, 1018 bp, Homo sapiens
acactatatgacccccatctaaaatctttgaaatatatccagtatctctgggtctggcactgaacctggcctggcatagcacagatgctcaataagtgacaaattgagtgaaaaccaatattagattaaaatattaaaggccaatatgcccatttctactctgtatagctgttccagtcaaagtattttggaaggatgagtgagaattacagtagggaaaaataatttgttccactgaaaaaagaattcttggcctggaacattttctgaaagttaagtttaacttttaaaaatcagaattttaaaataatgcgacttaatttgggctgaagtttatttttgagttatctgtaaatagatggtaaggaaatgaataaattaataattataagatgttactcagtctaagagaaagaggcttgtacaggtcttgagcacattgtagccaaataattatgtttaatataaatattactcatatcttttaattaaggaaaacaattaagtttaagcatattactatattgtttaatataaattaaacattaatattaaaaatattgcttaaaataaatatttagcaaattatattagtataatatagtaattatattgttatatactaatataatttgctaaatatagtaatatttctaattaatattagtaatatttctaattgaaaacatttttaggagttcatctgtgcctgcatatagtaatatattttttatttttatatttttgccattcttattcaaaatagtaatgaagttgtacttgtttttaaagctagtacttaaaaatggcagacagctttccccctagttggtgcaaaattgtagattttcatggtatgttgtttaaatggaatttgcactgctgcagtgctaatgaaattccttattaaggagagagatgagtgccttttatgttcaagagaaatgttcaatggccattaaaatactttgactatttgattttttttccctcgaggtctagatcatccccattgtct

SEQ ID NO: 94219 - DNA, 1074 bp, Homo sapiens
gtgaagaggaagatgaaccctacggctcagagtaccgcggcagatcatttgatgttacttctgtgaagcgtagcaagtcaactaaatactttgacgccagtggaaatggcgataattatagtagcggaggtgaagtaggctcgtgtatccacgtctatccctactgtgaatatatgatgagctcatacaataaatcctaggaaaccaattgatttcatagctcagactatgcccatatacccgaatggttctttttttccagaatagtatgttacgatatgggaaattatcccgaagcccggtaggatgagaatatagactttggggtgaccgaagaatcaaaataggtgttggtacaggatagggtctccccctccgactggatcaaagaaggtggtatcaaggttgtggtctgttaataatatagtaatgccagcggccaggactggaagggagaggaggagtaggactgctgtgattaggacggatcagacaaagaggggtgtttggtattgagatatggcagggggtttatgttaataattgtcacaatgaagttaatagcccctagaatggaggagatacctgctagatgcagggagaaaatggtcaggtctacagaggctcctgggtgggagtagtttcctgctaaggaaggatcaactgtccagcccgttccaggtggacatggctcactgcaacctccccatcctgggctcaagtgagcctctctcctcagcctcctgagtagctaggaccacaggtgtgaaccaccatgcctggctaatttttgtattcttagtggagacgtttcaccatgttgcccaggttggtctcaaactcctgttctcaagtgatctgcccacatcagactcccaaagagttgggattacaggtgtgagccaccatgcctggccaaaacagggattcttatgctcactttaccaatgaggaaatcaaggctcactggagttaagtaggtttgcagcaaaacccaactgttatagccagacacaccaaaagactgtgtcttgcccaaggtcagggagctgggtagagacaagattggcactg

SEQ ID NO: 94220 - DNA, 1014 bp, Homo sapiens
tatatgactttccagggatttatgttatccttggttgaacattctgtcttaaacgtagtagaatgtttatattgtcagaagagaataccacagtaaccttgcagaatatattctgaacacacactgtaaaagagagaaatataggatttaaagtttgtataattctaaggattttttttttaacttggtctcgtgtgtcagattgaataattctcctggtaatgaagtaatgaatgaagggatcctaacaagatgcagggtccagaaccagatgtaacgtttctcctcagcagagtgatttgtgttaatgttttatttacactttttccggttgttatccatctctgtcaccatagaagagatatggctgaataggccagtgttgtgtctcaaattggtttcatagtaaggtatattatcattctttcaatgcctcctttcgctaatgaaaatcctagaaacatctgagaagttccaaatgactcacaactttcctgctctacttcatacacatgtatgttatcaataattacttagtagactctttaatttgtctaaatttgtgcaggcataatggaacttgacaatgcaattttccattgcaaatggatgactaagctgagcaatttgcctccttcccattccttttgtcccgatatattatgctacactagaatgcctatactttgaaaatagcccgtctatattcattcatcgatgcatataaattgatttgcatgctcattttgcagtttccaaatatgcatttgttgcataaaatttttcatatctaacccaaaatgcttattttaccccttcttcaaaaatgcagctggtgtgagccaactacacataaactccaggtgtttcacaactgaatatctatagagaaatgcagaaagcatggagatgaaaggcttgaatcttgccattggtctgaagtcccaactcagatcttcctcttctggatcagctccttgaaattagggcaatattggagttaagtaacaagag

SEQ ID NO: 94221 - DNA, 2104 bp, Homo sapiens
agatactgtaatcttattatttataatagggaatctatgactcatgatttaagaaaatgcccagcttagacttaggttttatgtacaaaatcgataacttttgctttcttatttggcattttgaaacaccagtttgagtgatttctttaattctgaataaactaaactaaacctaaactagtaaactaaaaacgatgatgagttaacttctatggcttggaagatattgaagatgttagagaattaattggtctcaagccctatgggtattagagtttaaagaaccctatacctggaatcagactagctggtctggtatcagctgtgctcttgatagtacttgtctttgatgctctgatcctggtctgttcatcattgttaaatttcacagggatttataaaagatttcttgaattaacaaaaggctttggtccgattcacataaaagcagacattaacttctttatttaacacttttcatcttggaaaatgaaactgctatcatatgattcttttctttttttttttgagaaggagtttccctcttgttgcccaggctggagtgcagtggcatgatctcggctcactgcaacctccgcctcccaggttcaagcaattattttgcctcagcctccctagtaggtgggattacaggcatgtgccaccacgccaagctaattttgtatttttagtagagacgttgtttcaccatgttggtcaggctggttttgaactcctgacgtcaggtgatctgcccgcctcagcctcccaaagtactgggattacaggcatgagccaccgcgcctggcctatcatacagttcttaattatgtgcatttgaattgtcctttaattggtagttagcttttggctgcactgccttgccagatacacacacacacacacacacacacacacacacacacacacacacgctttgggttcagatagatctgagtttgaatcctggctctgctgcttactagctctgtgactttggaaagttgtttttttaaatttctacaacagcctgataatatatacttcatgaagttaatgaagataaaaagagaatttgagtgaagtacatgggcttatggcatagaaggcactcagtaaatactccctttctctcagagtcaattaaaaattttcattttatgttatggataaaaaggaaaacttgcaagctgtacatctattcacttgatgtgataggtctggaaaccatttgtaatgaaatagattaagaggaaggtagcatttgctattgtgagcttccaccatttctaaagttggttcatccatttcttaagtgcaggtattaacagatctttagaatttgagcatttagtgtttgcggccctggatactgactttgaatgtgtggccaacaaactgaagggagaggagccagttgaaggctgtagaaaagaataaataaggtttattgtggtcatactgactcaaagtagtcttctttcaagcaatatatcacttttattactaagagttgggggaaaaaaaaatttacctttatgtgctattacatctttctgtttaaaaaagtttcaccttgctttttttgtttctccagccactgttccatccctgacccatctttgtcgtttggaaattcggtccagtctaaaatcagaacgtctacggtctgacagttatattagtcagctgccacttcccagaagcctacataattatttgctctatgaagacgttctgaggatgtatgaagttccagaactggcagctattcaagatggataaatcagtgaaactacttaacacagctaatttttttctctgaaaaatcatcgagacaaaagagccacagagtacaagtttttatgattttatagtcaaaagatgattattgattgtgagataggttaggttttggggggccagtagttcagtgagaatgtttatgtttacaactagccttcccagtaaaaaaaaaaaaaaaaaaaaaaaaaattgtaaacatcacttatattactttattgcagcttcatcaccagtacattatatgttgtaatatttatttacctgatcattttgatcattttctgctttattttgctaa

SEQ ID NO: 94222 - DNA, 1034 bp, Homo sapiens
aggctgaggtgagagaattgcttgagcccgagagttggaggttgcagtgagccaagatcgcaccactgcactccagcctgggcttgttgagcaaaactccgtctcaaaaaataaataaataaataaataaaactataacattcttttttccttaagggaaaaaccagaatatttataattactgcttccatttgcctttcattttagatgacctttagttactggtatgttttccaatatatccatgtaaagtgaatataatatacctaatacgtataaattgatggaaatcttttagaaaggccaacacagtctctagataaggtaggttctcttaattcacttaagctttatcataaaaaataactatgcttaagaaatagtgcttcttatgagcaaatataattcaaatattccatgtcaaaaatgttgctaatgctcagctacttaatgaactttattaattcagaaaaatttttttttacctttttaaaacagcctggaagagttgtgactcttgttgaagatcctgcggtatggtataaatattcttttttgtataattttaattttataaaatgttgcgatgtttctgtttcaatttgattaacaatcatcacagacaatttgaactaccctaaatttagaattcttctctgtatttgtgggttttttttgtgtttgtgaaaactgaggccaataagaaaagttagaatgcagagtgcaaggtagacaacaacgtacagacaaatagcatgtagttttcgtttttgtggggttttttgagacagagtctagctctgtcgcccaggctggagtgcagtggcgcgatctcggctcactgcaagctccgcctcccgggttcacgccattctcctgcctcagcctcccaagtagctgggactacaggcgcccgccaccatgtctggctaattttttgtatttttagtagagacgaggtttcaccgtgttagccaggatggtctcaatctcccgacctcgtgatccgcccgccttggcctcccaaagtgctg

SEQ ID NO: 94223 - DNA, 1058 bp, Homo sapiens
agagcgatactccgtctcaaaaaacaaaacaaaattataattccaggaggtgcctgttcttggcttctgccagaggttacactttccagcctgtgggatggccagacgcaggctgcaaagaaaaaaaaaattttatatgtatatatatgtatatacacacacacacacacaaattgagatagtgacagacaaagaattccaaaagctgttttaaaaactaaattttcattatatgtgccattaatttgtagtatcagcccatctttttcagttttggtataagattaatacaaagtgaatgacagactacatcattagtgatcatgatttgtataatgtaatttatgctttagtgagttattttccatatagtaaaatgcctttatttaaaaaagaagaggtacagtacattataattccaaggaaattttcgtattttaaaaatgccaatttttggctaaaaactcaaaagatttcatttaatacttgaataacaaggaaattcacaattaaggctgaaatactgttcatattattgtgtatttctaagcatgttattttaagcttgtgtattttaaaccatggttacagaattgtataggaatatattgaaggcataaccttatatttattggaattttggtttaattgtttagaatttcaaaatagtattgggatgtgaaacaggatgattatcactctgataaaaacaagactgaactgagtccttcactgtatttttctaaagaactcacttctagtgagtaagtgttcaataacataaagttaggaaatctttatgttattaaaatttgaatttttctttcactgtatcccaatattttaaatatgtgtttcaggacatttccagttaaaataaaagtttaaataatatcctcactacattaaaaataagatctttaagtaaacgtatttccaaatcatattgtcattgtgcactgaagttaattctctgaagactaaattatatgcaattgaggttctgtttcccttctaaacgttcctttactaatttttccaaagcgaaaagatgctca

SEQ ID NO: 94224 - DNA, 1058 bp, Homo sapiens; identical to SEQ ID NO: 94223

SEQ ID NO: 94225 - DNA, 1058 bp, Homo sapiens; identical to SEQ ID NO: 94223

SEQ ID NO: 94226 - DNA, 1054 bp, Homo sapiens
ggttacaaatgttcttcactacaggaaaactcaacatagaagctcatgttctggggactcaaataacagtcgtaatacatgaaaactgtaaaggatattctgcataaagggtcgttaacatctcacaggccaaatagccctctcagaaacaactaggaaaggaaaaagttcccttggagctgtgcgtttgcgtatgtccgtgtgtgtatacaactgagggagaacgaatacgagagagggaactcgagtctgaagtactgtggtgtgggcagggtgacatgtaatactgaaggaaagaagtctgctggtgaagtaagagccacagttaattttccgaaaggaagatgagtaagtgcacctgacgttattctacgaaagctgcttctgcagggtgggaatgttgggaagcaaggtctagtgcgacagaattgaaaaggtggagagcaggtgattgctggatccctaatgctcagcaagggggacgcatccacataacgtgagaacgaacgaatgaatgaacgctgcataaaagcagctttggcttggggaaggtaagagtctgcagagaaggtcttggggagaaaaagcaaagaaaaccgagggaagaggccgaacccttagtgtcaggaggaggggtggctgcggggttagtgagggcactgaccagagagaactcggtgccgggccagttgactcggaaagggatgtcatcgctgagttgaggaagggctcggccgccgccggacgcctccaggaggccgcagaggaccagtaacaccggcccgcccgggaccagactccgtacgccgccgcctccttcctccatcctccgccgccgctttctccagccaccgccacaacctcctctgctccaggaggagaggaggaggaggaggaggtggaggaggaggcggcgggactataaagcgcccgggtatcaccggcccaaccgccgccacgtctccttccggagagcccggcaacgccgcctccgcccccttgagcctcctgtcaccgtttccggggcagacgacatatcaacatccgggggtcg

SEQ ID NO: 94227 - DNA, 1081 bp, Homo sapiens
taatatagccatttaccgagagtttagagaagaaagctctgagcagcccagtatagtaagtttctatattttatcttagtctctttctttagaactgttgagaataattcatattaatcattattttgtagccctttatataaatgtacatttacttaacatgttaattttggcactaaataatctttttgctgtattaaactagctctgaaaatacatatttgctcaaataaaaacttacgaatcaaaataatattagagggagaacttaaaatatagaagtgttacctttcagttaattagtaaaatgtagttttcttcctttcagaataataagttcctctcccacccccagtcccatctccatgtctaatgaaaagtctgtcttatactctttttttttaagattcccactaaaaatatcgaaggtcagatgacaccatactatcctgtgggaatgggaaatggtacaccttgtagtttgaaacagaaccggcccagatcaagtactgtgatgtacatatgtcatcctgaatctaagcatgaaattctttcagtagctgaagttacaacttgtgaatatgaagttgtcattttgacaccactcttgtgcagtcatcctaaatataggtaggatgtgcatttaatattttaaacataaaatgcacacatgctttaaagtgttctgtgcatagctttaatgctttgttcctactgaacaggttcagagcatctcctgtgaatgacatattttgtcaatcactgccaggatctccatttaagcccctcaccctgaggcagctggagcagcaggaagaaatactaagggtgccttttaggagaaataaagaggtatgagaattgtctaatgatagctttttggtgcttcatttttaaaatttcagagcatatgtcaatattttaatgatttctgtagtataatggtagtaatttattttactggcccaaccttttgaatttcatttcttttcattgattttaatccttttccttattctagtactactcaaactattttaatattctcttatattcataatttcataatattttaaagttt

SEQ ID NO: 94228 - DNA, 1400 bp, Homo sapiens
caaatgaatagtgtaaagatcagtataacattgcgtaggatgaagtcaggctgcagtggaagagatagaggccaaagatgcaattaagaattgcagtagtatgtgatagtattatctaggtatgagagattaaactcttggttgtggggtgagttgctggcagtgaaaaagtagaggaagagtctaaagctgaaaaatatccaggaaagaactgatgggacttacctgtagaagagaaaaagagatagaagagccgaaaataactacatttagagctagccttactaaaaattagttatgttattcagagaaacaaggaataaagaagataatgtgcttaaatttccactcattgaatttgactgacatcattacacctaaatatagatatccactgtgcagataaagactagcttacaagaaggtcaggtcatcagcataaatatctacttgatgatatcaagcacgcattatcacaaatttttttcccatattaggacaaggatagtgggaaaacctctgtggttgtcgggacatggaaccaagaagagcatattgaatgggctaagaagaatactgctagagcttatcatcttcaagacgatggtacccagacagtcaggtaaagattcactttacttgcctttggagctaattactacaatttctaaaactcaaaatattgaaaaacataaaaattcaaacatttaagtaaaatccctgtttagtttttttcaagggatatcttttaggttagttttcttttcttagggaagcaacacagtgtaatagttcagagcacagtccctggagtcagactacctggattcaaatgctggctcatcacttcctaccttggagaaattacatcatcttttttatctctcacttttgttgtgtaatggtatttgcctcatatgattattgtgtcatttaagaggtaatttatgtaaaggagaatgcctggcaatagcatgcaataaacctgggctgccacccataacagtgggggtgataacattaatgagagtggcagtggtgttagtaactggctcaattctgtcagaactgagggtgttttttaaaaactacctcacatctcttttaggatatatgagtataccttgtcaaaacaccagtaagttaatctcatttcccaagaataactacgcattagcttttcttgcagactcttaactcagtatgttttcaattattccttcttgttccttcttgggtattaccttttccttcctaaaacagatgatttggattgttttcagagtgtactgacttttcgggctgataaaagtcaaagtcagccaaattaaaacatagacttttttttttttaatactttaagttttagggtacatgtgcacaatgtgcaggttagttac

SEQ ID NO: 94229 - DNA, 1356 bp, Homo sapiens
ggatcctgctcatttgagattgacagtttggcctaggctttgtcttctatactacagtgcctaacgaacagtattttaatgggagtagcttgatggaggacggaagcaaagaactgttttacaaaacaatatagtgggctagggaaattgataactttaaaacaatttttttaaaggaatctaaccaaaattatttgtatacaaataaataatatgcaagttgaaaataattattaactaagccagtatgaagtatctcttatattctctttatagaatccaagagaatgcctctgtgagataaccctaaaaatatttttttaaagaatattttatagtcaggtttttttttaactaatgcaaaactgatccctctaaccatcttctcaccctacccattacaattattctattagtgagattttagtttaataaaacttgtgtgtttctctgattcaggatggtgtcacatttttatggaaatggagatatttgtgatataactgacaaaccaagacaggtgactgtaaaactaaagtaagttagaccatcaaatcatgctgtatgcctttgtcttttaactgcttcctatggacaaaagttttatgtaaacagtataattatgaataattatgaaagtataccatttaaattattgataaaattatattaaatcatacagggtccacttgagtgggatttttaagagtacagttattaacagtgatcttactttaaatgatttggacagtaccttaaagtgctctctgttttaggtgcaaagaatcagattcacctcatgctgttactgtatatatgctagagcctcactcctgtcaatatattcttggggtaagttaaaaagaaaataatcaaaaattccattttgagccatgttttaatttttttttctttttttttttttttttttttgtttttttgagacggagtcttgctctgtggctcaggcagagtgccgtggcataatcttggctcactgcaacctctgcctcccaggttcaagcaattcttctgcctcagcctcccgagtaactgggattacaggcgcacaccaccacacccagctaatttttgtatttttagtagagacggggttccaccatgttggccaggctggtctcaaactcctgacctcaggtgatccacccacctcagcctcccaaagtgctgggattacaggtgtgagccaccacgcccggctgccatgttttaattttttgcattaagtttaggaaggaccttcagtagtctccaaggcttaatatggcccacataccactcatgtaatagttgacatggtttttcttgacattttttattgagatataatttaca

SEQ ID NO: 94230 - DNA, 1033 bp, Homo sapiens
agtagctgggactacaagcatgcaccaccgtgcctggctgatttttgggttttggttggtttttttttttttttttttgaaatggagtctcactctgtcacccaggctggagtgcagtggcatgatctcggctcactgcaacctccgcctcctgggttcaagcgattgtcctgcctcagcctcccgagtagctggtattacaggcatatatggtaccacgtccggctaatttttgtatttttagtagagacagtgtttcaccttgttggctagcctagtctcgaactcctgacctcaagtaatctgcccgcctcggcctcccaaattgctgggattataggtgtgagccacccgcacccagccccattttcttattaatgtcttttggtgaatgaaaaatttttatttcatgaaattcaatttatcatttattcctctttaatagctaacgctttttgtgttctaagaaatttttctaccccaaaatcatgaaaatattctcctatatttccttctaaagactttatggttctacctttgattatctaatgcctaaatgtggttttctctgtatttatcttgcttggagttcactaagcttcttggatttgtgggttgatatattttatcaatttggggaaatttttggacattatctcctcaaagatttattctgctccattctttttctcctctatttctgatactccaataagacatgttagtataaaattgttccagaatctcagacactgctttattcccactttttttcctttgtttcgatttgggtcatttctgttaagctgtcttcaaacttgttaatttctctgctgtgcccagtccattgaatgaatttatcactgatgtattttttatctcttaacatttccacttggttctttttgttgttgttgttttttatttacttatttttttttttttgagacagagtctcgctctgtcacccaggctggagtgcagtagcgcaatcttggctcattgcaacctccacctcccgggttcaagttat

SEQ ID NO: 94231 - DNA, 1117 bp, Homo sapiens
ctgaaatttcctatctggtcatacatgttttcttcatcatgtttagtataattattataacatttgataatttcaacatctgttccatctttgggttacatttttctttacctttcattttaaatacacttaattattttgccataatgttctatcatttttgttgtataagagctatgtgttcctctcttactcctgtcctttgttccttttccctcccccgcttgtttaaaaatattttctccacctatctcatattctgtatggatgactaaaagttgtttttcaagaagcttaatttgtagaaataatgttggatgtttatctaaaacaaggactcatgcttctagcaaatataactacatgtatccattcagcagaatagtactgaaaagtattcagcttagcaactttttaatggctttgttgttcttctttaggttgaatctccagtgatctgtaaaatcttagatacagcagatgaaaatggacttctttctctccccaactaaaggatattaaagttaggggaaagaaaagatcattgaaagtcatgataatttctgtcccactgtgtctcattatagagttctcagccattggacctcttctaaaggatggtataaaatgactctcaaccactttgtgaatacatatgtgtatataagaggttattgataaacttctgaggcagacatttgtctcgctttttttcatttttgttgtgtcttataaactgactgtttttctttgcttggatactgtgattccaaaataaatctcatccaagcaagttagagtccagcctaatcaaatgtcataattgttgtacctattgaaagtttttaaataatagatttattatgtaaattatagtatatgtaagtagctaatgaagtaaagatcatgaagaaagaaattgataggtgtaaatgagagaccatgtaaaatatgtaaattctagtacctgaaatcctttcaacagatttttatatagcaactgctctctgcaagtagttaaactagaaactgggcacatggtagaggctcacatgggagttgtcctcacccttgttaatctcaagaaactcttatttataataggttgcttctctct

SEQ ID NO: 94232 - DNA, 1039 bp, Homo sapiens
ttgggaagctaagccaggaggactgcttgagcacaggagttcaagtccagcctgggcaacatggtaagaccccattgctaataaatgaataaatttttctctcaaggtgagagatactagtactaatactactactaataatgagatcactgtatgaattcctttctgtttctacattaatccctttctgtttctgggtgtgcatttttgtgtgtaggcttatctgtcttgggcctcttttgtcacatattgctcatctgtgagctgaggccctgactcactgagtatttttggggagcagaagaaggagacatttctctccgaaaatgaactcaacaggccaccttcaggatgcccccaatgccacctcgctccatgtgcctcactcacaggaaggaaacagcacctctctccaggagggtcttcaggatctcatccacacagccaccttggtgacctgtacttttctactggcggtcatcttctgcctgggttcctatggcaacttcattgtcttcttgtccttcttcgatccagccttcaggaaattcagaaccaactttgatttcatgatcctgaacctgtccttctgtgacctcttcatttgtggagtgacagcccccatgttcacctttgtgttattcttcagctcagccagtagtatcccggatgctttctgcttcactttccatctcaccagttcaggcttcatcatcatgtctctgaagacagtggcagtgatcgccctgcaccggctccggatggtgttggggaaacagcctaatcgcacggcctcctttccctgcaccgtactcctcaccctgcttctctgggccaccagtttcacccttgccaccttggctaccttgaaaaccagcaagtcccacctctgtcttcccatgtccagtctgattgctggaaaagggaaagccattttgtctctctatgtggtcgacttcaccttctgtgttgctgtggtctctgtctcttacatcatgattgctcagaccctgcggaagaacgctcaagtcagaaagtg

SEQ ID NO: 94233 - DNA, 2521 bp, Homo sapiens
gattataggcatgaaccaccatgcctggccaccagctgatttttaaaaattatttttggagagacaggttctcactttattgccctggctggtctcaaattcctggcctcaagtgatcctcctaccttggcctcccaaagtgctgggattacaggtatgagccactgtgcccagctgacaaattcttaaatacagaattatttttagtttagcctcaaaatcaagtatttgatgtgtttacatgtagattcattttaaatgcagaaattcacatattgaaaacaacacaattgaaaactaattttatctcactgtaacaagtgcattagagacatatatatatttgcacaaatgttgctattctctttgcagagttggtcaaacgccatgctggggtgctaggacttggtgcatgtgttctttctagtccttacgatgttcccacctggatgccccagctcctcatgaatctcagtgcacatctaaatgatcctcagcctattgaggtacagttcttccttattagtttgtacgtgtattatcagtgatgttttctaagaaaccataataataatttcctatacactctgaactaactgctttcataaagctgctgcctctgccaaggcttagtctgctcaccagtaattattaaaaaattacagagaccttgctgccatggatatttgagatcttttggtagtgaggaaattattgtagcttctatccctcccagtccaatggaagtaaagtactgtcaatattgttgtgataaattttatgtttctatttttctagcactgcaaagtattttactggaagctaatattaaataggaaattatgatggcatttttagtaactcaaaagaccattcactttgtccttctcattggctttttggttttgtagaacttggtattgtgtgagatctgaagtctagagggacggtaatttaactaaaagtatcctacatatgatcctggttgtccagagaggttaaaacgtatgtgggttgtctactttacagatgactgtaaaaaaaaccttatccaatttccgaaggactcaccatgacaactggcaggaacataaacagcaattcactgatgaccaactgcttgttctcaccgatcttcttgtgtcaccatgctattatgcatagaaaggtaagtcagcaaagttctgaatttacattggtttggtgactgagaactagatatttattgttttttttctttttgctgacattcttagatgtcagtgtttagataaagttggatggcggggattgtttgtttttaaacatggcttttgctacggccattggaaatgagaattttgctgtgcctccttgctttaggtttaaagcagagaaaatgtgtgactgcttttggacctttgtagatgagtggtgtcagcctgggaatagttagataaaggaaaatacatcttattcttggttgcctcctgggtggggctgggacattttgtgtggccctgaggactctgggttctaaaagttgtgagaacttgatctggattcttacacccattctgttaaagagggagtacccagaagcctttctactggaataggaagaataaaaatttcatttattaggcttttagagttggatgtcttgttacctaattgaaattttttcctccctgatacagatgactagtcctcacttcaggctcttttcatcaaaaattccacaccctcaggtaccatctgtggtggctctctgcaagttttaaaactgcctctgctgagctctcatcattttggtggtttctgtgttagatctcgttagtctgcattccacagcttctcagttgccatttgatttcccaacttgtccggaagtgtttccagaatactgatcactttttttttttgaggcatctgacaaagtcacaaagtctcagactagaaataattacccagtatgatcatggcatccaagaccagagtctcagaactcattaagaaacagtttacttggaatggagaatacccatctgtaatacaggtcctgtcatttcattcatctcaaattattttgaattcttcccaaatggctgctggatttaggtggtaataggggctgtgggccataaatctgaagccttgagaaccttgggtctggagagccatgaagagggaaggaaaagagggcaagtcctgaacctaaccaatgacctgatggattgctcgaccaagacacagaagtgaagtctgtgtctgtgcacttcccacagactggagtttttggtgctgaatagagccagttgctaaaaaattgggggtttggtgaagaaatctgattgttgtgtgtattcaatgtgtgattttaaaaataaacagcaacaacaataaaaaccctgactggctgttttttccctgtattctttacaactattttttgaccctctgaaaattattatacttcacctaaatggaagactgctgtgtttgtggaaattttgtaattttttaatttattttattctct

SEQ ID NO: 94234 - DNA, 1031 bp, Homo sapiens
attccaatttgaaatggactgtgtacacgcttcatttagtacttttgtaaactgtgtttgtgatctgacagcagcctgtgaaattcataagaatcacataggatgtaagtctccatgatgtatgccaattacagaaattaggttggtctgtgtctttgttactaacaaaaatagctatagcagtggccttcagagatgtagagtctggaaaaacttgatcttaatgtcaggttctggcactgcttttacagttatagccctgatgagagctatcagtagggaaaataatttatggagaaatttaattttgctaaaagagataaaagtttatgctcataaccctaatgtagtttttatccattatgaggccacaaactctttgagaatctgctgaaatctctattaagaaactgccaaagagcatacacaaaatttgcatgcaatttcagggaaggtcttcaccccagttcccacactaccccctatcctccattattccctcagacttagaatgtcagtcctaatagaaattattatatctacaggttcgagaaatggctgctactaccttaagcggtctgctacagtgtaactttcttaccatggacagtcctatgcagattcattttgagcaactttgcaaaacaaaactacctaagaaaagaaagcgagaccctggttctgtaggagataccattccttctgcaggtaacattgctggtaggaaacacctgtatcctattgggaattaatgagggttaaccaggcttactcatatttattgaataacttgtatgtatgtgcccaggtctatgctaggtattgggaaaagttttccctacttttgaggagttttgcatatagaaagcaggacttggaatgtagaaaagctaaaattgaggtagatagaaaggaacctgtagaactgctacctaacaactattgtattcagtctaccctccgcccagaatagcttcataaaaaagagatattcagaattagttattttggagggtctgaaaaacctgttt

SEQ ID NO: 94235 - DNA, 1762 bp, Homo sapiens
ttttttttaaattgtaataggtaataatacatgctggttatgttgtcagtgggtttcatggtgtctttctcaaattgtttgctattgtgtcgtgggaaacaagatgaaacactctgaatgtaaactaggacagcagtgtgctcagaagccagagatgagcagtcacaacacctaagtgttaataccccttaattataaggcttcttttacacacaggcataatctaagacccactccaggaattgtcttgggacagtttactttgattgggtcataacttttgaacctcatttttatttataatgtggcacctcttcctattattaagtattttattttgcagtgtgctgacctacatattcatgatagatgtatctttgccaaataccacaccaaccatatcgcctcatgtccctgagtttactgctcgaattctggagaaattgaaacctctcatggatgtggatgaagaaattcagaaccatgttatggaagaaaatggaattggtgaagaagatgagcgaactcagggcattaaactcttgaaaaccagtgagtggataaaattagtagaaactcagttgaaaacatctatttgattatcctgtagagttttttgcaccactttttttattgtggtaaaatagacataatgaaaaatttactgttttaaccatttttaagtgtacagttcagtggcattaagtacattcacatccttgcgcaaccatcatcaccatttatctctagaatcctcttcatcatacgaaactgaaactttgtaccctttaacaacagctcctcattttccctcccctcatcctttataaccactgtctactttccatctctgaatttgcccattctaggtaggtcacataagttgaatcataagtcttttttgtgtctggcttatttcatgttacatagtattttcaagttgaatgaatgaatttctgaatcatgttgtgtccttaatctgttacccattcatctgtttgctggatatttgggtttccacctttggctattgtgactaatgctgctctgaacattgatgtttgtataagtacctgtttgagttcctgctttcagttctttagggtatgtacctagaagtggaattgttagaccatgtagtatttctgtgcttaagtttttgaagagctgccagactcttctctgcagcagctgcaccattttacattccagtcagcaaatgcacaagggttccgtgttctcgccacctgttttgtttgtttgcttgcttttttaaagtatagccatcttagtgggtatgaagaggtatcttgtgattttggtttgcatttccctaatgattactgatatttcaagaatctttattagccattcgtatttcttgtttggagaaatatctactcatgtcattcattacccagccctctgctgcctttcactctgtcgtccaggctgcttactgcagcctcaatctccggggctcaagagatcctcccacctcagcctcctgagtagctgggactacaggtgtgcaacaccacacccagctaatttttaaatattttctagagacaggggtctccatatgttgcccagactggtcttgaactcctgagctcaagggatcctcccgccttggcctccaaaagtgctagaattacaggcatgagccactttacccagcccatttctgaattagattgttttgttgtttttgagttttagttctttatttattctaatatcaatcccttatcagata

SEQ ID NO: 94236 - DNA, 3171 bp, Homo sapiens
ctagaagtacaaaattagctgggcatggtggcacacgcctgtaatcccacctacttgggaggctgaggcagtagaatcgcttgaacccgggagggggaggttgcagtgagctgagattgtgccattgcactacagcctgggcaacaagagtgaaaactctgtcaaaaaaaaaaaaaaaaaaaaccctgaggctaagatttgaagaatgagcaggtattggtttaacaaagaaggggtcaaagttttctaggcagagagactagcatgtgtcaagactgtagagtaagaactgcctatgattcattctaagtcagatttagcactcacatggatgtactgccagatgtcgataggcgaggtgtttttttaaagaaacagaatcctatttctgctttgagtaaagcagacaaccagttaagtgatttaaacttttttttatgaatgtgtacctttttccttttctagatggctatctcagctgttgctggtatccttaaacagctaaaaagaacccacaaaaagctgaccattaacccctgtgaaatcagtgagtactaccagaagtaattaatagtgctttccaataaaactcagaaaattttcttgacatgtataaattctagttcttgacctcaaatattgttctatggatattaacacaaaatataaataatattatgaaggaaacagttgacttagtaaaagctagtgataactatttacaaaaatagattgactctttctgccttcatatttatctcacctactaagcaattatactaattattttatcaactgtatttcaaagacttaaattgctgttattaatttgttaaatgtttctctttgggtggtgggattagggacaaggtgaattttcttcctcataccttattgtattaccagaatttttcagaagaaaaaaccatttttttctggtctccaatccaggattaaaacattgcatttaaattgtatggtatctttagtttcctttaatgcaatgtttaatcctggattggattatagtccagaagaaaatgttttaatttttttcatataaagtacattcagtgggacaactgtcaaaatttgagtaaagtctgttgatgaaataattttactgtattaatgaaagcttttttgagaattgtattttgattatttgagatgatgtctacagtttatactcatagtttagataagtatgtgtggagagagagagaatatcaaagtatgcatggtaaaatgtcaaaatttgggtgtctcagtaaaagatgtgggaattttttgagctctgtaagtctgaaattattatttcaaatctaaatagtttaaacaaaattaatccttttaattttggtaaaaggaatgaagtgtgtttcatacttgatctctcccccaaaataactgattcaacacaatttagtagataatgccatctactctgttttgaaatgtgcctccaattgctcatatatatgttatcttaatgttatttttgtagtgttgttttgtgaagacaaagttatgctggtactgttgattgaaatttggtaataattgttgggcgaatatttttaaattcatcaaatgtgattgtcttttccttaggtggatgccctaaacccacccaaattattgctggtgataggcctgataatcattggttgcattatgacagcaaaactataccaagaactaaaaaagaatgggagtcaagttgctttgtggaaaaaactcactggggatactacacctggccaaagtaagtaacttactgtgcaccttatcattaaatgcctttgatataactgctttatcatattttggtttctggggaggttcagaggcacttgaaggttcttttatctttccccttccctagtcctctctttcttttgctcctgccaatgctatgcctcattcctgcctctttccttgtgcaaaaacccttagcctttctgaatcccatggttatatggctaaggaggttattaatagctgctctaaattatattcctacctattaataatacatatgcctaaaccagcccagagaaatacatatttttctctccttatttactccatttgtcattaggacacagtgatctgatagatttttaaggcctagactgttactgctgtactcatctccccaaacttagcatctagttagagttcattaaaagtgccttctaatgctttctatccatgaagctctaatatttttttctatgcgtatgataaatatgaactcttactatataggaatatggttgtttatgctggtgtggaagagcagcctaagcttggcagaagcagggaggatatgacagaggtaagcattccatttcaccatggttcaaatgcatcttgttttgggccactgatttatctcaacctcacttcagttcttcttcttcttttttttcttaatacaatttgtgtttttctgtatagcactgcataaatattggtgactatgtaatccattctcctcaaccccttcatactagtgccagttgacatagatgttgatgtatctaagactgagttactaccccattcagccctccgttggctactgctttatgtaatttgctgctcatttcttgtatcagttctgatacaagcgttttgaaggaaaagttaatgactgatttttagttttctattgcatataaattatgggatctccgtaaatgcatgttggtagatttcagttaaaactccttaaacttcatttaatttacttcactttgaaagttgacttggctgggagccatggcacatgcctgtaatcccaacactttggaagtctgaggcaggtagatcacttgagcccaggagtttgagaccatcctgagcaacatggcaaaaccttgtctctacaaaaaatacaaaaatcagctgggcgtagtggtgcacacctgtagtcccagctacttgggaggctaaggtgggaaaattacccgacccgaggaaggcaagactgcaatgagccatgatcgcaccactgcactccagcctggatgacagagtgagaccctgtcccaaaaaaagaaaagaaaaaaaagaaagttgagaaagggtttttaagtttatgtacttggtccttgagttaatggtattgtaactttttctgattctgaacagtttgccttt

SEQ ID NO: 94237 - DNA, 1392 bp, Homo sapiens
actgataacactcaagcaagagtcttcctaacttgattttgtctttgccttataattagtatatgaatatacctctttgttgttttctaaaatgtctataaataataaactcttatagcctacctaatatatttcagaaacctggtgtatcgtgtgtgtgtgtgtgtgtgtgtgtgtgtgtgtgtgtgtgccactcccaattaattgattactacttacagagttacttgtgcatgtccattcaggaaaagttgagttcactcttcctagcctttcatgagcttttcccagcatctctgttcacctgtctactttcattctggcttgcttctcatcaggccgtttacagtcaggtggtgggaagtaagtggggaaggagggtgaaattggctagaatttgaatttctattatatttttgatgttcattttagtattatagtaaaataatacctcaccttttttttaaaggaactatgaaaatttggtagacaccttgctagatggtgtggagcaaagaaacctgtaagtgcaaaagatttttgtaattctcacagcatttttcataaatactataggagttttctacatggaaggctatgaatgactatgtcacaaaaagttatattccggtttgtgtatttggaagcagattaagaggaaaagagatggagggaaagtttgggattaatgataggagcagtattcttcactagacctattttaattcttgagaaatttaaaattataaggtgtttcacatacagttttttttttccaagtggttttatgtgtgatatgctttgttatttttcctccttttaaggccctggaaatttgaacatataggcattgggcttctgtctctactgctgagagatgaccgagtgttgcctcttcgtgccatacggttttttgttgagaatctcaaccatgatgcaattgtagttcgaaaggtacataccttgttttagctacagtcttgggtttgagaatatgtacgtgacctgaagtctttaaattcttcacaagcaatacacacttggttaataaatatcttgaagtgtattgatttgaaatctccccctgttgattcagagatgataatgattcatctaacaaatgaacatgtttaggcactctgtttaaaagactggggatatagcaggaaataagtttataggctaatgggaaagatttaacaattagaaaattaggtgtgcagtgtgtttcaggaggggcaagaaactcgagggtatagctttttactctccaagtgttagaggtgaggtgggggttggggagatggcctaagctgaagcattggagaaagacctttaaaaataccctgaggctgggcagggcttggtggctcatgcctgtaatcccagcac

SEQ ID NO: 94238 - DNA, 1482 bp, Homo sapiens
ttttttttttttgagagagagacaggggtcttgctgtgttccccgggctggtctcaaactcatggcctcaagcagtcccctcaccttgacctcccaaagtgctaggattacagagatgagccaccatgtctggcctccacaatgttttcatcaccccaaaagaaaacaagtacctaatagcagtcgcttcccattcttccataccccaaacccctggaaaccactttctctgtcaataaatttgcccattattagatatttcatataaatggaatcgtaaaatatgtggacttttgtgtctggcctctttcacttagcatgacattttcaaggttcgttcaggtagtatgcatcagaacttcattttttttcctgcttttttctttttaacaagattccaaagtcatgtgttgaaatagcggaattacttcaacagtcaaaaaacccctctatcaaccagatattgcttagcccagaaaaaattaaggaaggaattaaacgccaacaggaaaagaatgccgatgccctaaggtaattgatgaatggtgtacttcaatagatgacattatagatagtaagttttggcttttttttgagacagagtcttgctctgttgcccaggctggagtacagtgagacgatcatggctcactgcaaccttcacctcctgggtttaagctcttctcatgcgtcagcctcccgagtagctgagattacaggcatgcaccaccacacccagctaatttttgtatttttagtagagacagggttttaccacattggccaggcgggtctcgaactcctggcctcaagtgatctgcccacctcgggctcccaaagtgctgggattacaggcatgagccactgcgcctggccgatagtaagtttttaacatctctaaaatatagatgtataacataactgcttaatgatgtttacacattgacttctgaaaaaaatacaaaaaagttgagaagtaattactacacagattcctgtttttcctttttaagctatggaggtataaaacaccatcttaaaaataaggccgagcacggtggcttatgcctgttatcccagcactttgggaggctgaggtgggaagatcacttgagctaaggagttcaagaccagcctgggcaacatggtgaaaccctgtctatacaaaaaaaacaaaaatttagcctggcatggtggcacgcgcctacagtcccagctactcgggaggctaaggtgggaggatcgcttgaacctgggaggcagaggttacagtgagcagagatcgtgcccctgcagttcagcctggtaacagagcaagaccctgtctcaaataaacaaaacaaaaagttatttcactgtcctatctttttttttctagtgaattatctttctttttttgtttttttaaggtagtaatatttcagaaactacataactggtacacatcagtcattaattcctaaattcaagtttagcagatgt

SEQ ID NO: 94239 - DNA, 1964 bp, Homo sapiens
actcagtgagtagagtcattgttttttggagataatgaagacgagccctaaacatcttccatgaagcttgtaagacagaggtgtcaataaactatagctcaggctcagttgcttgcttttgtaaaagtaaaagcttgcttttttaaaacttcttgaaacacagccatgttcattcatttatatattatgtatggctactttcactctacagtggcagagaagagtagttgagacagagagcaaatggctttgctgtttgctttctggccgtttatggaaaatgtttgctgacccctggtgcagatgtataattcaagagtgttgtaggtttgactcattgactattctgttgttgaccttaatgagagcagtttaaatggacaaaattagagaggtcaagtacaatcaaaacagaaaaatatctattagatcaacaaaatcgaggttatgagtgaccttatagagaacctgtagaggagtggaatacaaagtcagtaataagctagattggaatcaggtgaggtaaattggaaatcaaaagttttgatagtaaaaactttttatgaaaaagcactttagaaaggatacctgctgtcatcaaaggatacctgctgtcatcagaatcattgtggttaattggacttttatgagtaataaatatgcagtatactttagtttttatgtactttgtaaattactcagcaaccaggtgttaactaatatttaataaattatttcaaacaccaaacttcagactctaaaattttaagagtgacacatgttgtggtttttatgatacagttgaagaaaatcagaatggaatatatgttcttagaaacatccttccatttctttattaccttattagtagccattctttgaacaatttctttttttctttttggagacagggtcctgctgtgtcacctaagctggagtacagtggcacaggcatggctcattgtagcctcaacctcttgggcttaagtgatcctcccacctcagcctcctgaggagctgggaccacaggtgtgtgccaccatgcccagctaatttttgtattttttatagagaagaggtttcaccatgttgcccaggctctcaaactcctgagctcaaccagtctgccttatttggcctcccaaaatgcaagaattacaggcgtgagccacctcacctgtcccaaactctttattaaatgacttagagaaaatattaatggatatcacctaaatgtcaagttcagatttctaaaaagtaacatgttaaatgtgtgaacatattttactaaccaatattaagcatttaagtaatcaatactcatttaaaaccaatacataggtgcattggctacaactacatgatgcctcttatttcccatgtaaacatatatatatttttttttctgcagggtgccttgtactgtctccttggaaatcacagtggtgtgtgcttggcaaaccttcatgattgggactgtattgtacagacgtggccagcgattgtttcttcagggcttagccaagcaatgtccctggaaaagccatcaatagtgagattgtttgatgatcttgcagaaaagattcataggcagtatgaaacaattggcttggacttcacagtaagcaatatcattctttcattcaagttttagtgtaaatcctgtcttgttaaaatgccctttatttttcttgccctttttccagtaataatattcttggcatttgagtccagtgtttttttaaaaaagcgtttgttacctgtttgctttttgtactttcattgatcattattgtacataacagggtgaagtagcaagttggagcatggtagggagacagccagggctccacaaagggttattgatttgttatatttacccttattttgtgtgtgcccacagcttcatttttcaaagagttaattatattttatgaggtttaccatgctagccaaagtcgcaa

SEQ ID NO: 94240 - DNA, 1665 bp, Homo sapiens
gatgacttgcaaatacaatttgaaattctttgacacagattattggagaccttttacaattccaaggatctcacaagcatgaatttgactcccgatggaaaagcttcaacttagtaaagaaatcaatggaaaatcgggtcagtattttcacctaaaagtctgcactaattgttttaaagtcgtataataacctcgtaatttgggtattattcagcatatagaagaagttttcctaaaaggaaaaatagtagatttaaaagtatgtaaaagttaaaaacatcatggtagaaatcaaatggatcctagcaaaaaatatatttttcttatacagaatcttctgcctgtttccatgacagtctctaaactctcaatgggaatttggacaatagcattgagactaccttgtaagaacttgaaggaatttaaaaataggaggaattatctatgggcatgaatttaaagcattacactttatgtagatctgagaaaaagttaccctgtattatattcagctgcagaagtcattgtaagcttctttggggccttggaagaaagagtatcagtgtaagccaagagatgttcatggcagaattcttacgccagaaacttttactgaaattgagtctaaaaaggttgtatgagttcattgtttagacaacagttgctagatactttagacagaaggaatggcatgtaaaagggcaaggagatataaaaacatggcatgcttttaggggccaggggctgtagagggtaaactaggttgcttatactttgttttgagaaagtgtttcagttttatattcagcagtaggagagtcattaacagttcttaagtagatctgatttgaatattgattggaaaagtcaacactcaattcactaaacattaaaaagctctgccaccactgtgaacagtaagtacaaagagattgatactgtaagcaagaaagggagttaaactgtttcactccaggtgaaaaacacagcctaagtcaagtcagtggtattgaaatggaaataacatgttttgaaaatggtagaattggggggcttaatgactaaggaactgtggtgtgaaagaagaagagtctttgagcctcaactatctgcctttggtgaccaggtggaagattatatggataaaagcttaaatgataacttttagaaaagatattattattaaattttgtagtaaacatatttgattaccctgaaaggctatggctatttgtagatttaagagagttgagcaattgtcttagtaggctgtttttgtactttcagtatttaactgaataagaacacaactctgttgctctcccatgcatgggtctaatagtaaactatcagagaaaaacagggtgttggatgggctatttaaaagggggatatttctactgttagccataaaaattaagacaacatttttatataagcctgatgtctttagaataaaggaaataccaccaccactcaccagtcaaccagggacctttttgaccacttattaaggtatttagaggcatccattgttgaagtcatttagggaaaatgttgaagtatttgttgctactttgttttccagctccatgggaaaaaacaacatatcagagcactgttgattgatagagtaatgttacagcatgaggtaaatatgttttt

SEQ ID NO: 94241 - DNA, 1075 bp, Homo sapiens
tgatttttatacctgaatttcttcaaaaagagtgtcttattactgcacattaggagagatgtttttgactgattttaagaggaaggtaatgattatctaaataagcttgtcagctctatatgctttagtaaaatttgttttaactgttgtgccattattaagctgacttttctttatgtaaaggtttatcatatttaatcttttacatttgagtattggatatcaatattatgttcctttaggaggcctcctgaagtcactaaattttttctttaagttgaataacatgattcttactgaaacagcattcatcttgagaaagatagattgatttttcccattgaagatgggaaatctgtgtctgttaaaagaacattatctttgttttggtttaaacagtccagcaatgaaacttttccctttaatacttcatattggtattattaataaatgcaagcactcttgtttttatacagagtaccaagtatggtgtccttggaagagacaaagttgtatactggacttgaatatggtatgtgaatcctaatctgagtaaatctgtgtggattatttttgtcagtaactccacaaggactaaaatgaagtatgaagtagtgtttttgttttgttttgttttgagacagagtctcactctgtctcccaggctggagtgtggtgacgcgatctctgctcactgcaacccctgcctccctgcctcccagattcaaacgattctcctgctccagcctcccaaatagctaggattacaggtgtgcaccaccaagcccagctaagttttatatttttagtagagacagagtttcaccgtggtggccaggctggtctccagctcctgacatcaagtgatctacccacctccgcttcccagagtgctgggggattacaaccgtgagccaccctgcccggcctaaaatgaagtagttttgtattatgatgttcctaatctcttttttgatatatgaaaagaatattaattatacagtagtcatttttgccttttctggagaaactggaaaattattgtataaagaatagccagtaagaaattgggtca

SEQ ID NO: 94242 - DNA, 1045 bp, Homo sapiens
cctacagcataccaaaatacattcatactcaagtgccacagtaggccctgtagagctcacatacaggaaaagtcagccctccatatgtgtagatttctcatctggctaatacatttagttgaaaaaaaaatctgcgtgtaagtagacccacacctgtgttgttcaagggtcacctctgtgtaggagatatggaagctgtattttaatccaagttttaaaagtcgaggaagaagataaggcttttatttaaatacattacttaatattttacaatcttatacaggattttttaaagtagtcagcataaatgattatttttcaaattccctgataagaaaacaattcaaagtgtcacatggattttaagaaatttggtgtcaggactcttagatgaaacttgtttgaaaaactttaaattcccaaatgacaggctttttagatatagtaaaaactatggagaataattggttataaagaatgctttttttaatttgtataatatgacagtaactaaagtgacagtaattaaaattcatgcttgatttaatattatatggcattagatacagactgcataagctgcagactgtatatttctacttcagaaaactaagtgtttatggcagcagtggggagacacatactctaataggatggctcatagcaagcacttcccctgctctaacagtgggcggggggagggtgggaactctcttgtgctttattcttgttactcttgagtacaggccttttctctttggtgaaatctaatttcagtaaagacataacgttcatgtaaaggaatctgattttattttttactaacagattttggatacatacatatttttgatcatgcaaaaatatttaagatgctcaggtttgccagtggttgaagctttatagaaggaaaacaaaattttaagaggaatttggtcttgaaagtctgaaaaagcaaattaacgtttgatactattaatatacaatattaataagctttgaagtaagttagtgaaaaagaagccattctttgtttatactctat

SEQ ID NO: 94243 - DNA, 2501 bp, Homo sapiens
gagtgcggtggcacaatctcagctcactgcaacctctgcctcccaggttcaagtgattctccagtctcagcctcccgagtagctgggattacaggcgtgtgccaccatgcccggctaatttttgtatttttagtagagacagggtttcaccatcttggctgggctggtcttgaactcctgaccttgtgatccacccgcctctgcctcccaaagtgctgggatcacaggcgtgagccactgcgcctggccactaaatatcttatacttactataaactttacagtttcaaaggatggatataataaagtaattgtgggtaattaaggataaatttttttcttatttcgtactattgaaaacagtttgaatttttaacagttttgtcagatatcacaggttgttgaattaatcttaaaataggacctattttgctcttggaacctttagataatgttttaagagaaatatttgtggtatagtttatactcataattctacctttatagatgtggaagttggattatgtctttccagagtcacaggaattttggacccttgcctttaatcctgaaatcatcattaatttttccttttgcagtccattctctaaataatcttttaggtctaaccagctatcacaggatgcaaaaaactaacatctaaaaaacagggttactcaaggtagaggagtcatttttcatctcaaaatattcctttattttgtgtcccctttcctctgatagatttattacgtcatttttagttaaatcatccttaggatctcagcttttactaacttttcgctcaaagaaattcatacttaaggtctaatagtgagaccatttcattgatatgtgaaaggatgtgttgcttatgcaatgaggggcagggctagctaacctctcttggcacctccaggaaactacccagctctgctgggggagctgcacacagaaaaggaaacagttactactccacggtgagtaaccctgttttctccttatttcaccttctgactgttttcatttatttttaaaagcttatgtgtcagacttggaagtagttcctgttttcagagttaatttaaaatctagcaacatataagatttctctttatttagtgaccctttgttcactggcaggataagagccaggttttcatttgtgtttatagttattattgctacctaggattgaattggataatagaacacaaaaataggcctaactgtctcttgtgagacatttgtactttgaagggaaaaaatctattagtggcttggttttacatcttttatgtttatttttatttggaaggggaagggttattgggaagataggatgttctttcacttatacacaggaagaattttatattattgtttacagctgtttcatgacaattcgcccagccttcatttacatatgtgatttgtattatatattttgtttttgtgttattagttatttctttttcagcatcccttctttcctaccagtgattcttttcatagtcctgctctaatcatatctaaagaagattcccatctagtggtacgaatactatagttgttgaaaattcataggtccttttttagtggtacaaatattttaatacattttactatatgttaggtggcctggtactatctagaagctatgaagcagatttaattttattattattacatagagggtgttatttacagtatgttgtgctggaattatttttttgaattgtattgttccttaggttaaatgatactatggtttgtaaaatgaactagtgaatgagtaggatggatttcacatgaggaagggagaggtagtgatggaatttgatttgacttacatattgttaacatagcttttagtcagaatatagatctgtaagacagtgccttaagactattcacttaagattatgtgcatagctaaaagctaccagaacagtttaatatatcacagattacatcctgggcacaatgagatctataatgtcacaaagagatacagtcatgatattttacttgggtaatgggtagagatttcttttagtaaaaaatcttctaaaggtcagaagaggtaggatactatggctcatgcctgtaatcccagtgctttgggaggtggaggtaggaggattgcttggggccagggatttgagaccagcttgggcaccatagcgagaccctgtctctaccaaaaagtaaataaacaaaattagctggcgaggtggtgtgcacctgtagtaccagctactcaagagcctgaggtgtatgtgagtccacttgagccaggaaggttggggctgcagtgagccatgatcgtaccattgcactgcagcctgggtggcagagggagatcctatcttgaaaaataaataaataaatagctacacttgctgagaagcatttattgtaaatcatgttaatccagttaatttgtggtaggcaagaagagatcaaattatggtggataagaataaacaaaagctgtaa

SEQ ID NO: 94244 - DNA, 2181 bp, Homo sapiens
aatagagtgagaccctgtctcaaaaacattttaaaaaacaaaaagaataaaatcagcagtatatattaattttagcttaattattaaacagatagataataatttaaatatactaagaccatttttttcaacatcaatatcttgttactaagcaagttaatgaaatcacatgtaaatcacattcaaatgagtaagtgccctctcttccctctcaaaaaacacaaaggggaaaatgatttactgattttccaacaaaaacgttaaaaagcctcaagaagtggtttcaaaatgtggctacatgtctttcccatactttgtgtagtcattgtttggtgtcatgcatttcccatttttttcactccaaaaactgttcttaggcattgaactttttagattattaagtttaagaaggagaagttagggtcatttcaggtaaggaaatctgttataagtgtgtttaggaatttgccgaattctttttaaagaacttttgtttttcattagttttgttgtttgatataagcgcagttgtaccagaattcatttttgttaaaaaagattgattttgaacaatatttaaaaataagaggcttcaaaaattgtttcgattttcacctatgatcttaacagtgtgtaatacagtaagaacttgacccttttatggcaggcaaaaagctatttcatacttaacaaactttgcacatcagcaaattgagttctgcttgaaggtgtcaacaattagaattgtggtcatttaatccaataatttatctaagagcaaaagcatgtatttttaatgttagtaaatttttagtactgagtaatcattaggatgcactgctgaagggtcagctaaagaggccaagggattttccttgcagttcgtatcagcctgtatcttgatgccatgtacactgtaatagtgaattgaagcaaaaggctttatcctttgaaataaatgtgcatcatgacaaaagcttcatatatttgattattataaagccaattagattttttataatgaagtgcattttaataaggaaaagaatatattatgataatcttatgaataccatatgatacagactattagtttatattactatatattataagctataaaattgatcctgagtatccttttatctgcttttcccagaaaagttaaaaaggaaaagataaatttagcctgaaaggttttgcgttttagcacttgcacatttagagtgaaaatttaatgtaataatatgatgaagtaataaaaatctatattaaatatatgtatatttatttaaacatatatagattaaaatataaaatgcttcctgatacttaataatataatgaaataaaacaataaaacttcaatttttaaaaataattgaataatacgtatttttagggttctttttagttacatgtatctgtgggggataatgattgtataaagtaaaattaagaataaatgaacaggtctttgcctttgaattgccaaaagagggagttttccgtcttcctttgacttttgcaagttcttaatagaattgtatttaatttataactagcattaccttcagctgaaactttattttggcaaagtatagctttttacatttatttcctatgtgtaacatttttacttttttttaacagatggttaatttcataaagtaccataaaataaaatagcctttaaaatttctaaaatgcttattttaatataggttagtaattgttcaaatcttctaaatctaaattgatttgaaaaaactaatacagtaattccaataaatggtcccattgttctgtgatacgaattcatactgcctggtgtgaagaatgaatatctgtagcatgatttatggtgattatcagcagatcaatttgaaactagtagagaaagagaattaacttagcacattagttgctccataggaaatgggaaaatatactaggtcagggagaaaatgaaacacataattgtcatgaatattttagtgtaatgtctaagatgtctgaggaaaatatctattgttaataacagtttggctgtggtattaggagacaggagacattatgcattttctgaaataccagaccagtttttagacgcacatagcaattcataagattttttttttttttttttttgagacagagtctcgccctattgcccaggct

SEQ ID NO: 94245 - DNA, 2768 bp, Homo sapiens
ctttgggaggccgaggcgggcggatcactaggtcaggagttagagaccatcctggccaacatggtgaaaccttgtctctactaaaaatacaaaaattatctgggcatggtggcgtgtacctgtaattccagctacttgggaggctgaggcaggagaattgcttgaatagaatagactcttttgaaagggatgttactatggtgcatgaaagcttaagctcagaaaatgtgtttgatttcaaaaaacaattaattattagaatgcagttaaagtgacaatcctaaaattaattaaagtcatttagagaaacactaggttagtggccaaacattgaactttgcattaatgattggttcttgttcttttaaccaaaatatcttcaactattttttccctccttttagattactcgagtggatggaaggaagttgcttctttatagggagcagcttgtaaagattctccaaagaaccctacatttaacctgtaagcagggttacactctgtcttgtaaccttttgcatcatcttctccgttctaccacacttatctaccctacagaatactgcagtgtgccaggtggctttgacaagcctccttctgaatactttcctatcaaggcaagcattttcagtactttaggattcaagaatatgttgattttttgttttaagggattcaaagtgttattttttcttgcatatgttagttttttacttttaagatagattattgaaactattattggaatatgtgaaacttgtgctgtctcactttgcatggaactgaaactctagttttctttcctattgatatgtgaaacaacttcgtatatattccttatctaatgtctatagttcaatataattttattgctaaactaagcctcacttaaactcatcatcactcttacagtatcactcttagagcaaactcatattataatgagtactcttcggggagacttttttcaggagtgataacgaagaggcagtaagatgttgttttcatgctacttttttgtatatcatttgctaccttaggtttggattatgtgtacattttcttttaaattttaaaaattgtgtatatgtatgtgggtttgttgttgttgtttttaatttctcaacttgctgagtagatgctgttctcttctaggactggggcaaacccggggacttgtggaatctgggaatccagtggcatgttccttcttcagaagaagtgtcttttgccttttatcttttggactcctttcttcagcctgagctcgtcaaactccagcattgtggggatggaaaacttgaaatgtctaggttggttttattttataattagagttattcagttgcagactaaagaagtcttttttggctttatctgtggcatatctcatgtattaattttcaattgtgttttgaaaatctgctatacatgtacttagaaaatcatttaatataatgttgtataacagaaaatttaacaacatttaaacattttaaacccaaaaattgtgggtttctttttctaattttttttattaccttctacttagcaatttcacttgtcttttggaaggtgtgtgtagatatgcctcctttgaaaggaatgcctgttttcctagactcagctaagattttattgggttctcaaaattttattttaagaattatttttatgagatttttttttccctctcccacaggtatttaacaagaaataagtatttgaaaccattagactttcatagtttgaaagtttctaaaataatagcaagaaaattaatgtatcaaacaccacaaatttttcataagcagatttaagaatgcacttggagaaagaagtgtgactgactaacatcaactctgtcgtactctgaactgctttttggaagtaaatgtttagtcccatttttaaaagatggaataagctggaagatcttctgtagcattatttcctctttttgttagtggcagtggtctttggtaaagggatgcttaaattaacagttgtttcacaaagggcagttaattattgttacttgtgatttacttagagcctgtttaaatgtaagcaggcatagtgttagcaataaatatatatttaattgttcttcactgttaagttggtaaactgaagacatttgctatttctttaccttaatcatttatatccccacgtgagaaaacttctgtgctaggctctagcaggcttattaaatagggatttggaaatatgaaaatgtcttttttttttttctagagatgatattctacagagtctgactatagtgcacaactgtttaattggctctggaaacctcctacctccgttgaaaggagagccagttactaacttgtaagtaaaaataactgttttccacttaacatatattttaagtcttagtcacttaatgagttattggtttgttgttgttattgcttttatttctgtatcactttaacctttttatttgtcactgttaaggtcaaaaataccagaggtacaatttagatttataaacctgaaggctttattcagattttcacatggtaccaggatagaataactttaggtattaattttaaaatatcaaatgtggagatattaagttagtctcttagtttactgagttaattaagataaatgctgttcttttaaaaaggaaaaatactgctttgttttgactgtagcaaatgttgattcagaattttgtagcaaaaaactttaaaaaaaaagatttcttcaatcttattcattatgatttt

SEQ ID NO: 94246 - DNA, 1384 bp, Homo sapiens
atgtgtatttttagtagcgatggggttttgccatgttggccagactggtcttgaactcttgacctcaagtgattcgcttgcctcggcctcccaaagtgctaggattacaggcatgagccacagtgtctggctagctaccgtgcccagtcgcgagcatgttattgtttatatttttctggacattcaggtagtgagagactagactttgcaaaaatcagcagtttgaaaactgaatttataataaagatagctgcttgacttctgtatttggcccttgtaaaataacattaatttcttctttctttggttcctagaaagtagtagatgaagttgttctaaattgaaagtagtagatgaagtctagcatggtgctgtttctcatagtacccaatataatggtttagtgtggatacatttggcaggcaataattgagttttgttagttcaggaaaaaaaaacaaaggctatatgtaatctttctccatattgggatattataggtggaacgagaactttgttcagccacagctgaatttgaggatttcgtcttacagtttatggacaggtgagcttgtaacccacaccaacgtttagctgaaattctagaaaatgactcttctatcccagaaagtttagtttatttctgcattataacctttatttagctactactggtgctcctgaagttataaaaggataatcgatttgtgaaccacgtagaaattaagtagctatcacttgaataattaggacaatagagagttacctgatgaccaccaaaaatgtcaaaccagattttagttgctgaaattatgctttgtttggattatttagatgttttggacttatagaaagtagcacattggagcaaacaagagaagagacagaaactgagaaaatgacacacttggagagtttggtcgaattaggtctgtcttctacgtttagtacaatcctcacccaatgttccaaagaaatatttatggtaagaacattgctgcaaaaaataaacttccagcttttaagtttcatttgatgttttaaaattgacttcaagttactttgtgtatatcatgcagtttatcatttacattcatactaaagttttaaagaaatgtacagttgctcattatttgcaaatttcgtatttgcaaatttacctgtttgctctaactatttgcaacctgagaatcaagcttttgcgactgacaaaaattcagttacttaaatttgatctcacatatgccatgtgttctcagctgagagcaaacgaggcactctgccgtcttatatccagctccacttaaacaactgtcccctttgcgatctatttaatgccacttttttacatttttttgcttcttattggtgattctgctgttta

SEQ ID NO: 94247 - DNA, 1737 bp, Homo sapiens
gtatctgtaacttgttattccactgactgaccgttagattagtataatatagattaggatggctgaaatcatgcaggatctatcagttgatgttcttttggtttttttttgagacagagtcttgctctgtcgcccaggctggagtgcagtggcataatcttggctcactggaacctccgcctcccaggttcaagcgatcctcctgcctcagccacccgagtagcttggattacaggcatgcaccaccacaccccgccaatttttgtattcatggtagaggcagggtttcaccatgttggccaggctggtctcaaactcctgaccttaggtgatctgcctgccttggcctcccaaagtgctagtgttacaggtgtgagccatcacaccctggcctctaccagtttgtgttcttttttcactgtggaattggcatggaaagagttggtaaggtagcaggggattggggacatgtgcaataaataatctgtgtatctttcctttatttgtgtacagtagtgtctccccttactggtgagggatgtgtttgaagacccccagtgcatacctgaaaccatggatagtactggaccctatgtatactgtgttttttcacatgcatgcatacctgtgatagtttaattcatgaattaggcacagtaagagattaaaaacaatcataaaatagaacaattataaaaatatattgttcagtgtaatagaagttatgtgaatatggtctctcgttctcaggacacaaatatttggttaacctttgttaactgaaactacggaaactacagataacggggctactgtaattgttaactttgattgcagattttcactctgagtattttgctaactgtaagcctttaagtcaaagtgcagtttatgaatttattatatttaatgtattatggtattatgcatatctgtgatggagactttaaaaattctgttttcaaactgtagaacatatcctgcattagagacattaacagaacctcaccagctcacagctactttaagttgtgtaattggagtagcccgcagtttggtatcaggaggcagatggtttcctgaaggtcctacacatatgctacctctgttgatgagagcattgcctggggtggatccaaatgactttagtaaatgcatggtgagtatattggtgattatacactccgtatttaggtaggaggcaaagtaaacttctcagtgacaaaaggttggagaagtttgtgcataagcctaatataaatatgaaaataaatgttgtataatttaattattaaagtaacagttgtttatttatttatttattttgagacggagtcttggtctgtcacctaaactggagtgcagtggcgcgacctcggctcattgcactgtgatccacctcctgggttccagcaattctcctgcctcagcctcttgggtagctgggattataggcacacgccaccatgcctggctgggtttcgtatttttagtagagacagggtttcaccatgttggccaggctggtctcgaactcctggccttaagtgatccacccgcctcagcctcccaaagtgttgggattacaggtgtgagccactgcgctcggccgacagctagttaattatgaagaaccttacagtgttcaattctaaatgaggaatacccagaaaaactgttgtgggattttgatcaagataatttattggggtaatttattgtagttcatggtatact

SEQ ID NO: 94248 - DNA, 1146 bp, Homo sapiens
acgcttttttttttttttttttttttttttttgagatggtctcgctctatcgcccaggctggagtgcagtagcgtgatttcagctcactgcaacctccacctcccgggttcaagtgattctcctgccacagcctcccgagtagttgggactataggcgcccaccaccatgcccagctaatttttgtatttctagtagagacagggtttcaccatgttggcaaggctggtctcgaactcctgacctcaagtgacctgcccgcctcagccttacatcaggttttttatgcctgatgttagcattcttggtaattttaagatgataatcttagtgataaattttagtatccaggttatttactgcagaacagtaaagtacgctgtttgttatcctaagttgacaggtatttttttagttttttatgttggttcaagtaagctgcccttatttgcagtagaatattttgagttggtttgcatgaagttcatcagggaattgtttttgactcttatttaaaggtagaatttatttttgtcagcaagttgactataaactgtattagtgatttacgtataggcttgggcctgttgacctctgtttttacagtatgatgtgggtactgacatttttactcttttatctggacagggtggaccaagtaagctagtgcaaaaacacttagctggtttgtttaacagcatcacatctttttaccatccttcaaataatgggcgctggctggtgagtaacttcgttttgcattatagggcttggaatttttaaagatatggtcatccttgactattgcctattgtgtgacctgtaatacattttctgtccttcatagctttagctatatgtaaatgcttacatttaaattaaattactgtgtgggagagcatataaattaaataaataatattgatgtggtaactgttgacaacatggctcatttttgcaaaaaaatggtaacaaaaatgccttagaagcatagaaccatcttttcagttttatcctgtcatctgtttttgttgtttttaagttgtccagttaaaatggctttcatgtaatggaaaattatgtgctagaaatttttttagactggaatttgaaactcattttcattaattattaggaataattaatt

SEQ ID NO: 94249 - DNA, 1082 bp, Homo sapiens
tgttaagtgattgactaaaatacaaattcttagggaaaaatcaaatcaccattaaaattttgaaagggaaagcattctgctagaagatacttgcatttaggttggtgctgttgtgcatgcttgacatggaataggagctcaggaaaaattatttgtgcatttgggacaagaaagaagtcaaaatatttcatgtttagccacagtatgtttttgtctttttatatttagccataaataatcacatttgtctgttctttggatacatggacacaactgctttatgtccatgtgcctctgacctcagagtgtcatacagcacatctgttgatatttatatgtaatttttgaagaataaagcaagttactaaatactatgtaatttcacttaaaaacccttgtgataaaatgaaaatatcttcagtaacactaatatacagcacttactaagctaaagaattattttgatacctgtaaatatccttacttatttttttcttttaaaagatatttacaagaattctgagaagcttgaacctcccagtgggaagcagtcaagtgttagtcccaagatttttaacaaatgcttatgatataggacatgctgtaatatggatcaccgccatgatggtttgtaatacattatatttgttttctgtagtttacgcctattttgtgttaaccttacaaaaattgtggatagtcgcagaagttgataatagtggcttggttggtgacttgattcttggatattttctgatttagcaagctcatgtttatcaaatccagaatatagtggtaccatttctaaatctccctaaccaatggacattataaatagagtcaaaaatctagggttttgagggattcacgatgtctaacatttttactgtccgggaaccagacttgtagcccggaagactttcccaaggtaggattacaactcaggatttgtatgtgcttagactccattacttactcactgttaatattcacataaaacattgcattgaacataaagcttactaacaaagtaatcttagtgaagggagagatgtgaaggattactttgttgacatcattaa

SEQ ID NO: 94250 - DNA, 1050 bp, Homo sapiens
aagctaatttctgatggaaacacccagattttggtctgtctgctgcttgtgttttgatgtaaaagtattttagtaaaaattatttgaagttttaagccactgtgttgataaatatggtgtgtggtcattgctgcctaccttgtaaagactgaaaacaatttgttcttttcccagtgtaacctttttttccctttagttcataccagagacagcgaaatgagggcaaaggaaagagtagattaaggagtttaggtagttaatccttgcagttccgtttgtatgaaagggaaggctcaattattacatgtaaacaaataatacctgaatgtgtgaggttatcttatagatatttattaattgaattagatatgttcttaaaatacaccaatctaattatcaaatggctttccccccccagttctgtagaaaatattctcaaaacactcgtgaaaagctgccgaccgtaagtagcttctcaatttataaagcctcttgttgtttctgtgggcttttccacatctttagtatggtttgaaaaggaaatgaaaagtataaatagttcctgacattgtgatgttagtcactgagcacaacataccgtttccagttcattaactgaacttctcagatttcatttagaaatttagaaattttaaagtcatccattgtaaagtaagaataccatactttacataaaatcatctttatttggaagcatttcctagagtattgttatttgttattcagacaaaaaataggagtaatgccaagaaggtggttcataacttttttcaactatgttctgtagaatatttaaatatcccatattcttttctttttatttcaatattttttgtagagagtggggccttgctgtattgcccgggctggtcttgaacccctggcctcaagcagtcctcccaccttggcctcccaaagcattgggattataggtgtgagccaccactcccagccaattatcctatattcatatgatcaaagatgagtgtggataaaatttaattttaatttttttggttatctttaatt

SEQ ID NO: 94251 - DNA, 1113 bp, Homo sapiens
cgaaagtatattggtatagcaaggtcgtatgtgaaaacagcaggttttctgtgtagcgcagaaccaataaaataaatgtaatattaatgagaacacaagcattagtactgatagaattatgtatcttatgctcattttcatggataaacagtttacaattttagaattaccttttaaaaatcttcatttaaattgagtaatttagtttaaaactagatgactctttaaaccttagctgttaattctatactttgttactaaaagaagacccaagatctgtgctttttgttactctgatataaaatgtttattattacaaatcaatagacagataagtataaatatatatgagcagatagcctttttataagcactttggaagtgcccagaaataaaaatcatagctgtggtcttcagggagctttaaacgtagttggatagaagtttgccctgtttttttttaatgggcaaacttagattttctctaaactgtgtttttgaattgcttagccttttcataagaaaaagaagaacctccctctcatgatcagagacagtgcttattgatggccttttggccatgtagtttcttttttattttagaagtcatctcatgtgttgtaatctagttgcctcttcagttaatttttctctgagtagttttgaaattaaagaggatttctactgctccaagtaatgagattatagttttcctctcttggttatataatatgttgattatttgtgatgagtttgctctctgttattccttggaatttctttgcagattagttcctaaactttcagagaagttggatagacttctggacttaagaatttcaaaaagcttaataagaaagtgtcaggtggagacattgcctgaaacttactcctttcatatatatatatatatatatatatatatatatatatatatatatatatgtatatatatatttatatatgtattatatatatatttaaatatgtattatatatatttaaatatgtattatatatatttaaatatatattatatatatataaatttttttgagatttggggaattttatttttacttgtacatatcatactgtaagtagtcacacacg

SEQ ID NO: 94252 - DNA, 2058 bp, Homo sapiens
gttaaccatatatacattgttgtacaacttcttttattttacttgactgaaactatacccattgaataacagctctccatttcctggtccttgcaacccctggcagcaagtattctactttctgtttctatgagtttgattactttggatacctacacagtatttgtcttttgtgactggcgtatttcacttaacattcatacatgctgtagcttatgactggatttccttcttttttaagactgaatcatcctcatcactggttctagctgaagtatgatgggatcattcttcctggcaaataaattcctgtttctatccagaaaaccaataaaaagttttccatgaaatgttaaaaaaaaaaaaaaaagacaataatccattgtgttgtatatgccacattttccttatccattcatccttctgtggccattcaggttgcatctacatcttggcttctatggataatgctgcattgaacatggatgtgtcatcatacctatttttaaagggtatatctatttttctcttgcagatatattcgactttatgggagaaaatttagcaaagaagatcatgttctttttattaagttattgtatgagctggtatcaattccaaaactggaaatcagcatgatgcagggatttgcccgccttttgatcaacttgttaaagtaagtctttttccagaggtttctgttaaggtttgtttgtttcttcagggttttagggaatgaggactaagtgtttttggtaagaagaccaagtctcaaattgccaatttggaaaatgattgcaaaaaacattatcttaattttcatcaaatgtgtcagttaaccttttagttaaaattccatctcttccatgacatggtctcttctctagcacccattgaacttccccttttataggttgttaagtcccttgagaagacaagacaaagatcatggattcttttgcttaccctgaagcatccaactcaatgctggaaacattaaatattccatagtgtgggaaaacatgaaattcatccacaataatggcgacacaaatttaaatgccctcttttatctgctgctctttgaggtttgagcagcagcaagaattgggtgcattattcttcttaatactatgttctgctagtgagtggccatggatggggaaagcaaaacccatggtgatgagcagcaatgtttaactgtccctgtgtagtatttgtggtatacacacatctgtgcacatatgcatacataggtatttattttattttactttttaggaaaaaggaacttctttcaagagctgatttggagttaccctggagaccactttatgacatggtagaaagaatattatattccaagacagagcacctaggattaaattggtttcctaagtaagtatttccatttaaagcacttatttgggagtacttggggttttttaggggggtgatcatgattgaaaaatattgagttgtttgaaagaaacaagcagatattttaatgtgcctatttctgtgtaatttgactcctgaaacaattcattgccctctataaactgtatctgaggctgcatctctcttgcagatcattgacttcttgcacctacatcctgcctctttgatagctaatttttggttttatattttattctgagtttatataataaaatatcatctgcccttttttggttaatagtgatttcatactagactgacaggtatcatttctgtccagttgtggtctagctttaaattttctcagttttagcacgtttggcttatcattcttttttttctgagatggtgtctcactctgacgctcaggctggagtgcagtggtgtgatctcagctcactgcaacctccacttcccgggttcaagtgattcgcgttcctcagcctcccgagcagctgggattacaggcatgcaccaccatacccagctaatgtttgtatttttagtagagatggggtttcgccatgttggccaggctggtctcgaactcctgacctcaggtgatctgcctgccttggcctcccaaagtcctgggat

SEQ ID NO: 94253 - DNA, 1258 bp, Homo sapiens
tttcatcatgttggccaggatggtctccatctcttgacctcgtgatccgtctgcctcggcctcccaaagtgctgggattacaggtgtgtagtagagacaaagtttcaccatattggccaggctggtggtctcgaactcctaatctcacgtgatctgcccacctcggcctcccaaagtgctgggattacaggcatgagccaccacgcctggctggtatctggaatattgacaaggcctgaagcagccactgaaagcagggaatttttctttgatgtcttctgtctttatcttaaaaatgtgttccagtttttagggagatgtttgtgttcatttaaaataacattttaatgattctagcttttgctcctaaatttagagtgaaattgagggaggcatcagaaggctctatcattatgcttattcaacagcccaaaataataatatatttgggtgtaggatcttttgtcttcactaatctacgtgcgttaccattttagggtgtttaagaaactttcataataattattttgagtatcccttatttgaaattctgggaccagaaatgtttaggattttggattttttgaggttttataatatctgcattatgttcttaccgattgagcatctcaaatccaaaaattagaaattggaaaactccatgagcatttcctttgagtgtcatgttgttgctcaaaaagttttggattttggagggtttcggattttcggattaaaggtattcaacctgtactggcagaaccaaaacaagatctcacgtctcattgctcctccctctatatttgctggtctcatagtactaatgtgagatcatgggattataccttgaaatgacagaaaagagctgaataaattcagaccagcttgagaaaataaaaatgagttaatgaaccaagaattttgaagaatttctggaagataaaaaagcagttagatgccctaactttagaaattaaatgtaagtgctgggcgcagtggctcacgcctataatcccagcactttgggaggccaaggcaggggggatctcaaggtcaggagtttgagaccagcctggccaacatggtgaaaccccatctctactaaaattacaaaaattagccgggcgtggtgttgggcgcctgtaatcccagctactggggaggctgaggcaggagaattgcttgaatccaggaggcagaggttgcggtgagctgagatcaggccactgcactccagcctgggtgacagagcaagact

SEQ ID NO: 94254 - DNA, 1055 bp, Homo sapiens
ttggtagtctgcactctagcactccaggaatttatttttcattcaccttaaaaaaaaaaaaagacaaacagctttactgagatttaatattcctaggatttttggatcccaagaataatgcattttaaaagttaccctgcatagttcttctttttcttttttttttttttttttttaatagacatggggtttcaccatgttgctcaggttggtcttgaactcctgatctcaattgatcctcctgccttcgcctcccaaagtgctgggattacaggtatactacgcccagcctttttgcccatttttaattggattatgtctttttcttactagtaatttggatatgagttctttgtcaaatatatgtatttctgggctttttacttttaatggtgtcttatagtgactagaagttatttatgataaagaccaatttattaattttctttttatagttagaacttttgtgcccttttaaaacaaatctcttgcaccatattttgataaatgctgagataagaaccacttgctggttggcgaggaactgggggaaatagaagctttctgaggagtccctccagaatctttagatttgtcagcagccctaggctttccaggaatccccctgttggtctctttttatagtattaaaatttgagctttgttaattttatgtccctaactaatgttaaatatacagttgtctgtctactgcaatgaaaacaatgggctgtagctaagttacttcagtggcttggagcagggggtcccccaacccccagctcagggactggtatgggtctgtggcctgttaggaaccgggctgcacagcaggaggtgagcagtggacaggcgattgggcattaccgcctgaggtccacctcctgtcagattagccatgatgttagattctcataggagctcatatcctattgtgaactgcccgtgcaagggatctaggttgtgtactccttatgagattctccctggtaccaaaaaggttggggactgctggcttagagtacagtgtttctctagtttttctgcagaagtat

SEQ ID NO: 94255 - DNA, 1422 bp, Homo sapiens
gtatttattgttaacaagtttggtaaattagcactccgagttttgttattgttttggcttattagataaaagtttgtacctagaaagggctaaaaataacaatggagctaatgtttggtgtttagggctggattgcagatagctgatggcttaatacccatgaacccataaccatttatagctaaataaccagcaagaaatgctactgggtagaattttattttggaatagtggttagatgctggaaactgattcttgatattgcactatgagacattttgaatgcggtgggacatgttgtgatcttgggtgtgtttttttcctaagtcatgttaaggtgacctgttcatagttgtgcttgttgttttttaagccttctgtgttgcataagtgaacatctgaataatgccaaaacgtgtgacgaaagctgagtggtgatcatatttagtactttgtagaatagaaagtggtaatgaaaagaaaatctagtttctcccactagctctgagactgtgggaaagttacttaatcatgtgtttcagtatgcttgtgcgtgaaatgaggggattggactaaataattctttttttttttttttttgaggtggagtcttgctttgttgcccaggctggagtgcagtggcaggatcttggcccactgcaatccctgcctttcgggttcaagcgattctcctgcctcagcctcccaagtaggtaggattataggcgagtgccaccatgcctggctactttttttgtatttttagtagagacagggtttcaccatgttggtcaggctggtcttgaactcctgacctcaagcaatctgcccacctcggcctcccaaggtgctgggattacatgtgtgagccaccgcacccggcctggactaaattcttgagaagcatttctactctggtattctgcagttttatttttttaatcctgtcaagcttcacatcagtcattgtgtgtatctttctacaagaactgtttgaataatttgtaaaatactggaaacagttgcatagatcaagtacattcctaaagaccaaagtgtaaatgcagttgagagttagtgggactatcttgctgatcagaaatgtgcacccgtaatctggacatcagaggtgtgtttgggaccaagttctggtttggaaggttctcaggctttacatttggtccctctttttgacttttttttttttttttttttttttttttttgagacaatctcactctgttgcccagacacaagatagtgtagtggcactatcgtggctcactgcaacctccacctccacctccctggttcaaacgattctcctgcctcagcctcctgagtagctgggattacagttgtgcgctgccacgcctggctaatttttgtatttttagtagagacggggtttcaccattttgg

SEQ ID NO: 94256 - DNA, 1861 bp, Homo sapiens
ccaccaccgcctcccccgacgccgtcgctccgccccgccccgccccggaagtgacttgaggccggtccggaacctctgggcccggcggctgcagcgtcaccagcagagccggtgcggggcgggcagagcggccgctgccgccgccaacgaactgagagccgcgtggggcccagcagcacgccggccagggaagggggcctagcgatcggtccgagggcgacgggccgccagcggccgcagggcgacgaagacgcggaggaggcggagcccggagaggggtgggggccggggagggttcgggtgggagggggtggggggggtgtccctgggctcatggagccggccgagcgggcgggagtcggagagcccccggagccgggcgggcgtcccgagccgggcccgcggggcttcgtcccgcagaaggagatcgtctacaacaagctgctgccctacgcggagcggctagacgccgagtccgacttgcagctggcccagatcaaatgcaacctgggccgggccgtgcagctccaagagctgtggcccgggggcctcttctggaccaggaaactctccacgtaagtgtgcccgggcctgcgggccgggccggggggaaaggctcagtgagaggtgtcggggatggttgctctttgtccagagggctggacccttagctctgtcctcgctggagctgtccccgagcggtgatcccagggtcgtgacagagcctgtgaagtactcaagccgtcctccctgccactttcctacgggacttcccgggtctttaccatccctctacgtcctccgcatctgcttctcccgaagtgttcgggttgttgtcttcccacctggggggccctgggtagcccaagggccccggccccgagggagagaggtgagcctttctcaagggtcctccgtggacttttgcgcatgggagaggcggggcaaagagaatttgtctttgggggagttccttgacttgtctccttgcttcctccggttcttccttcccctacgatccccgcctcttcgcatctccgttggcgtctagtaactttctgaatggagagaagaccatagggaaacttaagggttttgctttttgggggccctctcagacctggcggagttgatcgaaaagggtcgtttaaagtcagacctcattcttgagcttaacgtcttatgtggacagtgttgttttggattgtgtgttgctcctgttgtgacatttcttttggagagacatttaagatactgaggaaagtagggaagagcactgtcaggatgtccagggcgatattagtatcaggcttgtgttaattttttgagttactcagattaagagattacctaaatcagtttcaggagttctgtttgtaaactagcttcaaactatagtgtcactgaaattaggaaaaaaaaaaaaaaaacgagtgaaaatacagtgggggaaaaaaggttacatttacttgctggatgggcatctttactgtgtccgaagagctttttaagaaagaattttgctgtatcttgtttggttaactgtacataaaatctagtaacatggtatgttcacgcatgtgggtatggacgggtgaacacacaagacataactcactcattcagtgtttacccaaagctgctgattgaactgagtgatgactcagggttttgtaatagttttgtgtatattcactggatgattctcatctgccaattattaaggggcctctgacaaatttctcatttccacttgaggggtgggtgggacctttttaattaaaaagaagcaaaactaaaacatgtaatttgccctcttcagagagtgatcataaaatgtcaaggttaacagctctcccct

SEQ ID NO: 94257 - DNA, 1048 bp, Homo sapiens
ttatagctatttttaaaaagagaaaaattttttaaaatgcaatgacagtaagttgcagaaatctgaattaaattgcctttaaaaaaaccacatttgtttcttcccaggccatgaaaatgtggaatacaacagggaccatcatttagagatggcctggctgtgattatagcagccctgctctgtctttactaacaagccagcagcatgtaagaacacactgtggatgtgtgtgttttcttcttctgtgttttattttctcaaaaagaatgactgatgactttcttttgcaaattgtactatattattccaattgcagtggtaagttctgccaacattttttgatgcataaggactgttttgaatctattgttttattatgtctttttttttgcaaaattaagaatattttctgtttcttagtaatcatgttaaattaatgtacagtgttatgacactgagcataagcctttgaataagtcctcagaaaatatattttccataaagactcaatggtagttttgtaaaataaaacacttgtatttggagatagccaaattctaaaattaaaattacatcttgattgctacatattttttaaaccgtatgttatgtatcagtcctctgcacttcaaaggattattaaaggactggtatatgtatataagaggatgatgaaatggttacatggcctggaaaactatgtcataatacaaggaatgcttgaaggcattggggaatttagctggagaaaaaatacttgaaatcatgatagcttccttcaagtatttgaagggctgatacataggaaagggtaaatgttctctctttttccagaaggcaataatcttgattggagccatgggtgaatttgctgaatttgcttatttcagctgaccctgacaacaagttttcctgtaaagtcattaaatgtatataatggtggaattttatcaatacctaggagtagtctagatcagggattggcaacccacggcctgttttgcaagtttagtaaatgaagttttattggagcacagccacacccatt

SEQ ID NO: 94258 - DNA, 1029 bp, Homo sapiens
tctagtggtgcaacactaactctttggatgtcatttttaacttcgtcttttgtattcaaaagttgaattgctagtgatctttattttggtagtttttaaaggaaataagtgtataatatattatccatactaaatgagaggacccactgacaaggattacttccaattaatggtaatcattttggggtctggaataccttaagtattttttttttacttgtttcttagacaaataataaaataagcttttactttctgaatatacaacaacagggatggagtgaggggagacattccagaagatgccaatagtataagttgctaacctaggattaataactcattgcagaaaattcaggagatgacggtctagtctggtactgaattaaattatctacggtatttaatgttttactctagtagatttgctggtttggtgtctaccttaacttaaatatttagagaaaaatatggaaaagtttgtgagaaaatgaagtcttgtataaacatccttgtcctaattgttcacctttactgcagaaatcccagactggcaccagtgtggccgaagttcacactgtgttactataaatttacatgatgtagtggatgtcttaagaggtggaggcaatcccatattcaaaattgaaaacaaaaaaaatatttaaatacccaagtgagtaaaaatggactctcctggataagtctggaccatctttcaaagatattgagcgtctggaatttttatgtgcatttcgaggctgcagtttcctctgacagacaatccattgttattactggctgtaggcagtcctgaaagggcagagtcaggaaagacaaagaatttacagtacagaactttcaataatgtgttgatgtcaggaaaagagttgagccatttctgataagaaagaagtgttaatgttaagcagctgtaaatgtactttctgtgatctactcctgcaaagtaacagcagggtatttcttaggcttgggtcacaggatgaatttgagtaatcaatccttaag

SEQ ID NO: 94259 - DNA, 1034 bp, Homo sapiens
actcctcaaatattctttttcagttcttgttttgaaagggatccctctctcttgacttaaattctttaaacaacattgtttatatagtgatttaacatacagaactatttttcttagaactaggccacccagtttagaaagctgagggcctgaatacaatatgttactttcgtaagattcaaaagaatgttggtaaacaagagagggagatgtacactttgctaatttcttctgtttcccatggaaagtttatcaaactgtttgtgaaggaaatggtcaaaaagaagttttaagtgattaaccaagtagctttacagctgcagtcgtctttattgtatataaatatagataagagaggagaaaaatatttgagttaccagggcatgggaaatgatttaccttggcaaagttaataaattatgatttaatcattttctactaatgtagcactcatagaaagaaaatatacattattgtgcctggtgaaactgtaaaaggctaaaaggtctatgtagagtcctggcctgatagactagccccagagtgtttcagccaggggtgagcagagccacaggcttgtgactggacctgtgtcctggctagtgtcaagcatccccaccagtgaatgcgatacaggagcaaaatgatgcaactgctgttacagtgtttatgttacacaaaaccaaaataccagtatttataccagactcttattttaaaagtgttcagaattcaggaaatacaacagtgaaactaagtaatacgttttaaatgcaaattttaaaatagatattataaaatgtttctaatatctaagtgttagacataatcactctagcctaatttagataaaaatttttaagtattagaaaagaaattgatactacagtaaatgaataagttggttaatcatggaaaattgaaaatgaaaaagagtgcattgatgatgtcatcattaccataagagtattttttggagcaaattttttccagctgctataaaagcttccagtttctacactggtggcagagag

SEQ ID NO: 94260 - DNA, 1044 bp, Homo sapiens
gtgaagagtgaaagaacaaagcttccacagcgtggaaggcgacccaagcaggttgccgctgctggctctggcggtcagcttttattcctttatttggccccgcccacatcctgctgattggtgtgtttacaatcctctagctaggcagaaaagttttccaactccccacccgacccagaagcccagctggcttcacctctcagatcctgctcagggagcttagaatgaagaaggcagaagcaggagactagccaggaagggcggaagccaggcagacagtgctgcaaactcacatgtaaaaaacaaggtgggaggaaagggagaaggtccaaggtaattgcccaaaaagggatgccggtctggagatgggtggatgcatattatacagaaacaagtagaaatcttaatgccctttcaaaaatataagtataaatttaggtggtgagttgtttcaacaagatacatgatccttgtttggggtaggggacagtaaagctctcaaaagcattcttgggacagtggaggaaattaaaatagggactggatagtaaatgtttaaaagaattacatgaattttcttaggtgtgataaatggcattaaagtatagaaaacagcattcttattctcaggaaaggaattttagtatttagaagtcaagtgttaaggtatttccaacttaccttcacaaagttcaactacaatgccaaaaacaaacttatggggagagagggaggaaagaaaatatagcaaactttaactaggtggaattatgtagctatttgattgtactatgctttctatgtatgtaggaaaatttgtataataaaaagtagggggtcaaaagataagcatgtgtattagtccattttctcactgctgataaagacatagctgagactgggaaatttacaaaagaaagaggtttaatggacttacagttccacgtggctggggaggcctcacaatcttggtggaaggcaaggaggagcaagtcacatcttacatggatggcagcaggcaaagagagacagcttgtaaatgga

SEQ ID NO: 94261 - DNA, 1051 bp, Homo sapiens
gtgccaaaacggcttccgtatctgctgaaggaaaagagggagtgggaagaggggagaaatatttcattggaagataaaaaaagctctttccagcaatttcctttagaaacttgggggttgctgttagtctcatttgggtaatgggccccaaggaaaagtgacaaatggccttcttctggggtttaaacactaaaggtcagtgttggcccttttcacagttaagagggaaaaatctgagctgggctgggtggactttctccaactaagggattcttctgaaactcctaacctgatgggaatcattttgtttgcaggtggccaaagcccatcaagggaaatgcttgatggttactgtgcctgagctgcctgaagcctggtgtaggagtctcaacttgatcttgaggcagctgcaaatgttaggtcttgacacttgggatggcaacaagaccaggcagtgcccagagtggtcccagcggcctaggttagaggagggtagggggctggaatgtggccttagccagtcctctgagcagatgagaatacctgtcactatttcaggagatgagttgtggtcagagatatcagtcaggtgacttctctgagaggggcctggtccttctcacagcaagattgacaagtctgtgctgccagttgtccctaaatacccaatttatctcctggggtggagttggggaagtgcctctagcctggagcaaagagatctgcctgccatttcggaaggaaagaaaccagcacacatcctgtctttcattctctgtttcaaaggtaggtttttgtctgtttgcttgtttttaaatcaacacccagggctaaaggaaatcccgagtttccctgataatcaggatgatttcttattttgaaaggcctattttgccttcgaagtgtgtgtttctgacataggtttcatcctagttctagaaatcttgcttaattcataaaaggtaaaagtttaattagagagaaggctgatgtatcgtcttgtttcaaagggagactattcttgtctgtcatttgaattttttatatatat

SEQ ID NO: 94262 - DNA, 1059 bp, Homo sapiens
gatatgcagtcccttctctctgtggtcacatgggagaatcactcttgcctgctccccttgcattttggtggcatgttggactagttctgaggaatggcctgtgtccagactgcagccagagtccttgagtgagaatggtagagcctcctgctaccatgtgacaggcacgtaacatgagtgggaaacatgcttctgtgagtttgagccacagaacggcattcttacagagtgccttggagtaatgaaactcaaaactattttttaaattcatcatttagtattttccactaattcagactcattgtttagtgaaaagaatacagccatcggtaaggcacatgactgttattaacagtatgaatttagacaaattatgtaatagagttttagttttcttgtgtcaaaggcctcacctccacaaactacaaacaaaacttttgatgcttcaaattagtccataccagagtgtttagttttaattcactgctctttagtgcttgaaatgagattctttagaccaaagtggccttaaaggttcattcttgttgtatgcttattccacatttctctatatatttattttgtcacttctggtcactatatataggtttatttaagaaaaattcccttccatagtttatcaggcaggttaggctggtgctgcagtaacaaagatctccagaatctcggtggctcaaactcacagatgcgtattttccactcatgttacttgtccgtcacatggtggcagggtgctctgtgccatcctcactcaaggacggtggactgatgggctagatgcaggccattgatcagaataatcaaatgccccgcccaaatgctagggtagcaggtaagagtaatcctcccatgtagccacaaaaagaagagactgggtatgtgtgatcattaaaagtttctaactaaacatagataacagagtaggtaatatggtcgaatccagcatttcccatcagcttctttgaagcaccagttttgcagtatgttcacatgtactgttgataaagggcatctcctggtcaagtaaatctggagaat

SEQ ID NO: 94263 - DNA, 1101 bp, Homo sapiens
tgagaaatttaaaatgtgaatattttaaaaattacagaggatgattattcacattataaagtgactcatcatcccttttaaaaaggacttatcttttaagaggatattcctctggtgcatttgagtccttgtctgctcattgttttaaacaacttgcagtttttttaacaaattacagtatgacctgtgatattacccagacattcaattccgaggtatttaactagagatacctaggaatgaaatgaaaacacatattcgtacaaaaaaaatacacaaatgtttatagcagctttatttgtagtaaccccaaactggaaacaacctacatgtccatcatgggtgaatggataaacaaactgttgtagccatttaatggtatactattcagcagtaaaaacaaactattggtatatgtagcaacatcagtgaatctgagaataattatactgggtaagcagccagacaaaaaaagagttctaactgtatgattccatttatatagaaattacaaactaatctctagcgacagaaagcagatccatggtcgtctggaggtggagaataagggtaagtgaggatgggccaggaggcatggactccaaagaggcatgggaaacttaggagtgatgggtatgctcattttgttgatggcaatgatggtttcacaggtatatacataggtcaaaacttgccaaattgtgtaatatgcacattgtatatcagttatacctgaataaagctgtttttttttaaaaaaaaaaaaatgtcctgaaaaaagttctgtcttcccttgtctgccaattgcaccgttctttatatctcatccagcctgctcacagtcaagaacaggggcagaagtgggctgacaggtgtagtgcagtgtgtggaatgctgtgacaggtgtgggcacagaaggtacaatgaagaccccctggaggaggtgagcttgaggcgagtgtagagagggcatctcagaggcaattctgagaatcataggaggttgcaggtgtgtggcagaggttggtctggaggacagcagggaccatacatttggagcattgttttgaaagcgttgtacatcactgacgggtggtaagc

SEQ ID NO: 94264 - DNA, 1084 bp, Homo sapiens
gtttgctctgtaaaatggaggaaggtgagaggggtgccatgtttctgtctcataccgttttttgttatagagtgtattcatggttatactgtataataatgataataagttcttaaaccgtggtgatgagatctatttggcagaatgttttaaaataaacagtgtatttcccacgagtgaaatcttaaaaaacaattaatttccattatagtaagggtgaattttgctccttcaaagagtatagagcctggttgaatttgcccattaagaaaaaaaaatgtgtctattggactgtgttgtttgtaaagctagaatcaccttccagtggcgttttccatccttacaggaaagaggtttatctctgaatattgagaatggaggttcataatgggcattttagcgtttgaatgttgtaggaagaagatggctaaatcttcactgctcccctaaagtacacacgttagttctggtggggagtagccactctgagattttatatcagagacataatgaatgggacccatgatatgtgaaattctaattctttagtacagagaaatgtgctcttcatctttctgtcttctgaggcttttttcaagtgttcgaaactgccgttgcaaaactctaactgagacagtggaagagatctgtactaaccaactccatcttgcttctaacctccaagcagtccttgctctttcctgggcttaggccaaactaactttgagagggacttagtttgtagtttaaaacaaagatgataacaaaacccccttcttgcctggggactagattgcttttgtaggactagcaaattaaccacaacattagaaaatatggtttaggagtcatgctgctggaggctgcaagattctaaacctccccaaatggttcctgggaataacatcactattgcaaaacctaagatgagtgcttgtgacattttgcagaccctgtcctcgatggatcatttggcaccacccagatggataaactggcttatctggtcttgtggcccccacccaggactgactcaatgcaagaggacagcttcaactctgtattcatctccacccctaccaat

SEQ ID NO: 94265 - DNA, 1083 bp, Homo sapiens
gtagacttaggaagtttttcatttccccaaatgtggtcatcataaaggcctattggtgggtgtttggtgtctcagatggttctatttgttgccgttattaaattcacttacacagttaacccctttgccagttttctaccaaagtggacctgtgagaaagtactatcataggatgataaaaggtataaatttaatttatatataaggcacttgtaaagttatgtgtattttaaaaataaaacatgtcccatgataaaagcaaactcagaatgacacaaagtatatttttaaatttaacagtgcaacgcagctctctagaattttatttaacctccatcttcagtgataccattcaatttaattttctaattaggagagaaaattgatgctaggtagatgttaaatagtttcttaagttgcatttgatttttgataccaagtcaattaaagaagatagttgtgattattaagctataaattcaccagtagtttgacatgatcatattcaatagcagtccagtggagaggggtccaggtgacagcagagctaaatatttggtctatgtctaatgattgacttctgaaaaaaatcatgcttagaaaattatttttggttaggtccttctggttgtaaggaatacagattcacttgagttctctgaacaacaaagatatgtgtgtggtggatatggggtaaaagaaggagaggccgggagctgtggttcatgcctgttatcccagcactttgggaggctgaggtgggaggattgtttgagtccagtagttaaagaccagcctggccaacatagtgagaccctgtgtctctgaaaagtaaaaaaaattagctgaacacagtggcacacacctatagtcccagctacttgtgaggctgaggtgggaggattgcttcagcccaggaggctgaggctacagtgagccgtgattgtgccactgcacttcagactgggtgacagaacaagaccctgtctttaaaaaataaatacatacatacaagagagttattacaaagtttcatgcaaatgagccctgaaaaatctatgtgacagtggctgctgtggacct

SEQ ID NO: 94266 - DNA, 1042 bp, Homo sapiens
ataccttcagaagaggtgtccccaaacattggtgaggagctggaagccatatgtacagaacacatcagctccatccatccatagctcagaggcatctgactggcagttggaggatactgttggcatgcctaatgcagaagaattgtggtggggtggaggaaggcattttatagtaggacttttggggaaagagactggagtatcttggatgatcaagggaagggctaaatagccaatctgaagaaagggtgaagggcccctaggacaacagaaattaaggcttttcatctctccatctcttgttgttagtgaccttgtgtaagtgggcttctgtctctgccccttgtaggtagtcttctagatgacaggaaacatggctgccatctgctcctgggcttcactctctaccacctttcattttttctggttccagttggaaatattaggggtgtttgggagaaaggctgtaatttaccaggctttactcaaatgtctagagcagtgaactggagtatggagtgtggagggacataagagcatggcagctctccctggaaccacatggaactgtttcccccaaaggggaaagtttgctgggaagatgacagtaagtaacaatgaatgtttacgacacattttcagatagactgatgttcttgattcagagataaagacattttataaaatgcaaggtgatgtttaccattggttggttacttaaaaaaaaggagcccaataatggacagtttcatttaagatttttgaataaacaaaattaacaaagagaaacaaacattagcgtttcagtctttagaatatgcctttaacatggtgtttcatttgcattgaagttattgtcttgtgaatatgtgtggttgataacttggaaacagtctatcccaagcttgcatctttggattctcaagaaccaagcatcactcttagagcatgacaggtgcttagtactagagtgccattctagattctttagcagtacagtgatataagtactctattaacactttgttccttactcacatgt

SEQ ID NO: 94267 - DNA, 1094 bp, Homo sapiens
tacttttttgttgagacagggtcttgctctgtcatccagactggagtgcagtggtgcgattttggctcattgcgacctccaccttccgtactcaagtcatcctcccacctcagcctcataagtagctgggacaacaggcacacaccaccatgcccagctaatttttatatttgtttggtggagacgaattttggccatgttgtccaggctggtcttgaactcctgggctcaagaaatcagcccacgttggcttcccagagtgctgagataataggtgtgagccactgtgcgtggactctgtgtacattattgaaaacattatgagctgaatgtttgttcctcccactcaaactcatatggtgaaatcttaacccacaccatgagggtgttaggaggtgaggtctttggcgggtaattaggtcatgaaagtggagccctcgtgaatgggattcatgtccgtataaagtagacatgggaaatgatctttctccctaccatgtgagaatctgagaggatggctgtctgtaaaccaggaagaggtccttcaccaagaacccaaccatgctggcaccctgacttccagcctccagaactgtgagagagaaatggttgttggttaatctcccagtctgtggtattctgttttagcagtctgaactaagatgaatttttcttttctagtaataaacagaagtaagaccagctgattgatagaatcctggagtttaatctttctcctaccagaatatttgtcttagattttcattctggcagtgtctgtatgatgttaacatgctgcaatgttaacttggtagagatgggtttgggaaatttaaggcattgtttgctagcttagtagaagccattacacagtgactcacacgtcctttactgtggatttggcccctgccttcttttgtgctccaggtatctcaccctaaggtttttaccctttttggttaaaagaactaaagctaaagatttctttagttttctcttccttccttaggtcactgggatgtttctggagctcttccccctttgcctctttaccttccatgttccttggatatcaggggcactcagtagagggc

SEQ ID NO: 94268 - DNA, 1021 bp, Homo sapiens
aaccctggaagcagaggttgcagtgagccgagattgtgccattgcactccagcctgggcaataagagtgaaactctgtctcaaaaaaaaaaaaaaaaaaaagacttgtatctgtcctaaaacagtttataatattttccaagagcattatgtcctccatgctgcagcatatgacaggatttccttgcttttaagtaagattctgttgtatgtatataccaattttcagagattttctatttcggatcctttggttttagggaaaacattggaaaagccaagtgaatggctcatggtcacatagccagtcagtgttaaaagctgagaatggagtgtgcccttcacttctcttgagtctgtgtctggtgtactttccattattttaattaagcagataagactggtacacaagaagagataagcaatgctctcatagagtgtatgatatgtgctggacgacggaggctgacagtgctggtgtagagtttctaagaaggagccatcatcccagctgggtaatctgggaagccttcctagagaagggaaggctttgagctgggcttgaaggatgaatggacttgggactaaaaggtgaggggagggccaagagcagaggcatggaaagcccaagacaggtggggcactgatcagtttgggtgtagcagaggggacagttaggaggaagagatggggacagacatttattgaggatctgtcttgtgttgggcacagtatctggtctttgcccatgccatctcagtagcctgagcatgggaatgccatcctggtcatgcacttgtttgaggacatcactttctccctaccccttgggacttatcttccttacagtaaaagtcaggtgtactttgatcctgccagaaattacctggtttaaaatggggagataaagcaaagagggaagggtgttttatggtgtctgtaaagaaggtctcagaggtagctatagtatttattttacagtaatctggagcctgcctcctacttacgaggcagctggcagg

SEQ ID NO: 94269 - DNA, 1039 bp, Homo sapiens
tgatagtaatcggagacttttccgttacatgaggctcaacaaaagattgtaattccagcagctctgtttgggaaggcactaccgcggcgagtccagggcccggccgggggtcggcggctgccgggcggctggggcgaccgcggaccgtgcgggaccggtagggggtcgcgggccggctaggctcccccgcgcccctcctcgtggtatagcctgcatttctaatacaatgctgttatgctaatcaggtgacatcaccgcccagcacacggcgagtggctcctgataaaattacaaaccggcggccgccgcgggcagctgggaggaggtgtgcgcgctgcgcccgcgagctcccgggctcggcaaccgtggcatgcttaggattggccatatttaaaagttctgaagtagaacctgcgcctcctctctgcttctccctcctcctcagtaatttatttcgagcttccaggcaagggccacggaagaagggaaagcaagaaattagatgcctgtgtggtaactcctcgcggagctaaggtggactctcttgcagccaacttcccatcagatcaccctgctggacttgcagaccggaatggggctcgcctaaggagccgagcgctgcggaggctgctgcgtgttggatgggagtgggagggggctggagcgagatttccagggcgcagtcctccggggcgttacgccgggcataatggaattgcagaggacgtctagtatctccgggccgctgtcgccggcgtacacggggcaggtgccttacaactacaaccagctggaaggcagattcaagcagctgcaaggtaagccccctcccaaaggccgggcctgtcctgggtgccaacgggggttcttggaggctttatttgtgaccctaatgaagacgggcggcttcacagctcggccccagaccctgtggttggctgcgggcaccccattcacgacttagggaaggcagttgctcatactccactccagaagagctaccatttggagtccctgtctctccagcacctttttggct

SEQ ID NO: 94270 - DNA, 1036 bp, Homo sapiens
aagtgccgtgctcagacccagtcctgtagaacaatagcaaaggggaggagggaggggtctttttgttcctaagcctttggtaaattacagttttttattcagaagcttaattttaatttttctgatgtgttgggaagagccttcccatctatttagtgggctatataatttctaatgaaagccggttattgtcatttcaaccctatgggttggattagttggatcaattacaggtttcttggagtctttttaaggctcagacaattgaatgagtccaatattttactgaacatatttttagggagagcagaagcctgtgtgtgcaccagtgtgctgttttccctgcggcccctgcacccctcagctgtccctgcccagccagcaggccctggccagcagtgtctcagagcttatacatgaaaaaaggttcctaactgaaaacagaactccttccgtttggaagcccctggagtcagtagtaggctgggaatggctctagcactgtaaaaaagtagtattcgaggactgtgtgtttcttattttaacctcctcagtgctgcaaatgtggttcctgtgaggaggaggaaggaaggaagccgctcagccctagaatgtttttcattgggaagaggggggaggatgtctttcattcattggtttatttgtcttgtgaaatagttgacagtaatgacacttctctggaaaacgaggcagaacaggacgtgattttaaacatttgctgggctgtgccacattcctctggcagttagctcagaggaagctcccttcgctctggggaacggttctgtgtctctttggttcatttctcttgagctcttcggcagtcaaatttgcttttttgaaaacttaagctgggggcgcttgcaagtagtaaatagaggagttggggtgggggggggcgttcattatctaggtttgttaggggcctcacggttttcgggtcggagaatccactgcgtgctcctcctcttcccctggcccggactcccagcttcattgtgtcatcccgcctggg

SEQ ID NO: 94271 - DNA, 1024 bp, Homo sapiens
aagaatattgacagtcaagggaataccaactttttcttaaatctaatattttactaggaagaacattaaaaggattcttggaggctagttatatagaagaggaaggtgatagataactccttttgaggaaaagatagcacttttcttaggagagtcagcctaaaatctccctggctgctgagaaagctttctggatgatggttccatgtcatcacctctcctcactcctcattcttggaaaaaggggtctgcacagcctcactgctgcttcgtctgctttagtctcttttcatggcttcctaaagtgtccccatgcagttatcccagtctccccacagcagggccctgagaagagtgctccgtgcaaacatgtctgggattcatctttgctgggatttgactccagtcccagctgcagctgctgccacacctgtaccccacagaagttgtgattccttaaacctgccctgcattttggcacccttgacaccctgccctcttggtttcttctgcagggaatcatttcatgtgtcaggatcagtcttttgaggttcagttcagatgccacttattctaggcattccaggaggttggggaggtcaacatccctgcttggactcccttccttttaagatttgaagtttcagcgcttgatcattcacctgtgatttttcattactgccttttgttacagttccagtctttgtctttttgttttccctgtatttcgtgaagtctgggagcctgaagaccaaagtctgaatagtctgtcttacacatacaagccgctaaatatttgctaaagagcaaaattaatgaagtcagtgttatagactcccttattgctgtggttcccaaattgaggttctcaaaatgaggtccccaggtcagcatcagcatcatctgggaattggctagaaatgtaaaatctcagatctccacttctcacctactgaataagaaattctagggtgggtcctaccaataagtgtttccagctactctgccaggtggttctggtgca

SEQ ID NO: 94272 - DNA, 1022 bp, Homo sapiens
tttgcctgaaaatgcacccaactgaaaccattcccccccccctttagaaagattagaaggttcagtcacttgggcctggtgacttttgatgtagtttgaaggtcacaatgctggttcctctctcaagttcataaaagcctctggagcagctattgctgcagccagcgagcatccagcacttggtcagagagccgcctttgtcagagagcgctcctgtagccagactcatattaactgccccccatgggtgtgttgaatgcctctactgtgtttgcctttgaaaggcccttcttagcctttctctctcccccaaccccattttcaagaggcacaagacctttaagtagcaaatacagtaatcacagtagcatggagacacaggctggcctatatttggtttcacaaaggccttgtgaaagatctggccttaaagtccctttttaatgctgaaattatgcaagtggaaagttaatttgaggatcactgaggcacgctttattcatgaagaatgtgagcaaaacataaatacaaagtctggaggctctgttctacgctggtggcaaggaaattacataggtggtatctttatttggctgaatccccctccctccaccaagagtgcaactgtgatagaattttggagtgagagctattgttttaagcactgactggttgcaggtgtgtgtgtgcatgttgcctgaaactctctacaaaccatagacatgattttggtggaattggcgtgccaacagtggttacagctaagattgtagaagaccaaacattctgttggaatgtgaccttaacattttgaattatgtttcttaagtaagataaatttcgaaggtctattttatttttatctttattctttgaaggcctgctttaaagtttaccgtgtctttgaaagtctagtctgttgaactcttaaatcccagtgagttcctatagattgctagcttgagtgtatagtatttgagatgtgaataaagtctagtgcaaagtgtgtttcttgtgcttga

SEQ ID NO: 94273 - DNA, 1486 bp, Homo sapiens
attttggaggaattgacattgattgcaagtttttaaatatgacctggattagattatgagatgatgggtgcttgggggtaggggtgtacagagggagtcatgaaaccatggaggatgttggggaatggctagaattctacttgggacatcatgcaagttttttttccccttccatttcatttgttaatgcttattattagttgggggttttgcctcctttttgttagccaacagccagctaatcttggcacaggtcccgggaatcaggtgctgcttagcagctgatgttggttaaatgaccttggacaagtgacttgcatttcagttctctaacctgttagggttgtagattgtctgatacagatttgaaggcccctgcaaataaatgcatggccgtttactctggtcactttcattttaccgaatgtgctcccccaaggctcttctgggtagatgcccactgccaaaacattaagcatttttggcttctcatgctttgagctcacaaaatcagtcctgtgggaaacctaacaagctacaaaggagagggaaagcaaaagaaaaggtatatggattctcatgcaaagagagaaggaaagtaggtccctacctaaagtctagccctgtattggtggtggtactgataatggtaatagccaccaaaacttcttgatactccccttgtgcaggcattgtcctaagtactttgcagtattgattcatatgctcctcatagcgtccttgtgtgatgtgttatttccattttgaagatgaggaaactgaggcacaaaggaagctgtgcccaaggacacttaactagtaaatggagccaggattccaacccacgcagtgcgctttgggactcaatttttaaccatcttgctgtgctgcctgttgagcatttttcacctggtgcttttgtagatcccacattaggattttgttaggaccctgggcaaccttgatttagtgaaagcagttgttgagaggtagaaattcctgatccttttttcaatcttaaaggatttgctgagactctcactcttcattggtgatggtaacaaggagcagcatggtgaatgccatgtaaaattcaagccttgccttatcttggaggactttattcccttttctttgatggtactttggagattccagactataaaggactcagctgacagtacagactctcttgatctgtattttcccagtatatgaaattatttgtaatgtacccgtgagaacctggaataaactgtactggcactgaagtagaatcttggatttaaaagtacagtgttcactgctgcatcgttgagcatttgctacacagagaataaccttggagcaatgttcaaaggtgatggcattacccagaaacatggagttaggccaggaaaccacatctgaagttcagattattggagattgctgatttttcttgactttaaatattttcgactggttgagtgtttgttggtgtttt

SEQ ID NO: 94274 - DNA, 1052 bp, Homo sapiens
atttatcttttgtgttacaaacaatccaattatactcttagttatctttaaatgtacaattaacttattattgattaattcacactggttcccaccttagctctcatcttagaagaggtagttgtgttgctttgcctcttattttcggagaaagcccccatcataacctcagctccctccagagtcttggcttcttatggattgtgactttatgcggctcaccttgacgtacgactgtgacagaggcaggaccctggtgacagagcctcatttctcagttattgtgggtctcctctcagaagttgtgcctgcagtgccttggtctccacattggcaaactggggttgtgccgctcagaagaaaggccctctggaagctgcaggagggactgcccagcagatgcaacctgtaggtgccaggtcatagagagctcatggtgggttttgtagtcggcccatcagacagttactagcagacaattgcatatttgcttcacatgcatttagagcaaatatttacatgtgttttgtccatgatgcaagttaaacagttaaggaaactattgtaactcaaattctatttttatacaaatcagcaaacatgaatttaaggccttcagactagtccgtcacagggaggacttcagtcaaaagattagtttccttcctgttgctgcctcaagataacagttggattctctgttatcaatacagccagctgcctgtttccggcttcctgctctgtgtattttgcatgttactcatgggaaatgatttatttattttttcaagctaaggcatatagggggactccaccctaccactattcttttgttttgagttaagatccttttttattctttattttaaaacagttcaagaattaaactttaatatataaattgttaaagttgcaacaaattaagtcttgtgacaattgacctgattgggtcatgtttaaataatgttgtaatatgttacaatgatgtcctaatcacaccgttgtgtattttgcaacttcactttaccgtacaggtatgtggtggcaattgc

SEQ ID NO: 94275 - DNA, 1031 bp, Homo sapiens
gggcctcctgctcctcctcagactgtctggcccatatccccaagccttgctgggtggggagtgcaggggtgatgtcattgtgccttcccaggataggtggaacaaaggagggagtccccaaggacccgaagcctgatcctctactgagccaccaaatagatttcttttcccctctgtctccctccttccaacttcataagcatttgctgttctccaagtgctccattgtaagaggacacgctagttgactggggctttgtgtgtctctgttgagtccgtttcctgcccctcgtgtgttatgagggtgttgattctggtctggtccccggatggaatcttctgtgtcttttccaacgtgggggtgtgaacctgaggaacttagaccctgcgtgatttttccagcactcttgcacttcgtggggcctgctcctgactgtgaggagagttcgaagggaggggaacaggaagagagggcaggaacacaagagcttgtttttttatttttgacatctcttcctcctcttctttcctcccacctactttgagtttctaagaaccatgatagccctggggagccctcccggcacagatctcagtctgtttcagctctgttctctgcacccacccatgacctctccatttgcctctctgtagggaggagggttgggattgggctgtaactctttaggacagggcactaaggaagtatattgactgttgtttctggcaaatcctcagagtttccttgtgaaagaacctgttaattcaaaacctgaaagaagtctgggtgctcctttagtgagagattcacccaaaagagtgacaattggctgaggaacacattttgtgcttgtttatttagaaatattttaatccaagcaggttttcattttgatcttgctcccttgcttcattaaagacattttctgactccagtataacgcataaaggattttataattcacaaaaaaaattgttaaccctaaatacatataaactatgagttacttgcctccttgataagaggccat

SEQ ID NO: 94276 - DNA, 1764 bp, Homo sapiens
caagtattatggtatagggcaggactgcaaaggaccctgttgtcatctgcatcctgctgcctcttcagcagggatgggagaaaagaaaggggagcaaaggatgttctgctggcagtgtgcctgggagctcacatgtttaaggactggacagttcctacacagatgctccttgacttatgagattatatcccagtaaacccatcgtaaagtcaaaaaattgtaagttgaaccatcagtaatcagtgttctttctcaaagacatgaccgcagttaaggggcgctaagtagaggtgtccttggaggtcagttttgctgaccttcctctggctggggtcttgtggccctgctagcatgtgcctgctcctgccagttctgtggtcaatggtaaaacaagttcttctctgcttgcagatgagcgtgaagccgtgcagaagaagaccttcaccaagtgggtcaattcccaccttgcccgtgtgtcctgccggatcacagacctgtacactgaccttcgagatggacggatgctcatcaagctgctggaggtcctctctggagagaggctggtgagtggagaccttaggaagtgccgtgtgttgtaggtggaaaatatttttgaaaaatcaagtgtgacttgtctcctgttgaattctgcacttaatggttgatagttttgaggagaatcttgagaagtgagttgagcgcttcagggagagccttagtgtcacattctgagcgtggatgatgttcttgagctgtaataaagccactttgttctggtaatttgcaaggttgccacctttggtcagaaagaacttggctggggttcctgccaagaacagggcatggtgctggaatttgaagggccaggcttgggcgctggcttctagatgaacctgtgtcccacatgcgatgatggaatgttttctaaatttgtgtctttctggttgtctagaaaatctgagctgccatcttaaggtggcaagcattgaattcagtggccactgatgttttcttccctgcacgctttttattttgggagtggagggagaagctggtgttttgtcatctccttgggaaaggagcttctgatgaattcaccctgccttttcaggcaggaaagttgtcagcctgcaatgaaaattgtatccccaatctgtttcccagagctgctgcggccctctctgatgtgactcttgtttatgcaccttataccaaagaagcttaaagcagtcactgtgactgatccaacaggttttgtctcaccttggtttgaaaatggttgctgtatcctcccagagcacatgtagtgccataggtggaagtggtgccgagccagaagccaacgcccagaatggagaccacatctgtactgacatcaccaggaaaatatgatgctggcagttggcagggctgccagaaagccttatttttaacttgatctccaccctgtagcttgccagccgcagtaggcctgtgtgcagacctgccccacacctctgaccgcaggcaagggtctaaggttgtcccttgtcctatttgttatcagctcagagacagactgcctctttgagtctgggttgaaatggagccagaaaagtattctcttccctgcccttcagttcaagaacagggctctccagaagatagtgaagccctgtcttctctgtagtgagtttcatccatgccctttgttcctgagcatgtaggtcttgtggcctcattttctgtgagggtttgtcggtcacactagacaaactagacaaa

SEQ ID NO: 94277 - DNA, 1033 bp, Homo sapiens
gatgctttatgggttttgttatacttgaggaggaaggctctaagtatagaagtattttaagccggaaggtactctcaaggtcattttgtccacttctttcactttatgaagaaatcggggacccacagaaatttgaaaccttgcctctgatgacacagccagccagggctatagtgggtgcctctgaccccttaagagagagcgctcagccttttgggactgtgcaccaccacgagcctgattattggttctttctccaggctcatgcttcgtactcatgcgttccaattaaaattggaaaggcaggaacaactttgtaccatagtgtcaggtttctctgcgaacaaatattctaacagtcctgtctcctcagtgactgtgttctcttgccattccttcctgttctgcccctttaataaagatctgttttgatttttctgggtaaacaaaaacctcacacaaaaaggaaaaacgaaaaatcaaattataacttgctttgttttcttattgaaactctgaaatcagcctgtcaacagtcccttttccttctcacttgccctacgattgggcttcagttagtgtcgtgattatatatgtgggaagaaggggtaggggactagaatgagttacaggaagaaatatcttcctgcctggctggttcccaagctggctgatcatctgatgcctttgggaaacccttttaataattcaggttcccagggcccagccctagtagttctgattaagtaggtctgaagagagaaccactgttgaagatggtacaacatcattaaaggagttaattacagcaatcaaggacatttttccccagatagaactcttacatttctgttatttagttcctgaatgatttgaaaatggagtagccattgaatccactaattactgctcttgtgtcttatggcaacagaggtgaaattattagcagtacactcctctagcttcaccccagttttatggagtaaaatgttgtatttctgttagctttggcctgcaataatcagagcgtgga

SEQ ID NO: 94278 - DNA, 1099 bp, Homo sapiens
ttgtccttggcaggtaccccaatgtcaacattcacaatttcaccactagctggagggacggcatggccttcaatgcactgatacacaaacaccggtaagtccatacaaatcatcctagcaatcgtggggtaaaaggttgctgtccttccatagcagatttgggtgacttttccatatccgttggcttaactgtctcaccgtggtggaaatttctgcattccatgtgaggaaaatatgggagaatatataaattcttccaaacagaataaacaggttctcccttaatcttttttttcttaattaactttgaagtgtttattcaaaaatcaggtttcattgtttgatgattccatgatagtatattttagagttttactccactaattggtgattttaacctttttggagtaacagtcatgtttcattagtcatatttcttttcaagccatgatttttgttgtgtcccactgttgttctgcacaggcctgacctgatagattttgacaaactaaagaaatctaacgcacactacaacctgcagaatgcatttaatctggcagaacagcacctcggcctcactaaactgttggaccccgaaggtagggactcaagggattacaggtgggatttttagcatctgtaccatccaggtgttaatgtaaaatctgttttgtgtcagtctgtttcatttgggagttatcaaaggaagagcttaattttggttatgggaattttttgaggatttatggaaaggatgacactcaaaaaggccttgaaagatgaatacgatttaaacagagtctgaaggagagcgtgtgcgggcagagctactagcatgtgcaaaggtgcagaaccaggaaagaagaaggtatgcttgagggctaacaattcaatgggaatggtgtttagggtaatagcagggaataccactattcccttctgttagtggatgggatccccataggggcaacaggcaacagggagtcattgaaggttcttagcagctgtgctcgaagtagaaaagtagaaaacctggcataggctgttaatgaatacttgttggctgacatttatctgaaggtggcaagcaggttggatg

SEQ ID NO: 94279 - DNA, 1965 bp, Homo sapiens
atgtgaaggaaatcgggaaagctggtggagggagccattgtttcagggctggttatgtgacaggatgggtctgaaacatgagtgacaataaggattccataaataagggtcatcccaacttagactcagtgactagctgctggatactggtaacaaagagataaagatatccaaagactgattgacagggggcggtgctggtcctgtaggcagcaatgaggactcaagcagagctaacccagtatggtagtagggcaaggagaggaggaactatgtgtctgtggaaggcgtttcatgaatattcacataatggggaatcagtgagatggtttaaccctcattatccttgtaattaatgcacggatggcagaacactcaggtacaaacatgaagacgctgaactgttccatgttgaccagcagtcgttgcatttgttcctgctacctgggtggggcacagtagcatgcaacacactgaacagagtcttctctgggttacagacatcagcgtggaccatcctgatgagaagtccataatcacttatgtggtgacttattaccactacttctctaagatgaaggccttagctgttgaaggaaaacgaattggaaaggtgagctggtgccaattttgtgagttgtgagacataattaaggttaattgagccctcattctcccatgcactcataaaatttgccaatagcaatttgtagtggactctccggatggtagggaaatcggcagaagcctcttcatcctgaagggtaacaagaggtgggagagatggccaccatatttaggaaaggatctgggggctatctcaaacccagcaacatctttctcctcaactgctccaggaaattgggtattggaaatctgatcgagttgcctaatgtcatgggtgtgacatcctacttaccacagttgaaaaggccccagcatcgtgctttttacttctcatttggctgatgttcacctgccatgttttcaaaacacctcagaccagatgacattgtcctctcaatgcagtgaagtcaaaaattaatgggcatttatgggacaggatcaagctaaattgagccctttttgtttctctagggatttcagatgttaggctacagaaatcattcagaatctctttgcttgggggttggaaagttacagaaccaattacagttaagctgtcattgctcacaaataataatcacagtctgggcccctcttagcagatggttccttgagttaaaatgcttgtgcccaggtacagctgaactgtttcagagctggccaaactgtttcaaagccggtcgttttgtgtgcatgcactcgtatagggttacaatcgtatttaacttatggagtgacatgatcttttcaatttttctatcccttgttgccaggtgcttgacaatgctattgaaacagaaaaaatgattgaaaagtatgaatcacttgcctctgaccttctggaatggattgaacaaaccatcatcattctgaacaatcgcaaatttgccaattcactggtcggggttcaacagcagcttcaggcattcaacacttaccgcactgtggagaaaccacccaagtaagatgcatattgtagtgtgatcattaatatggaaagacacatcactgtagccaacagatccctatgttctgatttctgtaatctcatctcttaactgaatgcctttcagtagtgtgtcctactccttttcatctgactctgttttgctgagatttatgatagatcatgctctctctgagcccttcccaatataaatgtgccactgacatacaggatatatgagaattccaagaaatggtacaagtccccaaccccttatccaaaaccattgtacctagtgtgtttcaggattccataatttttggattttaaaaaaacagcacagctcatatgttgtatattataagaccccagatgggactaaggcaatagcc

SEQ ID NO: 94280 - DNA, 2372 bp, Homo sapiens
ttttttttttaggtgaagaaatagatttcctaggaatgaatttaatatggacagtaggtcaggattttgaaagaaatttcagatgtgtaaattttttaaaagtggcccagggtggaatgaatgagaaattcatatgaattcttagaagaatcatttatcttttttatatgatcaaagctatttaagataatttatttcctcttaaagtaagagatttataatttacttatattgcttcatagctacagttttgttttccaagtacaacacagaatctttagatttagatgacggaagagtgttcccatgaggatacactgagagaaaaacccgtttttttcctcaaggcttgagagtcagtgagagtgggaatgggatttcccattcaagctgtcaggtccttttgagaaatattagctgttgactgtaaccacggaagtttccttgaacactgcaggaaactgtgtttgtgtgtgtgtgtattttcatttttgtaggcctgggaaagactggaaaaagcggaacacgaaagagaactggctttgcggaatgagctcataagacaggagaaactggaacagctcgcccgcagatttgatcgcaaggcagctatgagggagacttggctgagcgaaaaccagcgtctggtgtctcaggttctgctcttgacattattaaaaagactgttgctagggtaatctagaaacacagaccatccccaggggcatagggccagaggacagctgcttatcgacattcattattctggaggaacgtcaggtcaccttggccccttcccattaagaggatgtttataatttctaatatacatttctatttatctaacttttcatagatttggaagcagctcaagcagagtttgttttagagccattgagtgtgtgtgaactgttcacatttataagttttaacagtttctctcttttctttaatctttgaccaactaatcctacgaggcagttagactggttgtgaaataaacaaaaatggcttgcttttccacctggcttgacataagctatcacctgctctagcttttcagtaaggtactagatacgaactgggcccttctgcaaaatgagcagttactagtttgctttgaggagggcatctaagctcaaggcagagaccagtggggtgggggactcaggagtcagatttggctttaagaccaccagggattaatgtgtgctcaagatttcatgtctgttctttttccttttttggagggggggtggcgcgggaaataggttttttggttttgtttttgttttgtttttgaggcagagtttcactcttgtcattcaggctggagtgcagtggcgcaatctcggctcactgcaacctctgcttcccaggttcaagcgattttcctgccttagcctaccaagtagctggcattacaggcacgtgccaccacgcccggctaatttttgtatttttagtagagacagggtttcacaatgttggccaggctagtctcgaactcctgacctcaagtgatctgcccgcctcggcctcccaaagtgctgggattacaagcatgagctactgtgcccgggtggattttttattttccttcttttcattccgtttctctgtaggacaactttgggtttgaccttcctgcagttgaggccgccacaaaaaagcacgaggccattgagacagacattgccgcatacgaggagcgtgtgcaggctgtggtagccgtggccagggagctcgaggccgagaattaccacgacatcaagcgcatcacagcgaggaaggacaatgtcatccggctctgggaatacctactggaactgctcagggcccggagacagcggctcgagatgaacctggggctgcagaagatattccaggaaatgctctacattatggactggatggatgaaatgaaggtaaaacctgaccgaaaggaaggacgacagagctgatccaaccagggctctcttttctgtgactcattcactaaacccctacgtacagctgtgtgccttgtctaactgcccacatgtacagctagagaggagccacatcacccatgggaagattgctagctcaggaattaaatgagacgtgaagtgtgaaaaagttgtagagaccagttcagtagccagagctctgtttctgtgacttagatatattccagtgtagggaatcaatcacattgtggttttctttatttttaagttttcagggttaaactaacttaccgtttcattgatctgtgagtgagtggtactactttgggcaggggtcccggagaggtggtatggggagaagggaggagtggtaggtgccatggacagaggagaggtcaggaaccaggcagccagagttct

SEQ ID NO: 94281 - DNA, 4603 bp, Homo sapiens
gatggaagaaacaagaaaatatcagtgggttcaaacttaaactctagaagttgcttggggtctactaagcaagacagccacctgaccctgctctccttattggtttaaagatgtggcttgtaagcttttcaagtagattgttttcccattgattgtgtaagtacagtagaggcataccaataagctcctaacagaggaaaaacattcacttacaggctcagcaacttctaaaagatttctttcaactttgaagtgaccaagtctatcacctttatttatttatttttgagtagttgttgcagcggtttcttcttgaagctccagtttatattttggaatctttcatacagcacccccgcccacgctccccactgccccctcccccccaccctggccccgctggccctcaccatctttttcttctattctgcactttttagtgtagatttgacttacttattccaagtttggtgatccttagtttgtgatagctctcctgactcaggccttcaggtatgatttgttttgttctggtttgttggccatcatcttcccctgaaggtgtggggtccatggcagactagagggaaggcatagcttcattgctggctctctgcttgtcgaaagatgatgtgatgctgaagtcaaggctatagtcacagatgtccttttggttgcttcttgtgcacaggtgctagtattgtctcaagactatggcaaacacttacttggtgtggaagacctgttacagaagcacaccctggttgaagcagacattggcatccaggcagagcgggtgagaggtgtcaatgcctccgcccagaagttcgcaacagacggggaaggtaaggatggcccattccaagcattacctccgggtcaccagagattcatatttatagaaacacagtggggcttttgaagttactgtgccactatacattcctggtgggtttgtcatgggagcatgaaatacggtggagtggccttctgaacactaactccatcttgtttttctggaattgatacatcctttccttaaatacgcaaatgctgcctttgctttgagtggcttggtgtttggcagtgagactttgtcatacctcagtctctctggccatgcaccgacaccctggtgtggctgttccagcagctcctggctttcacagctggttgcatatacctctctttggaggatgtttagaatgatttggttatgcttcgtgtatttctagaaacaattatatgcagctgcctttttcatatgattcaagtgctttcttgcaggaggatgatcactttgtctgcggtttggccaaaaaaaaataatgtttatcattgccctcactcctgttctagtcaagttgttagaaggtgctccattgccttatcgcatggccctgcatttacatttagcagtgagctggtaatcataagaatatggggtgtagcttactgcctgccagtgagcctgcacccatgctgagctccctcacacagccacgttccttccttgatgttaaacaggttacaagccctgtgacccccaggtgatccgagaccgcgtggcccacatggagttctgttatcaagagctttgccagctggcggctgagcgcagggcccgtctggaagagtcccgccgcctctggaagttcttctgggagatggcagaagaggaaggctggatacgggagaaggagaagatcctgtcctcggacgattacgggaaagacctgaccagcgtcatgcgcctgctcagcaagcaccgggcgttcgaggacgagatgagcggccgcagtggccactttgagcaggccatcaaggaaggcgaagacatgatcgcggaggagcacttcgggtcggagaagatccgtgagaggatcatttacatccgggagcagtgggccaacctagagcagctctcggccattcggaagaagcgcctggaggaggcctccctgctgcaccagttccaggcagatgctgatgacattgatgcctggatgctggacatcctcaagattgtctccagcagcgacgtgggccacgatgagtattccacacagtctctggtcaagaaacacaaggacgtggcggaagagatcgccaattacaggcccacccttgacacgctgcacgaacaagccagcgccctcccccaggagcatgccgagtctccagacgtgaggggcaggctgtcgggcatcgaggagcggtataaggaggtggcagagctgacgcggctgcggaagcaggcactccaggacactctggccctgtacaagatgttcagcgaggctgatgcctgtgagctctggatcgacgagaaggagcagtggctcaacaacatgcagatcccagagaagctggaggatctggaggtcatccagcacaggtgagcggggcgctggtcagccactggcctgttccttgtgaccaccagtggcccaggaggtgaccaccctgtcaaattgccatttcagatttgagagcctagaaccagaaatgaacaaccaggcttcccgggttgcagtggtgaaccagattgcacgccagctgatgcacagcggccacccaagtgagaaggaaatcaaagcccagcaggacaaactcaacacaaggtgagcacgtggccagcagtgtgccagcctcccacgtgtgggactggggagggtgaggtcactcatcgagctttgctgttgggaatttcccacatggggtcatcgacattgcaacactgatgtcatggcattggcacctgccttttgacatgtccttgttttgtaagaagtgtctctcagggcaacatcattggttgcaggaggattatctgagtcagcccagcatctgcccctcgccacaccaaagttagggccttggtttgacctgtgtccagtgtagaaggtattaagatgacacctgtgctatccattttatagtaacttcaggaacaggactctagcatgtttaacacttaatttgccaatgaaagtcctgattgtcagggcagacctttgttccagtcttatctttctgttgagtaaacatgtttgagtaggttatggcacctggccccagttttgaaggttaccatcagtcttagatttggaaaacgttcattaggtagagttcagagatgtgtaaaatgtgtcacagacatgaattaattgactctgggaatggatatcttgtaattgctcacattggagctctgtaacacattcctcttcgtgacaggctttttccagattacattgcatccctgagctatttccattatatttggtgttcacagtttgagtgagatgattttccaaaaaagcatgtagtcaaagcacagatggagaaaacagataagcagcattaacccatcactgttccttttgcaatccagccatggtcagtcttccctttttcacactcgctgtctgcccctgcactcacaggtggagccagttcagagaactggttgacaggaagaaggatgccctcctgtctgccctgagcatccagaactaccacctcgagtgcaatgaaaccaaatcctggattcgggaaaagaccaaggtcatcgagtccacccaggacctgggcaatgacctggctggcgtcatggccctgcagcgcaagctgaccggcatggagcgggacttggtggccattgaggcaaagctgagtgacctgcagaaggaggcggagaagctggagtccgagcaccccgaccaggcccaggccatcctgtctcggctggccgagatcagcgacgtgtgggaggagatgaagaccaccctgaaaaaccgagaggcctccctgggagaggccagcaagctgcagcagttcctacgggacttggacgacttccagtcctggctctctaggacccagacagcgatcgcctcggaggacatgccaaacaccctgaccgaggctgagaagctgctcacgcagcacgagaacatcaagaacgagatcgacaactacgaggaggactaccagaagatgagggacatgggcgagatggtcacccaggggcagaccgatgcccagtacatgtttctgcggcagcggctgcaggccctggacactggatggaacgagctccacaagatgtgggagaacagacaaaatctcctatcccagtcacatgcctaccagcagttcctcagagacacgaagcaagccgaagcctttcttaacaaccaggtaaggtttgttcctgcctttgcttcctttcggtgaaagcagccctggctgccttttgaaatgttttggctggggcagctggtttaaaccacacctgtatggaattatatggataatttagagactgatttttttttccccatactcttaaggcattgaaatccatcacgttgtaggggacaggaattgaaagttgccataagagctgctttgccttacaaagtactgtttgatttcaactgccattgaggatctcttatgtgttcatagtatgtcttcataattgaggtattgatccaatttaaaagatacagtgagggccaggcatgatgactcactcctgtaatcccagctcttggggaggctgggacaggagaatcacttgagcccagcaggt

SEQ ID NO: 94282 - DNA, 1213 bp, Homo sapiens
ttgagaccagtctgtcttcttgctctagaagggtcagggacttcacctgaggacacaaagtagagattagagaaataaaaacagctgaggatagtcaccaacttcagggctgttactgtctcaaagagagagtatgaagggtacattgctgttgccttgataggcacgtgagaggacccttgaggctgatacacaaagctttggttcctttcctcactctctttggaaaaaaaaatttagagcattaacccctgagggaaattcggtcagttacagtgtcccactgggtttttttcctcctaacttttaatttgatgtgatttaattatttcatgtaagtgtaatgaagaaagtgttgtgaactatgttgcacggaaatgtagaacacaggaaaatgagatccttcattgatctgctatgatttgttcctctttttaaataaggagtatgttctggctcacactgaaatgcctaccaccttggaaggagctgaagcagcaattaaaaagcaagaggacttcatgaccaccatggacgccaatgaggagaagatcaatgctgtggtggagactggccggaggctggtgagcgatgggaacatcaactcagatcgcatccaggagaaggtggactctattgatgacaggtacagttttctgaggttcttaagggagccttgcaccttggggctctcaaacttctgaatcattggccagaagcccttgggagtttaggtataaatttcccagtgggcagaatatgggtgcccagcagaagttcatctacccatacagaaaattagtgagctgtgcatgactgcctgagaatgtgggtctggtgagacatgtacaagtgtccacaaaaggaaagaaagcctgagaagccaagctaattcttaaccgaggacctgtaagagccgtagtgctgcatcgcgatcaggtgtaagccatgccctttgaggattaacacacgcttgtgtcacctgataggacccctggcgccaggtattcccagccaagcccgtgttccccttcatccatgagaaagaagcctgtcaggagagtgggaagggagggtgaagcttgcttgttctgagtacctggcaaagctacaaaggaacattacctggacttttttagaaaattggcttggatagtgctgtaataggatctttttcatgatggagaggtaaataagagcaaaggttattttc

SEQ ID NO: 94283 - DNA, 1240 bp, Homo sapiens
attgtggaatagagaataacttatgttaattataattttgtatctgttgcttttaaaacagctgcaaaaaagaaaaataaatccaccaaaccctccttaaatgagcatgagaaacagcaattgggcaaagcattcataacctagggaaaaagaatttcctttttttgtaatattaactctgagtattttgtaaataagatatcctatgtacttccatgttagatgcacacagctggtttcctgcaggcgggcttggctgttagggatgtgtgcattcaggcaggcatgcagctgccttgctgcttcctcggtttctttttatgtccccagtgctgcaactgcacaaagctgttggaagcagatgatgctgtctagactcctggatatgataaaacgtttcagcagcagcagccctcagttgtggcttaaccttcattttgcccttgaccaagagcctgggctactggtgttccagagcttccttaggattcctcagttttaaaaatgaaacgtaaagataaccctgtactatcaataagcataataaagatggaaggagggagctttccgatgacctgccatcaggagaactacattttcttatttttctccattgatgttaactgaattctgatttcactttaatatccccagaggcccacagaattgaaactgaccctagagggtacttgtcagttatgaaaacacacacatctgtgagttccaggtgctgtaggagcacaaactaagtaaacatctaaaccttcagatataatccccgctcctcgaaacatcctgacactgtggtgaagcgattctcctagaatgtaaagtcattataatgtgcttacgttcaggaagtttcctgagttgttgaaagagtaccagaacaaagacactgactctaacagatgtgggtggggcatgagtggccttcaaagtgcctgtgagtgggaagagactgtcctcagcctgccccaggggatgtgaacagggagggagggagctcctgaccaagagggaaattccagccacagcacagttcatggggagcaaggaacagtatccagcttcataaagcaagaccctgtctcacaccggaaaacaggctcagaagttacccagctgtttcactcaggcacctggggttcttgactattcacagaaaccagaacacccgcatctgcttcatgtgatgagggagcttttttgagtcttattacagggagagaaagtgaga

SEQ ID NO: 94284 - DNA, 1046 bp, Homo sapiens
ttcattcctttttgttgtatttttggtgagtttttttcaagatgagaaactctttatcaggaaacatttgtttaaagccagttacatgattatatatattttcttagccttgtatgtgtcacccagttatgagcttcttgaaaataagtttccacttctcccccggtgcctaaaataaggacttgtacaaagcgtgtgctcatatttttttcttaacaccagattaggaagcaacaaatttgtatagatcatttgacagtatgttcggcctgttgtgtggtttgggcagatttttgggtctctctgggaccatggcttactcctttggaggatgctaaaatctctttatcttgtctccttcacattattgagaactgcaagcaaactctttttagcatagttaggaattcaggaaataaattgatttgtattctgtatttcaagattctctacttccttttttaaaaattatttttgttaccattctaatagacataggaagaatcgtgagacagccagtgaacttttgatgaggttgaaggacaacagggatctacagaaattcctgcaagattgtcaagaggtatgttactctttaatccctctattcctgtgttccagtaatagcaattgccagccagcatttagcacaagagccttttgaattataaaattaatgaaaccagaaatccatagcacccatttgactcgcaggcagggatacgtggcacttcatcagttctccagcctacaaggtacagcttaattagatcattataatctagactattatattaatagtatagtactgcactgttcattacagtagacaccagccacaatgtctttatggttggttggctatttcattttaaattaactataattacataaaactaagagcgtggttcttccatcactagctgtattttaagtgctcagtagccaactttgactagtggctaccatgttggacaacacagatatagaacatttctgtcgtcaaaggaagttgtattggatattgatgtcctagaatattgtgc

SEQ ID NO: 94285 - DNA, 1740 bp, Homo sapiens
ttagcattcagtattccgttgccccagttgagactatttcagcatgtaacatttattgcttaattcccatgaaacccttgtaatgtacacaacctaggggtcgttgttgattttattgagcagtaacttcatgtggaaagactgtgtgtattgagtgaatggttaaatcacagatcaaatgtcctaggtttgtttttcacagtgacattttttctgtagcaaacttgtttatttacaaccatgttggttttgttttccaggaaggaatgcagctcatttcagaaaagcctgagacggaagctgtggtgaaggagaaactcactggtttacataaaatgtgggaagtccttgaatccactacccagacaaaggcccagcggctctttgatgcaaacaaggccgaacttttcacccagagctgtgcagatctagacaaatggctgcacggcctggagagtcagattcagtctgatgactatggcaaagacctgaccagtgtcaatatcctgctgaaaaagcaacaggcaagtggacaagccatcatggacttgggtgtatttctgttttacagccatagtccttagagtcttttctcacccactgcattatcaggagtccaccttccatgggaaggcatttttaacccaaaatattacttgctctaacagcatcgtagaacatttccagaatagaaagacacttgtccaaactagaaagacacagtattaggagtattgggtgttggctgtctgtgtatgggattgataattttcttagttaatgggtattatcaccgtttaacagttaaataaatgttcatctcattcaattctgcattttacacgaaagaaatattctcatactttgttgtttaacatcgtgatttgtgacagttatctgagttgttcaaggcactttataggtaataaaaataactgtttatattatatcaccgtagagggctttaagggcaaatgaatttacctcagatttacttgaaaacagttccattgatgttgaaaagcaagtcagtggcaaaatgtttgagtggctcccatggctggctttgcggtgtggccaagtcccaggcccagcagttctgcttagagccagtcactgcaaaagatagtctgtgctgagcgctgaggctgcttctctgccctcagatgctggagaatcagatggaagtgcggaagaaggagatcgaagagctccaaagccaagcccaggccctgagtcaggaagggaagagcaccgacgaggtagacagcaagcgcctcaccgtgcagaccaagttcatggagttgctggagcccttgaacgagaggaagcataacctgctggcctccaaagagatccatcagttcaacagggatgtggaggacgagatcgtgagtcgacccctactgcacacatggcttttccacgagcccccttgcctgtgctaaagcccacattctcacttctcagtcatcctcaccttgggccacgttggcaagctgagctgccaaagtccacgctctggatggtctaaagtttctttcccttttcaccctaaatgtaactccattggtcctctcacgttatctagggatactgtaggattttaatggccctaaaacagactttttaaaagtaatgaggactcacagtgagtttgaccttgaggatgaggtagagttggaaagactctccctagccctgtctcggagaacaagggcgtgcttccccagacagccc

SEQ ID NO: 94286 - DNA, 1812 bp, Homo sapiens
cccagttgtgggttggagagaggatgcctttggcaacttccacggatcatggccacaacctccagactgtgcagctgttaataaagaaaaatcaggtaagcctttctgctcgagctagttctgtctgataaataattgctctaaattatgagactgggaatggcagagagctttgaagccttgctatttctttctggccctaacagcttgacataagcagcagacggctgccatttagcaagcctttgtgtgtattttccgctccctccagaccctccagaaagaaatccaggggcaccagcctcgcattgacgacatctttgagaggagccaaaacatcgtcactgacagcagcagcctcagcgctgaggccatcagacagaggcttgccgacctgaagcagctgtggggtctcctcattgaggagacagagaaacgccacaggcggctggaggaggcgcacagggcccagcagtactactttgacgctgctgaggccgaagcctggatgagcgagcaggagctgtacatgatgtcagaggagaaggccaaggtgagaggaggcgggaagcatccctgtcccaggagagcctcagattcaaaccctgggcacactttctgctggcggctctgtctgtataaaaacttcccttgtagcctttgagtgttaaggggacaccatgtgcatgaaggtgtctgaaatccagctgctggtttccctttggtgcagcattttcttatctgaatcctagtgtgccattaagaacaggttcatcctttcatctttgaaatatgccagagtccttcctgctgtctatttataggttccctaaactttacaaaatacaggatggcttggagacaatttgaaagtattgcaaggttccaggaatgctgccatttacatacttgagggaccttgaggaattccagcgaaccaggcacacttggtctgcccaagcttttctctgagaggggccctgctcattctgcgttctccttgtgtttatcttctgcacaggcttctgtggtccagtccatatggaagctcttggaacacttctgtgttccactgtccgtactgcacctctggagtttttctttctactgatccttcctcctaccctgctgagcagctggtctgtcactccttaaggggtagggccagaggggaccgctatggttgtgatgttctcctgtctttgcaggatgagcagagtgctgtctccatgttgaagaagcaccagatcttagaacaagctgtggaggactatgcagagaccgtgcatcagctctccaagaccagccgggccctggtggccgacagccatcctgaaaggtgagcgctgcttcatgagtgtgagacccggctctcgattcctctcagttagggtctcttgctaacccccaccaaaagaaaatgtcagcattcatcatgacttgctggtaaggcaaatctttgagaagcatttttaaaacagacccatcatttaaaacatcctatcatgattaggatgggtgaactgttatattaggaaattgctcttgtgggttaaatatctcccgttggccaaggctctcctgaaagaatattggtgtcgtgagtcaaaagtacaggttgactaggctgggcagtcaacgtaaagtggcttacacttgtaatcccagcactttaccaagccaaggtgggaggattgcttgagcccagggggccaaagaccaatctcggcaatgtggcgaaacctcatctctacaaaaaatacaaaaaatcagctgggtgtggtggcacacgtctgtactactcagctattc

SEQ ID NO: 94287 - DNA, 2801 bp, Homo sapiens
gtccctctggcagcatggtaccagagaatgcaagaccactctggattttgcattaacttattttctcttttgtcaccttcctgactgggaagattttgcattaacttttaacatcaaaggaaatcctgatttgcagagccagaggtgcagagagaattttcccctttccccgctaaattctcctgcccccactattcactgcagcagaatgaggcactacccatccctagtgtaatagtagggataggtgaatgtagtttacatattggctcttttgtttacatattggctcttcacgacttcaaattgtggccaatttcagaattttatttttcatgctaagtgggttaaccagagtttcctttgagaaatatgatgtaatatgctctcccattatctccacctcatttgtttttcccctgaagaaacttgacatttaagatcctttttctccccattgctccttttctttttcagtgagcgcattagcatgcggcagtccaaagtggataaactgtacgctggtctgaaagaccttgctgaagagagaagaggcaagctggatgagagacacaggttattccagctcaaccgggaggtggacgacctggagcagtggatcgctgagagggaggtggtcgcagggtcccatgaactgggacaggactatgagcatgtcacggcaagtacttgaggcagtgcatgagttggttgtgcagtaagcgatggtgtggaaggccatttgcattccttgtctgtgagcagataaaatgccctggactccaatcagaggtcttggggtttagttttaaggtggtgtttcttttataagctggtgactcgcatttaggttggctaacctctctgtgcaccccttcctccggtagtaaaaggaggtggaggtagtgcctcactctgctgcagtgagcaagaaaggaaacccagttgctaagaggttctcgagctaagatctattgttctgaagtcatgagtattattggctacatcttgcttagaggcagtttctttccaaagggtattcatgtgatcaagaaatacagagttcacagtgggctctctgatttccttacccatccccgtttcagatgttacaagaacgattccgggagtttgcccgagacaccgggaacattgggcaggagcgcgtggacacggtcaatcacctggcagatgagctcatcaactctggacattcagatgccgccaccatcgctgaatggaaggatggcctcaatgaagcctgggccgacctcctggagctcattgacacaagaacacagattcttgccgcttcctatgaactgcacaagttttaccacgatgccaaggagatctttgggcgtatacaggacaaacacaagaaactccctgaggagcttgggagagatcagaacacagtggagaccttacagagaatgcacactacatttgagcatgacatccaggctctgggcacacaggtgggtatggcagccacccaggggtgctggggaggctttttctccatagaacatctttgggcatctgtaagtatctccctgttccttggctcttcaaaagaattgccccaattaagcacatacatgtacccactttgtaatagtgctccatttgggagaacttatcagtccataaaggtctacgtttgccacatttgtgaacattagatgagtgcccccatgattaaaataaataaaccagatgcatacacagatgtttgcaagttataggcctcagcaagtgtttttattatgttagcatatccatccagaacaatttccaaaataatattttactatttttcatcaaccaggttctaagttgtatgtctggaaaaagaaaaaaacaggattctgacattttatcatgcctcgtccccagtatgaaatgactggcactaagactttgtttaaaagatgtttgacaaagtagtaacaatataacagaatctagtgtaatcactctctagtttcctttctgatctctgcacagtttcttgtttagtcttatgccttttagttgaaaaacaaattgtattttttttcttctaagtttcatggccctagagaagaagccaattttattaaagatgttatccctgattatgtcaagggttcttgttgttaagagtatattgagtatctaagttatctcagctttttctgttaaaggccaaatagtgtttttcgctttatgagatacatactctgttgcagctctgccctctgtcattgtagaataaagcagccatagacagtgagaagatgaatgagcgtagctgtgttccaataaatctttatttacagaaacaggccacccagatatggccttgggctgacccagtctagtgcctcagcctctaaatagctttggtatactttgggatttgttctatgaagggaccaccttgatagttgttctctctcacttccccttaattcttaattcctgtcactatgatggcaagtttaatttacctctctaagctttggttccctaatagtttaaggattgaggtgcaaaacatatgacatagtgagatctctagaaatgttttctaattattattatataacaaaagtttagggaaacatgggatatctagagatagaattagaaaacaccttgacaacataggtctttcctctgcacctctaaaatcatttacttttagaactgcaagacacttgagagacagtggagttgctctctcattttttcattaaatcccttcacctcattagacttagagatgaggaagccaaagaagggtctcggaa

SEQ ID NO: 94288 - DNA, 1149 bp, Homo sapiens
gtcattttcaaaatgtgctcttcatggcagtttcccattcatcataaaaacatttatctttaccccgagatagcagattaggtatttattttttggactgtatctgaatatgtcccactcagatatcccaggctgcctccaggggactttccctgactaaactctcctgcctgtcttcctgtagcatttcatttgttttatcattcataaagaacttaataatgtagttgaacagatttatagaaaacgggtttttgtgacttggatctccccagtgaaattgagggctccttaaggggcatgggccatattttgactctgtgctccctttagtgtatgagcagaacagaatagggcttggggtgatggtgggaaggccgccatgggctgacctggctcatcccctacatggcttcacaggtgaggcagctgcaggaggatgcagcccgcctccaggcggcctatgcgggtgacaaggccgacgatatccagaagcgcgagaacgaggtcctggaagcctggaagtccctcctggacgcctgtgagagccgcagggtgcggctggtggacacaggggacaagttccgcttcttcagcatggtgcgcgacctcatgctctggatggaggatgtcatccggcagatcgaggcccaggagaagccaaggtaacgctttcagcccaaaggaaattggacttattggcgcttggttaaaacacaggagtcttccagagagaagcaggagccttgaaagcgttcctgcctgagcgcttcaaggccagagtgggggtggggcggtgcttggagtgcggcaccactgcttgcctcgtgcacttggctcgtgcacaccatcaccagggaatgtgggagcctggggttatcaaagcctgtcccattctccctactcctggctcccttgacccacagtcactcaggccctcttgcccacatatgtgcttgaagtaggaccttgggcttcaagtagccacgtaccttggacatgactaactgccccgtctttgcaatgagatgacttttctgagttatttttctgtgcctgctttttggattaaagaccactctatccctttccatgcacattactaaaggtgtcaccctcaacatctgctttaatatggtgtccttgggt

SEQ ID NO: 94289 - DNA, 1783 bp, Homo sapiens
attgcggcacctcttgctgcttctctactttctagaagagagtctttctgacttgcatttcaaagtaaaagtttgaacagaaaaccattgctttttctggcacccacctagcaaccattttgaattattcaggcacacacacaaaaacaaaagcagccatattctacagtttggttacctggctggtactgaactgtgctgtcactgtgctttggctccagtggcccagcctaagctcagggagtgattcagacctgaaagaccatcagtttctttcaaggccatcagtttctttcaaattaattgtgtgttttaaaacctacacattttttgaaaagcttgatctcctaacggaggcatcgtttgtctaattttagggatgtatcatctgttgaactcttaatgaataatcatcaaggcatcaaagctgaaattgatgcacgtaatgacagtttcacaacctgcattgaacttgggaaatccctgttggcgagaaaacactatgcatctgaggaggtaggttgctactttgctttggagctgcagctggcgtcaagatgtaaaatgactttgttttatatgtttgtgtgtgtcagagatactgtgtttacattcttatacacacacacatatgttttaaaactcctttcctgtgcgtctagaataatgcaattatgcaagactctaggcccaggctggtaaatctctggcacagaagacaatttttgagggctacaaaatggactccgcatcctccccaatcagtactctttctaggtgacgccaatgtccattgactatgccctagatcagtttgctgttgagtgcatggttggtgattctggttaggatggtggtaataaagaggtaaattattaggtgcgtgtgtggccccctgcatgggaatgggcatcctctccaagaggtcagggctttgtccgtcttgctgtccctctcctgaacgtgtttgccgcagggagcctcctcacgacaaaacagctttggcagggcttccgcgccttcctccagccccttctggaaggagcagtgctatgcttttctttcctctcccagtcctcagacagactgagcagtccttagatatctcccagcttaatggtggtctttgcagaaaatgtatttttctagtataaaatgaccccatcaagaggatgtggtgcattccattaagatgtcccggggatcctctttttcatacagatcaaggaaaaattactgcagttgacggaaaagaggaaagaaatgatcgacaagtgggaagaccgatgggaatggttaagactgagtaaggatgtagtttatctttctgctcttttgggtatcaatggaaaacatgcacgtttattttcttgctttaattcattaatgttatcatttaaagattgttcgagttgtagatgcctttttagtgccccgtttcaccatttcatggtaaatactacttttaagaagcttcctatggcgtagtcatttttcacctcttgattgatctcagtgtcataggtgggatttggatgttctttagggatgacagagggcacctccctgggagaatacagatagaagccctctcccccatttgtcttcaagaattcttactacagaatcaagttggaaagttgatctcattaagtcatatttggtgctcttagtggaatgttgataacataataaaaactaacatctattaaaattttgctgtgaatgaggcattgttctaagtggttttttaatgtatttctgtgtttattccccaaagtga

SEQ ID NO: 94290 - DNA, 3089 bp, Homo sapiens
gtagacctgcgctgagcagtatgatagctgctttcccacgtgtggctcttgagaacttgaaatgtctcaaattgagatgggcagtgaatgtgtgccgtaaaatgcacatcagatttagatttagaagaaaaaagattgtaacagatctcaatagtttttttcatattgattacatgttgtaataattttatacatattatgtgaaatacactattaaagttaatttcacctatttatttttactctttttaatgtggctactggaaaagtcaaagttgcaagtgtggctcacattacatttacattggacagggctaatttagagtagacgatagactggttatgcaggtagccatcaccagagggcagcagtgccaagaggtaaggccatatgactgcccggcacctcctggtcaacgtgtactaactcatggtaccctgtgcagttctggaggtccatcagttctcaagagacgccagtgtggccgaggcctggctgcttggacaggagccgtacctatccagccgagagataggccagagcgtggacgaggtggagaagctcatcaagcgccacgaggcatttgaaaagtctgcagcaacctgggatgagaggttctctgccctggaaaggctgactacagtaagtggccgctgggccctttgtctgttggtgccctgggcagccttttcttcctgcttgcctcttagaccagggaattcacacgattgcttgtttttgttttttgggtttttttcaagtagtgaagatcatcttaaaatgggtggctcctgtggagcaggacctagggagagggtcaggactgttacctcctcagtcacatcctgggcacctggatttatgatcccttatagtagcttcctgcctgggggttgattggtggtgtttgcttttttcttcgaatctttcattctcccctatctcataaaagctttgttctcaagggggcatggcctcaaaattttcttcagaatttcagaattagaattcccatcaaatggaagcttaatcctagcctgttgttaagtccccagtcctgatcccctcttctgtcaacataaaggccttagaataggatttgtgcactggtgtttcctctcccaagacttttgcattcctggtagaaagctgatcctttgcagtgtacaaaaatggtgtttctggtttccagttctgggtgtttaaaatgtacctgcatacatttgtgttaaaacagagtacttctggtacatccatatgactcatgaaatggctttgtttcagttagactattctgtggctttttaatgtgttgtttgggttttggctgaacacagatccccaccacagcacaagcggcttccttgagaattattgcagctctgtccctggtgtttgtctgagctctcctggggagtccagcatgaaccctcaggctcaggtacttttctcctcagcagagttgagagttgcatagttactttagaaattaaacccaagctcccaggggtcctacaaacaactcacaggaattttgccagcccatggaatagactatttcctgtagttttaggttgtagctgcagttcctgtgaacctaattccatttggctcaggatgttagagcttcttgtccagtgtggtccagtttagcaaactagacaggaggacttcctgggttcctagaacctttttctgaaaagaggcagagtttgggactctaccaaacatcactctattttctcttagttggagttactggaagtgcgcagacagcaagaggaagaggagaggaagaggcggccgccttctcccgagccgagcacgaaggtttcagaggaagccgagtcccagcagcagtggtgagtcccagcagctccagaggctggacccttagcctcggtggccaatgaggtttatggggcatctttctgaagccttgcattgctaggcctaaccacatgccctgcctactgattgcttccatagactgtttaaaggctgtacagttatccctaaataaccttggagggcactgatttgtccacagtcacataggtatgtaggtggcagaagtagaatgtagacagtgccctttctcatcctgtgtgcacacacacaggatgctcagaacttccatatgattaaatgcatggagtgaactgcccagattttaggccagtgattttgtggtgatgcgttttttgagagttctaagtaacttcacacagagggcagcaattattctctacttccaaagggctaattattttgctatggtaagagttccatggcaacctctaatgctgcctttatgtggtggagcggggcatagggcattcctgtagtcgtatttttctgtctagagtctatttaaaacacttggaagtttcagatttaaaaagaattaaattatgtgaaaaggttgcacgtaataaaattgagtgatgatgttctcccaccctttcttactgtttcctctttctcctcttcttcctttcccttcctccttttcccctcttccctaacagggatacttcaaaaggagaacaagtttcccaaaacggtttgccagctgaacagggatctccacgggttagttaccgctctcaaacctaccaaaactacaaaaactttaatagcagacggacagccagtgaccagccatggtctggactgtgaagttcactaccatttgtcaagaatcaccctttccaaatcctctgggttttgactttttggcttccacttcacccaaaatgttaaaatttttacttaattcatagccttccttggtttcatatttgtttgcatttaattcatgtttgagtctcttaactgatggatgcccacttgccttaaagcagcatacttattttttgtttatttattgtgagctttttactttattaagattttacagcgaaacccttacatgagtaattgaaatgaaattaaatgagattacagcataatgaagaagaaaactagaatctaacaggtatgacacattcagttattctaacagggcacagtactgtgctatatgtagccgcctttacagatgttattaacctatagtagttta

SEQ ID NO: 94291 - DNA, 3062 bp, Homo sapiens
tgtcacgttgcattcatgttcacctcctgatttaagtatctcgggtgtgcccagccactaaagcactctggactaatcgctaaagagaagcaacgtggggggtggggttgcgagggatgtgttcacatgtacccatcatttgatcatagcactgtgattgcttttgatgtgtgtctctagtggtgtgctgtctgttggcatgcttaaagcacatgtccattaaaattcattttgttccttttattttccttgttttcttggttagtgattcatttgcataaacattaatgatctctgcatactggtttggggttttctctttccttctaactctaaagaaaaaatttttgctgcagaattatcctcagaagaggcttccctggccttcatctaccttgcagtctgaccaagtatgataaattttagccgttttcaaggaaacatctctctacccaggtcattgctgtcactagcagctttcaagtcaaacctgcagcactaaatttttttttatcctggtttctctacatactaaccccatgtctctctggactcacacctggctcaggccttccagaccaaactcatacttcctcctcaccagaagtttccgaatctcacactagagaagatttgtcacctttaaagtccactcacattattttgactcagggttttgttttttgtctatttcccctcctgcaactctcctttaaaagtgaaaagagagagaatggtttaagtagtctgttgctcataagcacgtgtctgcagtctgtcacttgcaaggccttggtgatcaccatgcagcacttgtgcgcacacacacccccacaagtcttttttcctaataatccattttccacattgccatgagggtaaagggttccaatcaaaaccaccattaaactgcatagtttctagtcttccctcagccctgatgctaattatgatagtttgcatagacataacttaaacttgtgattctccctccttccagagctttttgtagccctttttccccccaaaattagttttgttcaaaatcaagcattgggcccagccattaagataagacctaataagtgagagatacagttcccaagagtttacagatccaggtgttcacatggtggtggccagtctaccgtttatcttgtcaaggttgttactgctaatttggtgtcactttggtcttgggcagcagtggtgggcgacgtatctaatgagcgtgccattgacttctccatgtttgtctgtgtacgaggggtgcaggttgtctgtaatccactaaagtgtcagccacacccagctttagtaactcgctaatcgcacaccctgggtgtatcagccaggggctgctacagttaatggtacacagttgatggtacacaggctgaaaatgataatgaatcaagaccctactacatttccaaagccgaaaagccatgagggttacaatttaaatgagcttgggaaggaacgctcccgaagacgtctccagcctgaagggtcagagccgctggaagcctggctgtctctgggctttctcgtctcagtgcagcaaggcaccgtgatcaaccaacccgtgatggggaaggccctggttctgtctttgtttgggggtaaatagctgtgtggtgttgagtgactgtgattggcttttccagctcctttaacacaaactacaacccactcacgatacaacttcggcagatgtggtcaaattgatgtttgttgacttgcctcatttccttccagctcttaagttccaaagtctaactgggatggtagatgtgaaatgcatgattgtcgtcctaatttctgcatgtgtttatgacaatgtgttgaggggagggggaggagagccagagagcattttcaggaaccgaggtctttccttgtcttactctgggggaatgccatgtagctctgatagagttgtctatcggtctgtttgtgaatgccctttcgcttaaacttccagcccttctggtggcatccttggttgtaaggtggctgctgtataacgtccactctctttcatatttaatatgtgtgattgttactgttgtctttttgttttaaagtaaccataagaggagatgatctgagttatatttattgatcagaggaatagagtgcagtaaaactcatactggcatttcgcttttctcatttccctgtaaatgggcgggtattaatccattcccaccttctaatgtccttgatgtccagctggctttgtgggtgtgcaatggttttactgtactgcctcgatctgtgccaggcatttatacacagccacatgtgcgagtcaggtagagcgtatgtggtcacccccatggctcacggagttagctgaatggcctctccgctgtccctagatggcagaaacggtggacacaagcgaaatggtcaacggcgctacagaacaaaggacgagctctaaagagtccagccccatcccctccccgacctctgatcgtaaagccaagactgccctcccagcccagagtgccgccaccttaccagccagaacccaggagacaccttcggcccagatggaaggcttcctcaatcggaaacacgagtgggaggcccacaataagaaagcctcaagcaggtaacagcagcagaggctgccacagtaagatgggaagtcagcctgtgaagggataaggcgggccactcttgaattggaagagaagtatgtgctcatgtagttttattcctttggtagcttcctggacattgcattcttcttgggctgacgctggaaagcaggagtagaatgctggttattcactgagagaagaagagttgagtttggatgggagtagctagaaggggctttagtagttcatctagagaaggaatttgctagattgagactgaagagtcttctttactttaagtgattgatttcatttaggactccttgtgggttttttgtaaaaagccattaaccatttcccctgccctgatctccatatcagcctttatatatattcattgtctctcaacagccccaatttttttatttaacagatggggaacag

SEQ ID NO: 94292 - DNA, 2181 bp, Homo sapiens
ccagctgtttaatgggtgtgtacctcacctcaaggaaagagagagtccattgatggaaaaacaacacctgtaatgctttaaatgtgaaaaagcaccttctagggtgggatctgaccacctcacagattgagactggtcttccagctgttacaagtttgtagggccacatactagggtgatgagtagaactgaattctcatgagaagctgaaccaggttccctctcctgtactgataaggcagaggtgcatttggggacagtgcccagaagtgactctgcttacccctcagttggccagatgcgccattcccaagccttggagccagaacccctcatgcctactcttagttgagtctcacctgtgtcccttcctctgtccaggaggaaatgaacacatggatccaggctatctcttccgccatctcctctgataaacacgaggtgtctgccagcacccagagcacgccagcatccagccgcgcgcagaccctccccaccagcgtcgtcaccatcaccagcgagtccagtcccggcaagcgggaaaaggacaaagagaaagacaaagagaagcggttcagcctttttggcaaaaagaaatgaactcctttccttcacctcctgcccttctcttaccttttcagtgaaattccagcatgcaagctcagaaccaacacattactctctgtgcctaatgttcctcaatgtggttgatttttttttttttttaatttatagagcatttcggggggggtgggggaaacacacctaaacactttatctccaagttacaaaagtttgaggtgcagagggaaggccagattttttttttaatgaaattatatagattagatctcagtatttaaactgttcctcaattttgtgaggctgtgttggaaataacccgcctctagtgctgttggtatgcaaggcagcggtgcttaatcaatatttcctgtgctcaccagaggcaaaatgtaccaatatcctgacaccattctctctccatttacttctggtggttaccctgactcttgactcttagaagtgcccgagatggggctaacctttattaaacagatcgcatattatgatcttgctgcagccacagtgcagctccacattaactctacagaccaaaccatttgtatctggcatcacttactaacacacgacatgcggcttttctgcatcaactgctatgacggttaagaatgtcagtatacaagaaggaatagaaaactgatactgttttaaataatctgtaatttcaattttttttttttgctgaaatacattatattgtacgtttgagataattctagtacaaagtataataaaactagatgtataataaaccctttaaatcattggtaagtgtacaagtggtggaactgaagcatttactggacaaagtaatgttactctaatggttacttgctcgtgcgttgccacactgtgttataatttgcttcatttccttgctatttgatacatagtgtgcatttctctgtcactgtaactattgtaatgacaaattttcatcttactgcacaatcaaaatgacattgataggaatgaactccagaggctgggcctgaacagggaggtggtcgctcaggcctggtgctcagtcgtacgacctgtacctctcaacttttgccctatctgttaaatatatgctatgtcattaaatgcttttaaatctagcacggtgactagttgttgttcttcctctgctgcgtgtgcatgcccagtagggaaactgcaaagggagaaatgacaaacaagaaacattttacaaccagtctgggctcacttttgcattttttatgcatgtctggtgcacaagctttgaaaactacagcaaacagtaataaatgtgactgttttgtagttatacattcaggctttatcttttatttatgaaaaagttaccagagcacttgtgaaacctgaactctgagataggggttggcaaatttgttctgtaaagggacagagatagtaaatattttaggctttgtaggccgtaactgtctctgttgctcaattctgctgttgcgtaatacaaaggcagccattgacggtatgtgaatgcctgggcatggctgtgttccagtaaaactatttaaggacataaatttgaatttcatataactttgacatgccatacaatatttt

SEQ ID NO: 94293 - DNA, 1032 bp, Homo sapiens
gaaaatctgttgaagtgtttataagagggaagtgaagtccagatgtctgcagagattgtaaggcagcatctgccagctctaactaaatttgtctttcctggcctagaagagttttacccaaacatacagaagtagggcttcgagggaagacccctggagaaagtgacttttgaaggctgaagagcggtttggcagggaggtggaaaaagaatggggaaggagggaaagacagggcaggaacagcttatgcagaggctcaggggcttaaaatagcagggtcccttgaagcaagaataagtagctcaatgttaccagaatgacagatgagagtgaggagggtacggtgggagatgaagctggaataagtgggctggagctagatagctaagggatttaccgctcattccacaagttatggagaccagtgagttcatttaaacaaggcaagagaaggccaatttacattttaggaagatcattgcaggagtatttcactttgtttttattaaccttttcttctgattcctttctcctcttttccttcaatgccagacttctcagaagagggagcgtggcattgtgcatggggattggggtcccatgggattgaacactgcatgggctctgtctctaaccagacatgtgactttgggcatggcagttaccttttctgggcctcggtttcctcatttataaatccctaagatccttccaaaatctcttctaagttaaagtcatgaggttcttagttgtctccatttactgcccccgttttctttatctctcattcacttttcaacatagtgaactggtttctacttccgccagccactggagttctctggagcgacttcagtgacctccattgctaggtggagccacatcgtgcttaacctcttcacagcactgggtcagctgatcaccttctcctcagtgcctatccttttctttcctcatcattgtggtcccctggttttctcttacctcccctgccctttgcctcctctccctaggcctacctgatacatacag

SEQ ID NO: 94294 - DNA, 1101 bp, Homo sapiens
cactatcaaattcaatttgttttgccaaatgtaattttatctgggttttctttcttatatgaagaagtaagtttctatctttcccttatacaaacaaaccttgacagagaatcactgcttttgtcctggaattcggaagatttcaaagatgggaggtgtacatgagatccattctctctccccattgctttgaagttgagggagcatttttttttttttttttttttttactagaaaaagaatctgggacagactgaaagatggaagttactctgtgtctgggaaatacaaacctcctgaatctagaagcatgaggcttagtatgatgaatggtgaccaataatgtttttattaatctgggaagtactgagtttggtaatcagtatctttgaggtttatgctagtgaagttaatcccaaggcatttgagaaactagatttcagcttctctgctttatggttttaattccactttattcttagtggtagtgcagccaaatgataataactctcatcattgttgagaaattgttttccatatggttatttcatctgagaatatgattttaaacagactaccaaagtcatagtactcccagtttgtggaacggacttgtttaatgttataaacttgaattttgcagttttgtgaaccaaaaaatatgataataaacaatacgctttgtttcttttttattaatgcttaactgaaaaaaaagcataaatgaaggtgcttatttttattaattggggaaataccagggattaaacaaagcttagtccttcagtgtttataatttctggtaagaaagttgaataaggtatttccccttttcagagcagcttactagttttatctgaggtatataatatgtgaatgtaattaaattatcaaatttggttgatcatttaaaaaatcacaaaggcataaaagtggacatttatgaatcacattgcaatttggtcaaaagtgattctttcactaacataaatcataaactctgtggatatagcttgactttaatttgtctgaattatgatatggaaatgtttaaaatggtcaaaaatagttgaggtacctatgctttaagtttaaaatata

SEQ ID NO: 94295 - DNA, 1035 bp, Homo sapiens
cagtgtatgaaatgttttgttttttcatggaagaaattttgacatttgtgttgttttcatacagccgatggaaaatgtctggtgtcggttggtttagacgattttcacagtattgtattttgggactggaaaaagggagaaaagatagccacaacaaggtaagaagctgccgggatcttacggtatcctgctgataccacggttcagtaaaggtcaatagttttcattttctggtaagatttcatcttcaaactcaggtgaaattgacgtagaaggcttagcacctaagtgaaaaaatactgcagtatttcatggtgccaaacctgacttagagcaggtcatgtttgttgcggtgaatcagaaaattccgaaatcctctgcagagagtcattcaccgcttcattttgagtggtctgtgtaatctgtatcaaagcacttcagcaatagaaaagcagcttttctcaggctggtgccttgccccttgtttttcttctgtcctagcatctggtgaaggattgtcaatgtcaccagaatcagaagcaccgtttgtcatgaggctgcagcatgctggaaaggaggccccaccgtgtgcatctgccacttgctttcaaagcaggcaaattgtttccctaatcttccgtcttataaatagattttttgagaccgactgctgtttatagaccacctgtcctcccttaccccagccttcctgcctgctgaatcagcactaagtctgaacacgactttccactcctacttacattgagctcagctgtttgcccaaccctgatcaggggtcaaaatagttggcagccaaggcccagcaatacaatttgttgccgaggcgtgttgtcagtgtacctccctgctcgttcttctctgcattaatgatgtcctttctgtcttgcgatataaaatcattttgaagttaatagccttgaaccccaatattcactttttaaagtaatattttcctctacaatattaaataggaaaaaagttttgtggggatttaatgaatgaagatttataaat

SEQ ID NO: 94296 - DNA, 1083 bp, Homo sapiens
gtcttttgaagctggttattgtgcttggccagggtaggtttcagtaagtgtgcctggaccccctgtgccctgggaaactgccggtgacaaatgtgaactgattcacatttatgagaagtttgttttcacttagtcatctcgagcaatttttacaacttcctgcttgttttcattgaatcatgtccatttttaagtttaatttggaactttctgatgctggtgttgagtgcttcactgttggaaacgtgacttattttagctattgttttcccttgacgcttcctcattgccattgctcacccaatgcaggtgatattacggaaaccccaggtaaggctgttccatccgtgagtagtttgaatctgcagagcaaaatcatgtcattctatcatgtttgctgattgtatcttgccgaattgcagatacaaatcattgacctcaccagtttccttcgtataaaatcctctgcaagtgtgtgtgtgttgaacataaatgtccgtagggctctgcctttaaaagcaaatttcctctagtctttctcctctggccaggtcaggctataggtctcttatgcccaatgactgtaacagccctaaacatttgtcttaaaaaaggcttttgcaggccgggcggcagtggctcacatttgtaatcccagcactttgggaggcgggcggatcacctgaggtcaggagtttgagaccagcctggccaacatggtgaaatgctgtctctgctgaaaatacaaaaattagctgggtgtggtggtgcgtgcctgtaatcccagctactcgggaggctgaggcacgaggatcgtgtgaacccaggacgtggaggttgcggtgagctgagctggtgccactgcactctggcctgggcaacagagcaagactctgtctaaaaaaaaaaaaaaaaaggcttttacatgaacataagcatcgccttggctctgccatttgtcagccttacttctttgtcatgcctctccacactcagggacaacaccttccatccacatatgggacgccatgaccaaacacaccctctccatgctgcggtgcttccactccaagggggtgaatt

SEQ ID NO: 94297 - DNA, 1030 bp, Homo sapiens
tttgagtgtttagcacagaaccagggatcacagcatgctcccatgcctacaaaggcctgcaagccctgcacggttaaggccacttcttttttatattaaaacaagtctgtatcccctgcattggggtgaccaattcatttacgtcttttactcctagcttgttcacaattgggttggtgctgctttgaaggggtgttagcacttcacagggagctgctggcggtactatctcaagggctataagtgccagaagtagccagcacagcaggctggagatgggggctcccaggcaggccatgagaaatacacagtgcttttgagtgggaagtgggttgagattctttataggtgcctttcttacaacctaactcagaccaccaggaagtatcagaaggcctgtatttcatctttatcccctcaggagttttgcttgggctgaatagaacccagtattcatgctacaatgaagctcatcagaaatggggaagctgagtgagttagaatgacctagacctgttcctctatactctatttagagtaaataaagaaattcccaacactggtgatcaactgggagttcttaaaaggacatatagatgaatttgcattctaacctcctgattatgcacaaaagcccatgggctgccaagagcttctactcaaatcagccatctcgggtgtcatccacctgtccctttcccccagcagtgcccagagtagctatcacatgcccatgccatcccaggacagctccagtcacaaccattgggttgacagtcaccaaagagtaaatgccttatcttggaaagtacttgccttcatgaggactcatggaatttcctgtttattagccccacatcagccctcctcatgcccctgggagaggctgacccacgggatgcctgagatggggagggagagctggccaggcctgtggagtaagaactgggtcagctacgttagtacctgcagtcgtctcctccagtgctgaccacatacttgtcatcataagagaaacggatgttcgtca

SEQ ID NO: 94298 - DNA, 3731 bp, Homo sapiens
ctaaataatcactgtagctggtggcatcatgtttgttacctactaagtaggtcaaagtgattgccagacatacacatgaaggccttgaattagaaagcaaaggaactgatgatgaccaatgtttaacaaaattcagactgactttgtgcctgatccttcaaaggctagaggtgatatttttggtacctgaaacgtaatttccctgataagtactctttgcccaattattgcttatcagctgagatattaatgtctgaattattcagctcatatatcttcaagcactcaactagttcatactttgaaatcaattctaatagacaattctcataacacctttatagtcttcccatttaaaaggtaaatgttgttagggctggaggggtaagatgcacccttggtatattgtctgatctcagcagaatcaactacttggtagtgtagtccagagaaaatgggtcaaatctattaattattttaggattttgaaattcataattgagactcgtgacttaatagtgaactgctcatggtactttacccagtcttcaagttgtatgccttttgtaggtaggcatttagatgggatgcttttgaaagcataattaagaaactttacttgaattttgtttataatgggctaatgttattttcttatagtttgcagtgttgatgtgggtatttacctatgttggtgccttgtttaatggtctgacactactgattttgggtaagtctacaaagccattgggatgaaaaattgctggaaagattgtgtgccaggagcttagacattttagtggagaatattctcattgtatgaaaagtaggggatgaaaatgtgggccgggcgcggtagctcatgcctgtaatcccagcactttgggaggccaaggtgggcggatcacctggggccaggagttcgagaccagcctggctaacatggtgaaaccccatttctactaaaaatagaaaaaattagctgggcgtggtggcgcacgcctgtaatcccagctactccggaggctgaggcaggagaatcacttgagcccaagaggcagaggttgcagtgagcggagatcgtgccattgcactccaggttgggcaacaagagtgaaactccatctcaaaataagtttgaggttgtattctctttaaataagttggtgatactgcttcccggtttattgaaatgctaccttagttgctgaagacagctcctactaacaaacagtgataaaccagataaagggtggctttatatgatggtgcagtcataaatctaaccagggatacctttattttatgaaatctcactgtgatatgatttgaagctagaaatggttcctagctctaataactgcagcctcacacagttcattcattcctctggagtggctcctcaacagcagatgcatccagagatccttatgtttttattcattcattaggaacactgcttggttatcttgagttgccagtttaatagttttttgagtgtttattcctcccaaatcattccgttctttttgaaaagttgtatatttcccttttcagctctcatttcactcttcagtgttcctgttatttatgaacggcatcaggtaatttcctaactaactgctgacttcagaatagagcactcactctattacatgggatttacggatgtattagtgcccattttcaatgtcttacaaaaatgagaagtgtgatggtttcttaagcctttagcttgacacatagtagtggttaataagattctttagcaacggtaataattcctttatacctctctttcaggcacagatagatcattatctaggacttgcaaataagaatgttaaagatgctatggctaagtaagtatttaaaatctgcagtgtttttactaggataaggtgtgctggattgtgagaacagtattttcatattgcaggcataatgagtaacaaatctctatcagaccttaagtgtgacttcagagttgccaaaagattgtttttctaacatttggaccattcgtttctgggtttattatgtgtttaaggctttgtttaaatctaattcatgaggccaaggtggcaaaattatagcttagaattaggcagctttaaggatttcatttattgtattagctgaataacatacaagtagttcttggaagatggtattttaagcagcagcaaacaaaactgatatttacattgactttttcattttcagaatccaagcaaaaatccctggattgaagcgcaaagctgaatgaaaacgcccaaaataattagtaggagttcatctttaaaggggatattcatttgattatacgggggagggtcagggaagaacgaaccttgacgttgcagtgcagtttcacagatcgttgttagatctttatttttagccatgcactgttgtgaggaaaaattacctgtcttgactgccatgtgttcatcatcttaagtattgtaagctgctatgtatggatttaaaccgtaatcatatctttttcctatctatctgaggcactggtggaataaaaaacctgtatattttactttgttgcagatagtcttgccgcatcttggcaagttgcagagatggtggagctagaaaaaaaaaaaaaaaagcccttttcagtttgtgcactgtgtatggtccgtgtagattgatgcagattttctgaaatgaaatgtttgtttagacgagatcataccggtaaagcaggaatgacaaagcttgcttttctggtatgttctaggtgtattgtgacttttactgttatattaattgccaatataagtaaatatagattatatatgtatagtgtttcacaaagcttagacctttaccttccagccaccccacagtgcttgatatttcagagtcagtcattggttatacatgtgtagttccaaagcacataagctagaagaagaaatatttctaggagcactaccatctgttttcaacatgaaatgccacacacatagaactccaacatcaatttcattgcacagactgactgtagttaattttgtcacagaatctatggactgaatctaatgcttccaaaaatgttgtttgtttgcaaatatcaaacattgttatgcaagaaattattaattacaaaatgaagatttataccattgtggtttaagctgtactgaactaaatctgtggaatgcattgtgaactgtaaaagcaaagtatcaataaagcttatagacttaaaatatgctttggtattttcatttcatgaaattgcagcagattaaaaatgcacacagtgggtaaactgcttcaaccagcgaatggtagcttgtgcttttagaagggtttttttcagctgatggtgcagctgtttgtttgtttactgtggaaacaaaagtcaacaaatgtgtttacataatcaaattttatttgacacataaaatgtttaagtgatgtgttttatactttgaaaataaattcatgcaccaatgttttaactcacatatatcatacagtgcaggatttatgaacatacataaaatcaaaatcataccatataaacgtttacaaataagtttttcatgacacacggacactattgctctttaaatatggttgtacatgtcatcattaatcgattcattgttcttccacatggttatttcaatgcaagatccgatcagcatgaagagtctagtacaagataggcagacatggttatcactctgcatcaccag

SEQ ID NO: 94299 - DNA, 1415 bp, Homo sapiens
ccaccatgcccagcctacaattatgactatttccatgtgaaaccatcttcctcagaaattgaaattttagagccgctcttgctagcatgtgaaaccttttccttgcttattgccttttggcgggggcagtgaaggaggagcctggcctttcaaaatgtgatcaaaaaaataaccaaactccagggctcattagtccttttataaacaccggtgtgaaatgatgggtatccgtgtgcctggtccaagtttcctggtggttgacttgggcgaataaaaataagacatgttctgcagagttctccttttaaattcttgtgtaatattccgtttgttttgctcctttgcaattaactacaaacttctaagtcctagaaaagatttcaagtatttatagagtgagcaacgatcattttcctagtcaaatagtatggcaaaaatcactgttttaaaaagttgtggcattaaactataaatcctccctcccctcgcttcccacccgcaattatgaaagaaaagcatatgacaatgcctactgggctcagcttttgggctaattgagtctgactgagccttcttagcaggttcctgtcttttgaaacctcaaatcccaaaaagctgtctaataattttacttttttagggactaagaccaggtattttcagcagaggttcttacttttctgtaattgaggcgcaactataatgttccagaacacaatcttaaatctgaaagtgagaggaagaaaaaaaaaaaaacggcctgagctccagaaatagctgacccagaagaacactaaaatctagctctcaggctcataggcagctgttaacattcacattttgacagcttcctttcaggtttcttgagctctcagaaaaattagaaggaagtgggctggggatatagagagagtccaaactaccaactaatgaatgaatctgaaggagacacagaagggcaagtagagtttagagtttgagagtgcaggaaagttttgaaatggtcagaactgccagagtaatttctgagatcttactaagcactctcccaccgtttgccttaaagataccccttcccccaaattgaaacatcacaaatctgcagagctctttaatcaggtgtgttatacacagtgaatttaattctcttattgccctggaagaaagataaaccagatgtggcccttgccccttttcagtaagtatttgttagatcttcattacattttaggcctccttcctccagtctcgatactgtgcaatggagagataagctttgacctcttcagttaataagtattggctataatgttgcaaagtatttgccatggaatcgtgtagaatttgttaagtccaaaatgagagcagcctgtttgcttctttaaagtgtttattgaccttattcctgccatgtt

SEQ ID NO: 94300 - DNA, 1109 bp, Homo sapiens
ctttgttaggaaaacgtgatgagacaacatagtgtcaactttaagaaaaaaaaaaaaacaaccatagtcataactaccatttactgagtgcatccttgtgctcagttgcattaggcacttttctcactgaattctcatgataatctccactttataaatgaggaaactaagtttagagggaagaataaataactttgcaaaattacctagccaggtaagtggcagagcatcagattcaagcccagatcagtctggcttcaaagtgtatgctttttctgtgctagtcagcagacagtgcatatcaaggaaataccccttactgctgagtttttatattgcccctaatttggaaacagttggcttttatagtagaatattttcttaatttcttacagatatataatttctgattgacatttaggggaaaatcactccaattagtgacaattatgatgtgttttgttttctagggcatatctggaatctgaagttgctatatctgaggagttggttcagaagtacagtaattctgctcttggtcatgtgaactgcacgataaaggaactcaggcgcctcttcttagttgatgatttagttgattctctgaaggtaagtttattttgcctttcatttttgatatacccagaatttagtatcaagagagttgagtgtaaaattctgttcttctatattcaagtaaatgataaatattaattaaatcacatggctgtaaacttgtgttttaaaattcagaatccaatcaaataaggatgaagaagtgctattccctttttttttctggtcatacttaatacagagagtcctgtattcctttttaaaggagaataagttataaatcatacttgtgggccgggtgtggtggctcacacctgtaatcctagcactttgggaggccgaggcgggtggattacctgaggtcaggagtttgagactagcctggccaacatggagaaaccccgtctctactaaaaatacaaaattagccaggcgtggtggtgcatgcctgtaatcccagctactcaggaagctgaggcacaggagaatcgcttgaacccgggaggcagaggtttcggtgagctgaggtcacg

SEQ ID NO: 94301 - DNA, 1346 bp, Homo sapiens
tccacctgcctcagcctcccacagtgctgggattacaggcatgaaccaccgcacccagcccccaagattattttaagtaactccttgttttggattagaagtcttctaggctttggagacatttaatcattgtgtatggctagaatgatttggttatgcagaaataaatttgaataaaaaacatttcgtggtcaaaaataaaggtgttatactaatatacaactaagagtgggtttaaaatgtgggttataaagttagtgtttctttaacttagtgtttctttaaatttttaggtttgattttactttatgtagtagcgtttttgttttcatagatggagcaaatccaaattgataaaataacattctaatttcagatttctttttcaatttttagttgttgacctcctgtactggagagacattaagaagactggagtggtgtttggtgccagcctattcctgctgctttcattgacagtattcagcattgtgagcgtaacagcctacattgccttggccctgctctctgtgaccatcagctttaggatatacaagggtgtgatccaagctatccagaaatcagatgaaggccacccattcaggtgagatgtctggaaaacaaggcatgcattggcaatagtgtaaacaggattggtattaagacttcatctactgtctatagagttacaagcatgcatttttttgttaaagataattgcagttatttgcttgagctataccaaaaacatctgcttttgagattttctaaaagtcgttttaaaggctcatgatggaggagactgtttatgtatcattaaactaactctgctacttgttaggaatatttattagagttaagcattggttatcttacttgaatgagtgttgtatctttttaacatgggtaggtttgatgaggatattctttattgctttttatgctgtctgataacgtgctttctgatatttcgtatctttctagtatgctgatgttttctgttatgcttttctttatgtattttctttatctagtttcttctcgtttcttaaggctttactttttaattattttttggagagctttatttcagcatctccttgtctctcaactatcatcttctacccttgttttcacaagtatactatagcattatatagttgctatggagacacaacctcagcttgagtcttctgccctcacctcatactctgcgtgtttttccccctcttttttaattgacatataattcatataccataaaactcattggtttttagtatattcacagaattctacaaccatcactattttcatcgcacaaaaagaaacttcctacttattaa

SEQ ID NO: 94302 - DNA, 1963 bp, Homo sapiens
ccacctgcctcggccttctaaagtgctgagattacaggcgtgagccaccacgcccggccatatgtttaatttcttaagtgagaatatactgtgagtctttttgtaacatgctgttttcatttatcattatggacatgtttctgtgataatgtagatctgtatcacttttttttaatggctacacatttctcttgcataaatataccctgattttatttaattagattcacatagtttttaaaagtcatttttcaacaacttaattatagttctctactgtgggaaagtacttatcaaatatattggagtaaagccctgttctcggtttttgggtctaacagtaggtgaaatattcacattaaaatttgtcccttattgattaaactatcttgttaatttcacttagcttttcttcttggcctttatgattcatcttgcatgttgtaattatctgcctacactttgcccatttgttatgcatgcacacgtataacattttgaagcactttaatcagctaagccttcaatttggcatcatacaatggagaatatgagtttttatccataggaatcctgggttcagatccatgttctgccacttattaatgatgtgatctgggtctagtcatgtaggagctgggtttcactctttcaagcctacctttcattaggtttgtttgtttgtttaagagatgaggggtctctgtgtttcccagcctggtctcaaactcctggcctcccacctcggcctcccaaagtgctggaattacaggcataacccactttgcatagtggctcattaggttttaataattgaaagagataatgttgtataggctactgcagtgtttggcataaaggaggtgtggagattggagaatgtagatcagcaatcaaaacatctatcaggcttaagcgtatcatttttcaaacttttaaaaagtttctctcatacagttgccataatgatagagtttataattgcttgaaaaattgtaggaatatgaatttgttattttcctaaagttttaataatgtctggtacttaagatatttctaggaaggttcaaatcagaagactggtatgaataaaaatatttaagcttccttctccccaaaaaaatctagatctaaaaaggaaggaaatattttaaaattatattgagcacagataatgccccagtagtaaaacttcatcggtttggatccactgacagggaatttgaatgcagtactaatgtgtgtatctttgtactgactgtgggtcatgttaattccttaagggaaaagagagattagaagattaatgccctttatggacgataaaactgaaggccagagaggttggagtcgtatccaaaatcacacaattgctgagctggtacatgctaggatgtgggtctcttgaatcccagtcctgatatttccttctaccatattcatttaggtagaaattatagactaattataaataattcatatatagtcactacacctgtttaaacagtaactctgttataatattaggaagtttgattagacattaatttatgttgtacagtgcaaacctctcaaatctaaagtcattgatttcatggccaggttttactgagtagtttttaatgatggtaaaaaatagcaagtacatctgcatttactttaacttctcaccaatagtgattttgaaggttaattaatgtttctgagcagtttgagaaccacttttataaaggagcatttgttcatatgaaaaatagatttgagaggccgggcatggtagcccacgcctgtaatcccagcactttgagaggccgaggcgggcggatcatgaggtcagcagatcgagaccatccttcctaacacggtgaaaccccgtctctactaaaaaaacaaaaaatcagccgggcatggtggcgggcgcctgccccagctactcgggaggctgaggcaggagaatgccatg

SEQ ID NO: 94303 - DNA, 1646 bp, Homo sapiens
ttccaatatggatgccttgtatgtctttttcttggccagttgcactgcatagcacccccaggaccagaagtggcaagaatggatgtacttgtcttgttcctagtcttagggggaaagatttttaccatttagtttgatgttagctgtgggtttttgtagatgctctttatcaggttgataatgttccattttgttcctagtatgttaaatgttttatcttgaaagggtgttggagtttgtgagatgctttttctgcatctgttgggatgatcatgtggtttttgtccttatcctattaatatgatttattgtgttgattgattttcgtatgtttaatcaatcttgtatttctgagataaaggccacttggccatggtgtataatcttttttatatgttgctcgatccagtttgcttgtattttgttggggattattgcatctatattcataagggatatttatctgtagttttcctttcttgtgatgtctttgtctgattttggtatcaggattgaacaaacttctaagttaactaataaatctaaattaactaataattctcttgttgaccattagaagcaacagtatttttctcagaaaaacactatatttctcagaagggattttaataaagttctatacattcctcctattgagaatcatttatcctgtataaacaatctttcaaaatttttttattaaaaccaatttgaggaatctgtaagggactagaaattttgttggcaaatgtcaattaagtcagccacactgtttggtatcaactaatatttttttcattcttgcagcttcactaacaatcttttcagcttctttacggaaaaagatggaaattcttctgtactttgcacagtggggttggtggcagtgtagattgcctctcaggtgttcctattctaggatatattcatattatcttatgtgtgactatcagtgcctagttgtctcatttctcttggctgttcttccctttttgttttcctccagggctctaaagggtctgatggctccaccagagcattcctagtacttgtttcagtatgtctgtcatgatacctgctttgagctactctcatgtagctgcttacatatttttattcagtatgtgtgggcttacgtatgtaattttcagagcttttccatttattgaaaagaccgtgttcctaggaaccatatgacaagaggaaaggaagtggtaggttagggcttactatcattgagtactgctgggccttatacatgactattctggtatcattaactttgggaaaattgacttgattcaacgcagaacaccagaatcatcaacttagttatatactgctagaattttaactgttggctggatccaaatatttattaacctaacagacagggtgttctttttccaataggaaagcctactgggaaaaataacactcataagactcttcagtagtaccgaatagaaacagaatggggtgaatttttttctgattatagtcatgattcatgcttgccattagagtgggaccatttcagatggcacagaaaagagtaaagaagcaagtaaaactcattgataatcccgttatgcagagataaaaacactgcttagtagatatactttcagacttcatagttatat

SEQ ID NO: 94304 - DNA, 1031 bp, Homo sapiens
agaccttgtctcagcgacaataacaacaacaaaaagataagaaacaaagataaaagagttttctagtttaagctcttaactttgagtctttcggccgttatgagttaacttttatgtgtgatatgaagtagaagaatccaacgtcatttgttttgcagttggatatccagttgtcctagcaccatttgtttaaaagactgtttttttcttattgagttgccttggcacccttgtgaaagtcagttgaccataaatgtaatggtttatttctgggttatcagttgtattccactaatctacctgtttgtccttgtgtaactactctactgtcttgattactatatctttttaggaagttttgatatagggaggttcgagtcctccaacctttgttgtactttttcaagtttttcttgattttttggatcccttatatttccatatgaattttgcaattggcatgtcaattttcgctaaaagacagctgggattttgatagtgtttgtattttagatcaatttgaggagtgttactgtcttaatgtctttcaattcatgaacaggagtctttccaattatttaagtcatctttaatttctttcgacagtgtgttatgtatagttcatatgtcttgaaattcttttcgctgtattcctaagtatcttattttttctatgctattacaaatggaattatttaattcattttcagattgtttattgctagtgtatagaaatacaatttttgtatattgatattgtgtcctacagccttgctggactctcattcattatttctagtagctttttgtggattccttagaatttttaaaatacatacaacagaccctcatatcattgttttgttcagtgttgtttcgttataatgtgcatgaggaagagaaaaaaaaacaattccttgctggggccactgtctgtatgggatttgtatgttctccccatgtctgcatggggttttctctgggtactctgtggtttcttcccacattctaaagatgtacacattaggttc

SEQ ID NO: 94305 - DNA, 1035 bp, Homo sapiens
cttcttaaaggaacaattcagcaactgaaggaacttctgtagattcagaatttttagagtattcctgcagataaggcattctgttaatcatttattccaactttcctgttttactgacaaggaaaccaagaaaacgagagatttaaatatttgtcaggcccacacaggaccatgccacaggtccatggtggcatgaagcctttgtttttattttataatttatatttgcacttgaataaccaaagattgaaaagtatataagctaaaacggcccatgttttgatattttatttgtgcatagtctacttgtggcatgttattgaatgtcgtatacttctttcgtattgtcctcactgcaataaaaaaggcaggcagttgtctgtcacactaatcatggaagaaggtaggtgtggttagtcatttagtacaggtattgtcaaaaggttaaacctagtgggagttctctgggccaggagaataatttcttttcatctttcaggattggattacatgctgggatgtaggcagaatatctaggcagagaatagaattcttaaatttgttctccggttgtcccctaagttccctttttatgtacagccatctcagtatctgcaggagattatttccagccctccaccccgcgtccccctacaccatggataccaaaatccacagatgcccacgtctcttatataaaatggtgcagtattttcgtaaaacctacgcacatcttgttgagatcatctctgagttactttttacaatgtaggtagttgttatattgttcagggaataatgacaggaaaaaagtctgtacttgcttagttacagatgcagtcatcataggtctagctacatttttccatccacagttagttgaatccgcagatgtggaacctgcagacatagagggctgactgtattcacttggtcccatctcttgctagaatttgggctaagggatgatgtttaatttaggcaatacttttctttgcatccttggagcagtgatctgacaccacatttatactt

SEQ ID NO: 94306 - DNA, 2325 bp, Homo sapiens
tatgacaaatgacatttacatagtattcgattactggggttatatggaaaattttgattaaggtagtcaaaagatttttaggagcttaaaataggaaggaatgggtaggcctagggatttggatggggtaggagaatgatataaccactaaaaagctatagttgagacagtaaataactttctgggtagaacagaatatttaggacaggagttgaaagataagattggtgtggtcaaggaatgtagaaaatttagatgaactagattaggtttcctcatacttctctgtagatgagaatcatctagtgcttcttaaaaatgcagattccttgggtcgtgacctaccaaatcagattttgtagggcctggcaatctgcatattaagcatcctggtgtaattcatattgttgggcaaattcgggaaacagtgatctagggtttaagccttggttctggtatattttgattttggctagaataagaaacttacctttttggttttaatttcctcatttgcgtgctgcccagggttccagttgagaggttctctggttttatggaagagataccctgggccagaccgcagaagacattgagttttggatttgattgtaaaagaaataaaaaggatttggaagttttaaagtagggaatggtaaatgatagcagttggtttagggtgctgcataagatcaactgggggagaataacctatagccacaccagttaggatgactgtagttgtgcccagatttaaagtagataggcttgaatttggcctgaaataggaaggaagaagaagcggcagatttgagaaattcaaggaaggaatacttggcatttggtatagatttgcaggacaaggatgaggtgtaaagactcaaggggcaacatgaagtttgaattagagtgaaatattggcaatgacagtcctttagtattagtagaaatagagctaaaatagaaaagatgccaagttgagtttcagacgctttgaatttgaagtgatgatagaacatctcggaagctcagataaatgacaggtttaatgataaagaattgggagtcaaatgcagagtgaggcaggtgaatactatgtgaggagatttgcactgaaagaactattaagaaagaaaagcctaaaacctgcgttatggaggtctgcggctttagggaaaatgaggaggttctagagcagtaaaagaagcaggatagtgtaactgatactaaggggggaaagaattttcaagaaggaatgggcaattaaatacttagagaagctggttaatatgagtgagaaatggatgtgaatcttgttaaattttaaaagtaggtgcaacactgttctttattgttacagtactctttggatttgtcagttaatgtgccagaggtaatctttgagagaagtttctgtaggatagggaaagaaatgttcctagcattaaaactcaatataattatatctcaagacaaactagttttggaccatttctgcagcatacttccgtgtagagattcttttagggctctctgatctttacttatgataagctactttcattttttgaaagccttgaataaagctcatactgacattttggtagagagtagcaggggtcttgctgtttgaaatgccttactcgggaaggccaaaaaatgcccaacaagggaactttggcattaattaattatggggcctactgattggaacgactctcctttcagttctaaactttgttaaaaccgaatatttaggcattcattagatacattttctagatcttgggttagtagtgcagcactacataggtatgtgttatagagaatttagaaggtaagtagaagagtaaaactcacatcgcatagagaatagttttggggtatctttttaacagggtaatgtgtgttgggagggttttgtggtatattttattctgtagtctttttcctccattaagtatttattttttaaatactgtacgctattttaatgactacaatattttaattccatctagttaaatcaggttattgctaaagtttgcaagtacaggttgaacatccctaatctgaaaatctaaaagccaaaatgctccaaagtctgaaacattttgagcgctgatgtgataccacaagtagaaaattccacacataaatacttaacacaatctttgtttcatgcacagaattatgtaaaatattgcataaaattacttccagcctatgggtataacatgtagatgaaacagaatgaatttcatgtttagacttgggcctcactcccaagatacctcattacgtatatgcaagtattccaaaata

SEQ ID NO: 94307 - DNA, 1727 bp, Homo sapiens
aaaagatattaggaagattaagttgctaaagttttctgttcaaataatatgttcaataaacattagtaatttgacttttattttctgtttatctcttcataaggtgcaaaatgctgaatgttttacgtcttaatgaacttaggagcaattaaggagactcatcatttcacaagcttgaaatttaggctattaatatttgatcagtccatttttatcttattaggtaaccattaattttagagttttaaatgaaactgaaaaccagtagcataattcgaccatctgttaaaaaaagaaagaaaaaaaaactgcatatggctttaattgcatttcagatacattcagtggttagttctaagaacaacccttatttcctttcttttggtagcctgccctctccctgcaaatgcagctccatttggtatgagcaacaaggcaaatgcctaaaacaatcaacagatagaaggaaagcattaatgctggagtattagtagcctagttacagattgcactgcgtcagactgttccacacccagaagacgtcaggtgacttcagtcctgctgcagttgtgcagcagaggagactgcagacttcggttgaggaaacgggtatttcatgtctcagggagtaggtttgtgcagttacagcttttctgttggtatgcataattaataattggagctgcaaagcagatcgtgacaagagatggacggtcagaagaaaaattggaaggacaagggtatatctgctttttaatttcttattcagtttttatatgtgaccactaatatatttctatgaataagctttggaatttagatattttggattgaaagtgaaacctctgaagagttgaagtctaaaggattaaaacggctatctcacgtgtttttacatttggttgtataccagaaaatgtcatgctgttctgtttcactggcattcggtttagtcttttcagtcctgccgtttaggttctgttctctaatcttgcacattgtaaacaatatagatctaacagatttcatttgttcgtcacttggatgtggtaaatacacattgctgtttttgtgtttcacagtgacatattttccgtgactattttaaaaaaccttacttggtgtagttgaaattctgtgcaaaggtttgtaggtagcaagatattgtgtttgcagtaagcctcttctttgaaaatctgatttgaacctttaaaattattaccaactttcttttaatcagattatgtgcatcttgaaatcattcaaattacacagtataattacgcagtaattttaaatgcatgtctatatttaagtcactaacctttgtccttgtaataaccaatcagtgattttgatcccttttcctcccccttgaaagcccagatcctttcaaatctcagtggatcattgtgtaagaatttaagcctgtaaatggtaaaatgttgactagaatatttaaagaatattttattatgtagatggttaaatctacctttttttctttaaaagaaagtggtaggctgtatatctgaccacttataataaattacctttaaattattagagctatttttaagtagtccaaaatagacattctacgtaagcaatttttttcctggctacattcaagttttataattaaaaaaaattatttccttctagcaggattggcaacaatatttctaaaagtatgtagagctaattacagtaacttttacaatgtc

SEQ ID NO: 94308 - DNA, 1029 bp, Homo sapiens
tgccaaacttaaaacaagtctagttgaaaaactttgtgagaaagaactgggcaaaatgtcagttgatttccacaagctagttttccttgtacacttacaaagaccataaaaattaaagaagtagatgtcactatgtaggctgaaatgtttactaaacttcagggctcctattttgactttttaatctgtcaggggtgctattaagtatgtttaatgtttagatgagtgggtatgtcttattacacattcttgcccctctcagacttttttctttaattgttaagccaaatcaagtaccacggaagatacaagtagtcttaagtgccgagtaacttgatcacagtaaaacttttttcttctactagtgaagtaatctctgacttgaaaatagtgtttgagtactatagttgagtgttttattctaatgctcgttatttattggctttcagttttaagggacttgttattagaaagtcagtattttgtatttactaaatagtttgagattctgaatgttgcgtggagaggccagacattttcaggccatgatatggcttgctgaccgggttctcaaatatcacattatgcaggggttcagtgaataaagtttaaagttaaatattaactcgagctgagaatactgggctcttttaaaaattacttttctttatttatgtttggagttagagaggcagatagggaaataaatgtgtcattgatattcaagccacttcctttttcccctctcattttcctaattttagttctttctatgtttaagtcttacatgttttgtttttagtttttttgggtacataataggagtatatattaatatcaagccacttctgatattaaggattttgcagcccacagatagcaggttccagaaaatattatctctatttcattttagctatacagtcttaagtatgtatttttgtacataggctacgtatcttatagtattttcgcaaattgcattttaaaatattttagctgatttgttagtgccttttctgcttaggc

SEQ ID NO: 94309 - DNA, 2200 bp, Homo sapiens
tttgattattagtgaatgtgaacatgttggcagtttgtatttcttctgtgatttttgcttgttcatactctttgcccatttttaaatgtaggtgttcatttttttccctgattttatgagagttctttacatataaaggatgtaaactcttgtgttatagttttccctcagttttctaaaagatttttagtttacatttcagtggacattttcagttttcacaaaggaaaatatattttttatttacttatagttttaattttacacttagttctgatctatttaaaattgattttggattccgattagggattattttgccccacgtatttttttggtgttagagttgttttcctattcccatactctgatctagctgcctagggccaggcagcaatcttgtggaaaagccagaaagttaatgtttgccagattgccttccatgaactgggcaatcaactgtagactacgggtgttggtgccatctagtgttgcagatggaagatcaagtctgtggaatgatctataattgactatgtggaataaattcagttggacagagaaatttagcgagctgtgaatatcgttttgcactaacagatgagtttaaaatttttataaacaattttgaatattgacatcttgtaccaaatcaaacaaatgctttaatcatactactataaacattatgaaatgaccttaaagattccccccaaacctggatacttaaatgaagacattaaagtttaagaagatctgtttagggcctagtgactattaattcttgaattcagaatttaaaaatgcgtgcttgaggccaggtgcagtggctcacgtctgtaatcccagcactttgggaggctaaggcgggcagatcacgaggtcaggagatccagaccatcctggccaacatggtgaatcctcgtctctactaaaaatacaaaaattagctgggcttggtggcacgcacctgtagtcccagccacttgggaggctaggcaggagaatcacttgaacccgggaggtggaggttgcagtgagccaagatcgtgccactgcattccagcctggtgacagagcgagactctgtctccaaaaaaaaaaaaatgcttgcttcagcagcacatactaaaattggaattatacagagaagattagcatagcccctgcacaagaatgacgcatagaatttgtgaagtgtttcatatttttatataaaaaatttttaaaaatgctttgggtgtttaagaatatttgtatgttttagattataatgtaagaagttagcatattagttttcataaatagtgtcactttcagtttatgaattttagtattcatttttggtaccttatgttaaattttttatagactttaaaatgctcgttgttttgctattttaacttgtactgtcattcattttctagactaaaatctttttccagttcttaagatttaattcagtaatgttgaagtgctgtaatttagtccatagagggcattatattacagcatatggtagggttttaaaaattaactcctttcagtattgaaacatgttaatttcatacctttgtgtagctcagaatagttaaattttgaaataagcttaaaactactgtgtagctataattgtttcttattttttaaaaaacatgcctattttctgtggctggaaagtataaattattttagctctcaagagcagtgtacataagcagtctctaactttcagagtagcattttcaatccaaatgattgctgctttcccaccctctttcccttgcatctctaaatgttgtaaagaaaaacgaagcaaaacaaaaacctgagtttttcctgggtgcagaagtagaggaaagaaagaaatggaaaaggaagaatgtcttagaataagagctggctggggtggacttaacaccttgcctagtgctgcctgttctaaaatctaaaatataactttctactgtctgaaatcttgccagttagataccaccccccctacaccctcccccccccccaaaaaaaaacccaccaaaaaacatacacacagtttctgaggtcataaaagagtttcttgtttagtaggaattgatttatgcgtatttcctacttaacaggtaagtgcatgaaggaaacgagggtttggtctgagatgtgagaaaagaaaccgtgtaggtaattttacagcatattaccc

SEQ ID NO: 94310 - DNA, 1105 bp, Homo sapiens
atccattttccacatacctgatttgcataaggtgatttgcacaaggtgatttgcacatgtgctctttattagcattctgatttagctgcgttttctctaaaatagtgattatgataaatttactgaatatacttatgtatttaagtgctggtgcttcagcagtacagtccagctcatcaccattggaacagtggtagaccagttgctgtaatctaagaaagaggagattatgaacattcaggcagtgggatgagcacagagacataggacttggtgtttgacggatagggacataaaggatgaggggaagaggtaaagatgaccccaggaaccctggatttcatttctggcatgtgcacttgtatgggtggcagtatgagaaactgagatagggaacatgagagattaaagtaggtttaagagggaagatacaaatttggttttggatatgttggtattgatgtacatacctctaagatatccagtaagttatggatattatacacatgaagctcttgagagagatcttggctgtatgtgtctgtcatgggcttagagatagaaattaaagccccagataccaattaggaagaatcaagagaagaggactacttgaaggtggaagaaatggtcaaaattatcaaatactggagaggtcagttaaggattgcaagttggtcaaaaaggagggaagatattgtcatgacagcggcaaatggtgtggtgtgcatgggcatggctaggattgagaagtgaatgagacttgagtaagtggttattaaatgttgattactcttaagaagtttgagatttttattggagaaaaattaaaatattagcaagcaggaaggagagtatgcagtggaggtaggactttttttttaaggtgggaaggggaaaatctgattacaggtgctggcagaaagtcagaaggggatggggatgtgctgcctagttcaggtggaagaattagtgttagagagaaggaacgatagagctttgattgtagtgagtggaaaggaaagtatggggtattgatactgttagggttttgtgactgaaagttgagggaattatttgatggtttatgtttgttctttaaagc

SEQ ID NO: 94311 - DNA, 5470 bp, Homo sapiens
ttaactatattgtctagataaaaaagacaaccattttgttaagaattggttaactgttatttagatggagcagctgcgtaattatttggttctgctctttgaccctcaaatttcagttttatacaagctaataattcattattttagctgaagggaactttccttcattttacaaatgagaaactgtaatttaagatcacatagcaagtaatcttttaaatatgtgtacacatatatatgcactttatttaaaaatcttataagccattatgttacccctttgactggatagcccatcctacctagtgctctaggttggaggaaacccttttaaacacacatcataaatttcccgtcatcaccctcatctaggaatcctttaagtatgacttcatgcccagtatatatttatctaaaatatataagaccttgtgaagttagctctcctaattcattaagggtaatatgcttggaagacaagtccgtattcatgttagctacatttcttggatttttatctgttttgatcagccttgtctagcttgtccatccagatgaaattgtctaaatttattaggttctctctgttaaaggaatatcaccttccagtcatctctcaggctgtttcaaattgtctgatggtagaggcctttctctagtgtaaaccatggaagatctttagcttaggatctcccaactgcaggtacaagatgacattgtacaaagttaatattaccaatatagagtgtattagttagcttgggctgccgtaacaaaataccataggctgggtggctgaacagaaatttacttctcacaattctggaggctggtaagtctaagatcaaggtgctggcaaggtagatttctttttgaggcctcttctcctggcttataggtgaccaccatctcactgtgtgcacacatgacctcttgtgtgtgcctggggagacagggagcatgacagcaagctctctggtgtctcttcttgtaagggcattaatccccttggcccagggccccaccctgactgcatttaaccctaatcacctcccaaagtccccatcttcagatactatcactttaggggttggggctttaacatgagttttgtaggaaatataagcattcagttctgtaacatacagtgattaaggaaatgggctctggaattgaattgccttagtctctcacttactagttgtgtatacaaataacaagtagccctcacttaggttaattttaagcaaaaccaataatggtgtcatcctaaaggcagttaattttttttttttttgtattttggactctggcatttggacattggcacaggactaatgtcttcaaagagcaatgtacaatgactgtaacaacttagaatgtaagagaaaatgcataattctttaaaagtgtttctttaaattgaatatatgccaataacaaaagattaaacatttgtagttgttaattgtattcaaattcagctttttgtttttggcctgaatagaacaagacaatttacctatgtgaaaacctgagtgaaagcttgggatgtgatatgttaagtagaacagtattttaaagccactttgattcataagtttctttaacataaacaggttgtattgcctcttgaaaaatgataggttctatggataacatttaattagctttataatacatatgatgatttaacctgaattaatggtactactttttctgacttccttttgatcttggccctttctctgtaaagttttttgttaacttattacaaactgaaccctggcttgctcctcttatctttagtctcctttcaatctgtctttatttctgctgaggttatattctatttgtttttcagatgagaccctttttgctcttcctgctgcatctgagcctgtgatacgctcctctgcaggcaagttctttctgccagccttttatcctctctgtattctaactttaactctttagtgtgttaacactatgcagagtagtttgggtttactaaaaattagcatggttccgagaatgttttgtctactggaaaagttgaaatgtgcattttatatggtatgcccaagggaaaaatgagcaaaatctgatgaatacttggaagtacataaggaattcttggacccttgaattacatttacatatttaccattccctttctccaaatacagtttgagtatagccagaaaggctttcctgtaaataaataccagtctatggcatttacccagtgccccttctttcctatgctgtcaccgaaactcttttcacagatattcttctcttctctaaaactagctattagtatcttagttgataacatttgaggtttactcagacttgatttgtctttgcacagcatgtaattgcctctgtagccatgcatatgttatatttacaatagcttaatattttcagtaatgattgaagtctactctattgttacttattaattgctattaacatttcattttagtaaacagtaagtctttactaacactattttggatctgtcataaaacttgcattaactctgagaacactggcattctctaactttcctttctgtccatggtcacagaaaatatggacttgaaggagcagccaggtaacactatttcggctggtcaagaggatttcccatctgtcctgcttgaaactgctgcttctcttccttctctgtctcctctctcagccgcttctttcaaagaacatgaataccttggtaatttgtcaacagtattacccactgaaggaacacttcaagaaaatgtcagtgaagcttctaaagaggtctcagagaaggcaaaaactctactcatagatagagatttaacagagttttcagaattagaatactcagaaatgggatcatcgttcagtgtctctccaaaagcagaatctgccgtaatagtagcaaatcctagggaagaaataatcgtgaaaaataaagatgaagaagagaagttagttagtaataacatccttcataatcaacaagagttacctacagctcttactaaattggttaaagaggatgaagttgtgtcttcagaaaaagcaaaagacagttttaatgaaaagagagttgcagtggaagctcctatgagggaggaatatgcagacttcaaaccatttgagcgagtatgggaagtgaaagatagtaaggaagatagtgatatgttggctgctggaggtaaaatcgagagcaacttggaaagtaaagtggataaaaaatgttttgcagatagccttgagcaaactaatcacgaaaaagatagtgagagtagtaatgatgatacttctttccccagtacgccagaaggtataaaggatcgttcaggagcatatatcacatgtgctccctttaacccagcagcaactgagagcattgcaacaaacatttttcctttgttaggagatcctacttcagaaaataagaccgatgaaaaaaaaatagaagaaaagaaggcccaaatagtaacagagaagaatactagcaccaaaacatcaaacccttttcttgtagcagcacaggattctgagacagattatgtcacaacagataatttaacaaaggtgactgaggaagtcgtggcaaacatgcctgaaggcctgactccagatttagtacaggaagcatgtgaaagtgaattgaatgaagttactggtacaaagattgcttatgaaacaaaaatggacttggttcaaacatcagaagttatgcaagagtcactctatcctgcagcacagctttgcccatcatttgaagagtcagaagctactccttcaccagttttgcctgacattgttatggaagcaccattgaattctgcagttcctagtgctggtgcttccgtgatacagcccagctcatcaccattagaagcttcttcagttaattatgaaagcataaaacatgagcctgaaaaccccccaccatatgaagaggccatgagtgtatcactaaaaaaagtatcaggaataaaggaagaaattaaagagcctgaaaatattaatgcagctcttcaagaaacagaagctccttatatatctattgcatgtgatttaattaaagaaacaaagctttctgctgaaccagctccggatttctctgattattcagaaatggcaaaagttgaacagccagtgcctgatcattctgagctagttgaagattcctcacctgattctgaaccagttgacttatttagtgatgattcaatacctgacgttccacaaaaacaagatgaaactgtgatgcttgtgaaagaaagtctcactgagacttcatttgagtcaatgatagaatatgaaaataaggaaaaactcagtgctttgccacctgagggaggaaagccatatttggaatcttttaagctcagtttagataacacaaaagataccctgttacctgatgaagtttcaacattgagcaaaaaggagaaaattcctttgcagatggaggagctcagtactgcagtttattcaaatgatgacttatttatttctaaggaagcacagataagagaaactgaaacgttttcagattcatctccaattgaaattatagatgagttccctacattgatcagttctaaaactgattcattttctaaattagccagggaatatactgacctagaagtatcccacaaaagtgaaattgctaatgccccggatggagctgggtcattgccttgcacagaattgccccatgacctttctttgaagaacatacaacccaaagttgaagagaaaatcagtttctcagatgacttttctaaaaatgggtctgctacatcaaaggtgctcttattgcctccagatgtttctgctttggccactcaagcagagatagagagcatagttaaacccaaagttcttgtgaaagaagctgagaaaaaacttccttccgatacagaaaaagaggacagatcaccatctgctatattttcagcagagctgagtaaaacttcaggtaatccaatctatatgcagttttgtgctttcatgccacttttggatttagggaacattccactacattttgtgttttatattatgtttatagtgtctcatatgtcacattggtaagaagtcttctccactttttcagttaaaggttttagtgctttttctaactctcttgcactcagcattcacccttaacttttccacacagttacacttttatattgcactatggaactattaatagaaaatatttttgtttataagaattggctttagtacctatttctttctttctttcttttttcacttgtgtttcttgataacatgaagagcaagagatattaaaatattttcagatgtgtttttgttatcccagaaattaccatatttaatttttaaagaaaatttctatagtatgttttaaatatttctatataatatagtacttttccagtggtaggtataaagttaggca

SEQ ID NO: 94312 - DNA, 1003 bp, Homo sapiens
agacaggatctattctaagctttgagggtatagcaataagcaagacacatgctcccccttgggagagtacagataataagcacataaataaagaacccagaatagtggtgttatgaggaaaataaacaggataatggcatagagaatgatggggatttatgggggcttttttaggttaggtgacactaagacaggcttagaaggtgagatttgagctgcagagagaaaacatttccaagcaacttcagggcaaaaccctgaggcaggaatgagctctttgtgtctgagaatctagtgtaagactagtgagaaaaactagtgggagagtgaagaggtggccttacccacccagatcattgggggtctctaacaggcaatggtaaaaatgtttagctttttaaaaaaataaaaatatgcttattaaataattatattgtgattttggaactaaaataagtttggaagattcagggctactgagaggactgatgtgagacaaaggtgagaaatgtgcagagcagggttagaagcatagactagcctgcctggaagagagggtttctagatcactgacacttgtctgtttaacattgctgtttacgttatttatgagtaagccctgattttcatctgttaataagttgtaattttactgtttgctgttgtgcccagagcatctccatcgcaatgcagtaactgaagtgagactaaaacctctcacttgagggccatttttcatgggaaaatacttggcttagtggttggttaagttaggctttgaggatatgcgcagaaaactctggctagaaatcgatttgagagcagtgcaaacataattaagggtgacttcgaactggtctctggacatgttctaaaccaaggttaattaagaccgaaaatatgtagatctggattctgaaagatactgaatgccaaattaaggaatttggattttatcattccactttaatccatgctctgctatccagttgcccttgctttt

SEQ ID NO: 94313 - DNA, 2378 bp, Homo sapiens
gaagggtggggcggcccttggagcccgggtttgttcttattgtccgtcttggtttcggggaacacgtgcaccgctcccggctcccactttcaccctgtgtgatgcccagcgtacggattctcggaagttaggcacccacccgtagtaggagccgggtatatacccgagagccagggttgtggatttatcgggttggttgggcttcgaggtgaggaaggaaaggccttggcacccagatatttttaggaggtgcttttgtctacccgtctgggttgctcctttggaaaaggtgcagttttgctgcgggtctgttggcctgcattctgccccgggctccctcctcacctcctggctggcgtgggtggcccctttgcgcttcccctccccctcctcctgtgctcgtggggagctggccgagtggaaaacgtccacattgacccaaccgcagtgaagggagagcgcctccagtggtgtggtgcgtggagaaatgggaaggagagagttctggtaaagtcctgccaccgcccagctccccggggtgtgatgtggactgctccccaccagctaaaccgagccagggaaaggggatctaggcattgtgttcgagggggcgtagttctgccggggtttcagctgcagggtcggaggaattgctgttagtgtggacttggcccagcctcttagtgcatcataattgaatcttacagaaaaaaataaaaggcaaaatggttgacattcctaaagaagggaaaacctgtggattccttgccaggaattggctaattgaactcgtggcagatttaccatgagacacagagaaatgttttgagacagacattttcatatatattggttagaaatactgtttttcagaaggatatgttttaggttacagaatcaaaatacggtcacgtgcctcataacgacgtttaggtcaaggacagaccgcatttgcaacggtggctccataaggttgtaatggagctgaaaaattcctgccgcctagcgacgtcttgatcttgaccctgtgtaggcctagggtaatgcgtttgtatcttagtttttaacaaaagttaaaaaaaaaatagaaaaaagcttatagaataagaatataaaatttcttttctatagctttaaaatgtgtttgtgttttaagttaaacgttattacaaaagagccaaaaagtttataaaatagaaaagatacagtaagctaaggttgatttattattgaaaaaatatatctaaagataaatttagtgtagcctaaccgtagagtgtctgtaagttgtacagtagtacatggtaatgtcctaggccttcacattcactcactactcacgtccacagcagcttccaggctggcaagctctgttcatggccagtgccctgcacacgtgtgccatcttttaatcctttgtacagtgttattttaggtatgtttagataaacactacacaaataccattgtgttacagttgcctacagtaacatcctgtataggttagtagcctaggagcaattgattataccatatagcctacatataggtatgtagtaggctctaccatctaggtttctgtaagtatactgtgaggtttgcacaacgacagaattgcctaacaatacatttctcagatcctgttccccctgttcagcgaggcatgactatgtatggtctgtaaaatagttttcaagttctttcattcacctaagttcctgattgtatgttattattagtcacgttgttttattgccgttttcatcttgggaaattattttggaagcgaaaaaaatcacgtttgttagagattgagaatgcataatattagatacattcataagtacttgctacttcggggacagaaagtgtcccactagcagtaggacctttatgtataaaaggtcaagaatcaagtagtgtaactgcctgcttggaaatcttcatagccttgtaggatgttagaggtgattcatttcttaaaagaaaatcagtctgatttttttttttctcaattcacttctccataatgggggaaaataagccaattgcgatgctttttagtaatattttgatgttgacggactcctcacccccatactactcaaaacactaattgccatattaaaggtcttagaagatgaggagtaactcaatcttttcctttttctttatgaaaaagacatacttgagggaaactgaggtaagagaaaaatatgaaatatatttttaaacaggaattttttttttttttttttgagatagtctcccccttgtcaccaggctggagtgcaatgacgcaatcttggctcactgcaacctccgcctcccaggttcaagtgattctcctgcctcagcctcccgagtagctgggatta

SEQ ID NO: 94314 - DNA, 1056 bp, Homo sapiens
cccagccggtaagagagaggaagtgccgtagtccccacccactttcatctccttccctttctgttggcccggctggtcgcctatcttctcgatcctgtagccgattggctctctccctcccgcgccagtccctgccctcccctggggagggtgagtcacgccaaactgggcggagagtccgctggcctcactcctagctcatctgggcggcggcggcaagtggggacagggcgggtggcgcatcaccggcgcggaggcaggaggagcagtctcattgttccgggagccgtcaccacagtaggtccctcggctcagtcggcccagcccctctcagtcctccccaacccccacaaccgcccgcggctctgagacgcggccccggcggcggcggcagcagctgcagcatcatctccaccctccagccatggaagacctggaccagtctcctctggtctcgtcctcggacagcccaccccggccgcagcccgcgttcaagtaccagttcgtgagggagcccgaggacgaggaggaagaagaggaggaggaagaggaggacgaggacgaagacctggaggagctggaggtgctggagaggaagcccgccgccgggctgtccgcggccccagtgcccaccgcccctgccgccggcgcgcccctgatggacttcggaaatgacttcgtgccgccggcgccccggggacccctgccggccgctccccccgtcgccccggagcggcagccgtcttgggacccgagcccggtgtcgtcgaccgtgcccgcgccatccccgctgtctgctgccgcagtctcgccctccaagctccctgaggacgacgagcctccggcccggcctccccctcctcccccggccagcgtgagcccccaggcagagcccgtgtggaccccgccagccccggctcccgccgcgcccccctccaccccggccgcgcccaagcgcaggggctcctcgggctcagtgggtgagtgccgcgacctctcgcttcgcgccgcccctcgcgcccctccctcttttgtgtgcagccccagatgctttgg

SEQ ID NO: 94315 - DNA, 1034 bp, Homo sapiens
taattattaatctagactagcactgtccaaaagaaatataatgtgagccattatgtatttaaaaaactctagaagctgctttaaaaggaacaagtaaaattaatttaataatattatacttatcccaatatatccaaaatatcaatttcaacattcagtcaacaggaaagctgagatattttacatttcggaggtactaattcttgaaatccagtgcgcattttacacttacagcacatctaatttcagcctagctacatacattccgagtgttcaatcagtagccacaagtagccagtacctgtcaggtacagcacagatttagactttgagcaacttgaaagcaggttatcctcttctctccagggcctccagagtaggcatgcagtgaatatttttgaaaggtaaatcagaaagataaaaggatcctgattcttacaaagatgttctgcaactactctctttaaactctccagcctcataaaaagtggaatggggatcatgcttattcctgcatatcaaaccaatgactatggggcttcctgactcccagaaagcctgaatcatccgaaatgttgactcatgaacctaaggtgactgaaatgtaacgtgaaccaaattagctttccaaggcatctttgtatttccactttcctgtctccccgctgcctctctctttgggtgactcactctcttaccatgtaagagtccagcaggcaaggccccaaactctctttggaagaagagcagactttcaaatggtcggccccagatccctagttaattcagcacagctgttttcctcccaatttcgggggctgcggtttagactgagtgagcctaactgtcaaaaaacaatttttttcttattttagggtggtagtagtagtgatgtagtttggaactttgagtgaacaaataatcttttatttcaaaaatctttaaaaatccttagggcccacttcccagtcccgctaatacctttctccagtcgggtttcttcctttcccgggaggaaagtttccactctcagt

SEQ ID NO: 94316 - DNA, 1027 bp, Homo sapiens
ccccagcttggaggaagggcccgttgtaaagcctgggccggaggaaggttggcaaggcagggcccaagcctgggctctagtttccctgagcctgccagggtgcccagccaggagtttccttctgtctgtgcccaccctggtgagctggagatagggggaaacctgctgggaaaagtggcttcggagagctaaagtgaggggggcaggaagcattgctttccttctaagaacctttgcttccttcggcctcagcatctgcctggggtgacacagggttgctttcttcagagatgcggctgtgctgttcagcccctccttaggttctgccaaggcaaggcctgggtgtccagagtgggcatgggaatcattcacccaccccacctctcagtgccgtgggccagtctgggcctcacgcagcccacagcgaggcatgggtttgcattttacagtcacttgcaatgactgcgcttttttccagttcatgggagcaaatggagaggtgttctgggaatcccatcttcaccctcctgcatctgaggctggtgagcagctgagagaaggagaaatgagaagccagctggtcaatggtctgactcctccacccctgcataattatgggttggccatgtagctaatcccgttttctcaacagccctatgacatgagggaggaggaggtggttgtggaaaccacatgccctagatcctagtggtgctccagcagtctgggagcaaggttgccctgggagatccctggggaactattgacttctctccctgatcttttgcttttttgccccctgtaatactttcatcattttcactatggctaagcgagattccaagttgggctggtcactctgcccagagaatacaagttctatgaagaaaagtgctctataaatccaaggcattatgaaatttacttctactataaggcttttatacttgcatccaataagtctgtgtcccctatctaagggatgaagccagccagctatcacacgagctctctgttcttaaataga

SEQ ID NO: 94317 - DNA, 1042 bp, Homo sapiens
gcgatggtgatgcaaaagccaggatttgagggatagacagatgtttggagtggacacagttccccgtggggcggggtgggggagggtcactgttggttgagttcagaaggccatatggaggaaggtgtgctgtgggatttagtctctttgtgctcctgctcagtcccatgtgaaccagacataactaagaggagggattgacataggatggtgtcagagcatgtgctgtgggagatgagctgggaccgttggcaaactctggctaataagtggtagggccagattgtaagccaggctcacctggctccaaagccattcccttccacaaaactccattggctcctggccacctgtctcagatatctgagggcaaaggagtggaatctgcccagagaaggtggctcctagcagaaaaggtggctgcagagcccttggtgtagagcactggtaccaacactaacctcaaggtgtacttaggctggttgtggtgggtacagcacagtgccctttttttcctaacctctgcctttggctgaaataccatctgaaattgaactcaccctttttcatgtagaagcctgcaatgtttctggttcccagcaccgcagaggacaacaaagctcagaaaaggaaagactttgtctgggggagactcactgcatacccaggtccctctcccctcttgcactttgaggatacagcaagtctcctgttatgcatgtgacccacttgttcagaagaatagaggcaggggtcgctgaggattgggtttctgtcctggggcttccagaaggcccagatttctggcaataacacttatctggaagctgttaactttgccctagttcattttattacatgcatacttcccttttaaagatactttcagacgatgggtgtggtggctgatgagttaaaacctgtcttaattatgcactgaagcccggtttcggagtgttattacttgcttaatgatagcagcttgcaaaacagtttccatggctctcagcacagctaggcctgcattgccatacatctgctc

SEQ ID NO: 94318 - DNA, 1744 bp, Homo sapiens
tccagtcctcacctgagtccttttctccaaacaccgacttcagtgcttagagatagtaactagggaatctgggaggtggaactgcatcttgggacaagtagtccaaggtagaagaaagcagtggagaactacagttcccagaatgcacttccatttcctacctcttccccaagaggcccccctcgacctccttttaaaaattctcttagccacgttgattgtacgggaaaagcctttttaaaacatcttttacgttgcttaaacctacagtttcgaaagcattccgaaggctaaagtgagaaataagcccaggctagggagaggagaaacgaagttcacgtcctagtctggcaccgggttggattgtcgctgggacggcagtcaggcatttggtgtggtcgcctaaggggtgggtccttcggcgggagctccgggaaaccccgtgggcctgcgcggcgttcttccttttcgatccgccatctgcggtgggtgtctgcacttcggctgctctcgggttagcaccctatggtgccttctcttgtgatccctgacctaacctgtctcttccttttcctcaacctcaggtggagccgccaccaaaatgcagattttcgtgaaaacccttacggggaagaccatcaccctcgaggtacgggccgggtggtcatgaggaagccaaggtccgaataaggtcctgaggtggattttaggaccggcgctgctttccatgtcttagaccatgattccgaatttgggttctaaaacttaagctttgaaatgagtaccttttgctgagcaacgacctagaggtgattttcggtggccaaaggctggacctgtctcctctcgaggggttccagctagttagttaaaacggaggagctgcggtggggaaggagacgctctgcccgccgggtgcgagcacgtgtggccctgcggccgccgcccgctctgggctggggagatgaaggtgctttccggtagccgacttgggaggttgcccactgggtgggtaataggtctctcgagtaggtctcagccctgtcgctggttcggttcagtggtaattgtcaaactaaatgagttctgctgtagttccttaatgtgtaaccaacatgctttcactttaacactcataggttgaaccctcggatacgatagaaaatgtaaaggccaagatccaggataaggaaggcaagtagtattttgtagttaagaaaacttaacctgcggagacttcggcctacctgtaggtgctagacatacctgctcttggtgatgggggaaggggtcagattgacaaagcgaaatacttgtggaataacacaatagacattggtgatcggggagcacagtacctagattggaatccttgaggtgtatttcacttgcgtgaatttggacacttatttatttattttgtgtgagatggagtctcctctgtcgcccaggctggagtgcattcgcttgtcccggcttactgcagcctccgcctcccgggttcaagtgatttttgtgcttcagcctccctattagtggggattacaggcgtgcaccaccatgcctggctaatttattgtatttttagtagagactgggttttaccttgttggccaggctggttttgaacttttcacatcaagtgatctgcccacctcgacctcccaaagtattggtattacaggtgtcagccactgcagacaaccaagtattgtccctaatattaaatgcggtaaaatgtgac

SEQ ID NO: 94319 - DNA, 1189 bp, Homo sapiens
tgtattctggacattttgacacacaaaaagggaaaatggcattcgaatagcagtagatttttaggtaactcctatactgatacttgagaagcactgctatagttctcccattatgaattttgcaagttgtatcccatggtgtaatgtaatgcattctttaatgtccctataaactgtcagttaagaatctgatactttattgggtttgggggctgcaagattccctcaaatgttattgtgtgctgctactgcttttaattagaaaatgcataatgttgggtgtgcccattcttagtggaatcatgaaagcttgcttcattcttccattaacaggagtctactcttcatcttgtgttgagacttcgtggtggtgctaagaaaaggaagaagaagtcttacaccactcccaagaagaataagcacaagagaaagaaggttaagctggctgtcctgaaatattataaggtgagccagttaaagggcagaatgtcagcaaagtcttggcttatttggaaaacttaatctttatagtacttgtcaatattttcttggacttaaacacccaatattatcccactttggtttaaatgaggtattctggaaatgagaaattcagactttctggggtttttcctgtttggtatttgaaatcagttatgtaatagggttctgagtttaaagtcgggtttgggttcaggtctttacctttgtctaccacttgcaaagctggcctttagtgttcaaaagtcccaagacttctgaatgttttcattgtagcaatgataactggtgagaatttagggtgctttggtttgtaagcaccaaaaccaccagtattacacagttaaaagcttaaatattttgagtcacttaaattagacttcagaatgtgttgtaaaattatcttaacagcaggtttgtgcttttcaggtggatgagaatggcaaaattagtcgccttcgtcgagagtgcccttctgatgaatgtggtgctggggtgtttatggcaagtcactttgacagacattattgtggcaaatgttgtctgacttactgtttcaacaaaccagaagacaagtaactgtatgagttaataaaagacatgaactaacatttattgttgggttttattgcagtaaaaagaatggtttttaagcaccaaattgatggtcacaccatttccttttagt

SEQ ID NO: 94320 - DNA, 1689 bp, Homo sapiens
tgcttgctgtctgttgtacaacgcttgggaatttaatgtttgttcaggatggatccctataaaggaatgattacttatttgtactgttaacagtaaaagacagtttagtttcaagcaggactggggtagcctatcttccttcggagctcaattcagggaaagctggttcacttgataagcctcttaactaaagcatacacttgaaagaaatcggtgatgtataaataacaattcacttttaccatattgccagtctttccattcaaggatttctagttggaggcatccttaaataaggtttcctatttctgagcactttgacagtttgtgcaaatgcatatgaacacatggtaaaacaacttagatactttttggccagtagtagtgcatttctaccttcaaacaaacaacacgttgagttatttacatttttaatgtaattttaaaatcctggatcccaagaagtcttggcttgaatttgcttttcttcataacaaacaattctgtctcccacttgaaattccatattgtcttcatctaaactgagaccacaatccattcccgttttgacaattgaaatgtcatctttatggtgtttcaatgaggttaatgagccttaaaaaagataatttaaggttagtatattcaataaatgataagtacctactaaatactacattatgtggtgttaaccaggaaattacactgaaattcttaaaaattttatggtcttgtcaagttaaatgatgggactaaataccaggggaaccccctcaaaaatgaagtttgctgtgaataagacttgatttgtaacaaaataacctaaatctcctatttcaaaggtagacataaactttttgctgaggacaggatggtactcaggacttgaatgggtaaaaccaacatacatctcaggcaaagggaacccatcaactacagacaatttaggggtttcaatagcaataagaaatggcctgagctgagattatgggcatgaaagatgaacagatttcagatggttatatagtcaacaggtcttggtgactggatatgctattataggagattttgatgttgcttacccttccaaattacatgtccattacgggttagtttaaattttttttgtttttctaactgtcccttttggactctgcagccagccacaggaacttttttcttcccttctgttacagagaaggtagctagtatagatgcctcacctttaggaagaagagaacattaatgtgcagaaaactaaagattctgataaatacgtaatttctgacattctgtggtataagaattaaaggtatgacaaaaatccaaattcatgcctagaaaaaagtctgggtttctttaactccaattttattttcctgaccaatattaagaataaaaatgaatgaaaatctttggctattcttttccttttctttttttctttttttttttttttttttgagacagagtctcactctgtcatccaggctggagtgcagtggtgtgatcttggctcactgcaacctccacctccggggtttaagcgattctcatgcctcagcctcccgagtagctgggattacaggcgcccacaaccacatccagctgatttttatattgttagtagagacggggtttcaccatgttggccaggctggtctcaaactcctgacctcaagtgatcca

SEQ ID NO: 94321 - DNA, 1036 bp, Homo sapiens
ggtcaggagtttgagaccagcctggccaacatggtgaaaccccgtctctactaacaatataaaaatcagctggatgtggttgtgggcgcctgtaatcccagctactcgggaggctgaggcatgagaatcgcttaaaccccggaggtggaggttgcagtgagccaagatcacaccactgcactccagcctggatgacagagtgagactctgtctcaaaaaaaaaaaaaaaaaaagaaaaaaagaaaaggaaaagaatagccaaagattttcattcatttttattcttaatattggtcaggaaaataaaattggagttaaagaaacccagacttttttctaggcatgaatttggatttttgtcatacctttaattcttataccacagaatgtcagaaattacgtatttatcagaatctttagttttctgcacattaatgttctcttcttcctaaaggtgaggcatctatactagctaccttctctgtaacagaagggaagaaaaaagttcctgtggctggctgcagagtccaaaagggacagttagaaaaacaaaaaaaatttaaactaacccgtaatggacatgtaatttggaagggtaagcaacatcaaaatctcctataatagcatatccagtcaccaagacctgttgactatataaccatctgaaatctgttcatctttcatgcccataatctcagctcaggccatttcttattgctattgaaacccctaaattgtctgtagttgatgggttccctttgcctgagatgtatgttggttttacccattcaagtcctgagtaccatcctgtcctcagcaaaaagtttatgtctacctttgaaataggagatttaggttattttgttacaaatcaagtcttattcacagcaaacttcatttttgagggggttcccctggtatttagtcccatcatttaacttgacaagaccataaaatttttaagaatttcagtgtaatttcctggttaacaccacataatgtagtatttagtaggtacttatcatttattgaatat

SEQ ID NO: 94322 - DNA, 1710 bp, Homo sapiens
tcaaactcgtgagctcaagcaatccacccaccttggccttcaaaagtgctgggattacagccgtgagccaccacacctggccaatttccttctttttaaagactgtataatattcctttgtatgtaaaatccacattttctttggaagaaatgtccatttgtcttttgatggacatttgagttgcttctacttcttggctatcgcaaataaatttgtttaaaatggtcttgataggctgactttgaactcctgggctcaggtgatcctcttgccttagcctgctgaatagctgggattgcagatgtgccactgcacccagctttgaaatgtttttatagtatgaaaaactgcttaagttaagaagtggtggaattaatcttgtgtatacacatgtttatataacttaaacttcataaagatatctttgctctacttaaagtacattatgacattgaaaatatacttttattttcattttagtcttgttactacagctataattcaaagaggaactttaagaaaaggctctgttctggttgctggaaaatgttgggcaaaagtacgcttaatgtttgatgaaaatggaaaaacaattgatgaggcctatcccagcatgccagtgggaattacaggctggagagaccttccttctgcaggagaagaaattcttgaagtagaatctgaggtgtatcaagcttaattcctatatattagatataatataatgattttaaatgccagtttacaatgttataccaaatatgtgtattaatgttaacaaatctagattataaggggctgtgaggatgcaagttgtgctattttagcattagactatagaattttgggggtggggataagatttttaaatcatttcaattatacaagctctcaaattaaaattttacatgtttcttgaaacttataaaagtagtagtttcatacatgagttaagctaatttcctaatgcaggacaacacaaaggctttaatctagcagttattgatgtctatttcattaaataatacgtttttcccctataaagccaagggcacgtgaagttgttgactggaggaaatatgaacaagaacaggagaaaggtcaggaggatctgaaaataatagaagaaaagcgaaaggaacacaaagaagcacatcagaaagcccgtgagaagtatggccatctactgtggaagaagagatcaattctacggtttttagaaagaaaagaacaaatacccttaaagccaaaagagaaaagggaaagagattcaaatgtactttctgtgattattaaaggtatctttttaaagattttacattacagttcattctttgaatatatgtttttttattctcatagtttgggcctttacatttacatgaaaattatttcaatattttaggagagtttttcttagtcaacatatttcttgctgattttgttgtaaatgtacgtttggctcattatatgctattaagtcaagtagatatgtgtaatgctaagcctaaataaaagtggatttagtgataaatgacattcctatcatggctttaaatagattattgtcatttttatgtctgctgatgtctaactcttaaaagcaacaattataaactttttctgtatttaggtgatgttgatggttctgttgaggccattttgaacattatagatacctatgatgcttcacacgagtgtgaactaga

SEQ ID NO: 94323 - DNA, 3387 bp, Homo sapiens
gaaatgcataaaacaaaattatgtgttgatcagttgatgaaatgtgactaaaggcttgcaggaacccaactctatatttcccctcagaacagtggttcaatatttgctaattcaatagttttggtgactttatagaacataattattgcaaataatggcaattgattgtatatacacacacacattcgtgtatacatgacatttgtgaccttaaatttttagagaaatagactacaatcaattattataaatactaaatttatcttaatgttttattgatgattcagatggcttagaatacataaatattcaaatatttatgaatatgcggaaaagtcagttaatagaaatgtatcatattttaaataattaaaaaacattttttagcttccttgtgatttgttaatattagagaaacagtttgcatagttattcctctcattgagtgtactgtttatatagacatttattaatagagattacttcttgagcatttaattaatgatcctaaaaggttttattttattccaatcagattatgtatatgaagctttattgaacactgatattgacatagattcactggaagcagactcacatttagatgaagtctggatcaaagaagtgataacgaaggcagggatgaagttaaagtggagtaaattaaaacaggacaaagtcagaaaaaataaagatgctgtaagaaggtaaaacttaactgtatatactggcagggtttgggggagactacatagttatatttacactttttaatggaaagatttgctttaaaatttcttttgtaataaagatatgtgtgtataaacttcgaagtacttaaagcattagaaagtgtattatacattcaagttattataaaactttaaggattttttaaaaatttgctgaatgtatacattggtctgaattttcaaatttgattcagttctgctcattgttatgaaaatgcaaaccacaggtaggtaggcagttattaaatagtctgtcatatgtataggagggggaaataggtctaatccacactgaatattgggttttattgttaatggtagttcacagggataaatgtgaaccaattcacaggctataaagtatttctgatatttaagaaatgaaactcttttgctgttaattgtaggccccaggcagatccagctttattaaccccaaggtccccagttgttactataatgggccatgttgatcacgggaaaacgacattacttgacaaatttcgaaaaactcaagtggcagcagtggaaactggaggcatcactcagcacattggtgcctttcttggtatgaacacaaattaccttacaatgtgcttgggaaccccacttattttcttaaactaaatgtcatagtatgaaatatacaaattcaaagtacaagagaaggctaaagcttgcagtcattagtttgatgaaatgtagagcaagtggttagtaaagctgtgttttgtactttctataagaagaagattgtgttaactgttaacttttttttttttttttttctttttgagacagagtctcactctgtcacccaggctggagtgcagtggtgcaatcttggctcactgcaacctctgcctccccagttcaagcagttctcctgcctcagcctcccaagtagctgggactacaggtgtgcaccaccgtgcctggctaatttttgtatttttagttgagacagggtttccccatgttggccaggctggtctcaaactcctgaccttgtggtccgcctgcctcagcctcccaaagtgttgggattacaggtgtgagccatcgtgcctggcttaatttttttgtatttttagtagagacggggttttgccatgttggccaggctggtgtcgaacccttgacctcaagtgatctgcccatcttgacctcccaaagtgctaggattacaggtgtgagccaccgcgcctggctgaaaattgtgttaacttttaattctagctcattcttagtttgatttaatgagtctacaatttttttattaattatgtttatataacttcctttgctaggttgtgataatattgctgataataattaaataatagtcccatttacgagcacctagcatgtttccagtactgtgctgagcaccttatatgttttgtcttttttatcttgacaacaacatcataaggtaggtattaatagttgcacttacaaataaggaagccgatacttcttcgagttaagcagctttcccacagtatatagccagtaagtagcatagccaggatttaaacccaaggtcaatggactcaaatcgtgagctactgcctactaaattgcctctctgtggctcagggagttgtgcaactctgatttgctaatgtgagggtggctgcctgtacaacaattggtctgttctgtctctaaaatagatatatcagttgatacatttatgaaagtagttatgttctagaattatggagactttagtttgaaatttttacatggaaaaaaacccataagaatctcactggcattttatcacttttcattgtgaaatgatgatctgtgttctgattaagattaatggaaggaataaaattattttaaagaattattgatggtttctgataatgtcgcatatattctttggtattaaggaagtacatgtttgaatccttgatgttcttgaatttctgtttccacagtctctctgccttctggggaaaagataacttttcttgatactccaggacatgctgctttctcagcaatgagagccagaggtgctcaggtcactgacattgtcgtattggttgtagctgcagatgatggagtgatgaaacaaactgtagaatctattcagcatgccaaagatgcacagggtactgtgtggctgacttaatggatctactacataaagtcaaagttctggggccatttacatatagctcatttagtcttcacaacaatcccagagttattatacgtgtattacagataagcctcaaagataaattgttttcccacagacttataactaataggaagagtatagcaggattcaacttgggagttgtgaccataagtacagaccacaggtacaatctttcctctactatgccctttttttttcaactttttatcatagaaattttaaacagatacaaaagtaagaaaagaataatgaaattcgatctatccatcacataaattcattaggagttgcatagtggttatattctgttatttcctgttaatttattatgtggaattcttctctaaagagaaactttcccttctgctttaaataagttcttatctgatcaaatgtataaaattcagacttttggaaaatcacttaaccatcttctcccttatttcttca

SEQ ID NO: 94324 - DNA, 1049 bp, Homo sapiens
gcaatgagctgtgaccataccactgcattccagcctccagcctggatgatagagtgagacccggtttcaaaaaagaagtttcagggtgtttaacagaaatgttatcatttggaattcgcactttagaaacattactctagttgtgatttggttagttgatatttcaagagtgaaaaaagagccttttacaagttgttattgtatttcaattctatcatagtggtaacattaacagtaataataatagctagtatttagagagtacttgttatggaatcccatctcttgatgagactgagatttttcagggcaggaacccagttttactcattgttgtaagtctagtgagctaagtgtagtccagtgctatgcatatagtaaatatccaattaatatttgctaacttgatttgaatattattttaaaaccttttttttttccccaggagaaacatgaaccagaagctactgaagttggagaacttgctacgatttcacactatttataggcaactgcacagtctgtgtcaaagaagagcattaagacagtggaggcatgggttttcatctgcttaccctgtgtggacagctcaactgtgtgcctggccctggccaacagatgtgctcactggggctgctttatctcagtataggcttctagtaacaaaaaaggtagttacagatttctttttttttttttttgagatggagtctcaccctgtcaccccggctggagtgccgtggcgcgatctcagctcaccgcaacctacgcctcttgggtttaagcaattctcctgcctcagcctcctgagtagctggggttacaggcattagccaccgcacccgctatagttacagatttctgtaagttattttattactcggtctaaaatgaaagtgcctagaaccatgagtacaaatccattttgagtaatttatcatttacagaatatttattacttaatgcaataaagtattactccaagcaatagagctttgtgagaaagggaagttccggttaattgtgtggtgctgatgaatttggttcct

SEQ ID NO: 94325 - DNA, 1082 bp, Homo sapiens
cgccaccgtacccggctaatttttgtacttttagtagagagggggtttcaccatgttggccaggctggtctcgaactcctgacctcaggtgatccgcccgcctcgacctcccaaagtgctaggattacaggcatgagccatcacgcccagcctgaatttctaaatcttaatgtgtttatttcgttggcattaagttagatttttccttgatctttactcgaataagccttttaaggtaaaatgcttgctcgattacacacacatacacaacctcataattgtccgaaggtaaacaagttaatgacttgtgaatatttttaacttataagcaatgaatcctcaaagcttataagcgagtatcaagacatgtgatatggttttaaaatagctgatgataaagtatatacatcatctcattttctcctcttagtcttgtaataggaaggacagatattcaaacacttatttatttatttatttttaacagagatccggaaaatgaggcccataggaaacaagtgacttgctgagtccagataacactgactgtcagagtgagtgtccacctaaggttcctttgttgcctaataagatactttctttgctatactgtacttgtttctgttatcatttcttttctttcttttaaaaaatattcagtataggccaggcgcggtggctcacgcctgtaatcccagcactttgggaggccaaggcggatagatcacctgaggtcaggagttcaagaccagcctggccaacacggtgaaaccccgtctctactaaaaatacaaaataattagccgggtgtgctggcaggcacctgtaatcccagcgacttgggaggctgaggcaggagaatcccctgaacccagcaggtggaggttgtagtgagccaagatcacgccattgcactccagcctgagcgatgagcaaaactccatctcaaaaaaaaaaattcagtatattctatttaccatgtcagaaccatacatttactatgtcagaaccataaaatacactttgggaagattggttgaaatgtaacatttaggctaggcgtggtggctcacgcctgtaat

SEQ ID NO: 94326 - DNA, 1659 bp, Homo sapiens
gtaatcttcaaggtctgaaatgagaaacatactgactttttaaaattttaacagtgtacttcttaggctttcattaccagctctgaagaactttttggaataattccatattccatagtgtgtggtttatgagttgtgggtttcatcactaacccagtaaccataagaaaagtctctctctctctctctctctctctctctttctctctccctctttctctctctctttcgtaggccagtagcaatgttgtgttcacagtctaatttccaaaagaccatcaataaaaaagagagcatgtttaaattgaaatggaacttagagaacttgagcttacttacgtacttcaatgccaccggtaacttaggttttaccaccaaatgctgttaacgttaaatcattttgaaaatcttggatgaaaggtgctatgtaaatggaaatacaaaggattcttactaacatacaaaaataatgcacaacagaaatatctaaaaccttttccgtagactttgaaacatctctctctctcataactccctggattcaagtagcacattggtaataggtatcagagcagtctagagacaattgcatgtcaaaaaatgtacattcatttttaggtggataaaagtaaacatagaaattatgttatggctaaatacagttagtgggtaacttagatttatattagctagcatctaatttgcacaactagaacacatcccagaacaattactgaaaagctgaaatttaatgggtggtgatgtagcccaatgagggcgaatgacattacagcttgacctctccagaacactaatatcctaaaatacagaacatgctgggttaagtgcattagtgcttcaagcagaaaatgctgaaaacaacgtgtaaagtactgaatctgagtaggctgaccctgagaagggacaattaaagagacaaccaagggaacacattgagactacaaaaatatgaataatctcaattatattcatcacacttttttcataccatttcaagaaacgactagacagtagtaaccacatgaatattttactttctccagtataccttgagaagcaaactttgtaggaagccactcttctcccctaaacaacttctgccaaacaataataaagccaactggaaacgaatcggagccattttcattttcctaaccggggcctgacatgctttaaattatctggctgtattctaaatcaacacctaacccctcaaggaaactgaagaatcaatatacagggtaatagctttggctcagagctccaataatgtgcttcagatctgtccatgtggaaatgctttcatccaaatttttaaattggtggttaccaaagagttcacaaaacaggtttgtatgtagcacctttcatgcaaggcatgcaaaaagcctattttaaaatcactgtgcatattatagagttgtagccacctcacaatgaagtactacagcctgtgctgtcttaatggtttatgtcaggaaatgaaaaagatactgtaccaaatctggaattacaatggggagtaataatgtatactaaatgacttttgtattttaagttactttttgtgagtggtgaatttttgtgtttttcttttcagctacacttagtcctgagatgtattttttctttaagtct

SEQ ID NO: 94327 - DNA, 1034 bp, Homo sapiens
cactttaaatttaattttactagtgaattatgttctaggaattacttttttagtttgaagccttttgtggtaggaatacaacttccccacagttttcttgaaaattaatgactaaatgcctattctatgatgagccactcaaaaattatctctgattgtctgtcattctcattcttatagaaatacctggtgcatgctgttcttatagtggctgctctgtattttgtgtctctcttatctttaagcttttcttatattttctttcttctttctaccttccaactaaatacagagagaaaagtgtccttcagtttctcagtatgaagcctttatttctgaagtaacaagacacctagcaactataggaatcatttttaaaaatctttaaggagacttttaacagtccttcgtgaatagagcaggcaagaaatacaaaccttcattccttgaatcaaggagcactactggattcaactgccaaaattttttaaaggttttaggacttactataccttgtactgttaagatctactgaataaaggacgttctctcactaaggaccaggtgttttaaggttaagtgtttaaagaagtactccaagaacaatctgcttttttcatcatttgttttatgaatttatccatgtttgcttaatgcttctgctaagtgttagccaaaatctagccatttatatttagttgtgtaaacctaaattaaatgctgtagtattttgtggaatgtactatatagcaagatacagagaaaattgttttggcatgtcagagccttatttggttagcagactgcatgtgttgatactttttttttcttaaagccaattattttgatgcaaaagaaattcagtttataagataaatctgaaaaatccataatgaaataggagttataaaaaatttatagtgatattaatctttccatatttcccattaagcaacactaagcattcataagttaacccatggtaaagagtgtttttctgaaacttttttttagtaagatggtttttcagcaaa

SEQ ID NO: 94328 - DNA, 1366 bp, Homo sapiens
aaatacacattggcattctctctggaatgttttttgccatttggatttagcctatagctgataaggactcagcctggcacctggaaggaatgccttcaaatgtgaccatgtggggatgaaattatgttatacttgttgttgttgttgttgtattaagtggttattaactggaccaaagaaaaaatctgtagagaatatttcctaatgaaatttgtctcctttgtaatcacactttttttccgatagctattacaaaaaaaaaaaaaaatggttctggtacaggtaatcaaatgaacacaatcagaggattgtcatattttagtaccacctaatatactttttgcatccttctattttattgtcagttacttcccagtcagtcctgacatttcaaatatatttggtgctaatattttcccttttgttttttcataggccagtaacaaaacttaatagtaaacatagctgagattaaatgggggcagtatatgacacaaatgttataattagtgttatttcttttccacactgagtcaaagattatttcacagctatttcaactttttagatatcataattctgaccataacacttcaaaatattgtatttattcattcaaaattcattgaaaaatcacatgctattatattaaaattatgtgattattttacaaaattagacttacagaaaagaactatttcctacccaaaaagctatatgtttatatgcagcatgtttccaaaaaaaaaaaaaatacactgtgcatataagagaaatatgtatcatgtccatgtgtcctgaggactgttggaaaatacagtctggacttcagaaatcatcacctgctgtggagtcataaaattccccccaaaacaccactagttctttttgtttgtttgtttgagatggaatctcactctgtagcctaggctggagtacagtggcgtgatatcatctcactgaaacctctgcctcctggattcaggcaattctcctgcctcagcctcccaagcagctgggattacaggagcatgccaccacgcccagcaaatttttgtatttttagtagagacggtgtttcaccatgttggccaagctagtctccaactcctgaccagcttcccaaagtgctgggattacaggcgtgagccactgcgactggccacaacactagttcttatcaacgttttttcatagcatttggaatcaaatttttagtggtgaaaataccttagaaatcatatggaaccgatgtgtcccaaacatttaagaaaaaaaacaatactttctgtaagtgaaatcttacatagatgccccaaattttaaaaaatgaatttcatttaaagtaaaagtgaaacaactctga

SEQ ID NO: 94329 - DNA, 1086 bp, Homo sapiens
accttaatttagatgaacaccacaagttaaatttctgtaattgaacttcagagctttttttttttggtaagttaaggagtattaagaggtaccacaattttatattgcacagtctgctaaatcaggaaagtaaaaacatggcactatattcactaatctgctttgaatttttttttaaacagataaagtcctcaagtcaagagaatcttttagatgaagtaatgaaaagtttgtctgtctcttctgactttttgggaaaagacaaaccagttagctgtggtctggccaggtcagtaagtggaaaaaccccaggggacttctatgatagacggacaactaagcctgagtttttgagacctggtcctcgaaaaactgaagatacctacttcattagttctgcgggaaaacctacaccaggcactcaaggaaaaataaaattagtaaaagaatcttctctgtcacgacaatcaaaagatagtaacccttatgcaactttacctcgtgcaagcagcgtgatctcaactgccgaaggaactacacgaaggacaagcatccatgattttttgaccaaggacagtagactgcctatatcagttgattcaccaccagctgctgctgacagcaacaccactgcagcatctagtgagtaccatttacaccagtggtcctctcatatacttgacatcccaacacatactataggttcttgtgcccaaaatgatttagctatagacatgcctgagcctctatatgcccaggctagaaactcaagaacaggaaggtcacattttctaaaccaaacttttgccactattaggatgcctagtgatgcattcggaatgttggcaaaagatagcataggaccatttactgtggcccattcatctcagccattcttatccctgaatacagaattagttagtaacataagtgggttacctcctaggccagttatcagaataactgaccaggcttctgcctctttggataaacctgcacagaaagaaaatgaacagttttctgatcatcagaaccctagtaacagtaacctacagttttctataaatagcaacaatcttgtcactt

SEQ ID NO: 94330 - DNA, 1033 bp, Homo sapiens
aaatgtttttacatccagtagaaaaatgtagtctgaaaataggatttttttttttctgatttgaaaatttaagaaactcttacttttgtaaaatgttacataacttgagccaaattctttcgtggcccactttactctctgtgactgggaaacaatggaaagttgcattttctgttttgatgtacagtttgttcgtgatcaaaacaaatccgtactcttaaggaacaccatagatttgagggagtttaattctagaactagcaaattttcattttatatagttgcttaatgtcaactgagtcttttaaggttatataggcaccatatcaacagtggacagcaagaacaataagatgatcaagacatttaaaaaagaataaagcactacatatttgattgtatacttttactgaaatgttgtaagtaattgcttcatatctttatttaactttccttatgtgtatgctctttaaatttttttaaatgtttaaagttatccatgcaggatgaacagagaagccttcaagtagtaatgaggacttcttagataagcaaataattaaaatagaattttctgcatttagaacagtttttggtcttaacatactgaaataatataaaattcacctaatgagccaggtgcggtggctcacacctgtaatcccagcactttgtgaggccgaggtgggcagatcacctgaggtcaggagttacagaccaacctggccaacatggtgaagccccgtctctactaaaagtacaaaaattagcctggcatgggggcgcatgcctgtaatcccagctacttgggaggcagaggcaagagaatcacttgaacccaggaggcgggggttgtagtgagctgagatcgtgccactgcattccagcctgggtgacacagtgagaccccatctcaaaaaaaaaaaatacacacatatgtatatttatatataatatatatttatatataatatatattatatatatttatatataatatataaatttatatattatatattatatatttata

SEQ ID NO: 94331 - DNA, 1550 bp, Homo sapiens
attagtttaaaatattaaaaatatctgttttaaaggatgaactttaagaaaccaatttttgggccagggacagtggctcacgcctgtaatcctagcactttgggaggccacggcatgcggatcacctgaggtcaggagttcgagaccagcctggccaacatggagaaaccccatctctactaaaaatacaaaagttagctgggtgtggtggcaggcacctgtaatcccagctacttgggaggctgaggcaggagaatcgcttgaacccaggaggcggaggttgcagtgagccaagattgtgtcattgcactccagcctgggcgacagagtgagactctgactcaaaaagaaaccagtttttgggcaatgttgagtatttcagatattttccatttctgtctggaaaatcatatctcaccaaactattggcaataagtggataacatgttaaaggaattttaatgtaaacagggttttaagagttagcatagggcagtgttaattatacagttgttacccttgttacagataggaatacaggacattaactgtatagatgcttgtattcctcctcttcttgacatctctgcaatgtgcagagttccttgtctgatctgttgtaggtgacccaatcaatagcattttgggggatctggggggatatgtcattctatttaactaaaacactcctggcatatccatctagaactcattttcaaatctaaatatgcactttatcctcctctttgaatctcaactattgtttcagaagtgtcctattctaaagtgtctcaatgaactatctggaaatttgctttctaatctgggcatgctcatcttgtgaaagtatgcatgattgcttcctcaaagcattctgtaatcagaatgtaaaagctcatcagcatcatcagctagaagttttatcacactgtctcctggttttttcatttagcttcaagaccagccagccttgatagtggcagaacatccactagcaatagcaataataatgcttcactacatgaagtcaaaggtatgctgtaggtaaatttattaatgcgctctatccatttccagtatttaaaggtgggagatgggatgaagtttctggggtaaagcatgaaatccaaatcatctatgtttggaacatagttgtttggaacattttatacttttcacattgtaatacaaatgtatttcaatgtatacaaatgtaaaaacaggagcagttatttagtttcactttttcatcttcatagataaaagtcttatagtaatatttatacttcaaaattatctatatgtccttattttactgacattttgtctttgacatgaaaatgattgtccttcattttcttatgacgcatggacactcacattactcatattttagaaatatgtttggcttaatttatccacaaaataaggggaaggattttgtgtttaatttgagaaacaactatttgtgtatatatatattgaacaagaactatatgaatgcatttggctcatataaggaattatttcaagattttttttcttaattt

SEQ ID NO: 94332 - DNA, 1051 bp, Homo sapiens
ttggcacatgcctgtaattccagctactagggaggctgaggcaggagaatcgcaggcggaggttgcagtgagccgagatcgtgccattgcactccagcctgggcaacaagagcaaaactccgtctcaaaaaaaaaaaaaaaaaagtatatgttcctcatcattgtcttcagtgcttttccaagtattttaaaatatcaaagtacatatttcatatttcattatcactcagcagcatgagaataatagccttaatatagcatacatagctaaaactcaaacattcatttctgtccttaatttcaacatttaactcccatctgttcttctcccttttttctttcatctccctgtttctgtttttcctcatgctctgacattaaagtggttgcactgaaaagactgccctttttgaggaacagaccgaaggataaagacaaaatgaaggcctgctaccgtcgttccatgtgtaagactttatgacagttcagcttctttcaactgactacactggctttcattactaatttttcactaacctttctctggactgtgccaatttccttattttgcagaggtcagtcttcctctaatataaggagctagaagaattttttttttcaagtggcactgaatttgcattatgtatatgtccactgatacatatacgtgcatatttctagtcatacatgtaacttactcgtaaatttccagtgctttctaaaaattggcaggaaaaaaaccctttattttatatgccatagagattttttcccaaagaagtttacttaagaagaatataacaaaatgtttagcattagaagttaatttcctttaatgaaccagattaattaaataaataaagtggccaaaaacccttgaaaatgcttgtcattctttaaataataatattctggattttctttttttatgtggcatgggtagttacataatcacattaagtgtctgtcactttagatatcatctctttcaggtttttattgaatggtatacttattgagtcataaaatgaataatttcttcagtaacctg

SEQ ID NO: 94333 - DNA, 1253 bp, Homo sapiens
cagcctgggtgacacagcaagaccccgtctcaaaataaaatagagatgtgggggccagttacagtggctcatgcatgtaatccctgcactttgagaggccaaagcaggatcacatgaggccaggagttcaagaccagcctgggcaacatagtgagacactgtctctattatttaaaaaaaattaggccgggaacggtggctcacgcctgtaatcccagcactttggatggcgaggcgggcggatcacctgaggttgggagttggagaccagcctgaccaacatggagaaaccccgtctctactaaaaatacaaaattagccgggcgttgtggtgcatgcctataatcccagctacttgggaggctgaggcaggagagtcgcttgaacctgggaggcagaggctgaggctgagattgcaccattgcactccagcctgggcaacaagagtgaaactctctctcaaaaaaaaaaaaaaaaattaggtgaagagatacatatttgtttataaacttatgatataatttttattacaaatttagaagtaccgcattataatatgctctatacaattataaccttttaatttcattactagtatgcttaaacagtaaaaccaaagtaaaagctttggaagtatattccaagaaaatcagaaaatttttttaaagatgtctaagaagttgactactatcaaagttcttacaaaatatgtgaacaggatactttgaatcctctcacactatcactaatgtcactaattgaacacacacacacacagacacattctattcttttgaaatagcaggtaaatgcagctgctgcttctcccaggggtagactctccaaatgggcaactctcaaagcactcaaaaaactattcacagtgttttggcttaggtgaattatctctggaaacatagtattttagggtataggatattaggcattaattatgggctataggccaggcgcggtggctcatgcctgtaatcccagcactttgggaggctgaggcgggcagatcacttgaggtcaggagtttaggaccagtctggccaacatggtgaaacttcgtgtctactaaaaatccaaaattagcccagtgtggtggcatgcaccagctactcaggaggctgaggcaggagaatcgcttgaacctggaaggtgaagatagcagtaagccaatattgcaccactgcactccagcctaggtgacagggcgagactttgtctcaaaaaaattaaataaaatt

SEQ ID NO: 94334 - DNA, 1023 bp, Homo sapiens
aaacaatgttttaattttttgctgatataaattgtaataggtcacctttcttccaaaaaggaaaaaaaaatgtaaatttttaaaaaaggagaaacatggaaaaattcccattgttaactacctgatgaaatcttagttgccaaccatggtatctgtatttttttatgttttggggagacattagatcacagtcaccaaataatttaatattcatagctgtacaaaatatgatgcctgtcctaaaaggtaatttttattttatagtgataagttaaatgaattaagacgtcagaaggagaaactagaagagaaaattatggatcaatacaaattttatgacccatctcctcctagaaggtaccattaaccaaattttatgaattcttattctgaaaaaaaacactaggttatttctaatattgtgatgacttctacttttgtgaaggatttgtatgttgaattttaaactgataacaatttttaaaattctgttaggagaggcaactggattactctaaaaatgagaaaattgataaagtctaagaaagatattaatcgggaacgccagaaatctctaacattaacacccacccgctcagactccagtgaaggatttcttcagctccctcatcaagacagtcaagatagttcttcagtaggttcaaactctttagaagatggccagaccttggggaccaagaaaagcagcagtgagtgcttaaactctttaaacatcgtattgatttagaatcctttctaaagattttttaaaacttcagtagtcctttgggggaatagtctgatgaatggcatttctttttaatttaacatcataaaattaattgtgtactgcattagtgtacagccacacaattttctgaggtaaatcatacacagatatactatcatttggccagaggggtaaaatattgcagaaagaaagttaaaataagagctggaatacctctgccacttgctatttctgttaatatgggcaagccttttacctttgcttcatacttc

SEQ ID NO: 94335 - DNA, 1050 bp, Homo sapiens
cagccttgttgggtgggagctatcctcatttcatagatctgagaacttacttgtctaacatttcatagaaataaaatattagatatttgaatctagcttttggactatactataagttaaacagttttaaagacagaaagcagtgtttggggagtagataatatattatatattagacccagtgtttgtgaaaattaagaaaatatttatatagagagagagacagcatgtaacccagtgctgtaggtgtcatcactaaaataatcatgctctgataaaagtacaatcatctaattgttcaaacagtggaacacttaaatctttgtgtagtacttcatatttttcagttgatttatgttaaatgtaaatgttgattttttaaaaaatgtttgtgtttaaacagttgctaagccaacttaaaggaaatttagaagaagaaaatcggcatctactagatcaaattcagacattaatgctacagaacagaacacttttggagcagaatatggaaagcaaggatctttttcatgttgaacaaagacagtacatgtaggtaccaaataattttgcactctgaaatatgttactcatgattttatcattgccatacccagtggcagagaaaattcatgctaatttttactgattttcaacaaatatttttgagtgcttatattccaggcactattctaataatcagaaatactaacatgaaaacacatgcatcttgctcttaaagaattagtagtctaaagtgagaaatacaaataaacatttaaatacagtaattctataatggaagtatatgtaggaggccatagaaatatagcacatataggggcaggaatatcttagtctgggagaggcaaggtgaactttccaaagatgagatttgagtggagatttataggttcgataggaatttgcttgaggaggcatgccagcccaggagagctgcaatacaaagtcatggaagtgtgatgaaagtatgttgtggtgtggtataggacctaaaaattaattgttctttctggagcaaaattgaggaaa

SEQ ID NO: 94336 - DNA, 1072 bp, Homo sapiens
ggcaacagagtaagactccatctccaaaaaaaaaagagagagagagataggatcttactcttttgcccaagctgaagttcagtagcatgatcatagcttactgcaacctcaaactactatgcttaagcaatccttccaccttagcccctcaggtagctggaactgctggcacacaccaccatgcctagctaatttttaatttttttattttaatatttagtttttgtagaaatagggtctcctgtgatccccacggttgctcacaaactcctggcctcaagtgatcctcctgcttctacctcccaaaatgctgggattacagacatggaccatcaataaccagccaatactttcttattaatacttgaaactttgagtacctatacttcaacatatttaaagactaaaaaattcttttcccagtgtggagatgggtggatgaaaaaaggaaattaaaaattattttcaagggaaaggtactcagaattttaaaaaatctagtttttacagaatagaaactgatttttgataagtttagtaacttgtaaaacagtcttttattctaagtatgccttaatgttatttatatcatttcatattgtataaattacaccaaaagctattaagataatctaattatatttctatgatttctaattataggctgaatcatacctatagtcaacttttaaaagagactgaagttttacaaactgaccataaaaatttgaaaagtcttctgaataattccaaactggaacaaacaagattagaagctgaattttcaaaactaaaggaacaataccaacaattggatattacatcaaccaagctgaataaccagtgtgaggtgagcttaaaaagtttaatcactgtgtccttcatttaggcaccaagacatgcctaagaaataaatgactagattacaatgacaatactagtatatatttagtggcatatatctaaaagaatttggtctaggatcactgaaacttacatgtaattcagaacaacttcccatatcattaattacaatattttaaaaactattagcttaaacttatgtccaaat

SEQ ID NO: 94337 - DNA, 1462 bp, Homo sapiens
aatttggactcttgaaaaatttctaaaagtaatttttcacttctatcaacttctatcaccaaattctagaaatgataaactagtacttcaaattctatacattttcatttgtaatataatacaaatggttgctaatcaccttcatttaaaataaattcaacccaaaacatacaatacatatatatgtctatatatacacacatacatatgtatatatacacttccaaaagtcaaaattaaatgatagccttattctttgggaagctaaaatccacgtcttcccagtataatgtaaatatgtgtgctgtgattcatttagagctttctttaattaacattgtaatcttgtattttgaaaaagaacatgaactgtttttcttatgtctgataacaatatatattcttataggttgaaaattccacccttaattcccaaagtacctcactcatgaaccagaatgcccaactcctaatccagcagtcttccttagaaaatgaaaatgaatctgtaatcaaagagcgagaagacctaaaatctctctatgattctctgatcaaagatcatgaaaagctggaacttcttcatgaacgtcaggcttcagagtatgaatctcttatctctaaacatggaactctgaagtctgcccacaaaaatcttgaggtggaacatagagaccttgaagaccggtaatttattatattttgttgtactgtgaatttaaaatgaattttcttcaagtagtataataaattttatatattaaacacatctaatgttagtttacataagaaatttatataaatttacatgtgttttaaatgatactcattactcatttccttcatttctaaaatttcttttttgtaaatattataaaccaaatgccttttttccccccagttacaatcagttattaaaacagaaaggacagttggaagatttggaaaaaatgctcaaagtagaacaggaaaaaatgctgcttgaaaataaaaatcatgaaacagtagctgcagaatacaagaaactttgtggtgaaaatgataggtaataaatatatattatatataacaaacattttatatagaaagtatatacatatatatgtgtatatatatgttttttcaaaattatgtattatttcttacatccaaactatatactgcccctttgtagtaccaagcatagtttgaattcggaattttaaaaaatagaataggctgggtgcagtggctcacacctgtaattccagcactttgggaggccgaggcaggtagatcacctgagtcaggagtttgagaccagcctgaccaacatggtgaaacctcgtctctactaaaaatacaaaaattagccaggcttggtggcgtgcacctgtagtcccagctacttgggtgggtgagacaggagaattgcttaaacctgagaggcaaaggttgcagtgagtcgagatcgcgccactgc

SEQ ID NO: 94338 - DNA, 1030 bp, Homo sapiens
actactcacttaggtatatatttgcctttgggtaaattagaaaagttagacctccatggttggacacagccccatttattctgggcattctgggaaccttcaagcagtattaaaaccatacaactgacaattcctttctagtttttgtgttaataaatatatttagaatgggatattttatttttaggatattataatgcagacaagacacaggcacaatattaaagttttaatatcattgccttctttctgataaatgtctgtttacaatttgggatgggggaaatgttttggttttttttctcttttaagattgttggggcttttatggattataatgctaataaatactcattgtataaaattcagtatactatagaaacatatttgatgttgccattattgttaatatgtttggttttggtttttgtttttcaagaatgctacactgcaagcagagaagcaagcgttgaaaactcaactgaagcaacttgagacacagaacaataatttgcaggctcagattcttgcacttcagaggcagacagtgtcattacaagaacagaataccactcttcaaacacagaatgccaagcttcaggttgtaatataatattttgggaatatgcaaccaaactcttgaattatgctattaaaataagggagggtaaacatggaaacattgtttcttagtgaatgaacttaaagataaatgaaaatatttttatttagtgccatgccaaattttcacacatcagtttttaattttaaatattaataaattcagtcaatacatctgaataaagataaattatatttatggtctttctaccatttcattaagtcgattgtaaaaaattaggtagaaacccttgctttagagtatgcttgcagcatactattccttatttcatttgtatagcttttttttgtcagtttagttactgaaaagcaggacaacatgagaattttgtctttagacctctcctaagttcaaaggatccatctttcacttaacaccgccagtgtc

SEQ ID NO: 94339 - DNA, 1430 bp, Homo sapiens
tgcggtgagccgagattatgccattgcactccagcctgggctacaagagcaaaactccatctcaaaacaaaacaaaacaaaacaaaacaaaacaaaacaaaacaaaggagtcttcattaataaaaaggatattttgggactttggtcttccgggttccttgagaattaattattgcttttgataatctaagccataatccggagctctgttcactcaatgattttgttgcttcattaccaggattagttttaaagggagaatggggcagtaagaagaggataatttcatttgcctctttaacaaaaatgcttttataagacccatttatggcatgaatatttgtggtcataaattatctttaaaaataattttctgacctccaataatgaactacattactttgtacttggatagtaggtataaacttttggaatcaaaattagaatccactcttaagaagtctcttgaaataaaagaagaaaaaattgctgctttagaagctcgattagaagaatccacgaattataaccagcaattgcgccaagaacttaaaacagtaagtgattttcttggaaagaattttaaggatcatttattatataaatatttggacagaaaaatataaagtagaaaataaaaatataaacattttattgatatttagtctatttcttcctttttcataaacttgagaatattcttaaacagatctctgtcatatgaatatggtatagcttattcagtgctatttcatgtgtgtaatattcctgcctgctgttagggatatatcagaagtgtgtgggtggaatgaggaagaggcaggcttattttattgggaaaagctctcattgtgatactgacatttcactctgtcactctttcctatcgaggatccaggggaaattctgctaagcaaaatatgagtgtgagtataccaagttagaggaaaatcatatgtgtgttatataagacagcacctgatctcataaatttgatgtcttttctagatctgttttccttgtgatatttgaaagtattcagtgaagtaagtaagcaaggcagaggcaactgtttattttccctaaggaagtaaatcaaaatataagggactttcccattccacagggctagtagatggtagattggtagagtcatgttctggtttattcacccttttatcatctctgcagtgccaccaggagtggtctcaaggttaactaaacacttagactgataagattactgtaggctacatttagaatcgctgtactcagaacactataagaaatacaaatagatagcagggcagtgtcagtccatcctcttcacgtagttgtctgagaatcatcttcccaccagatggttttggtataagatgagattcacactgggtgtgtgcgggagctttcctggctttgaatccgtatac

SEQ ID NO: 94340 - DNA, 1050 bp, Homo sapiens
ttttcttctgtagacttataaacatgaacaacaagttccttgtgcctaaacttctaagaacatcctctagttcttcagatcagtatcatagggcctctttcactgggagaagggatcttgtgggagagaagtattatagtcaacatatatttataagaagaaatgtgcactaaagttcaggctcattattaaaaagtaaatggatatgattttccccagttttcaaacctaaatgtgtattcacaagtaaagagttactactcccttttaaggttttgtttaaagtattagcaaaaaaaaggaaaaaagttatttcaactaggttataactttaactacattttaataatgaaggaatggtttaatgacatttcctggttcaaattacatgtattcctagatggtggtaattagaatcttagctgactttcttagatgtttatacccttgacacttaggtgagttttgcatttcttttaaaataaggatttggtgagtgaaaagttgaagacccaacagatgaacaatgatctcgaaaaattaactcatgagcttgagaagatagggttaaataaggagcgactcttacatgatgaacaaagtactgatgacaggtgagtactaagtctacttggcaaacagttgaaaatttttttttttttttgctcatacatgaattctttctgtactagctatagaaaacatttatatatttcaccctatttctggttccttccttcccttaaggaaagttctgtagccgggtgcggtggctcacacctataatcccagcactttgggaggctgaagcgggcggatcacctgaggtcgggagttcgagatcagcctgaccaacatggggaaaccctgtctttactaaaaatacaaaaaaaattagctgggcatggtggtgcatgcctgtaattccagctactcaggacgctgaggcaggagaattgcttgaacttgggaggctgaggttgcggtgagctgagatcgtgccgttgcactccagcctgggcaacaagagcgaaactccatctcaaaaag

SEQ ID NO: 94341 - DNA, 1700 bp, Homo sapiens
gaatttgaagcatgtaactgtaaataatctgaagaccattatgattaatagaaaatacatttctcaaccgttcctttaaactgtgaacttcctaaaaacatgaactttaatgacctcacagtaagtgtacacagtggtcttcagtaaatgacctcacagtaagtgtacacagtggtcttcagtaaatacttgtcagaattaaaagtaagacatgttctagcaccctttttttgttccccttttcttggtagtttttggaagagataaaccatagttagtttttcctcaattacagcttttaattattttcttttcaaattagattaagatactggaacaggaaaatgaacatctgaatcaaacagtgtcttccttaaggcagcggtcccagataagtgcagaagcaagagtgaaagacattgaaaaagaaaacaaaattcttcatgaatctatcaaagaaacaagtagcaagctaagcaagattgaatttgaaaaaagacaaattaaaaaagaattggaacattataaagaaaaaggagaacgagctgaagaacttgaaaatgaattgcatcatcttgaaaaagaaaatgaattattacagaaaaaaataactaatttaaaaattacttgtgaaaaaattgaggccttagaacaagaaaattcagagctagaaagagaaaatagaaaattaaaaaaaacattggatagctttaaaaatctgacctttcagttagaatccctagaaaaagagaattcccaacttgatgaggaaaacttagaactgcgaaggaatgtagaatctttgaagtgtgcaagcatgaaaatggctcagctacagctagaaaacaaagaactggaaagtgaaaaagagcaacttaagaagggtttggagctcctgaaagcatctttcaagaaaacagaacgcttagaagttagctaccagggtttagatatagaaaatcaaagactgcaaaaaactttagagaacagcaataaaaaaatccagcaattagagagtgaactacaagacttagagatggaaaatcaaacattgcagaaaaacctagaagaactaaaaatatctagcaaaagactagaacagctggaaaaagaaaataaatcattagagcaagagacttctcaactggaaaaggataagaaacaattggagaaggaaaataagagactccgacaacaagcagaaattaaagataccacattagaagaaaataatgtgaagattggaaatttggaaaaagaaaacaaaaccctatccaaagaaattggtatatataaagaatcttgtgtccgtctgaaagaactagaaaaagaaaataaggagcttgtgaaaagagcaactattgatataaaaacgttggttacactacgtgaggtaaatatgtttacctaaattaaggcaaatttttttttatatttttaactcaaggtttctttaagttttattggaatctatcagtaatttgcatcatttattttatggttcagtagaattttggaattagaactagaaatagcttccaagtttcctactttgttaaactaagaaatacctataaattgtatttttaaaagaatttgtagtaataaagtttcctagtggtatctgacttattacattataattttaaacctttatttcaatataataatgtttgatcaagacactaaattctaagtat

SEQ ID NO: 94342 - DNA, 1099 bp, Homo sapiens
gtctcatatttcatttgtaaatcctaatgttcttatatcagcaaaatatttaatgggtctgcttgaactccaatttcttcaatctaaattttatgctttttttaactagaatgctgtggatgcattaaaagttaaacatgtatctcttagctgggtgcagcggctcatgcctgtaatcccagcactttgggaggccaaggcaggaggattgcttgagctcaggagttcgagaccagcctaagtaacagagacccagtctttactaaaaaataaaaaaattagctggctgtacctgcagtcccggccgcttgggagactgaggtgggaggatcccttcagaccaggcgtttgaggctgcagtgagctaggagcacatcactgcactccagcctgggtgacagagagagaccccgtctctttaaaaaaaagaaaaaaagaaaaggaaaaaaaagatttacttcttttatcttgtttatcttatataacctcattgaatttttaataaagttaaggatcagatgatgcaatgcatatacactcaactttttaaatagtaaagagtaaacatagtaaaaacagtaaagagtaaatacaatggtgtatttttcaatattatagcaccccagaaatccctgggccatgaggtgaatgagttgacatcaagtagattattgaagctagagatggaaaatcaaagtttgacaaaaaccgtagaagagcttcggactactgtggattctgtagaaggcaatgcttccaaaatcctgaaaatggaaaaagaaaatcaaaggctcagtaaaaaggtaaattaaaatgtagtgtttattttaatgttaaaaaaacttgtaaaagtgtaaataaatagcccatttattttccactttttaaatgcacgctcaatgttattttaacttgttatgaaaattttcaaatatacacaaatatggtgtgaatgaaccctatactcattattcagcttcagcaattaagaacttactagctgatcttggccaggtgcgggggctcacgcctgtaatcccagcactttgggaggccaaggcagatggataacctgaggtcgggagtttgtgaccagcct

SEQ ID NO: 94343 - DNA, 1841 bp, Homo sapiens
tcaaggtgtatttatataaaatatttattaatagagccttggtttatgatttatgtgagttctggtttaagtcttggtattttactgcaaaaacctcaagcccttcacttccaagttatagctccaagtacagagaaatatttaaatctatttcagtcaatacattaagccttgattccatggagaattgtatcttaaatatctggaagactccttgtacttagttaattccttatccttgtgactaaggaagttaaatataccccgacaatttaatgtgaagttatagtagtattatatatcttaagaactgagtgttttgtttgcattctggggtaaaaaggaagccaagaaaacattaattgtatttctattactcagtaggtttcctcatgcatagaactgttgataaagatggcttaatgttttatgataatctgtatgttccataactttaaaaaattaacagatattaacacatttgtgataaacatttataggaattaaaagaagacaatcaagttttattagaaacaaaaaccatgttggaagaccaactagagggaactcgtgctcgttctgataaattacatgaattagaaaaagagaacttacaactgaaagctaaacttcatgatatggaaatggtaagttttaagaggtagatcagttacatggcctttaaggaaaacttctaagattcagctgatttccctgtattggcaaggatggctagtgtccttgaggctttaacagagaagagagagctaaataaattagatgcctccaactttatataaatataaaagtagtagaaatttctgcttttgttacagaagcatgttacttactaatgttgtcttcaaccttttaataccacaataaataagctattgtgtaaacatgtctttaaaaatacagaaatctgattgctaaaatttagcattggttcataattcttttgttgtatcactaaaacagtatgttgactatgaagaagaattttcattgtgtccccaaagatcagcttaaaaggatgtcagacacttaatcagtataatgaccggtaataattataattgccttcaaaactgaaaaatttaaagaactcataattattactgagtttctgataaataaaagttgtgagaaataaagtatttgctcaaaattgtactgtttcttagcttttttctctccctaatccttgccaataaaaaaggaacgagatatggatagaaaaaagattgaagaattaatggaagaaaatatgactttggaaatggcacagaaacaaagtatggatgaatcattacatcttggctgggaactggaacagatatccagaactagtgaactttccgaaggtattcccaatttttttaatttaaatagataatcgaatcatgaagttgtatttatgtttacttgcagttctttattttccgcagtgggagatatctcagaagactacctgtctccatagatatgatttcacacagtaatatattgtttgcattttcttgggtctggtccctagctttacatgtcttacaactgaatttcatgaatgcaataacagatttaattggtttcttagccactatttcatgttaatatcctaagaggctgcaatatcagtttattaatgtattttaagaaatatagccatctaataaatagaacagaaaagtcgtattagtggtcagcatgttctttgactataggtaaacccaaataggaagttaaagcataatgggcaaattttcagaggaaaatatagttagaattagttaatttaaggatcttcatgactacttgtaatatgtatagtctccatt

SEQ ID NO: 94344 - DNA, 1050 bp, Homo sapiens
ggcgcctgtaatcccagctactgaggcaggagaattgcttgaacctgggaggcagaggttgcagtgagtcaagtttgcgccattgcactccagcctgggtgacagagccagactccgtctcaaaaaaaattcttagcttaactgtctgtgactgcagagagtgaggaagagagaaagaagagtggaaatggaagggcaggaaagatgaaaagagagaaagagaaaaactgtattacatactatgagaacattagcctttggaaaacattagggaagaggttttattaatggcatctaattatataaattcctaatatctatctttttttttttatcttctagattagggttatggctaatactatgtccaactagttatttagtgatgatgatacatttatattaacgcagatgatgatcacagttttcaaaaatagtatacttaatgaatatatttttgcatttaagggaggaaaagactgagcagttgttggattgtaaacaagaacttgagcaaatggaaatagaactcaaaaggctgcaacaagaggtttgtacctggaatatctgttatttaggaccaccaagtaattggaaattgattttcttccttgtaatttataacctttacttcaatgctttatgtaaataaaagaggttcctgaggcttcaagagattggatgactttttcagagtctctctcttcaaaaatgtcagagccaaactttcttccatattaatgctgttcaaactctgctaagattcaaaagagctacttaggactgaggtagttccacatttttctttttgatgtgtttggcttctgtggccttggaagctagaacacctctactgtaaactgtgctctttatgtgtatctctctgtgtctctgctccctgatagtgctttatgctaactcatatgtaatagaatgttttttgatttttttcacttttcctattaaataagattaaaactttttaaaaagtatctttattttacagcagcttcttcttttttcaccttaaaccaagagtaattaatagtt

SEQ ID NO: 94345 - DNA, 1050 bp, Homo sapiens
cacttataagtggaagctgaacaatgagaatacacggacacagggaggggaacaacactcactggagcctgtcaggggaggccaggtcgggaaaacattagggaaaagagctaatgcatgctgggcttaatacctaggtgatgggtttttaggtgcagcagactaccatggcacacatttacctatgtaacaaacatgcataccctgcacgtgtaccccagaactttaaaaataaataaataaataaataaaaaactaggaagggaaaagcattattatcttgttaagtgtcatttgctaagtagcccatgcatgaactgttgaatgaaagttaagaatgacaactaaatatgatagttaagatgtttttgaccagtgaattgtttttgatatggcagtacaattcttagacctagtggatcatgttgatgtgtttagtttgctaatatgtagaatactgaaagtgattctgtgtgtatttctagactatcatagaactctctgaagagcgggatggtctccattttctaccccatgcctcttcatctgcacagtcaccctgtggttctccaggcatgaagcgaacagaaagtcgacaacatctgtcggtggaactggcagatgctaaagccaagataagaaggcttaggcaggaattgtaagttgctgatttttgaggttcattgaatttatatggtcccaaaggtgacctaaacaatatttttaagcttatggaaatattgctagcttgtgtcagtgttttcacaagtaaatgagaaaaataaggaggttggcataaggttttcctattgttaaatcttaacagtttaaaggatgccttttattctggatttatggcctttctagcattctagtatgtatttttttaaataaaataatgtcctcatttggcaaattggggctcttagttttttgtctttacattccttgaaatccaaattactaggaactactgatggagatcaataagtctaataactcttttaaaattaatgttttacacctattctgccccccaaaatttaatgt

SEQ ID NO: 94346 - DNA, 1052 bp, Homo sapiens
gagtcagactattttgaaaatgtataggaagccttgaactcaagaagttactgccattagagaaatgtcaaaatatctaaataatctttaatggaaaatactctgggaactcttaacttttaaaataccaggtttctttctttctttttaatattttgtaatatgtagttcattgacttctagaagctcttgatagatatctccatttcaccacctactaagttcaaatgtagtatctgtcttctgtattttctcctgttcttaattttgtgaattgcttaattgaatatttttgagcacccatttttgtgtaaaatactatgctagataaaattagagattgagagatacaaaggaggtgtaagaaagattgtatctggtttattgagaaaactacattatttgtaagtacaaaatatgagctagcatataattaagtgctagtttatttgtgcatgagacaaatattaaatactattatctgtcagctttgttagagtcaggagatgttagaaagcaagattaaagataattgagacagtaagaaaatacacaaataaaagttgactccaagtatgtggagcctgggctactatggagattaataacactactcacagagagatagggaagttgggatgagcatgctgatagagggatagaactgaatagtgtccttggacagaggaaccatccttcaaaaagtgccaagaagggattgtgattttttttttccctgggttgaagaaacttgtatatctttgaagaacatagagaaaaaagccaataagaagaaagaaatggaaatgtttaagtaaggattatctattaggagcaaaaaaatgcataagaataaaggagttaatcccacgtggttttgtttctttggcaaattggaggagaggtcatttactggaagtaatgatagcagtttgcagttggaggcttaagtagagaaaaggtaacatttacatagtcatcatagggaaatttgaaaggaaatcagcaagatttcaataaaaggatagatgggcagtagagagagtttgatt

SEQ ID NO: 94347 - DNA, 1020 bp, Homo sapiens
atgcaataacatatatcctacaagattaaaaaccttttgctcttgaattcaagtacaataaattagaagtcttatctacagaattcagttgattttgttaaagaagtcatcaggatatatcaacattactttcctttaagaatgccttgagttaaatattaatattttatttttgttgactagaaaatgaatattaattcatttaaggtttatatttagttaaaataatttttatttgtagtgtttttatcatttcaaatgttctccttttaacatcatattggcttttcatattttatatgggttatataatacttgggctaatattgtactatagtgaaatagatttttaagtattagccacttttttggttgtttattttggtcacttttctaaaggtaactcataatcaggaaaatgtgtttgacctgcaatggatggaagtgactgatatgtcgcaggaggacatagaaccactcttgaaaaatatggcattgcatctaaaaagacttatagatgagagagatgaacattcagaggtttgtaaaattctttcagtatattgtgaaagtttgctttccaaaaaagaaaatagtagctttaggaacttttcagaaacgatactatttcttagagacaggtgatacaggagtgtctttttttgtgtggaacacaggaacctgaaaggatgtataagaaccccaaattgctagtaaacagattgcagttaggttttctcttctccttttcttttaaattagtattattctgattttcttcctgtgtgtttttcaagtcatccccacagctttggcaacaatacaaaagtgtgaaactgaaaatatagttgatgtaagtggaaaaatcattgccgtgaagcataagaatttgcttaaggctaatttcgtagttttattgccacatgttgaggttggaaaagtaagttttaataaaaggagaataacaggtgttctgaataaaatgtcccaaaaaagatctcaaatgaggtgtgattttaa

SEQ ID NO: 94348 - DNA, 1523 bp, Homo sapiens
ttgcactagctacatttcaggtactcagtagctgcatatagctaatgatcaccgtattgggcagctctcatatagaaatttgatctgattattcagcttcaaagtgtgaatattttattcttttttccatcttgacagtctttctcttttttagccttcaaaagcctatgaaatttattctgtatccttagggaagcccaacctgtttataaaacattttgagaatgcttagcttctaagagttaaattaaggtgtgagatttagtagaaatcgtgtgtgttacaagagtaaagggaaaattttcattgatttgtgttgagattgtgctaaaggacgagctcctaaagatagtacaagtaaaaaacaagtggctctggcttagaaaagggaagtatatctatttagtctaaactgaaggcagagaaagatacggcagttgaattaaggaactctttggtgagtcatagtcattacctttgataataattatgctgttttgtgttctgataggttcagaaactgtgtaggtcaacaattttggtagtgttaaattttaaaattgatgttactatacctgaaaagttaattatgttatatatgctatgaatttatgattagaacgtaattcttaattgttcttacaaggcctgtcaagtattatttgctagaaaaaaattcttgagtttaaacccactaagttttattccatccacccaaaactctgacttcctaatcacagctaggaattatacatttctggtaatttagttttaaccattttattatcctaataattctgtgtttacaagatatagaactttctgcattgatggaagtgtatttaaattgtatagtagtagaaaatatagcattacagtttgataaaataaacacgtaaagcataaatcagagccttataagtttcatgatcaaagagctagtttgtaattttgtgactatattgtcctcactagtagttcagtaattggcccaggagatgcatctaagttagacaaggcagtgctgtctattttgtaggcactttgcatttgttagctgtaagaatacagtgatactagcagttggtttgcagcattagagatgtaggtgaaggtggagattaaaatgcatgttaaattgttaatgctgactggaaggaaaagattgttttgcattttaatatttttaatttatataaagctttttaaaagttacacaataaagaattaccccctttattccatttggttacgtgtgtactcatgtatatattttttaagtttgcctctggtaactttgctctgttagaaacaaatcaaatatttattagattatgttataaatgttgaactgggccacaaaagtgggtttcttttattaagcttgataggatgaagatgtgagaatgaattgtaagcttgaagtaaaaattgcttaaattttttttccaagaagaaaggctgtgttgtttggtaatagtcagggactgactgagcattttggctgtattccgaattctgcc

SEQ ID NO: 94349 - DNA, 1075 bp, Homo sapiens
acatgttatccaaattagtgtattttcttcagcccataccccctctcagtcaaaacaaacaaaaccaaaataaaaactaaaatcaagtagctatttttatagaggaaactattaattagatgtgtgaattagcagcttagtttttagagataccatgggatgtttgattatataaatttaaaaatgaaaaaaattgcgtgtaggatggaattgtttcccatcgtacatacatttggtaagtacctaccaagttactgggaccaggagtggaaataaatggtctatgttctagaagctcttatggtttggtgaaggatacacagattatggggaaatcatgtaataattagtatgaagtaaaaatatgtaccaaatgttctggcatataaaatttggagccattaattattcttaaagttgacgtataagtgagagtgggggaccattgatgattggatcagggaagactacacagagatgataagagctgtgcctaggattgtgattagcaagtagttcactagggggatgaggaggttggggaaggaggacagacagagggagtagtattaaggcagaggagttgtatatatgcatatttgggaagaatggtgattaatggctcagcatagctagaaagtaggttgtttcatggagagtagaaggaaatgtctgataagaagatttggactttttcatagacagattggcccagtggtgaaaatctggcccaaagaagtgatttttttccagttgaatattttaagaaaatcttagttgaatgctgttggacagggaatattctctccatttctgttatagattgttaacttttacctgacttgttatatacatttattttaacagcctcactgtaacagacatttaagattctggtcttcatgaacttgcacagtggaaaaccatttaaattttataaggagatgaatcataagatctgtgttttaagtaagaaaacactaataggcctaagaggagccaaacctattaggagccattttggctacctttgtggcatgtccctgtatcaacctgatttggcaggttcttgatt

SEQ ID NO: 94350 - DNA, 1019 bp, Homo sapiens
tatttcctaagcaaaatggtaggataataaactgacttctcttttggggaacctacatgacagaaagggtagccattacagtagatactcagaatttgttcccctgtgtctctttattgtgcttatttttagacggaagattttgaatttgtgtgctaaaaatgtgtgttcacaaaaatagggaaatatattactttagttttccactttaatggtttttatttgaatgattctttttccagaaaaatttagattttttttttgcatcctaaatacttagctgaggtgctaaaaacaaatacgttaatttccacttcaaatgcagttttatgcttaaaaaatatatgtatattttgaaaatgacggtattccaaaatagtgtttgtcaggttgctgtttttcatgaggactagctcctttccaaaccacaaatctgcttctgtattttcagttccacctctcagtttctttagattttttttcggtgtcctaattctgttgtaaatgacctataaaattaaaggaaaagaaaagaaaaaaaaagtatacttttgctttgtttgaataatttgctaaaataagatcaaatttatcttaataaattatttaactgatagggcaacaaaatatacattgttttataagctgtattttgctaattttgaagtcattaggatttctgttaagcactttacttagattaatgtatgctttaatgtactctattataaagtgtcagttgtaactctatacctagtaaatgtaaaagttaggcctagtctaatttctacagtacatttagttacagaatttgtgagcaagaaccctttgtaaatgaaactatttatatattttccatgtttcttgtgcttggaattcaatgagtgtcttggatctgtgggtttatagtttttatcaaatttagaaaagtttcagtcattattcctagaagaaaatatatacatatatatatatatatatatatatatatatatatatatatatatttatttatttat

SEQ ID NO: 94351 - DNA, 1269 bp, Homo sapiens
ccagatgccttttctctgcccctcctcgcccggtacagacatttccagcgcaggctgctgctcgtggtgtccgtcgtcgaagccacttcttgggatttcggctcgtttcactctggggtgttttttgaggagggagagtgcccccctcctccacgatgggatttttctcccttgccgaaatggactttcattgatttctacttacttccacgtttagtgaccaattccctaggcgtatttttgtggtagttccttttttcaaatacatactctgtaaaatggagaacgaaatttttactccccttctggagcagttcatgaccagccctttggtcacttgggtaagtggggtgtcctttattgtatattttgctgagttatttgtggctgcagagatggaggtgggcgttcatgtcgtggtgatccttctgtttgttctaggttaaaacgtttggacctctggccgcaggaaatgggaccaaccttgatgaatatgtggctttggtggatggggtattcttgaaccaggtcatgctccaaatgtaagttcttccttctttcctaggtaacgttttctttgagaaatagcatatggtgaactttgagacacgatgttttaagcccctaatttggttcattggccagaaatattcaggtggtttaagaattggatcttgaaaggaatgctaatgttatgggctcagcccattatcacaacctagatattttacctgttaaaattgtgaaactttagtttttcattctgtcaaccatgtattgtcacttgtcttcagtactgaaatccaagccacattgtgtattctttgataatttggtaaaataagagagaaaatgagaatctggtttcctaagagaggaaaaaagactttactgtgaagttatgtgcatttgatgcagaaatgtttcttattaacctttatatctagaaataaatggctcaaaatttgaaactcgttaagtaatagcagatttcagaagagaaaatttcaaacagttctgattggtgaggactcttgctgtagtaaataatttaaatgcctgtaataactaaagcctgatgagatgatttattgtgtgaattattaggttgcttaatattttagggatcattttaaggtattcttacaggttttgaaatgcaaataacaagtcttgataacaattagataacgacttattgggcaaatctttgtcttttgtgtttataatattgggtttgtactaagtaggaaagtatgcttttgagat

SEQ ID NO: 94352 - DNA, 1012 bp, Homo sapiens
tacaggcgtgagccaccgcgcccgtctactgcgcgttttctaaaccttggctcctacgcatttatcagaagagagagcgcaatctgtctatgacttccagccaatagctacacttcttttctcagccctcgtccactgttcttttttaaccaatcagaaacgtttttcaaacgtttgccctccccgctaagtgcgcaggctcctggaaagttgtcttcacttccgggccgcggtctagggcggctacgtgtgttgccatagcgaccattttgcattaactggttggtagcttctatcctgggggctgagcgactgcgggccagctcttcccctactccctctcggctccttgtggcccaaaggcctaaccggggtccggcggtctggcctagggatcttccccgttgcccctttggggcgggatggctgcggaagaagaagacgaggtggagtgggtagtggagagcatcgcggggttcctgcgaggcccagactggtccatccccatcttggactttgtggaacagaaatgtgaaggtaaaaaccagagcccgaaccgacaatccttttctcctctctcacaccagcggcgggcagggggttggtaaccacaagccatctctcgtctccccgaccccctgtctccacccctgtcgcaaggtctcgttcccctcaccaccttctccacccgcgtcatcaggtttagagctggttgtgtgggaggaattcctttcaccctgccaatgtgttccttcgcagacctgaaaacggggaccgagactccccttctctggggccgaagcgcacgtccgaagaacattagacttgaatcgtaaattcggtctctcaccctgtcccgaacgtttctgccctcggcaggtggactgtttggctgggcttcttcaacagctttgccagacttgagaggagaagcgtcggtttacctgagttccttatgatccctagcatttcgcccggtgtagtcagcttaggaaatgagaaatgatttcac

SEQ ID NO: 94353 - DNA, 1026 bp, Homo sapiens
gtatatgctttatttcctgctgcagaacctgaactgttccttacctattctttgtgtaattaaccttccattcagcttaaagaggcttagccagccctgctcataggacactacactttgcctttctaacagtttcgtctttgggccctctccactagccccatgaaggcagtgaccctgtcaatctagttgactcctgtatccttagtgcttagcacaatgcctggcacaaacagtaggtaaccgagtttgaatgaatgaacatactatcaactagtttccttctataccctctttccaagggaaaacatccaggaatttgtattaaactaatcagtatgagtagctgccttccctactgtcctttacctaaagtgtttaagatatttggatttacaaaagtgttcgaaactaaaaggctcagtgtaaggactaaataatttatttttaagacaatttgaacttccattttgttaaattgttcttaattattacttattaataacttcttctttgagtttctctgcaagcaatctcctctttagtaatgtttgcttctcctctgctgtcatttctggtttctctgtcatttcctgaaaaaaaaagaaaaaattggctacagtatgaaatagggtaatttgtctaaaattcccaacatactgcctcaaatgaacaaaaatcgggggcaccttcttgtgggacggagggagagacagacatagactaggtttcctaaatctcttcttcgtaaagtctcttcttggagaacccctctgggaagtggtggctgatgtgctctatgataaaggtggtactgatgctgctctatgataaaacatttcagaatgcccaggtgaaacagaccaccaaccctgacatactcagagaagggcaagtaaagaaacagcataagaaaaaaatgtataatgacaccgctattttctgcctcaaaaaatccttatcacaacaatttcacttcctagaaaagacttagcagctactgcactaggaggtgattaatatgaa

SEQ ID NO: 94354 - DNA, 1382 bp, Homo sapiens
ttaaagtgttacttatacagaccaaccaagaatagtgctgaattaagtggcatttagtatctagaagccattttgatccaagaagctacttaagtgtcaaagtcagcatgcagcacatgtagcttttctgtaaacaagggtgtgatatgaaagctgcttttttaagaagagtaaaagcacattccatatacgtaagtgaattttaaaaataaattgaggcaaacagttaagttttatttttagagcaacaagttaactgtaaatattttaatgttagtttgctcatctatgatctgagatcatgccgaagtgagaaaaatctccccaaaatacaatttaatgcattgggaaaaaaaaactttaacagtaattccagccacaatctttagatcacccttgtaatgtgttacgggtccatttttcctggaatcgtttaatctaaagcagtttcccctgttttggagattttgtagttaattttaattttggctattgtttggaaaagatgagctgtctgtgtagatatgaagtatagttttttccataaaacagatgtttattttgtattaaaaaataccactgtacttgttttacaccatttgtatacatgtggtgatattaatgctaaactgtaaaattcaggaattaaaatgtgaccctgtaattccataattgatgtttgtgtttggtttgttgtaaatataaattaactccattttgagatatgtcaattttacagtatcttttaaaagccaataaaattatccataaatatttattataaactgctagatcataccccaattttaatgaaataattctaaacaaatgcgggtcaatggcactttatcagtgactacttatagaaggtaagccttggggaaatcatagcatcacagtatggagcttttctcaccttttcaattaaaggtgtacatatagtaagaaagaaagaccttccacctcataaggcaggtgactcaggatattttaaactaagatcagtaaagttcccatccactttctttgaatcatcaaattttatcgagacccatctctcagcttttagtaaatttcttcttaaaataagcccacatgtaaaacactttcctagttactttttgtttgtttgtttgagtctcgctctgttgcccaggctggagtgtagttgcacgatttcggcttattgcaacatccgccacctgggttcaagcaattctctgcctcagcctgagtagctgggattacaggtgcccgtcaccatgccaggctaatttttgtattttcagtagagacggggtttcaccatcttggccaggctggtcttaaactcctgacctcacaatccacccgcctcagcctccctatctctgtatcttatg

SEQ ID NO: 94355 - DNA, 1053 bp, Homo sapiens
gcctcagcctcccaagtagctaagattatagacatgcgccaccacacccggctaattttgtatttttagcagagacggggtttctccatgttggtcaggctggtcttgaactccggccttgggtgatctgcctgcctcagcctcccaaagtgttgggattacaggcgtgagccaccatgcccgggcagcaatgttttataagttttttaattactgctgtttttagatgttttgacttagcagtatttattgatatacgttcaaaattttacttttgctttagcaaaagaaagtgaagacaaggaaaaccttcccaaaaggacatctcctggtggcttcaaatttactttctcccactctgccagtgctgctaatggaacaaacagtaaatctgtagtggctcagataccaccagcaacttctaatggatcctcttccaaaaccacaaacttgcctacgtcagtaacagccaccaaggtaggtgaaacagcattacacacaaactttgcttttcccgtctgtgagattttttcatgtttactgaaaaaaatttggataatcaaaacaatttcaatgaattgtttagaatttttctgttaccaaaatgttgattgtagaattttattttattttattttattttttgagacagagtctcactctgtcgccaggctggagtgcagtggagtgatctcagctcactgcaacctccgcctcccgggttcaagcagttctcctgcctcagtctcccaagtagctgggactacaggcgcgtgccaccacacccagctaatttttgtatttttagtagagacgaggtttcaccatgttggccaggatggtctcgatctcttgacctcatgttccgcccacctcggcctctcaaagagaatttcattttatttaggcttatgataataaatgtaagcatccttcctccctgtcccccattctattttggagcacttaagttgattctaatatttcactgactacttagtgttactgcattttaaattattttcttggatagtttagtagtagaacgtcttc

SEQ ID NO: 94356 - DNA, 1094 bp, Homo sapiens
ccctctaaccagccgtgtgctctggatcaaaccatccagcctctcttagagcctcaattttggtttttctctaaaatgggaataataaaacctatctcatagaattgttgtgaagatcaaatgaaattttatgtaaaagtgctttttaaattgtaaactgctatatatatatatatatatacaaaaaatagaagatgtaaaataaatctatttacttttcgaatgctctttatagtcctataaaaggactccagtaaattgcttctccttttttttcaagttttctgtgcagtcctgactcatgtgtaaagaaaccaggacattacattttggaaggtgattttgaaaaaccttttttgatcagctttagaactacaaaacaaaattttaaagtttttcttctaacaagcattgtattatattttaaatgtaaattttgtgcttatacaggaagatatcaagtctcttactgcccatatagttgaaaacttttataaagcacttgaatcgattgaatatgttcagacattcaaaggattgaagactaaatatgagcaagaaaaagacagacaaaatcagaaactgaacaggtattgtttaagtatactgcttttatagcctacaaaactgtgtccaaaattgtttgtagttcagattttccatgtgaaatttactgaggaattttctttccatcactggatagcatagagttgaataggagggtaaggcgtcccccctaccccatatcatttatatgttgaattactactccatgttgtaacttacgaagaatatttagtttaatttacaacatcctaaaatattttggagtgttctctggctacatcttctatcattacagagattattttgatataaattatagtcagttaaaattacttcagttcatcttggttatacatatttttccttcagttcaatctgatgatgaactttaaatcattactcaatatttgtgatatatttcttacagtgtaccatctatattgcgtagtaacagatttcgcagagatgcaaaagccttggaagaggatgaagaaatgtggtttaatgaagatgaagaagaggaagga

SEQ ID NO: 94357 - DNA, 1095 bp, Homo sapiens
ctttgtctcaaaaaaaaaaaaaaaaaaaaggaggaaatacagtttagattttgttataacatataggatgtaagctttatttattctttatttagatatattcaatatttattttcatgagattactttcttttgtagataattatcaaacagcacagctacttgccttaattttagagttactcacattttgtgtggaacatcacacatatcacataaaaaactatattatgaacaaggacttgctaagaagagtcttggtcttgatgaattcaaagcacacttttctggccttgtgtaagtataaaatgttttaaggagcaacatttttaatagagataaaactgaagttacccatttgaagttatttattagcagtgtatattctatgaatgagatgattgtgagaagtcctattcttttgttcttatttaaagggcaagaggactaggttgtagtgattttcccacccacatattgctcacatttagatttaatgagcctaacttttgttgtgatacattaccatgtgcagtgacagcattttactaacagaaccagtcctgctgtttttttacatctacttcatcaaactgtcatttagtagtcagtcactctttataattatcctgatatttgcatcaatgttgatttttagcagactataaactgtcaccttcataatttcacctgcaagcagagaaagaaacatcctccctccaaatgaaaagtactttgtggttttattctgaccataaaaattatattttaaatatagacatttaatttaatgtatagagaaaatgttaatctccctaatctttatttttatggacttaaaatagccagtgttaactgtctgcattatttctttttttcatacctgtaccaatttatgtaataaacatattcacacatgtatagaggatttttttgtgttttttatatttacaaaacagtatcataccaacacatttctcagcccactaatactactctagattaatcaatattgtatagactaattttattcctggagatagctgagtaagattttatagtatggctcttccacagattcttctgccattctcc

SEQ ID NO: 94358 - DNA, 1090 bp, Homo sapiens
ttttacctcaagtatttatttgtgttgagaacacttaaaatctactgtcttagcagtttgcaagtgtaatacattgttagtaatatgttgttattatatatgttgtacaatagattggttcttcactgcgtttcatattcgtatcacaggcatctttttaaaaaattattttgaataattttcctcagaaaaacattttgtgatgctctctgatctttatcttgccttcatttttacttagtacataatatgaagtagacttaattttcagttccacagaaataagattaaagtgaatatagttagtttttggttctttgacaacgtataaccaagtgtttgatttttttcacagtattttaaagtatctgcttatatatgatctgtactgctaattctttttgttttggtttggttctggaaaaggtatgtactgctaatcttgaagatgtttttatttacataagtaacagtattgtttaaaaaattctatgtttcagaaaaccgaaaaaagtgaatttctaaattttttctacaaccattgtatgcatgttctcacagcaccacttttgaccaatacttcagaagacaaatgtgaaaagggtagggtctctttatttatctgctgtgatttctgtttttaaagaaggatgagataaatattaaactaacaggcaatttacttgagactttataagacagggagattacgactgaaaaacttaaactgcaatataaaattatgattttcttgtttcttaaggttatggaagtgaatgataaaatgtggcaagactattctttcgggggccatttctatagtttgttgctacggaagtttctctgaacgtgtagaccactggcagaaaaaaaagaaaatgtggcaaacagtattacacactaaggaattgatatgtagacacttatcaaaagaaagcattgtcgccaaatttgtgcgatatctagaatgagtagaagcaaatagtataaatattttaacttagcctccaaatgcacattcatatgccaatatgtgctaatatataggggcaaggctttttccttagtatttttaaaattgcatttccat

SEQ ID NO: 94359 - DNA, 1092 bp, Homo sapiens
attttttcttttttttctttttgttaggaaggatttactagttagaggctgagataatttatgtcttagggtcatgtgatcttgcttgtttagtcaacctctaaatttacgcctgagtctgaaacccaaaatgagattctgttagaacctctactgaacaagaactactgctaaagaattttgttttccacttcctataagttgaagcatgctctgcttttgtgggttttttttcctccttcttcttttttttttctcggagtgggattttttttcactctagtgtgtagtattttatagaactttcaaaagcattaggaatagaggtttaaataagctattccattcttcgttttttctctatataattctcactttgctctttcagttggtgtttttgtcttagatctaaaccaggtctaatggaaacatgttttgttttgttttgttttgccaccaggatattcttcttattaatgtggtaattgaacaaatgatctgtgatactgatcctgagctaggaggcgctgttcagttaatgggacttcttcgtactctaattgatccagagaacatgctggctacaactaatgtaagaaattactctgagataaaaatgttttggcctagtcagttttaggtggctttgtaataagattttgagaaacaagtattttaagtatttgtccagttggtatttaagtagcagtggtattcttatagcaattcatttgtggtaaaatacaaaattgtaatccgtcaaaatcttagtaaaatgttaggaattccatttatggcccttggcctctatgtgttaatttcttaaaatttaatacacagcaatgtgattatacttaacactactaaactgtacacttaaaaatgataaaattattattatttttttgagacagagtcttgctctgtcaccaggctggagtgcagtggcgtgatctcagctcactgcaacctccgcctctcgggttcaagcgattctcctgcctcagcctcccaagtagctgggactacagacgcacaccaccacacctggctaatttttgtatttttagtagagatggggtttcatcatgt

SEQ ID NO: 94360 - DNA, 1257 bp, Homo sapiens
atgcgtgcttgactatatatatattatatatatataatatattaaatatatatataaatatatatataattatatatattttttatatatatataattttttttttttttgagatggagtctcgctcttttgtccaggctggaatacagtggcacaatctcggctcactgcaagctccccctcccgggttcacgccattctcctgcctcagcctcccaggtagctgccactacaggcgcccaccaccatgcctggctaatttttttgtatttttagtagagacagggttttaccatgttagccagggtggtctcgatctcatgacctcgtgatccgcccgcctcggccttccaaagtgctgggattacgggcgtgagccaccgcgcctggccacttgactatatttttctgtttgtccttttagacaacgcctgtagaaattagcacttgtctttctttttaataccccagagtcattagtatgaaaagcagttattgtagtgctttgtcatttagttatatccttggggaccgcaagaacgtgtaaaactgtgcaccagttggttgtaggttgttgtattttatgagttattgtattttaaatagctttgtaactttatctactgtcggaattcagcctcctttactgttttccttgttccttgtcttacaattcttgtttttctaatctgttataaactgacaataagatccttaggcttgtttgaattatgtttaaattaagagtaagtagaccctgaaagggggctagagaatctaagttaagtgagttttcacgtaacacctctagaacaaatatttttgttttccagagagttatttgtagttgaggtttttagttaaactagatattgatgtatttataacaagaattgaatggtgtagtcaaattttagaaaattgtaacacagaaatacaccccagaatattaggtttcatgatgaaaatactacttgtcaactattttttataatttgtgtaagtcatataaatgagtataactttattcttttgttaatatttcatagtaattatttttctcatgcaggaagatgagaagtttttgtctgaagtttttgcacaattaacagatgaggctacagatgatgataaacggcgtgaattggtaagttatgaaattcaaactcttaaagagcacttattcttttggcatgcacagcttttaatcttgaatttgctaacttgagacaattttttgtaattagattagtaaga

SEQ ID NO: 94361 - DNA, 1005 bp, Homo sapiens
tttatgttgtccagaaaagcagccacacaagttttgacttaaatatataggttttattaaaacaaaagctgttaaaaccaaatagaaaagaaaaactaaaagagattagtttgattacttggagaaccagagattttggagtaagtatttcaactatatgataggctttaagttattgattatttgcttccttcataaatatattggaacagagtgcttttatagcttaatgaataatagccagagtaatgctggaaatcagggaaaaaatactaggaatacatattctcttaatggactgtaataattgagattgcctctatctgtaatattttatgcagttctacttatcagctcacaagtaccgaatcatataagaagaattcaagtgggaaattgcatttatcaaggagttggaacttttttcttatgaaaatattttgaaaaaattaaattttcaggtagtaaaggatgaagatgtaatctacaacagatgcaggaaaatagaaatttataaaaggtgtgaatggaggtaaatatgtacttactcaccctaacctaaaatattaagactaaaagtatttggaaaaagtaggctgggcatggtggctcatgcctgtagtcctagcactttgggaggctgaggtgggaggattgcttgaggccaggagttcgataccagcctgggcaacaaagtgaaacccccccatctgtacaaaaaattaaaaaaaaaatagccaggtatggtggcacgtgcccgcagtctctgttacatgggagtctgagggaggaagattgcttgagtccaggaggtcgaggctacactgagccacgtttgtaccactgcactccagcctgggcaacagagtgagactctagaaaaaaaaaaaaaggaaaaactaacttgagggctaaataaaagattacatatgcatataaactccctcaaaagatggatgttcaggctgcagtgcataaggtccaaaaggagtcaatgaaatacga

SEQ ID NO: 94362 - DNA, 1070 bp, Homo sapiens
ctctactaaaaatacaaaaattagccaggcacagtggcacgtgcctgtaatcccagctactcaggaagctgaagtgggagaattgcttgaaccgagaggcggaggttgcagtgagctgagattgtgccactgtactccagccagggtgacagagcgagactgtctgaaaaaaaaaaaaaaaaaagtttaaaagggtcctgatacaaataattgagattctatctctgacttagtgcctagctaatcgacttcattttgcgacgtttcccaccagtagtcacctattattgtttactttaattttttgcataggatttacttttctttcaggtcatttattcacctaccaattttttgttattcaccaataatgagtgtgggggaggttagatgtacatatcaggttctttttataatatataggacctgtgtatttttaaactgtagtatacaattcagggtgctatttcacttgttgacagaaaaacatttaataatcttaggagattggacagagtcacagtctgtagttgataaaaagaggaccaggaacagaagctcatatgtagctttcaaatgactgtttttgtcttcagaagggtttccaaattcatactagtaaatcgtaaatacttttttatattcagaaaataaattatatgaactataaatatttgtaaaactttgtcattttatgtattttataataggtttatttgtgaaggctataattacgtaaatcaagtgcagctttttatttttctaaaagatttactcatttctgcttcatgagatgcatttcatgaaatagccagattctgtgaactgtctgttatttacataacatttactacttaattatctcttatgtgccagcaatgatgttgaatttttttttttttttttttattttagattcagagggcacataggcttatttgttacatgggtattgcatgagtaatggtggagattgggcttctagtgtacccatcaccgtgatattgaacacagtgcccagtagataatttttaaaccttcagtcctctcccatcctacccctttttgga

SEQ ID NO: 94363 - DNA, 1299 bp, Homo sapiens
tgcaacctccaccttccaggttcaagcgattctcctgcctcagccacctgagtagctgagattacaggcgtatgccaccacacctggctgatttttgtatttttagtggagttggggtttcaccatgttgcccaggctggttttgaactcctgacctcaagagacctgcctgcctcagccacctaaagtgctgggattacaggcgtgagccaccgtgcctggcctagacttcacttttaattagtagtgactagccaggcatttccaaatgatttgatttccaaaattttgaattattttgtattttaaggtaattagctgtatacttggatatttttaggttcaaggtaaagacccatcagtggaagtcacacaggacctcattgatgaatctgaagaagaacgatttgaagaaatgcctgaaactagtcatctgattgacctgcccacatgtgaactcaataaacttgaagagattgctgacttagttacctcagtgctctcctcacctatccgtagggaaaagctggctctcgccttggaaaatgaaggctatattaaaaaactattgcagctgttccaagcttgcgagaacctagaaaacactgaaggcttacaccatttgtatgaaattattagaggaatcttattcctaaataaggcaactctttttgaggtaatgttttctgatgagtgtatcatggatgtcgtgggatgccttgaatatgaccctgctttggctcagccaaaaagacatagagaattcttgaccaaaactgcaaagttcaaggaagttataccaataacagactctgaactaaggcaaaaaatacatcagacttacagggtacagtacattcaggacatcattttgcccacaccatctgtttttgaagagaattttctttctactcttacgtcttttattttcttcaacaaagttgagatagtcagcatgttgcaggtaagtaaaaagatactcttcacgattccatttttcagatatttagttcccttaatagttcaagcaggtgtttataccctctattttttgaaagatttattttgtttaaatgtactattaagtacatttaaagtaaacaaaagaaattgggactttatgtcttgtggttttagtgcaaccttttatttatttttttgagtcggagtctcgttctgtcgcccaggctggaatgcagtggcgcaatctcagctcactgcaacctacgcttcccgggttcaagcaattcttcttcctcagcctcccgattagctgagactacaggtgtgcactgccat

SEQ ID NO: 94364 - DNA, 2493 bp, Homo sapiens
ggttaaattttttgtttccattagcgggttttttattaaaaacttaatgagtaagtgaatgagatgtttataggccattttgctgtattaaaatatgttgactatggcaggcatggtggctcacacctgcaatctcagcactttggaaggccaaggcaggaggatcccttgagctgaggatttcgggaacagcctgcacaacatagcaagatccctgtctctaccaaaaaaaattcaaaaattatccaggtgtggtggtgcgcagctatagtgccagctacttctggaggtgagacgggaggatcatttgagcttcggaggtcgagactgtagtaagccatgattgtaccactgcactccaggtggagagacaaagcgatttttctgtctcaaaaaaaaaaattgagtaaattcagaggggaatgtttaacattcttcttttaacattatagttttaaaatgagccaactactaaattgtgtgctcaagatacatcttttctttcataaatgaagtaccaaattgtgagcctaaaaggagttagaatgagtcaagctgaatgtcatatgactggatattgaaaagtcattattgattcacatcactttcttccttactgtgcatagtactgaagtcgttaatggaagaagatgtacttacccaataaacttaagcatttaaacatgttggaaagagaagagaatcattatatgatacaacatgaaataacatacctgataggtgtgacagaaattttaagttacttcaaatcagtcccactgatactgactaaatcaaaagcagagtcaaagccaggtgtggtggcgtgtgcttgtggtcccagctccttgggaggctgaggctggaggatcacttaaggccaggagtttgaggctgtagggtgctatgattgtgcctgtgcgtagccattgcaccccagcctgggcaacatatcttaataaaaaacaagagtcatactaggcacagtggctcacacttgtaatctcaacactttgggaggctgaggcaggaggatcactttagtccaggagttcaagaccagcctgggcaacatactgagactctcactgcaaaaaatataaattagctgggcatggtgacacacacctgtagtcccagctgcttgggaatctgaggtgggagaattgcttgagcccaggaggtcagtgcttcagtgagctgttactgtgctaccgcactccagcctgggcgatagaggaagactctctcaaaaaaaaaaaaaaaaccagagtcataagaatgtgtacctatttaacacaattgtgtgttaattgggtttaagaaaatcctcattgcagttttatttggaggcaggatgtaacagatgaaacagataaagaatgataataagatagcttataacagtgttttaccacagtcttcactgaaagcccgtgaaagcatttcacacatgaggcaacaaaggtacagaaagggtaagattcttgactgagattatacagcaggtatgtgccaacacaaaatataaaaagtaaacttgcattttccacagacttagagcagtagaaaattaaggaagaggttaatataagctggaatcattaagaaaaacttcattcttggtggtggtagtggaaggaactgtgataggaaaggaaatacacttgctacaaaaggtattaagcctatttgtagcagtggtttctccccctcctaccaccaatcccaaatatgataatacacaggttcagaaggggacattacaggttcttgagtaggggcctaaagtgatactgtgtttaaagaaatgagtgtggcaatgtcatgaataataaattggggaggagggatagggtggagcagaagatctttgagtagcaagaccttttgcaataattcagatacaaaaaatgaaagtctattccaccacggtaaatggacttgaaggaacagagctccagtatattttccagaaagtgctggaaaatttagtaaatgattaaatattaaagagaaggaatcaaaggtcactgatagtgtttttgagtctggccaggaaggtgatggttctttccagaaagtgggaagttaagcaggtttacattaatcttttggtttgaggcttattaaaaaaaattttttttagtgtgtaatatattagcccagttaaaaattcaaaaggtatttattgaagtctctttcccacgccagattctgtccgtacagtttcccttgctagaggccactgacatcaccagtttcttatatatcttgctggaggtatgcatatgtaagcaaatatgcatacaattgtatgtattttttcccttttattggtataactggtagcatactgtatactgttttgtgctttgctttttttttcttttccatccgggctttgaagttacatacagtaaaataaatggaaagagtttttttgttttttttgttttttttttttttgagacacagtcttgctttgttgcc

SEQ ID NO: 94365 - DNA, 2202 bp, Homo sapiens
ggaatagggtgaaatattttagattaaatgtgaagcctagatttggagagaaaatgtgaattcgaatacattttattaagatgtccaactcggtaaaaagacttgaaaagtttgcgggggcggggggcggggtttaaatgtgtatttttttttttttttttttttttttggagacagagtcttgctctgttgccaggctggagttcaatggcgcgatctgggctactgcaacctctgcctcctctccctctctctcaagcgattctcctgccccaccctcccgtgtacctgggactacaggcatgcgccaccacgcccagctaatttttgtatttttagtagagacggtttcaccatgttggctggaatggtctggatctcttgacctcgtgatctgcccgcctcccaaagtgctaggattacagacgtgagccactgcgcccggctttaatgtgtattctaatttttattcagggttttatcatttgagacttatgatgtattattttttatctttcaggatcactactcttggaatcaaagataaatccaaatactgcatatcagaaacaacaggcaagtagttgtttatctttaatttgaaagacttcatctgtgatcaaggaagtattaatctgacaaaggtgggaaagctttcctgacaagaaaaaaacatgtttggtaaacaaagatcatgtgtatttctcttgcaggttaaaagtttcagactgaaaaaaagtttttgtactggtgataattatcatttttggattgagccactgtcggtttattctaagatgtatttattagtattatttaactgtagttagccaagtctcttctataccttgtacatgaaaccttttattctgagtcacgtttaaaggaaatgacatagaacaaaattcaaagggatactcttaaagcaaggaaagcctgtttgtggtgtgaaattaaatcctttgactcaagtaaaggtagaggttttgaagtagaagcattaaatcctgctctttaattgttgtgtatttttaatatagtaatcaatggatactttataaaaatgtacattaccaagtatgtaacatcttctgttaatattgtcttatttgggaaagaaaatgtgtattgtattttagcacgcctgattaatctgaaaatggtagcagtgattcaatcttttttattctgtgaatgtttttgtttttattatgaaatatattaaaattgaaaagtacagagaataatcggtgtctactgtaacaccaccagatttaacaatgttaatgttacgccatatttgtttcaaatatttttgtaatattgaacattatggatagagttaaagcttgtttgtatccatcccgttgtttacattctccatcccctacataggtaaccactattctgaagttgatgtgtattctttgtgtacatgcttttataccttttctgcatatgtatgtatccataaataatatgtagtctgttgtgtgtttttaaactttacacagtggatgtcatactcttacatgtattctgcagcttgcatttttcacacattcattttgaatattcgttcatgttaacaatgtagatctagttttctttttaaactctgtatagtattcttatgtatgacatacacttgttgttatacatttgaattatttccaggtattcttttttgtgtgtggtatgtaaagtcacgatggcagagatttttgaaggaagataaattattttaggattacatttacagcgtcagtgcccacttcaaggtttatgaaaatttggatgcccagaaacaagtacttcgtagttggaggaataaaattctgtctgttgtgcagcttattattacaaagtcttactgttagaacaattatgtatataacacattcttaatcagttatttgaaatactttaaaattttcaatattcaattcatagcttttttctctgtttagaaaatattgtgtgtcttttttgatggagaagcaaattaaacatttgtcctgaattgaaaacctgaagatgtttcctataccttagacattgtaaggtagacatttaagtaaatttaatttctcagtcagccaggcagctcttaatctctgtctttataccgagtttttaccagatgatcacttttagtttgtttttgtttgcttgcttctttgtggggaaagaaatactaat

SEQ ID NO: 94366 - DNA, 1039 bp, Homo sapiens
atggtcacagagctctaaagatatttgaatgctcagcctagggagatccagtatgtagtcagggcgctggttggggaaaccagcctgaagctttgaaacatggaatgggtgcccctgaggattttggctctgtagatacctctggacactcaagagcttacagaactggctcatacttcctagtaagagcaagcacttccctcattacagaaagacctcttccataattgttctcagtttttctcctggctgccaagccatggtaactggagttaacatctcagcataatctgcctaggaactgctggccctgataagaaaggaaagattacacaccgaaggaattgaaataagttaccatgactatcaggagccagagaagtatacttaggattggattttaagggtgttcaattaagggggctggaatttaagacaacataagcaagacttcatggacttggggtacttttttgggacagatttaacctcagcaagtagtcccgaggttagcttttcaaagcctggaaaaggtgatggctttgaaaaagtggaaatgaattcacaccatggcagcttttaacttgaggagaagatagctatttattttggcatatttatgtggttactgctcacttactagtcccaattgttttgtaaccactttttatttattttttgagatagtctcattctgttttctagactggagtacagtggtgcaatcttggctcattgcaacctctacctcttgggcttaagccatcctcccacctcagcctcctaatttttgcattttttgcagagatggggtttccccatgtcacccaggctggtcttgaactcctggactcaagtcatctgcccattttggcctcccaaagtgctgggattacaggcgtgagccaccacatcgggactgttttttttgttttttgagatggagtcttgctcttgttgccaaggctggagtacaatagcaccatctcagcttactccaacctccacctcccgggttcaagcaattctcctgcctcag

SEQ ID NO: 94367 - DNA, 1046 bp, Homo sapiens
ctgcctcagcctcctgagtagctgggattacaggcgcccgccaccacacccagctaatttttgtatttttagtagagatggggtttcaccatgttggccaggctggtctcgaactcctgacctcaggtgatctacccgccttgacctcccaaagtgttgggattacaggtgtgagccaccatgcctggccagatatacctacatttttataagatttaaaattttttttagagataagagtcctgctatgttgcccaggctggagtacagtagctattcacaggtatgattgttgcacactacagtgtcgaacttctgggctctagtgaccttcccacttcagccttccaagtagctgggactacaggcacgtaccactgagtccagtgtatttttataagattttaaaaaagattacacattctaaattatgacgtccacataccatttacttttctgtggaattataaggtgatattttaaatgatgggaatgaacaacttgacatgtgtatcagtaacctctaaacatctatttcaaacatctattaaccgaaagtcatgatccttcagctcttatactaagaacttccatacattagagcaatacacatattcaaattgacctagttcaatttgataagtaaacaattttttttttttttttgagacggagttttgctcttgttgcctgagctggagtgcaatggcgcaatctcggctcactacaacctccacctcctgggttgaagtgattcttctgcctcagcctcctgagtagctaggattacaggcatgcgccaccacgcccggctaatttttgcacttttagtagagacggggtttcaccgtgttagccaggatggtctcgatctcctgatctcatgatccgcctgccttagccaataatctttctgtttaggtaaatttgaaaaatatacatcattactaccacattcatcctagttagaatctcatttatatttattccactctgtttatgatttggtaactaatttgaaaggcattatattatcaaaagtgtat

SEQ ID NO: 94368 - DNA, 1157 bp, Homo sapiens
agttctcaaaataagacatataaataggtttatgaacatgaaatagttttcaacctcagtcataaaaaacaagtcagatttaaaataaccattttttacactttaaattgagaaaaatcaaaagatttgacaagaattaataagaatatagagtagcatataccttcttacaccactggtaaaagtttaaaatgctatgtctttagaaggcagtttgacagtctaacaaacgtaaatgcacataccttttgactcagcaatcgcacttctgtgtgtgacttgtaaaacatacagggagtactaaaactattcaaaggaataaagtagagctttgtgtggtggtatgtgtcaatatccaagacatgttattaagtgaaaaaggcaaggtgcagaacagtaaatgcatacagtctgccgccacgagtaaagaaaacaaaagattatatttacatttatacttgtgcacagaaattttctaggaggatacactaatgttagctgccatggggaggtaaactgaggagttcaggctggaagaatttaccaaatagatgcttactttccaacaaaaagaaaataagacacctgaagcaaaaaagcaaaccaacggataatttaaaagttataaagtttgctattgttagagaagtttttgctggatatagtacttgtttacattgttttagggaactttattatatgttcaaaaacaaacgaagtagtcagatgacctcttaagacttccaactcagcttcggtgattgtcaatttaggcaacaatatccacttacattaaaagtaaatgtctgctgggcgcggtggctcacgcttgtaatcccagcgctttgggaggctgaggctggcagatcacctgaggtcaggagttcaagaccaacagggccaacatggttgaaaccccatctccactaaaaatacaagcaaattagctaggcgtgttggcgggtgcctataatcccagctataggggaggctgaggtgggaggattgcttgaacccaggaagcagaggctacagtgagccaagatcatgccactgcactccagtctgggcaacagaccgagactccctctcaaaaaaaaaaaaaaattgatagataaatatttgttttaggctcatgtacacattacccacagttg

SEQ ID NO: 94369 - DNA, 1017 bp, Homo sapiens
gggtattgctgttggtgtgatatatctataattcagctttacggtttatgatatctttatgatatcttgtgtaaatgatgcagaaatttagactaaataataggtgcaccattcatactggttaagggatgagcaaagggactgcttaatctgatcaacaggtcagagaatgatctcaagttgaagacgtgaggatgcttatttcagccctgtctctttcaatgttgacttgactgagaacactggcctgccagtaaaaatactgccaataaaaatactgattaaaaggaatgggtgactgacaaaattgagcaggataaaaaaatatggagcttaatagtttaaaaattaaatttgaagcgttaaagccaaaaacctcaaaaaaattaaatttgataagaatgaatgtcaagtcctgtgggatgggccgatacaaggtatgcagttcaattcaaatatgaatttgaattgctagagtagggcttgccctgccctaagtcaggcactgtcctatgccccagggatgcaaattgtacccagtttttgaaaaagcttaaaggtttgaaaacaaaaagatactaatagattgaagaggtaataatacaaatatgtgtaagggtgattgttgaactaggctgagcataattggctgagagagactgctacatttcatctgattttaaaggctgagtaattgttgactgggcatattaggagcagggcctgtatttcacatgaaaggaccagcatgtgcaaagttaagaagttacagtgtagtgtgtttcaggaatctactcgaaagaggtgttaaggtaataaagtagaaccatatgttgaaggttattgtttttttttttttttttttgactttcctttttatctttgtcttctctttatttcctagttgtttctagtcagaggaaggatagctttatacagaaataggattttttttttttaattttttttttttttttaaattgatcattcttgggtgtttctcacagagggggattt

SEQ ID NO: 94370 - DNA, 1541 bp, Homo sapiens
ggcgtgtgccactatgcctggttaattaaaaacttttttttgtagagacaaggtcttactatgttgcccaagctggtctcaaactcttggcctcaagcaatcctcctaccacagcctcctggtgttctgggatacaggcatgagccaccacgcctggcctttggtgtgttttttatgtaattttaacagtttttttgaggtataattgctgttcaataaactatgctgtttaaaatgtatgatttggtaacttttcacaagtatgcaactgagaaaccagcaagataatgaacaggccaggcatggtagctcactcttgtaattccagcactttgggaggcccaggagggaggattgcttgaggccaggagttcgaggttgcaataatctatggtcatgccattgcactccagcctggactaccaagccagaccctgtctcttaaaaaatttaaaaatgaaaaagataatgaacatatcagttacctccaagagtttcctcatgcctttttgtaatgccttcttcctgccccccacctcctcaggagactactgatctgcttttgtcactataaattagtttgcattttctagaattatctggtatttctgttgtatctttcttttaatattgggtatacaaaattgagtaactcagactctagtttatggcatattgtgattgttgacctgttcaaggccctcatttgttttctccatttagcctgtacagttctattctttttctattctttattctttacataggcacccactcttgtatttaacaggtagccttctggttctccttcttttcgtttattaatatttacctacatctgtattcattgttctgtgtaccatattatgctttatactcctttcccacattaattgtttctttaattctatcaatctgataggcaccaagtagtaactttttgctttaattttattttcctgattactagtgaggctcagcattatttatataacagccagtcaacatggtcactgcataaaccatgccctggggaactgcacacctccagggcactatttccacatgaatgttgtcccctagagttgtgcagtgtggtggccttgcctcaggtttgcccttttatgaattttctgtccatatcctttggccagtttttctttttttaatatggtttactgtgttttacctgctattttgtagtaatttctgaagtgttttaaatattaattccttttggtaacaaactttatatatatatgtctccttctttatttattgccttttaactttgcctgtggtagtctgctatgtttagagtaaacctgaaaacttagttctgatataaattcttctgtacctcaaagtcacaaagttactcacctactttttctattagctttctagttttagctgtcgaatgtagaccattagtcgatctttgaatttattcctacacgttgtatgaaaggaagacctccatagtgagccaattatacattatttactaatactttatttttctcaatgacttgtgatgt

SEQ ID NO: 94371 - DNA, 1016 bp, Homo sapiens
ctactcgggaggctgaggcaggacaatggtgtgaacctgggaggcagagctggcagtgagccgagattgcgccactgcactccagcgtggtcaacagagtgagactctgtctcaaaaaaaaaaaaaaagtattaaaaacaaatgcacttgtatactttaaaagatttaatttttattttatgtgacttatagctcaataaaacttatttttaaaatatgtgcatgatttcttttttttttctgtttcattttttatgggaaatccctccttaaacttaaggagaatgtaaacctaaatacagatatcaaggtgtctttattcatttaccgctgcttacattttggaagtatgttgattctgaggaaagaaatcaaggtggatctatcactaagaagtaaaattgatccataatatttatgtcatgtcatggtatttgaaaatgttatattactaagagcttcgatggcagtcattttttttttctttttcctttaaatagtcatgttggaagcctctgcagagaacattttacagcaggacttttgccatgctatcaaagtgggagtgaaatatacccaacaaataattcagggcattcagcagttggtaaaagaaactggtgttaccaagaggacacctcagaagttatttaccccttcgccagagattgtgaaatatactcataagtaagaacatctgtgcaaatgaaaatatgaaattgtcatcagatttaatttcctcgtgggagagaaacttcccatggaagcactgcccatgcattacttcataaatagcacttttctgttttaagagtcattcccataaatatctgcttactcccttaaaaaggataagcccacatcactcttgtaagacctaactttgaatctcaaatgaaagagtgtgtttattggtcaagattcaggtaagcaccacatctctccacgtctaggaaaaagaataaaacgttaagatatttgaatatctaaggaaactgttggaattctcaaaaaga

SEQ ID NO: 94372 - DNA, 1279 bp, Homo sapiens
ttctgttagaggacttcttttttttttttttttttaactgggaaattatcagagtatatactccttcaggatgaaattaatgtaacttacggctgttataagttcataatcatgcaatataaaaatggctcagtgagtaaataattatcaagtgtcctaggcagagcaggccctagcaatacaacaatgaaagatgcagttcttgatctctgcataaaggagacagataattacttatgatcagtgttattataaagacatagtcaaagtgctaagaatatgatagagaagagcagatttgattttgtgtggtcaggttgtcaaggagggctcctcagagtagtcatttgtgtaagctgaaccttagtaggatctagtgttaagcatttgcgttagagagaatactgactggctagaccaggggacaaacatgagcataatcccagaggtgtggaagaagtggtatatttcagcaattcagagtgatccagtgaggacagaaggtagggtggggtaggatgttctgtgggtcttaaataccgtgtagaaacatggattttattctgtggtcacaatcaaagatggggttgaagccatgactggaataatgtcttgaaaactgggtatttccattaaacagttgccaatattctaatacattttaggggcagtacgaataggaataattgatggagaatatgttgttaacccaacaagaaaagaaatgtcttctagtactttaaatttagtggttgctggagcacctaaaagtcagattggtaagttgttttaaataccacatttgttctggattttacttacaagttctggcttcttaaactgaatttaaactctgtgtgtatgttttgtcggtagccataaaaatttttgtcatgttttatctctgtcctatttttgtgctcttgcttcatatcaaatgattcctaaaattacaggattttattcaattttatttagaatatacaaaaatatttaccaagatcatttcagtaattatttttagactaaattttaattattaaaattatgactaatttttagtctaaaaataatttcaataattatgtttagactaataagttattagtctaaataacttattttaaaaatagaagttctaagtctggtagtaaccattttattagtttaaacattataatttagctatttcattctaagtctgcttggtatcctcttgagaagtgacccatttctactaggtggaaaactggtaataaaatagaagaaatgcattgac

SEQ ID NO: 94373 - DNA, 1138 bp, Homo sapiens
gcccatgcctctactttgttgaatctattcctagtacattttttcatgttcagaatagtaattcctaaacattatgttcatcagctactgaaatatgtccataatctttcaaatctttaacatccctacatattgtgggatcatatgtaatttatagctcttctacccagaaattgcttttttttgagacagagtcttgctctgtcacccaggctggagtgcagtggcacgatctcggctcactgcaacctctacctcccgggttcaagtgattgggattacaggtgcccaccaccatgcctggctgatttttgtatttttagtcaagatggggtttctccattttggtcaggctggtcttgaactcctgacctcgtgatccacccgcctcagcctcccaagtgctgggattgcaggcgtgaaccactgtgctcggccagaaattgctattttatgtatatttatatacagtcttcagacacaaagtagcaaggaagcattttcttttggtctgctattggtcttaagtctctttgctctgcttatatatgtaactgttgcctgtggaaccagaatgaaaaattgctccccaatctttattgttaatgtgcttcttctgtgtttgttttttgttgttagggcatggtatgtaataatggaagcactgacatttatctgtgtccctcttagtaaatcagtccaaggggatttttcttgaaaacatattgaatggctatctatattagttcaaacgttttgaactgtaaagcaactctgtcagtacggtttaatgtgtttttttttcttttggcagatcgttcaattagaccgctctttccagctggctacttctatgatacacaggtagattctgctttaggttttttagttgccagatcaatcaaaaattacttaatgaatctctgtaatatttcctagagtaaacattataaagaacataagaattttttatgatactgttatattttacattacgtttttgaaaaaagatagtactttttttttttttttttttgagacagagtctcactttgtcgcccaggctggagtgcaatggcacgatctcagctcactgcaacctcaatctcccaggttcaagtgattctcctgcctcagc

SEQ ID NO: 94374 - DNA, 1062 bp, Homo sapiens
tcttagttcacagatccaaataataataatgtgttgttctatgacttctagtattaaaagtaaatataaatttactctgcatattaaacatttacattattctaggacttctcctttaaattacgatagtacacacacaaaaaccttatttatctaattgcctttcgttggcacataaagacaaagatcgtttgcaacataatcgcgttctgataggtttgaccctctctagtcttcgtagaaggtggccaaggtttccgttaccccggcgtccctcgggcaccgcggaaacgaaactccatcaggctccgccccacggtctgcggagtgagccaatcagggcacagcctgcgttgaccgcgtgccgggtgtcatggcggcctgcaggtactgctgctcgtgcctccggctccggcccctgagcgatggtcctttccttctgccacggcgggatcgggcactcacccagttgcaagtgcgagcactatggagtagcgcagggtctcgagctgtggccgtggacttaggcaacaggtaaggagtgacgtgcgttcactgtattgtcataaggtgtcttgtccagccagcttgagcgtattcatctcccagggtagaaacccggtatcccagctctatttaatctctccttaccctaaacctaaattccaaatttccctttccgggtttggaatgtgtctcctcggaccctccttcccgcgctatgtcgttctctctgttggtgtgtgccgggcttctttgctccatccgactctgtccgtccacctgacttccgatctctttactttccgggaccactgggctcttaagtgggaaacattccacctaggaataacgagttgacgtgggtgagacgaggccccccgggatgctggcccggaccctggaagctggggctctgatgcccctcgagctgggacacagacctcagcagaggctccgggtggctagtgcaccacgggtcccccacgtcccactcctcgggctccttcagcctcctcttcaccaggagcctaccttgtagaagttgaacaccaggtccag

SEQ ID NO: 94375 - DNA, 1027 bp, Homo sapiens
gtgagggggtgaatccaggggatcttcgccttggagggtcgggaatgcggctgctctgggccagcagctcttgggcgggcagagggcgaggaaagggcgccactgccagggagagcggctggcggggcgcccgggagaagcagcgggcgccaccctcagagcagtcttgtgtcaccgggtacataggagttcaagctctgccttcacgtcttctcccaattcctgtgctttccctctcccggagtttggaaggcatcccctggagttgccttactccccttcccacttaaccccaggttgactgggggaaagaggaggagcaaagagactcagtatggaaggagcagcattttgacagagtaccccaagtgttggtcagtgatggtttctttctgagccagcccccctgccaccctcttctaggaaaagaagggaaacgtaccccaagcccactaactttcttttctccttggagagcgccgggtctgcgaggagtgtgcctgcccagctgcagtacactagtggccgggaaccgccctgctggcgagcaccacaaacttcctctccttccagctagcgctggtgcctcctggtattccttcctctcattgttctgctttgtttgtaggaagccagacacaaacgaaatcactgcagggacttcagggagcaaattcccgaaggcacaagctgttcttttcccctttccactcctatccccacatatcagacagtagatgctgttccggaattgcctcagtgctccagctctgggattctggggcaagaaagagtgggaagagtggaatgctcaaggctcacctatgtgctgggcccagttcaggtggagatggccgtctcccgaggccgaaagtcattgtcatatagtccctagagtgggtgcaggtaggaagattcctccagtcagaaaaatgccaaggcttactctctcctgtggttgaattcattactaacagagtgtttattaagtgccagtctctttggggaatagaggcaggctagtgta

SEQ ID NO: 94376 - DNA, 1001 bp, Homo sapiens
atgacataatgcaagtaaagtattgtgcagggatagaactgatacttaagttagtttaatttttatggccatactaattattatcccctaaatgtttgggtaaaaattagatgacataatgcaagtaaagtattgtgcagggatagaactgatacttaagttagtttaatttttatggacagctacaaatcttcagcttcctcctactccctcacctcctcccctaacctcacaggtaattcaccagttacaggctctccctttccaggaagtctgagcctgctgacacctcagatgtgtacttcccttgaatggttgtgtctctcttttcaggatatcaaccagaaactccaggaagacaaccaggaactgagggacctctgctgtttcctggatgatgaccggcagaaaggcaagagggtgtctcgggagtggcagagactgggtcgctacactgccggggtgatgcacaaggaagtggccttatacctgcagaagctgaaagacctggaggtgaagcaggaggaagtggtgaaggagaacatggagctcaaggagctctgtgtgctactagatgaggagaagggtgcaggctgcgcaggcagccgctgctccatcgacagccaggccagcctgtgccaactcacagcctccaccgcaccctacgtgcgggatgtgggtgacggcagcagcacctccagcactggcagcactgacagcccggaccaccacaagcaccacgcgagcagtggcagcccggagcacctgcagaagccccggagcgagggcagcccggagcactccaagcacaggagcgccagccccgagcatccacagaaacccagagcctgtggaaccccagatcgccccaaagcactcaaaggacctagcccggagcaccacaaacccttgtgcaagggcagccccgaacagcaaaggcacccgcatccagggagcagccccgaaacgctgcccaagcacgtgctgagtgggagcccgga

SEQ ID NO: 94377 - DNA, 1009 bp, Homo sapiens
tgataaaaaatagaaccattctaagagtctttcatcttaaacctgagcattttcttagtggtgtgtgctgtttcctaccagagcttgtttgtggaatggttgccaaaaggattttgaatccagttaataggttatatacaagaagatatgaatatttctatgaaaaaccaataacattaaaaaagaagtatgatgttcctaaacaggcttgatgctggtctgcccaaatggctataaatatgcctgactttaccttaaggattttttttccattgtgttggaggcctgaatctgtgacatttctttgcatctaaaacgcatcagctgattccctttctactcactcaaaatccaccaacactgtcatcaaactcccttatacatattccaaataatatgctgtcttacactgcaagagacatctttcctggttgtttgaaagtacctttttaaaatgtacagatgtgtttggacactcttttggtttctaaagcataacgtccactacatttgctgaggcagtgctaaacctgagcttttaaaccttttcgaagaggtttaattttctgcatcttggatctgaaaccactttgcacttgagagagaaaaaatcatttcttaaagaataaaaaacaaaaaaactccacaatccttttatgttacctatggttgagttggatctaaaacgattgattttatatactgtggggttttgttttcattgaaaatatctgagggtttttgctttatttggaaggtgctctggagtctgcagccagctccaagcagtagtggaggaggctgccagttttagcagtgacaagaaggggtaaatttcaatattgtatttggggatttacctgttggattccattttatcctaatccttttctcatagtgctgaaaattgcctccagaaacttgacttcaaatgcatgcaatgttcttttaagcacaagtggaaataaaaaggttgggaaagatgagaggctactgctttctctgtcgt

SEQ ID NO: 94378 - DNA, 1048 bp, Homo sapiens
ttgtcctacctgtaaagatatgcattccctcccaaaacacacacatatgcacactgagaggacatcagtgaaaaagatgactgttttcgttgactgtgccttgagcatttataaatcttcttgtgcttataattacaaactcagtggatgaaatattgaactcattcaagagtttcttttgggaatgcaaagataaattttagctattttttctctcttaaaaacatcttaagtctctataataatttcttaattagtaggtgtttagaaaacaacaaaagcaaaagcaaaagaaatatttaaacaaatctccaaactaaacaaaattctcaaaaatgcatttaactctttagaagttactgttcaatgatttctttctagtttgtgtagagttccgttttcaaataggaagtagattcaacacttaccacatctaggcattcaggcatttgtccattcattcaaattgcttgcttatttcatatttgtaaattaagtaattgaataaccattgtcatttataaatgttcataaagtgacagcctcaactattgagaatgggggtttcacttacttgattccattgacatccaaggttgaatggaattttcttaggcaaaaatgtttccttccacaacaaaatgaaagagttgtgcttccagatactagctggcaggcctttgcttttaaacaggtaactatttagctcaggtcatggatgtcttggatgatttaggctcttctagcaatagctgtatttgttattggccttcaagacaaagaagattctgatgatcacagatccttacaagtagctcacccactggacataatgaatgcagaagaaaaaatagtaaaaatagtttgatattaattctagaagcacatattgctggtgactggcaaatgagaaggaataaatagacgaagaaatggtactcttcattatcttctttcttcttcgtcttcaaaaaaaaaaaaaaaaaaggaattgtttaattatcctggtgggtctgattccctttgccttgttagagcaagtttcagt

SEQ ID NO: 94379 - DNA, 1038 bp, Homo sapiens
ccagggcctttgtgctgcatcatcccatggtgggaggcaagagggcaagagggcacaagacagcaagcaagcaagagggggccaaacttgcttttataacaggcccactatcttgataactaacccactcccatgataacaatattaatccattcatgaaggcagaaccctcatgacctaatcatctcttattaggcctcatctcccaacactgctgcattgaggattacgtttctaatatgtaaactttggggaacacattcaaaccacagcattaagggttcctgaacaaagaggttttacaatgatcagtgcttgagggctttatatacccaggtttgtaccgtgatttaatcccttttcacttattttatttttcttgtaaaggttatgctgaattactggagagtttttgcaatgaaggagtcatcagttaagaaaatctatcttctgactaatatcttctgagtcaatgatgaaggtgtactgtttttttggggaaaataggacctagttgcctgggaggcagaaatattctaaatattctgctaagtgaaaatcaataaactaattctgtttaaacaataaaggtagacaaataatcttgcaaccttgtggaccctttggcttgtctagtgcagtaaaattaatttagcttttacatttcacttactttgatgtttttccactttagtattttgacctcattttagcttgttatgttctatctaaatctcagattgttttcaaactgtgctcctttgagccctggaaggtctgtggagcctccctggggctgttaggagtgcatagggaagagtaggcaggctctgccaccccatttatccctagcacagctccagcttcaactggagcatactctacatttgactggtttgtttgttcccatttctgcttaagctcttaattgaacaaagctgactttacaaagctgacttgaaaacctctagtgttacccagtgacaccaaaagaagcaaacattttggacacatcaggcatatttctagtccagtaaa

SEQ ID NO: 94380 - DNA, 1039 bp, Homo sapiens
aggcacatatctgcctccatgtaatctatgtactacatgaggagttgcagctgtggtccaagggccaaataccgtcacagtcatgttttatttgtcccaaatggtgttttgacaattggaaaattcatatacaaatctaagtgtctgttttctcttggtaaactggaaggtcacctaacactgactgcacattgccacatgactgcagtcagtggaaacagtacagtggctgcctctttagtggaggtgttctggttttctattgccatgtgacaaaccacctcaacacttagtgttgtgaaacatcagcctttcattatgttcatagattaggtggctcaggaatttggacaaggcatagtagggatggtttgtttctactccacaatgtctggggcttctgctgaggagacttacattctgaaggctgggaccatctggaggtaactttactcacgtatcatatgcctgggctgggatggcttggagttccttgagcatcccccgaatttcggtgcagattccagaatttccatgtgttcttttcatgtgtcttctgcaacatggtgcctcaggatagtcagggctcctacagtgtggctcggtgatccaagggcaagtgtcctagcagaacaaggcaaaagccacctggcattttgtgacctagtcttagaagtcatactgtgctactgtcttgtactgtattggttgaagtagtcataagccgatcaagatgcaagcagagtggtcacagaaacctcttcttgatgagctaagtgacaaggagttgcaactatgttttaaaaccactgacataggggacaagcatgttttcatttgctgtagtcttcaccactccctattacattgcatccaggctgctttaccaacttatgttatctgaccattgtcaagagcatttgagttagagatcactgttcttccttggttcttccaaatttagataaactctaaattctagttagggtttgtttttgtcagtgttcataggagggtaaatctgaatgttccctttggg

SEQ ID NO: 94381 - DNA, 1550 bp, Homo sapiens
tgacagcatataagtaggggactggatctagccagggacatcagcagaggcttccctgaagaagtgatgattaagttgaaagaagaatagtatcacttgggcaagagaggatggagagaagagcattttgtctgatggggtagtttgatgaggcaggagtgaaagcaggctaggttatatgtgaagaacacatgaaccccttgattccagggacttagcatcacaaaggtttgcttcttcctctcactacatgaatgatgtagcttggtgaggaggttctgttctttataggtattctgggacaccgctgatgaaggcttccctctctgagcattgctgttggtgtggcagaggagaaaacatggacttatcacaccttgctcttctctgttcccacctggaagtgacccatattacttctgcccatggtccattggccagactgaccacatggccccacttcacggcaaggaactgggtggtatagttttctgtaagaggttataatagcatttactgaagtgatgcttatggctatgtggaagaaataaagcatatcagtgactatgcaaataatgtcccagagtgatttgttggctgctaaaatgtgggtggtgaagaaggagagggagtcaaaaagggggaggtagcctttagctcctaggtaagtggtagaattaaggaaccattcacaaggttgaggaagggatagacagggtgataagtaaaagatggtaagaactgtaccttggggaacacaaagatatagctggcaccaggagaaaaaagagtcatcagaggagacagaagaggagcaaaggatagtgattgggagttttcacagccaggataaggggcctttcagaaggaaggagggcccagctgtgtcaaatgccctacacgttaaagaagatggagaataagaccaggtcattgggctgggaatggaggaggtcattgatgatcttctaggaaggagaaagaaatgatggaatcatgtgagactcttaaagtcatgggttggggtttttgttgttgttgttgttgttttgttttatgagggatagaggagaataaatcctgaacatggtgataggtacagaatgaaagagagaatgaacacaggaaaaataagatttagaagagacaagagtggaagaaatacagggttaacattggtaacaaggagtcacatttccttcttagaggtaagagcaatagatgggaggagagtttggaaaaacaaatatttgagataatgaatggcttgataggagagatgaacagatgtacatatcctatgtagaattcaagatccttagaagttaactgctcataatcctgaaatatacaataaattgcatggcaggactgcaaattcaagttagctcaaaaaaggctcagaattcagatatgctttgattacaggtcaaaatgcagaggaccctatgaaagggctattgttggaaaattaaaaacaatagtaaatgttgcattttctggaattgtgcattggctattatattatttctatgggaatatagaatgaa

SEQ ID NO: 94382 - DNA, 1160 bp, Homo sapiens
gtgtgcgagatgctatggtgtgaacattctgaaagcaaaaacttaagtacgtttcagtccctgacataaggtatcttcgagtaccactgtgttggggagatggtggcaaggcattagttaattataatgcagtccagaatgtgatggctgtcacaatggggcccaacgtactgtaggagttcaaagaatgaaggcaatattttcaattaaaggattaggaaaactttcatgaacaagatagtatttgaagtgagacctaaattaagaggtgaagccatgttatggtgggatagtgaaagaggaaaataaacagctaggggcaagcatacgacgaggggccaaaaacaatggaggaaaacatgagaggtgggagaagttagggttgtggagtcaagcagtcaagcaagtctagtggggaggaagttacatgaaaaacatctgggaggaaggtaggtttgggcatattgtggaggtcttaggtgattgtgtaaggaattttgacactcttttgagtggaggagtgggataataaaacatttaaaagaaactcaatcaggtgttttttcaggtatctacaaggcgaattagagaacagatactgaaggcagggagatgagttaggaagctattgtgatgttatacatgagaaatgatgaggatctgaacaaggagaggccctctctgaacctgacatggaggagaagatataaaagatgttgtagatgccaaatctttgaatattagcaactgatggagggggagagaaaggtaatgaagatggtggtaagatgttgacatcattttcaccaacagaaataaaaaatcatcagtaagggctgttctttaatcagctattataatgggtttggatttatactttcttaaatcatagccatgttaggatttatcagagatgttctcctttgaggtgttgacttggtaactgtacatgatattgaaggagtgaattggcttccgagtagggagtgtgagaatgcaggggatggagaacagggtcccacagcaaacctgcaggtaagaggtgggggaggccatggaagcatggctgtgggagaagatgaagaagaatgaagctggtgctgtggtacagaagccaatggaacaaagagtttggaaaaggagggtactggaaagaacat

SEQ ID NO: 94383 - DNA, 1048 bp, Homo sapiens
ctgatcctcctggcattttcagaaggcacatgctttaacttcagctagtgtttctctttgagtctgggaccattcaaaactctgcctgcctggctggagctgtgtcaccttcctagatcttcccagagcctattctccaaggactagaaatttcaccattagccaaagttctgcccttaatggacttaaaaccaggaagcttctttgtctttcttgccaaattgggcctcttcagtactgatgatgacacatgtcagacttgatttctccttgcctttctggacacagaatgctaaacttctcattactcatcttaagggccaggttgatagctggatcatcttcaccaaactcaagtggggccttttccttatgaatctatgttgcggggacttcattggctatcctgctaaagtgttgtcatatttgaatagggggatttaatcaaggtactcatggtagtgagtttagcacccaaactagcatttaagacaataaaagagaagtaggatctgaagggaaccagatggtcaaagagcagggaagactgatgggaaccagaaaaataccaatgtgaaaatcagtgtgcatcttggaggctgcacagatagtgtgggaccacaataatatgggaaaatggaccaaaaaatagacaaactcatgctgtccctgaaacaccattggtctcctgctggagtagtgattttgttgagcttggttttcccagggatctcagctagaactggagtgagggtgggagtaaaaagaatctgacagggaaccacaagaatctttcctttgatcagtgttcttttcaagaagatgtttgccactgtccataatataagtcatgcttgaaataaaactttagtggagcaaatttattcaagtctgggcttacacaaacatgataaatttgtccaatctttttttagctgctctaatgtcatggtagcttttttgcctgcaggagtagcaatgtgatctggctccatagttcagcctgttgagcagggcagggctgtattagtagtcacattacattcat

SEQ ID NO: 94384 - DNA, 1043 bp, Homo sapiens
tttacttttgtggcctttgaaatgctgtgattttattagctagccaaatttcaagagtctggaggggagaggcctgggaggaggctgagacacatagtgggcaagaacagctggagagaggctaaggacaggatcaaaggtacaagtttcttcttcaaccctgtcattctcattaccatttgggacacacagggtagcaaatctagtcaccttgtagcaaatgcagggtttaggcatacaacagtgtggaaggcctgaataaagctttccccacctgtagttctcatgcattatttatttctgatacctccgctgtttctcctcttacagctgcactcagtctggaagagtaaaggctacacaggaaatcctcagctcctggcctagtgcacttagagaatattgcctgccaatttggtaactacgataactgcagcaatattcttgggtagcttgttttcaggacatctttaatgagagaagaggatttgaggaggctattagccttggctgtactaagtttagagtgctgtcagtgatctactgcatggatgccccctgctgatttcttccttgattagtcttttctaatgttcttgcctggatgcatctgtgctgcaataagagaattaaaattcataatctctgcttgggatcctgaggctgcactctgttctggagcccagacgtcttttgtttcctagctttgccactgaaaacagatttcctggcacgttggctgatagttggatgagcagcattgaacatgagaaagaaaatgctgggaatggaggatggtcagttacagtctgtctgactcagaaaagggcattccagctgctggaattacattagaaagggctgtcatcagtgaatacccatactgaatcaagaaaatcaagaaaccgggtaaagtaagggataggtcattttaagcaaaaagacgattaaataaaatcctaaagtaatattacccatgattccctgccactgtcctcaggaaatcagctggtgcttaccttcccctccattcatttcttttt

SEQ ID NO: 94385 - DNA, 1038 bp, Homo sapiens
tctatagagtaaaatttcagagttgtatttcttgttcaaggagaaaataatcaatttatgatatgagacctttctgtgatggttcaaattagatttcttgacatcagacctagctcttaaatctaataagcagctacacagatcgtagcagttttgcagatgtgttttatggacttcagcttgcagcacattaaacgacactgccagcttaattataataaaagcttcacagaccctagttggcattacagactaggtttctaaaatattttatggtatagtgatagtttatttaatgtcacaatgtaagatattgctcagaaaataatggtgatcctaagtgagatgtgacaagattgtgtatagtgtttggtgaacagtaaaagtgattttacaaataaagtttggggcagttggatgaactaggacagataagtaaactggggaagaggaatctccttggtaatggttcatctttggacagtcacatttagaaaacagttttaggaaggtttttgaacaaattaaagaagctactgtgtatcccaatgtaaaaggttgtcattgactttgactattgtgctgaggacctaaaaggatgcgtgctgaacatttgaatgcttctgagaatgctctggggttttggcagcggggtttgaggctggctgcatcacagcatggttggctgaatgtcagcttcatgtacagactttttatggctgcatcttaagtgattataatataatgtgcactttgcccgagagagaaaaatattatttttccttgtccttcagttctttgccctttatatatttgcacaaggccctggaggagtcacactattcacaccatcaccttttacctgtttgtttcatatgagatgtgaggaactaaagacctaaataaattactttctccaggtctcgtccaacttgtgacaggagtagagccattttctgtctccatttttaaccactgtttaacctacacttagagtttacagtgagacagggacatacctcgggtaaaatgtcatga

SEQ ID NO: 94386 - DNA, 1085 bp, Homo sapiens
tatttggtagttattcagcacctattatgtactaagtaaattgatctctaattttgcaaatctgactatttataagtcttaaaactgatttgatatatttgtagttttatatatcaaggatagacttgttagtctgtaatcctgacatacaaaagcaggataactaagtttgtagagagcactttatgcttttaaaaatgcttctatatgcattgtcttatttaattctcacattggttaggtcttaacatgctcattttatggaaggatagatgatgcattagatgaacttgttgccatttgcatcctgaaagtcttttattatgtttatagatgaggaattatattgtcctgaacattcatggctgttactctttgtacaatccagttggcgactagtcatgttcttttttgttgtaactctgtcttctatttttatcttaacagtctttatgtaagactttaagtaatatttatatttttatacatttcagttttattttcccaactagcctgcaaatctcatgtgtgctatatctcttcataattataaagcagtattaactattttttatagtccttatagtacctggcacattgtaggccttcagtaaaggtaattgaatctgaagtgggaataaggagaactgataccttgatttgcatcctaccttcatttgtttcattctctgggcagtatttttgattttaggccagtcaagcttggggcttccctctctttttccaggctcttgctttaagccatgtcattgcacagcagaccatggtgcaacaaagaggatttggagccctgtatactcagttttgccaaacgtttactgctctaataaatcatctattggctaagctaactttggggaattgcctatggactttacttctatttgccagccccatctggttgccatggatacttgctgtggcagaaggttgtcctacaggcactggaacatgatgttgcctgtggcaacaaatagctcagtgggcagcagaaggaacaggggtgggacaggagtaccaggtactcacagggagggcagggactttggttggactcagcagaa

SEQ ID NO: 94387 - DNA, 3118 bp, Homo sapiens
ttagtttaattcgatcccatttgtcaattttggcttttgttgccattgcttttggtgttttagacatgaagtccttgcctatgcctatgtcctgaatggtaatgcctaggttttcttctagggtttttatggttttaggtctaaggtttaagtctttaatccatcttgaattaatttttgtataaggtgtaaggaagggatccagttcctacaaggagatttaggcacttttcatttaaaagttttctacttttcattttttgttttctttcctgtagcctgaggaaagtgaacatgcttataaatataacgcattagtaatttaagttggtgccttctgtatcctttacatataaagtagacaaatataaatgtaatatatgcaatatctatattgcctaaatataaacataatatagatccgaaatgtcatatacataaagatctatattctttgacaatataagacagtttaagtgaatacatttttaagtgatttgagtctttctttttcttttttcgagacaggcactcgctctacaggctggagtgtagtggtgtgatcgcggctcactgcaatctccgcctccctggttcgagtgattctcctgcctcagcctcctgagtagctgggattacaggcacgcgccaccacgcccagctaatttttgcatttttaatagagacggggtcccaccatgttggccagggtggtctcaaactcctggcctcaagtgatcctcctcccttggcctcccaaagtgctgggattacaggtgtgagccactgcccctggcaagactttcttaaattacatttgaaaagctgtcattgtatgaaaaataagcaaaacataactgagccatgtttaggaagctgagacatagcagtgactttggactctgatagtaattcggagaggcactgtgaattgctagaaataacaccaaataggggtttcaagaactagttctttgcctggctctgtctttaatcagtttttagaccaggaggacacccttaacctctctaagccttatatagcttgtctataaaagaaaattgtcacaggtgatatggaaagagctactcagctctgcaaatttatgactctttatccagagagtttgtgtttatgtataattaatatacaaaacaggtgtgttctttttattttgatactcagattccttaaaaccacaactttacactatattgggtctttaatttacaaatgcctacttacatcgtggggggttactctacctcactggattctaaagctaataaagtttcattagatagctattaaatctatttaaataacatacagtcatggacatgtatgtttaagactcagaccatatcagatatacagatagtgtgctcacacgctagtctaatcagtgttggttttatgtgtatttggagagataacatgcagtccccttaatgtttctttctattctttatataaaatcatgtataatgaacataaaagttctagttttccctaacaatatacatatttaaaaataaaatgagtgtgataaaggcttgtggatttctctctggttagatccaaagagctaactccttcatttctaagtgtggttcctttcagctctgaacattctgagaccaggtgtaaataaaagcttgggctcatgccttatacatttgcaaagctaacaagtgtcaggatgaagggctatttattcaagaacagatagagagaagcagtgaagattgaattggttgtatctagttggtggagaggaacccacaggaagtgctgatggaatgctggtacagccaccatggcaggtcatcgcccagtgaatgcagagctctttgcactgccatgttctctatgatacccgatgaagatcactaagctgtcctttaaatccagtgcaacattttgaagagagccaaaaactaggaacagtcttattatttgggggagttgcaatgttatttattaggcattatttaagaagaaaatgccttgtgaagggtggtatatacagcccagccacaactgtgagcatagcgttactgagtagactgtgtttcctcaggccacaccagcccaggtaaagatcacctgaagttaggatattctcacctgagttcatgaactaatgtgaaaattttaaaaatatcacacttgaacatattttaaagggaccacatgttatctcatattgcatgtaataaaagaagccatgacatttctcatactgcctacaataaaaggaggcatgacatttcacagagggaatttaaataattatgacgaaagagaatgctaacatagaaaatgctaaaaagttaacttttatctaagtgtaatttatacccaacaataggtattctttattttaaaatgtagcatacttttcagaaattcagttctgagactggccaaaataaattgttatgacaaagagacgacaaagacatgaggtatcacacattagttttttcagtgaagctacatagaggagaataatgaaagagaagctgcatataaatcaaagtcatctgtgcttgtgatacacataaagaataatacaaagaggaagaaaacgttttttcaaaggatacctgatttaccggattcattctgcagactaaagcatctgaaatagccactaagaagtggatgaggcctttctttagattttctggttgacatcatgaaagaattgtaggaggcacacagtgagatggtaatgagtgtagcttttactgtttagaagaagctcttgtacatgatcttttaggttgagtgcctctgagcctgtctaacctggtagcatgttaacacatgacactaattaaagcatgttggagaagcaggatgaagaaagagcatattaaataaattataggtgttagcttaattgtttcactacttaggggccttcaatggcttggtaagtcttactagaagacgatttagggtttattttagaattaaaaattatacaaagtattctaacatcaataatcaatggagtcttttgaaaaacagcccagccacaattgtaaacatagcgttactgagtagattgtgtttcctcaggccacaccagcccaaattgggatc

SEQ ID NO: 94388 - DNA, 1033 bp, Homo sapiens
aattctccctaccagctagaagggtagcaagacgttgtagagtgcttatcagagagtaccatttacttcaattgatcaatataaatatatctttttttttcatcttaatgagtttctcataaagacacatcttggggcataccaaccttcatattcattcagtgtatccattggtgttaatattaacaatttcaactaaaaacaacaaacataatttttctaagtgtttcgagctgtgagatgtcaatttctacaatttagtttctagacatgctgtatatttaataaactttatgtaaactttaaaatattgcactgcatttatgaaaaaagctttctttgcctactgcagctatctaacattttatgaaactgacgcatgtccttcattattgaggctaaaagctcttgttcagattgcttgaggtttgaaaaagaggtgtgctagctttgcttagtttatttcttatttttggtatacatatacatatatataacattagaatgtgtgtactggaaatgctatgataggtattttgtgttaatccaaatgcaatgatagtttcttgtatgaatgtgcaagaggcctgtgaccgaatgctacgtttttatggtagtttaagattataaaagtagaaatgcaacaattcccagtttttggataggttctaaatttctgagatttgattcatggcagatattctctgttgttgttgttttagatgggctcattacataacgagttaattgtcactagtaggagactgtgaaggaattttgttatactttcaaaaatgttactgtgatgaaaaatcatctattttcagaaaatatttatgaattaatttactatagaattatctctctaattatcataattgggttacaatttaagctccccttttaaatgttatattttaaaatgttattactctataaaagaaaattgcttgctatatttacaccttctttcctaggaaagctttcatccttaaattgttgtattcctaccctctgaagacatttaaaataa

SEQ ID NO: 94389 - DNA, 1683 bp, Homo sapiens
tacatgaaatttattttctttcttcattggaaattgttaatttcgtgtttcttaaggtgtgtcctgcactgttaatatgtgctatagaaccccgaaatgaattttggatgaaatttggttagtttgcttctgtttttttaaaatatctatacctcttagatctcagtattgtaatgtatgtgaatttctaatttgaatataatgtgtgggcttttccaaactgaattaactttagaatcctaatttctgggaacctgggaaagttccctattgaagacattttgggaagtgtattttaagagttttgtttgtttgtttttctttttacccatttatctcaccccttctgccaacagaagtgatgccaccaaaaagaaatgaaaaatacaaacttcctattccatttccagaaggcaaggttctggatgatatggaaggcaatcagtgggtactgggcaagaagattggctctggaggatttggattgatatatttaggtaaagtaaaaccttaaattaacaattattcttatatctgtgactgtaaccgtgattacttagtggtattttaagaatggaaatatggaattcatatgtgtactttattaaaattcatgattgtactcgattaagtaataatagagtacagtgtctaggttcaagacatcactgacccactccttgttgtccatgtttttctgagtaaatcttagaagtctttttagagcataattatacaatctgccagacaaaatgctaactttctttttttttgagagcttgttttcttagaaacatgcttttttcagatgagaaaccacaactgtatagataaaaacactttctgtttgtgaatcttaatcaatatttaggcaatacaagagtctagtcatttcttaattgggctctactggagaattcatagataaaacttaaggcatctattctgtgaaatgaattaacttctctctcgtgcatctagagtggtccctagggatgtgccattcttgggataattgaaaaaataaacactcaaaattattttctgtgatctgtggtacaggtaaggaaccatgggctggataggcctttacattgcatttaagcatttaaaaattacactgaactttaatggatcattgagttggaatgaggaggggatatccattaaaagattgattaataaaataaggaaaatagtagtgatttttaaaaatataccctcaaggataaattctcctaaatgtactcacttgagacttgagatcacatctatttctataggagattaaggagttgataaaatacctccgttgagggaatcttgggttctcatcacatatttccagaaaaacatgcttcatggatcctgaaatataaaagatcctcttctgataaaattaagattgtagttttgaatgaatgaatgaatgaagtttggtcaataaatatctgcttattaaatacttaagtgtctattctagttggaaagacaagatcagcacaaaaaattgtatgagtcaagtaaaggacccatttaaagggtttgaacttgcttgaaattgcttgaaaaaatactatggttattaagtgctagattgaatgacatagtcaacactgttcaatagaaatgtaatacaagttacatatgtagtttaaaattttctaggagccacattaaaat

SEQ ID NO: 94390 - DNA, 2777 bp, Homo sapiens
accctgcctggctaatttttgtatttttagtagaaacggggttttgccatattggccaggatggtctcgaactcctgacctcaggtgatctgcccacctcggcctcccgaagtgttgggattacagacgtgagccactgtgcccagcctacttatttttttttattaccaaaataatactgtttgttttacaatatattttcagggttcaatatgtaagggaacattctctagtatctgaactttagaacctggaccctacctaggaagattagcaagtacacaccactgaggaaggactttaaagaaatatttagctattttcagaaaaaaggctccagtacttcagaatttataataaagatgtgtgttccaaatgttgtaactgttccattaaaagtgatgctaatgaatcatagaatcagtttaatttcactaaacttagtttttactattttcaaagctatacaaacaaatcaatatgaaattacatcatgtttttgcattttatcatggttctcatcacttcctctatataaatgaagagaagaagcagtaaaattcaaattttcctgaatacttttgtgtccagtgacattcatttcgattctttccagataccctctttcagcagacacttgatcagcgtttactgcctaaggctgagaagaaactagctgctctgtctagctcattgtacatgtacaactgtcctctagctttgagatcagtagccagggcctttcggtaatcagcagcttacagttaaggggaaggggcagagaagtttggtatttactcttgacttggagaaataatgtgcctctagcattaataagaaatagctaaaagagtgaaaagaaaagtctgaatacaagaacaaagtcaaagttctttctttgaatatgaaaagagaaggggaggaaaaaggaagaaaggaaactggtttaggggatgggaaaaattgctgtcattttagtatcaaatgaatgaaaaagttttttaaatatcaggaaggagagaaaactgagggttagaattttactataatgctgggtataacacagaaccaagtaaattacgggagaattgcataaataatagcagaggttttggcattaggcatatctgacctgaatcctgacctgatgaagccacttattcatctagttacttaatcctttgggttgtttctattctgcataattgtgataataataattgtgaggagaattaaatgagatttttttaaggaacttggtaagcatttaataaatgtaatttagttatttatttccatagactttcccattcttaatactggtgccatagtggggccaggcacagtggctcatgccagtaatcctagcactttggaaggcccaggcgggtggattgcctgagctccatccagcctgggcaacttggtgaaaccccatctctactaaaacacaaaaaattagctggttgtggtaatgtgtgtgtgtagtcccagtactcaggaggctgtggcatgagaattgcttgaacctgggaggaggaggttgcagtgagccaagattgcaccactgcattctagcttaggtgacggagtgagactgtctcaaaaaaaaaaaaaaaaaaatgctgccatagtggattaagatgatgacaaagaactccattggaagggtggattttctatttattctactatgaattttggtggatttaactactaatgtggtaaaactgagaacatagagaatgtcagcataagactttatgacattttactaactgataaaagctccccctaaaatttgctatagtagtgaaaagttctcatataagctgtatttaatctgcctcagatattaaagctattggtttcagaaattattcaaaattgagaataacagaattacaggataaactttagccacattcttttgaaggctgattatgtaagtaaaagatatgatttatctgtagcagttttagttttttgaaggtggcatagtgatgaccatttagcatctttggagtgtcaagcacagaatagatgttcaacagttatttgcctgagaaattgagactgagattggagtacttaacccacacaagctagtttgctttgttctcttccataattatagatgtcactcttcgatctactgcagattagtatccttagtcaccaggaaagttgagacaaggcacctatcatgacatcatctaaaagaatgtgcatgtgctttattgacaggacatcagtagcaatatcttttataaagatactatctcaaagcttttataaagaataacacattattataactaaagttaactgtggtgaagcctgaaaatcagatcatttatccatggacagatgtttaaatttcatcaaagtgactgccagacatttttggatcatgttgtcggattagcctaattttgtacttcagaaacatagaaggaatcttttgttggcggataggtttttagaaattaccaaagtttaaatcatttattttactgataaggaaacatttatatttaaaacaagtaaatataaaccacatacatagaatgtttttacttcttcataaaataattttttattttctttataaatagtgagctataatagattgattttaaggtatgcagaataaagtttagaagagcccagtgataatactagcaacaaagtagtgtgttggaatacatattgcttcattacatattacattattaagtgttattttggtagtgtttatagagagctttgagata

SEQ ID NO: 94391 - DNA, 1028 bp, Homo sapiens
ggcttttgcttggctttttcatttttttaaatatccatttttaagcatattttatattatggttcttctttattttcaacattttactgtcaaattcttttgccttaagggaagatttataaaatactctattcttcagtgcatttatatattatgtctcttccactggacctgttactatcttgtaactgtttacagtggtcaaggttttttttttttaatttgaaacatattgctgtggggaaatttcttcttcctgaaatgagctcacctctattgccacacaataaaagaattctcagcttttgagagctctggcttccttatgaaatatggatagacttctgcttctgaagtgttttaggtttttttctttagataaggaagaagaggaataaatagtatgaggtgtgtttcttcttttaagacacaggaatatctatatcagataaatgagaagaaaattaagaaactttaaagctctaaatgagagagctcattagaaattagctacttggatgatgaaaatttcttcatcatctacacttaaaggcatttatggtttttatactacttagatacttgattttgcaattagtatttctttagaatgtttgtccctgatagctccatcacatggactgttattcctgaacactctgttgtattctccatgaaaaaatattttaggagaaaagatagaaaactcagcaattatttcaagataattgttgaggacttcccttgtttcttttaaaagcatagccttttgttagccaggtagatttatcttttctttaacatcttcgatcaagtaatacttgagggaaatattctgtagaaagacatccattgaaggccagaaacatctacagatgcaatgtgatcccaagcaatgaagcatgtggcccttcattggcattatatgataacaggaggatcttctggcagaagaagtgacttttgctgcgttctgcatgctgcccctccaaacccatctttgattggcacctatgccctattgaaac

SEQ ID NO: 94392 - DNA, 1064 bp, Homo sapiens
aaggagatgaagggaaaactccaaataaaagaccttcagaaaatttcatccagaaacagaaagatttttaacaaaccaaaggaaaaagtttagtcctttctcctcaatgcagaaaatcttctgagttttctatcaataaaaacttagttaaccaaaatgttagaaccaacttaatgcataagtgacaaaactttctatttttacatttatttcattgcatgtctatcatgtatataaactttgcttcttgaataatggattttgcataaaattgagaactctaaacatcatatttccttctgattgtctcacacccactacagaactcccctcccccaccccctaaaagagggcacgcttccttctgatcactttaatcatatcttctaaatgctctaaaatttacaggaatgcctgtaagaccagctgtggccaagagaagcttttcctaatcgccttatagccgttgcttttgctttttcactgtgtaaactttatctatggaacagattccatgagaccgttgtgaatacttcaacgtattcaaaacatataactgccacaaattaaactactaaaactaaagctggtgcattgtaactgccaagtaaaactggcacgtccctctgtcagactgcaggagagtgtgccatacagtcctcggaaaacacaattcatccagaagcactcttgtcacttgctctgatattaaaccagagaaagtgacattaattaaagaagtgacatgagccaacaaaggcaatgaattctcagctttggctcatgtgcagaccttaatccaacctgttctgcttaggtagtgtggctatttctgaagagtaactagtgtggctactcaccccacttcctctcatcttcccattctgcatcacgtgtttgaggaactaacattttatatccagggttggactggttaattggtacactggtagtcattgcagggcttcccaaaatagtagtgtggtggcatgtgatgcttttattgtacttggtaatagtgtgagatgtacaactagaggtagaggagagttggtctaacgaaa

SEQ ID NO: 94393 - DNA, 1041 bp, Homo sapiens
ggctttagagatgaagctaaggagttttctattaccatacagaggaagaatacctttccctttgctcatggacatggcattttgttctgagattctcaaggcttgatttataattattgcttaggtgaggaattgctgagtgggcttcaagattatttcaccatagatctctgattttatgctatgtttttcctctttgtgcagtgcggtttggctactgggctatcaggaattaggcataagcatttttgaatcttgattttcttcctttggaacttcaactaaaatacttgatttttgaggatcattttacttttttctaggatgagcaaccagaagatgtgatattttagaataattaaccagtaattgtgaaatacatcgctttgtcaatgttaatatgaaaaaacccatgttattctatattcaaaatgttgaaattgatcatgagttctaaatagcagtaaaccttattttatctatttattttcacagttggatgtactggaatatatacatgaaaatgaatatgttcatggtgatataaaagcagcaaatctacttttgggttacaaaaatccagaccaggtaaatacatacttttgcttttaataaaggtctttaatgtatgaaactgaaacattcagaaaacaaacttctaacccagaagagtttacaaatgagggcgtaacatgatgaatgttgtaatttatcttacctgcttatctaatttaatctttgtaccaaactaatgagtaattaggatgagaaactgagagtcagaggggttaaataatatgttaatgggcacacagttaagaagtggctgagcaggaatttgaatttctgagcaaatatagataagcaaagaaccatcaaaatccagtgggagtagagatggatttatgtagaggttaaaacactgtcatattagttcatcatttcctactgtataaccaattaagttttaagcagagaggccgggcgcggtggctcatgcctgtaatcccagcactttgagaggccgaggtgagtggatca

SEQ ID NO: 94394 - DNA, 1027 bp, Homo sapiens
agaatgtttgctcttatctccccttcctgcttgaaatagttttatgtttcagggaggggttacaggaaaaagcagagcctcctcaactgtgtgaatacagataaaaagacatattgtggtttatgatgtctagatgcccacctggagggaagggaatttaggagcaaaataaaaagattaaaaatctaagtcaactcagaaataagatatgccaatgatgaagaaaggatttaagttggaaagttagttgttatggcccccagttgtacatattttatcctaaggcaccatttggtttaataaaatgtagatctgaggctgttcttaacctatcagtttcttaagacttaattataaaggttatgttttcagaggacaaaggcattattcatttgtctgtgcttgtcttccaggtttatcttgcagattatggactttcctacagatattgtcccaatgggaaccacaaacagtatcaggaaaatcctagaaaaggccataatgggacaatagagtttaccagcttggatgcccacaagggagtaggtgggtttcttttttctttttcttatttttatttcagaagaatgattagagacaagggtaatgaggctgcatgaaatgacctttgcatagtcagtttgaagcataagagcactggtgaggtttttatcaaaagtaatgaattcctgttatgccaatgaatatttcttctaacagtggaaagaaatttagactgtgacaagtggtgaaggagcaaaagtgtgtcaagtaagcaaaacttgctgctcattttagccagaaagccacagtttgtataggtaaaacttggaggtcagcagtgaatgtttatactgaagtgaatattacagatttggtaaagttgcatgtgggccaggtgcagtggctcacacctataatcccagcactttgggaggctgaggcaggaggatcgcttgagtctaggagttcaagaccagtttgggcaacatggtgaaaccccatctctacaaaaaaatacaaaagg

SEQ ID NO: 94395 - DNA, 1611 bp, Homo sapiens
tggttgctttgttcacaatcaatatggtcaatgcaactgtactttcttagttgctctgtcagcaacacaaaaagtcaattctaatgttatgctagtgaaaaaatggtgattattgaaaaactttggctttcaaaattatattctttgtaaactttgtttataaaagtattttcaaatatgctaaaccaaacaatttttaaacagttttgaaaggaccacatttttactaaaagacaattagatatttgcacttcttaatggttgttgaactgttaccctaaactgatgccttctaacaagttttagttggtgaagacaactgtatattattgccttttctattaaaaggaccattgaccatgtaatgtagagggtcttgatcattttgcagggcattaaaacccatactagcttaaggtaggccaatgcaaaagtaaaacaagtataacttcttcctttcagaaagattcataggcttgattttctgaaacggaaattatcttttatattcctgatcaaagtaaaagaaatgactacattttttttcaagtatagtttggttagaaaagtaataatcagtaagaaattttgtagtgttgtgtgatttttcagtattcatattgttaataaattagtgagaatttaaagataatatgggacgtatcttacattaagaaatgagaattaaatgctcaagaaatgtaagaattaaatattttattctgttacacctaatagaatttttagaaacagtaagtacttttttgataatggtataactggaaattcatcatacaggttcttaagcattggcccagttatattaataatgataccaacttatgtttgagtcatttatttcaactggtagctctaaactgctctgatctagttttgagtagtggaattgctaagaaatcactgtgattgtggaaagagaagtagagtttttttgtgttggtatggtcagtgtttggactgtggtaaatctgaaagacctattcaattaatttcattgtttagggtgtcgttttcattgtgttgtcttcttgaaagatttgaacacatttttattttttagtctacttatattttttattctaaaatcttaatacatgttgaatatgttggtaagatttcaccaccctcggtctttggggagaagactgaactgagaatgatcacagaatgatcacagaaagatggtgttacatccctgggggaggtatattcagggaagaacctacattaaatatttttgggatttgctgaaaagttatatgatagaatgaacattcatttttatcaaaggttttaccagattcttataaaatagtagatttccttaatgcattttaaataggatttacactaaaattctaggcatattgatatatatatatgtagatacagatataaatatagatatacacattacatatatatgcacatatgtacacatatatacacacatatatagatatatacacccacatatatatttgctgacattttaatgtgaagttttagtctgggatataaaatggaatgtatgacatcctcaaatgtctgaatactgttcactcctatgttttacatttaattttccaa

SEQ ID NO: 94396 - DNA, 1120 bp, Homo sapiens
ctaaatctcattacagttccaagcaataataagtaaacacttcattttaggacatctgcatgaaaatatactgtccataattacattaattaccaaatgccactgaagaaccctatgtattacaataaattgtgcaaatacatgactcagaaacaaaacagtgcataatgtattttctattcaaatgaatgaaaatatattaaaaagaaatacattgcacagtatcatctgattttagagctgaaaatgtaaaatattagtggcagggatagaattggatctcattcctagtccagagctctatttactgcttcacttaatatgttttaaaatgaatttgaaaattgtataattaaagaagcaactttcaaattaaaaaaaaatttttatagttagacattaatagtctcagactataatcaattctttgtgtaaactatacatgcatacatagattttaatattgtcatctagaacatttgtttttaattaatttaacaggtattaaaattactcctctgtgtacagtagatggaaagaagacaatcattggcaaagtctaagattttaacttcactaaacattcaaacttttcaatttgcttttctgagagggaatttcaggtagaggtatgtagtcagaaacatttttagtcactcttcagtgtggggaaaggaaagggtgactattgggtgttctttttatcactgcatgcatttatgcaggacttatcagaaacagtggcaaaacattcacctaacggtagttattaataccgatgtgcaaaaaagaaaataaaagattgaaaaatgtgataatgtattttaattaggtaagaccaaactataatagtgaagtaaagttaactctcaaagggctatttcaaatgaagaccagtttatgaaagattggcttcagaaatctaaatgacttgtcattacttacagcttcatatcaattaatccctcaattggggggtagggggaaatggctaggaaggttcaatctattttaattctgattatttttcctcaaagggcctcttgtgtgtagcttatatcatccaaacactgtgccagaatatcattttttgaaaattagaggatatgagattttttaa

SEQ ID NO: 94397 - DNA, 1052 bp, Homo sapiens
gataaaacagtacgcaagaaccatgggagaccctttgtttcacactaatggtatcaggtacatttattaccaagatgacttcagcagaaagtggctcagaagatggtgacataaattttcccagtagtttgggaaggttgagtggtgaaaataaagaattcctgcatgattaagaaacatttccaactttcaggttactgaaaggcagtggttttgagctgggatcctggaggagggtagaatagagtggtgttgtgacaatttaggcttagccacaaaacaccagcatattttaaagggaaggagtgaacacacttggcgataaaagctaaaaattgagagactacaaattaaggctctgcttgcccagccaatgtaattcattctctattttggcactggctacttcactatttcccctttgtgctgttcctatcttctgccccctgtttaactcatgaaaaaaaggtgatggcactttcagctgctataaacatgaagctgctgaacaaatacttcatataaggaccttcgctgtagctttcaatcttccaacagtgttgtgggttctgcccttctgtttctgagtctacttcaaggttattgacagtcaggcatcccccagatatcatcatggtgtgaaaaagaaaccttagagacagcaagcttgttgtagaagaacttaacctctgatactggtacacagtattcgatgacatgaactgttattcatcttgctcaaaggttaaactacctgcacaaaaatgtaagcaacatcacaagctccttttatatattcacattaattaggctcacttcaatgatagaaaactaagattttaattaataagaatttaaactacaaagatatactggatacactcccagcaaaggttaataatgaattcatgtgcagctttaaaatgtgacaattttctctaaaaatgctgttttcagtaagcaagttatctgtagagataatttctaaggagtacagtgacactaattttattttttattttattttttattatactttaagttctagggta

SEQ ID NO: 94398 - DNA, 1063 bp, Homo sapiens
aggatttgtgccagaatgtttgtagcaactatattcatggtggccagaaatgagtagtagcccaaatgtccattaataggagaatggccttgtgaattatgatgtagttacacaatggacatgtgaactatgatatagttatacaatggagtgctgttcagcaatggaaaaaacaaattactaatacatgcatgaacatggataaatctcaaaaaaaaaaaaaaaacactgagtgaaagaagccaggcccaaatgaatgcatactatatgactgcatgtttatgaaattctagaagaggcaaatctaatctagtgatgagaatcaaaatggcagaacattccctgggggaagaggactgactagggaaaagaaccaagactttccaaagtgataaaatctatatatacgtatctcattgccaccacagccaaaaaggaatcaatttctttgcatcagtattttcgcagtgcttccctatccctgtacaccaggtgattttggtggacttaagtaagggttgaaaaagaatctctcaactagagatttttagaatctctaagttttgtcaccaagcacgatttgtctttaattttaccaataggaactaaaatatgcctaagtgaagtagttccttacataaatttaaaatgaaacaacaaataatgccactattttatactcgaaagaatgtaaaagattgctattagtactaaaaaaagcatttctgtctctggataaacttgcaggcttgttggctggctgaagaatgcataagtactatgcttctaatttttgcctcggctgtcaagaagttcagagccaaattcagtgctcagtttagtgattaatatcccagctgcctgatatatcaatttttcttgattaggtagggtatacaaggtggggtattaaattatcctgtttcatactgtaaactacctcaaatcatttgggggaaatgatggtgtataaatcatataaaatgttggtcattttgacaaaattaaatattttttcactgcagataataaatgcattgtatgcttctccttgttgtcaaaa

SEQ ID NO: 94399 - DNA, 1041 bp, Homo sapiens
tcaattcctttctttaaatactatcagggacattataacaatgtatgatatgggaatattactgatgcccaaacatcttgccagccaaaaatggaatctctttttttagcctagctgtgtatatttgagtggaaaaggaaacaccctacaatagctttgctaggtgttaaatagtaatgtaattatatttcctataatacagcaatatagtcacctttataaaaactatatttataaaacattcttcctgatcttaccttgtgttttaaacacatagatgatttcgtattctaaagtagttagaagaattgtaatgttcccaacataaaaggtaaatgttgaggtgatgaatatcttaattatcctgatgtcatcattaaacactgtatacatgtatcaaaatatcacacataccctcccaaatatgtacaacgaataagttagtgagacacatacgctttttataaatatttttcttttgaaggattttactatggattgtggaatttgttatgcttatcaacttgacggtaccattcctgatcaagtgtgtgataattctcagtgtggacaacctttccatcaaatatgcttatatgaggtaaaaaataaaaatattgtcaagacttttttccgctaacacaacataggaagtattcctgtttgaaatacacagaatctaaaatctgttgagtcaatagtgatcctctcttttgccattaactccttttaccagtttattccagatgcttatgtgcttcatttcttcatcacagttactaatgagtggagaaatgttctgaagtatccaagggagaaaatctatccagaatatattcatggactagcttattgacacataacaaattaaattgatggtacattggaatctttctataaattccttgttaccacaatgtaagcttcataggtttacccgaggtggaggtggttgaaagtggcagtaatacagtgaaaatgaaattagtactatgtagtatctattacttttcaggctgcatttaagaatagaatatatcc

SEQ ID NO: 94400 - DNA, 1037 bp, Homo sapiens
attgtatttatccaaaaattatttttctcatatccttttattgtttttttttttaaagtcccaatctccccacaatggaagttgagaaaacatagcaaaatagagaagagagagcctgtaatttgcttttggtattttgatgtatgctataagtaaaatactatgttgatttttttttctattaaagaattggaattatgcataaattttatagctttctttttttattttaaaaaaatttcatgagacccatgtccctttttttaaaatacacattttctatttggctctggaagttcaatcttgatgttttaagtgagatcatgagaaaatattatagctaggttgtgttactctttccaggtgttatttctaaattatactttaatatttatcacaattccaaggttgaaaaatacactgtttatgagtttctttgtgttttagatgtagataattctagaagtttccccaggcatttatctgtggaaaagtttgcaatgccatgaaaagattgtttagtactttattttgttatttaacaaaatcagtttgtgactctctactagactggaaagtctttgaaggcaatttcttttaaattttatatccacatgctcagtgccttattcatataagcatggaataaatattatattaataatattaattcaaatttaagtttcaggtttaattgggtcatacaagttttgttttgtagtaactctaagaaaatgtagaattcgtagtaatgagtgttataaattcttaatttgtggaatatactgaaattctaagcaaaatacagataaattaaaacagccttttatcacaactcagatttgacaaatgttaatattttgtcacttttggttcagatacatctatatttctctttgtcttaaaaataaaatgttttaagaatagctaagacctgacccccttttctgtccctccttcccatctttcctttctttgcttctctccctttaagtagtaactgtttacccaaaattggtatataggccatccgtgca

SEQ ID NO: 94401 - DNA, 1043 bp, Homo sapiens
gagttttgtcatttttacatgtgaaacagccagagaaattaaatgacttgttcaggatcatacaacttagttagcagagctggaaccaaagaaagctgaggtctctgtctacatttactttgagataatcacgatttttaaatatggcatacaaattgtttttccagtgattacagcaatgatactctgaagcacatcatctgatatttttaattgtctgaaatagaacttcctcttttaatttcagcatgatatttttttctttttttttttttccagaagtagaccactggaatatttttatatgatttcttatctatttgcctttgtgttaattagttctacatagccagattccattagtcagagtgtatattgatagtaaatctttttagccaacttattattgtagctaaatgttaatttttttgaaagtgttgatttcaaatgtttgttaaatactgtagtgatttttttcttcccttttacttacccagcagagtactgaaaaataagaggctgaaaaaagtgaaagcctaaaacttcttttaataatttgtcaaatgaaagatttcctaaaactaattttctttcagtacatttagctttttaatgaaaagaaatgggtatttttaattacatgtgactttgaagaatcagaattggattatagagaaatcattaagtatgattctctaataaggaaattgattttaagaaattttatcttttgcctttgttaacttaaaaacttggtttgtcctcatgactgccagtttttatatgactagttgaagaaataattttgtatttagcaatctttcaaaggtttttcttgctaaaaactgttttattttttcttaataagccagaagatatttcattctttttatcttcttgctaaaattaatatctttaatatagaaaataattttttaaattgacagctatatgtattcatgtttgtgtatttcttaattcctttaactgatactgcctatttaaatagtgactgatgctatttgaaattaaatttaggacta

SEQ ID NO: 94402 - DNA, 1054 bp, Homo sapiens
aagctgggaaggaatttggcaaaaaaagaaaaaaaaaactgttttggaaaaacaaaagcatgtaactgaatcttatgttggtatgatttattagaatctttatttctcaatttagcttagctttcatatatacaccatagctgtctttgagatgtgataatttttttttttaggaaaaaaaagttagttctagattgtgaatttggacaaataagtagaataaacaagttcagcatattaatcatttacctagtaatcactggggaaacatgagaatttgaagaaaaccaggaagtcttttttttttttttttttttttaggaaaaaggtataggtatatataaaaccaccagcaactaattgtcaaacttttactttcaaaagtaatttacaacaacaaaaactccacatataggaatattaactgaaaaatattttaggaaacaaaaattttagggaaaaaaaaagaaattgggcctgcgattgtcagtcaactacactaatagttgaaacgttaactgtatgttaagagtatattatgcaaaatcttaatccaaactaagttttaagtggaatgctgaattttttttattaataacatacctcaaagtaggcttttttcataaatacacaaacctttatttctgttacttgattttttaaatatacagtaaataaatgcatttgttctatttattctggaatacatactttcccaattctaccacttcccctcacgatctccaagaaactcacaaagaaaacaaatacctattttgactagatgtcctttattaaaagtaaatatgtaaataataaataagtagaagtaaaccagataaattttttggtttttataggtatatttttatgcaatgcttacagtgcattcagtactgaattacctttgctttacaaaagtagcagcccagggcttcctcagctttggtcaatcaagatcagtactacttgaaaaacaaattacatatatgcatcagagggtgggcactctttctctgctgcaatttgtatgtatttacttggggatcagcct

SEQ ID NO: 94403 - DNA, 1070 bp, Homo sapiens
ttggactaaaatatgacataaaactgtctaggcttttggaaacgtggtgaataaattctttgaggctttccaaaatcaatgttttaaagcatgatatatgtatttttagatgtaactagcacttctttacattgagagcattcacagagttcatttcacaaagtattttctgatcacaataacagtttaacgaggcacatacctttgccttcaacttgagagtgattaaatgctctctaccagaagcatcttctgcttttaacttgatggtactgaagcaggtatccgcatacacaagtctggtgagcagaggagaataaaaaatgatcacaccggggagagctggagaggggaactggagatggttgaatttgaaatgaaaatatttgctatattcctattaatccattataaaaatcagagcaatttctgcatgccaaccctttctgctgctatagatttactgccgttcatataccagcctagcacttaatgcagtcatatatctctggattatttacaatgtgtgtcaaggctcatgctgtggtcagtgagcactatgtttcagttttccatcactggaacctttggcacacacagcatgttcctgtcagcctctacttatgtacacattaaacttcctgtcaaactctttgatccatttctgtagtttcatacagtatgagactttaatgctccctttgtttttctcctcaatgaacttctcctatattatcaataatgttaccgtacaaaaatctagctggtatttgttcatatactcaaattgatcctctaaggaaaatgctgtataagcacaggtacagcctggtctcctaacaataaattttctttctgcacgatatatagcttctgacacttaacctatgcatgtattcaagatgactaatattctaaacatatagcacaagcacaactgctttggctttaagttaccctaaatgcatgaattttctacaatggaaaccaatatcctttgaaatatataattctgtaaaaatacggtcccttgagtagcataagctactgccaaaaaggttcaaatttag

SEQ ID NO: 94404 - DNA, 1087 bp, Homo sapiens
agagaatagcattgtaaaaatgtcaaaaatatccatatgcccagttcactagtaaatatactgctaaatttgaacctttttggcagtagcttatgctactcaagggaccgtatttttacagaattatatatttcaaaggatattggtttccattgtagaaaattcatgcatttagggtaacttaaagccaaagcagttgtgcttgtgctatatgtttagaatattagtcatcttgaatacatgcataggttaagtgtcagaagctatatatcgtgcagaaagaaaatttattgttaggagaccaggctgtacctgtgcttatacagcattttccttagaggatcaatttgagtatatgaacaaataccagctagatttttgtacggtaacattattgataatataggagaagttcattgaggagaaaaacaaagggagcattaaagtctcatactgtatgaaactacagaaatggatcaaagagtttgacaggaagtttaatgtgtacataagtagaggctgacaggaacatgctgtgtgtgccaaaggttccagtgatggaaaactgaaacatagtgctcactgaccacagcatgagccttgacacacattgtaaataatccagagatatatgactgcattaagtgctaggctggtatatgaacggcagtaaatctatagcagcagaaagggttggcatgcagaaattgctctgatttttataatggattaataggaatatagcaaatattttcatttcaaattcaaccatctccagttcccctctccagctctccccggtgtgatcattttttattctcctctgctcaccagacttgtgtatgcggatacctgcttcagtaccatcaagttaaaagcagaagatgcttctggtagagagcatttaatcactctcaagttgaaggcaaaggtatgtgcctcgttaaactgttattgtgatcagaaaatactttgtgaaatgaactctgtgaatgctctcaatgtaaagaagtgctagttacatctaaaaatacatatatcatgctttaaaacattgattttggaaagcctcaaagaatttattcac

SEQ ID NO: 94405 - DNA, 1087 bp, Homo sapiens
ggatgatttttcttcatacataaatccatgtcattgaataactgcaaattatctagtagtaaaaaaaaaatcatgtttttctaggttggtaatatgcttaacagtatttaattaaaacagtttgctttcagctattgtttgaaacttacacatgaatcagtaaatgtgaaccagtctgacaacatcctctacattgtcatatatacatggaacatggtacactgacacatacataggaatataaagctttcatattccttattaaaaagtttattatgtgtttggcaagctaaaacttacatgaaaaggagcaatgtgagtttggaggaatttgaagcattttgggctacaaataatttaggagagttcttagaggagatgaatgttgggataagctttgaaggaatatacagagcctttaaagggaaggaatggtgaaggcaaggttgtagcaatagaaatgtgcaatttattttttgactttggagtagatcagtggctcacataaggggattaacatattagggctaaacagaggggtcttgactacgaggctaatgattctctatatgcaggtgatagggactcattgaatatttttgagcaagggattgatatgattaaaaatgtatttaggaagattagacacagaaggcagaatggattggtgtacagagacgaagtaaagacacgcattaggaagattgtttctagtaatccagatatgaagtagttaatgcttaaacttgagagtggcaataaaagtggaaacttggatgctttattcaaacatgaaggtcttcagtctgtcttttgaagcagtctgcctgttgatgttaatactacttaaatgcatctagatggctaaagaaaataaaagctaaataacttaaactcttggtcaatataagtgcagtattttatgagctatgtaaaacacatttcttctactttgttttacttgttgacattcagctattaacagggacaacaacaaaaacatccctgaagctttattattaacaaacattttaaatgtttaaaaaatttaacttataaagaaatatagcaaatgataaatacaaag

SEQ ID NO: 94406 - DNA, 1053 bp, Homo sapiens
atccattactgtctggtagagtgacaaaacctatcaactttatttttatggcttaactcttaaattaggtctggtacacacatacactgataaaattgggtttcaggacctgctgatctaaagctgagacctgaactgtgctgtccacatactagaattgctactgtttaaggccccgcctgaggagctggctaaattcttaatttaaattatcttttgaaatgacacacacaatgatttgcatgacagattgatttaaatgtatttacagaatcttaatgatttctagactctgtcaataagtctgtattttccttacactctaaataataatcttgtagatttgtcagtataatcataaaatctgatacagaaaaatccttgttagataatgctggccttgctgtgtttttaaattacatatttggtatttctaatcaactctataggattagacattatacaaattctaagttggaaaagaaaaagaaatatttaaaataagatgaaagcttccctttctttccttagaaagaaatatggaaataatattgagaattagtagttgaccttaagtttgattgctattgttataatttctgttcttatttcaatttctataaaaacacagtcaaaacagcaacttccccaaaggttaacgtgaagatggtatgacaggtctgggttattttgggtgtaacactggctcacaaaggtaagtgatacaaaatgatgtcttggtgggtttctgttaacttctgcccatgttgttttacagaatggcctattaaaaaaataagaattaaacagtcctttgtgtttaacaagattttctgtttggtattaagagtatcctagagttgaaagtaccaaatacttttgctttgagtagcttatcatgcataccattttgcctaggacagccctaatttatgctttttgttttggcccctgtcagtctcaaatatgtcccagtttggaagaaatacatatcactttatgatatggtttggttctgtatcccctgtgtccccacccaaatctcatcttgag

SEQ ID NO: 94407 - DNA, 1048 bp, Homo sapiens
tttctttagaggtactttttaaaaaatgtatatatcaaacatcatattcatgggaatagagccatagtgaagccttgaggatgaatttaataaaaattttttttttatctccgataggcataatagtccaggagaatattaaaatctcaagttattttcatggcataaaaattgacattttgcatgaccttcagtgcagtcctttaactttttcttgtctctttttcatgagcaggggaatgagtcagccagatttccgtaaaaaaacaggcacttttattaggcactaagaagataatgaaattatgttttgcaatcaggtattaacagttcattgtcttgcgttccacagctaattcaggttttcttcttttaaacaggaagttgccttaaagaatagacaagagctgtatgcactacctcctcctccccagttctactcaagccttattgaagagataggaactcttggttgggataagtatgtctgttttaaaatatgttttaaatgcctttgttttatatattttaacttaatgtatttctagttttagcagtttatacctgattttagtcaaagtgtttaattgtaactagagtatttgatccttattgttgctgtgaattaaagagagggatatcatcataaaaaattgccttacaaagtaaaatgctaaatataatttggaaaaaatgacatttttatgtacacagtaagatgttaccgtaatagatactttcactgaacatacaactgtattctaaattttccatgtttgaagagtaatgctgagacacatgaaagagactggaaaaattgcagtatttctggaataattgttatttttggttaatatacaatttggcatgtctaaatttacatatatataacattataagtgcttttgtaatttgagtggtaaattttagcaactagggtttgtaagaatcatccagctttctttgaaaaaaatgattttttttttaaaactgatgcataaagaaacttaagttcagtaaacgtgtatgcaagttgttaaaacttaat

SEQ ID NO: 94408 - DNA, 1019 bp, Homo sapiens
ttcattttattccgtaactgtaatcagccatttctccaaagaatcatgatttctttgtgggaaatagtatttggatgcctcaatctggaaacttgagtgtgcattgctgttacttgtaggttttttcagtggacaaaactgagaaaaaatactttttggaaagaatataattatgagtttgtattgatatttacaattcaaattggcattatagaatttttacttgtttgcttgtatcacttttactctgaaaatgctgttttctaatgttaacatcattgtagtatggttttttgttatgttctacttgttatatttcacttatgcttttcctgtctatgtgttgttagtttatataaaaattacaatactaatattgctaacaatggaaagttttgatatttctttgtgatccttgttgagaccattttattcctagcagcagctactacatattgataacttagttgctaggttgttttctggagtccttttttaatgctaataagaaccttctaaggtaggactttgattaaatgtgtgagattagaataatagtttaaaattaatttctaaagtttgaattttgatttatgagttcataaatcctaattaataagggttatcaaacttgattacaaattacatcaaaggccttaatgtaataaccttaaaaaggtaaagtgaacaagtgaagcatatttggtttacatctccttgacattggagaaaagtttgcaacatttattttatctttttattataattttaataaacaatacaaatacaaggagagactaagggaaccagagtaaaagtatagatatcatgtcccattaaactcttcttatcaaaaataacttcattaaattgtaagtcacagctctcttggccatgtaattttggagaaacacttattagtttaaaactaaaataaaattttgagatctctgatttacaatatctatttagtatatttattcaatttctgaataaaaatgaaatcctgtattttagct

SEQ ID NO: 94409 - DNA, 1013 bp, Homo sapiens
ttaacatctaagaagagattaggtagtcctacttaaagatataatatgatgtataaataattttgtgtatagctacagatatctgaaaaacttattaggcttcattttatgtatactgttacatatgtactgtttaatcagtgttgcataaaatacttgattattcagtttatcctgtagacattttattattttcttaaaacccaagttcattttattacccaagttttcaacataaacaaaagaagagggaagattatagtgaatactgctgggcctgaccaaattttaacattttgccaatcttatttcctcttctacttttttagaagaaagacaccatagtattttaaaggaaattctggatattgtatgtatccctctgtaaatatgtcagtgtgtatctctttaacagctaagtgctttttatctgtttttaaatatattattataacctcaataaagttaataatttcttatagctgctttgtttgtattagtatgcaaacaaggtcctcacattatatttagttgataagtctcttaagccttatataagacttataaggtacttatgtataacatcatctctctcctctttacctcaccctttttattcatgccatgtatttgttgaataaaacaaattaggtgtcctataaaatcttctacattctggatttggcttgtaagatattcatggtttatcttttaacatattctactttctttgtaatctggcagttagatctagaggcttcagcagatttggattcatttgttcttatgagattacttggtgctctgtatttattatattacatgaggatccacgtggtatctgatggttccttggttcctgttttagtaaatttaagattgatcaataggtttagatccattcaatataaagtttcccatcagactgtcacctaatgattttagcctctaataacaatcattgcctgtatctaatgtttcattaggatttacaaatggtaattttaaaaatt

SEQ ID NO: 94410 - DNA, 1050 bp, Homo sapiens
tagatgctgacatgtagccttataaccaccatttttagaagctatatgatgtcaatttactatgcaccttaataggttgtaaaaattttctcgtggaaggtcctttttggtttttaattttgttgctgatttctaatttttcttgtattgtaattagacagtattgtttataaaaaagtctccatggaacttactggtactttttcctgtgacctaatatgtaatcagttttaggtgttgtctctattatcagattttctctttccttttgagtgagctttggtagtttgtgtctttcaaggaatttgttagtttcatctaggtttctgattttattggcttaaagttatttacaataatcccttattatccttttaatgtctttaggatctgtaatgatgctctctatgttggttatcttttgctgctatttacttcaaaccttagtggcttaaaacaaaaacaattattgtctcactgtttctgtggatttgaaatttgcgaacaacttggatggtagttcttgatcaaaatctctcatgatcttgcaatcaagatatttgccaagactttgatggtctaaaacagggtgtccaatcttttggcttccctgggtcacattggaagaagaagaattgtcttgggcacacataaaatacactaatgatagctgataagctaaaaaaaaatcacaaaaaatcccataatgttttaagaaagtttattaatttgtgttgggctgcattcagagctgtcctgggctgccagttggtcaagctagaggtggaggatttgcttccaagattgctcattcacatagctattggccatgaggcctcagtttgttactgctcttaacaggaggccttagttcctcaccacatggatctttatagtgttgcttgactgttatcacacatggcagctagcttctcctgagtgtatgatacaacagagagatcaataaagatgcacattctctttaatctcttagtctctgaagtcacacacatttacttctgctttattgtgttagatgcaagtttctta

SEQ ID NO: 94411 - DNA, 1058 bp, Homo sapiens
gagaaaaacaaattcttaggtccttcaagttaacctctattttcctttcaataaaactttaaaaaaatgtttagtgcattcagtagtttgctttttctctttcttttgcttcctctttccagaaccttagttaatatctgtgtcctatttgggagaaaatcacagccaggactagctgtggaacagagcaggactggagttggtgacatttaagcagccttgactgggggccagggcagcagaaccaggcccagttgcttctcttgcatacgtctttttgaggctctgacatcacactgctgctgggttgctaatgcaccattgtaaatcgtacagtgaattgctgtattacctgagaaagaaaatgctggcattaaaaacaatcttttttgcattatcatagcaatcatatcttctatacaaaaaaggattcaagcgaattcttgattcataatttttattataccctgtggaaggcccatctggaataagatatgcacgtactatttctcttcttccccttgaaggtggcaaacactaggtggttggttctcatttgttagattacaccaaattatgtctattttttgcttaatcaccaaagcaactttctatccagctcactacatgtttagtaaagcaaaacttatttcacaattactatttggcaggtatagcccatcaccttaccatcccactactcagttctttttgacccattgacattttaaaaagtaaggtttatcttcagagagcagaatagaaatgagagtgggtagcgagtcttagctaactcaagaactcaggacttagtggagttagaagctttcagtgaagattgcacatgtgtattttcagttttgtggacatgagaaacacaaagctggtggtttcataaagagcttctacccagacacttaactcaccagttagcttgagatcgcattactcagtaaccccaagcacattctcataaatggattttatgttgactccttgtccatatcagttcagagatcataatcatggaagaaagtgaattgccttccacaatgact

SEQ ID NO: 94412 - DNA, 1031 bp, Homo sapiens
cctgatcttagagtaagaaattgtttttatgtttactttttggttcccaaggttaatcaatattcattatggccttactgtttttctttaaactgaggaggttaaataagtccttctatagagaaaagaaaatttaatactatatatatgaatttgggatgcaaaatatgggatggaagaattttgcaatatacacacatatatcgttagaaacaccatctccaaatgtaaaaatacttattatatatatacatattaagaaatttgaatctacatctttctcattggtagctagcatcctttcttactcttgtgtgtgcatttgaatgacagacaaatttaatgtatgatatttaaacctccaatgctggtttctggaaattgctgtgtagaaatagtcaatgcctaagtctagaccttgtctactagttaagtgtaaattgtaggctccagtgaggcagatatctgtgatcagtttaagctagaaatcaatctctagactgcattattacatccatgaagcatttcttctttcctggttttcctgaagtttcaaggtagttgcagtcctggtagtctgggtatcatcagtaagtactctgtagtctcaccatttggtaatcagtatgtcaataatgctgggaaaactgcttaagctcgcaagatttatactcccaaccatgtaatagataagagttgcataggtcgttccacatggaacttcattccaaactcaatctgttcttgtgtcagctaggccccaaagtaacaatttctggtaggggtttttggatctattacttggcaaacatttattgaaactcaagcaaaaacaaaatgtaatgaaacccattagtctacagaaaaatataaggagaattgggatatttttctgcctctgaaatcaagatgaagaagggtgttgaggaagcctgatagtatcaataacaaaggaatggtcccccaaatcatgagaggccactgaatttgtcaaagaggaggtcattgataaccttaccatgggcattgac

SEQ ID NO: 94413 - DNA, 1112 bp, Homo sapiens
aatcatatatatatatatatatatatatacacactgattccttgtccatgctctgcaggcagatcagtatattctcccccagatttaaaactaagagtattggaagtaattaataatctttgaatacactgtaaatctttgtcatttattgatgaatattcaatcatatatttcaaaaaactggaatgtacaagtagtacaaagttttgctcttataattgcagtacagagcaatgatttagtctgttattaaaataaaaggcacaactttaacatccttagttttaatagtgtgatctgaagtttattttgatggcatttctcttgaagttccatcttctagaattgtctagctgagcttacaacttactactcagttaaaaagagtaattaaatctgttaatgcacaattgtggaagtatggatggctttttgaaatgcgatatatttaacctttaccttatttattaaatcatgaaaacagctcacaggattagaatacatcttaaagttttctagccccaccaccctcatgatacttatctctaaattttttgccaaactattcttcataggtgtacctcagttgtaatgaaccacctcaggattggcctcctaccagatgtaccaaacaatgccgttccctgcccccaatcccagagtgctgcttacatacttgattaagagaaagttttggcatcttctgaacctagaaagaggtctcttattgattgttaattgaaggtgtgtccgttaattttaagctttaaacacctcatgtgcccttagcaattagacttttgtttctaacttcctcaaaatctacattaaaagacattcaataattggaatgtgaaatgatgtaagaggtagtggtgtgctgaaataggctcctacctgcttgtatggctcactagttgagtgacattgagttaagtgacatccctttggtagcttgaaatcagccatggtgggatcatttacaccacagaaaatggcgagtgatttaaatccccctcactccagccaactgttaaacatttaccagtatactactgcataaggaggtgtacataattgaatattaaaggagataacaggtaaaatgcatg

SEQ ID NO: 94414 - DNA, 1028 bp, Homo sapiens
tagaccataacagctgttacagtctattatgttaactctcatagaattatattatggatttttaaaaacaccataaagaacctaaggaatgaaatgatagcaatgaaataaaatataaacttccacttattatagctctctcaaaagaggagaattttgagttcaggtgaaactcatgactgatactttatcagtaatttctgacttaaaatttattcacaaaaatataggttaaggaatcaaaggatgaggaataactgggcagtatgtattaggccaagtttttaagcatttccaaggataaaacttactcttggtggcataaataaagacttgtatgtaacttttatgttttttagacctcataaaattgcagtggagcataaaaatgaaaactgtatttgtgtcttttatgtattatttaagtatagtagaattaaaatactgtagaatattctctggtttatacctaatgataacatgttggggcatattcgtgtaggctatatataatgataacatatgcatttgtgtgttttttgtgggaattacagttgctttcttgaccttttaagggtcctcatgggttaaggattcataccatacattttatggctcagcttctgaatttattctaaagttaaatacaagatcaatgcaactaaatgaaacttctatccgtaatgactactaaatagcaaggctcaatcaagcaagttagaatctgtcatttagtgatattggaccacatattcttagttacaaaacatagtataggagaaacctttgatcctatttgttaggtattattttgtaaaatatttgacagcttaaagtaagtgagtgcttgagtttcagagaactgttgtagaaaagttaatcttcacatctcttaaaatttattttcatttcacatttgagctgtagacccctgacaagtctcagcaatactgtggacaaagttacttaaaccaggggctttcaaatttctttaaatgcaactcctgataagaaatatttaatgttag

SEQ ID NO: 94415 - DNA, 1056 bp, Homo sapiens
agtattcctcagtgatctctgtaatgttcatgactctgaataggctctgtgggtagaatatcttcataccacagctagtttatatttgtcaattagtcataatgtcaaatacatgtcatgacaaatcttttgagtttcaaaaaacatccgctctgctgttgtttcacccatttcttctcctgcatttcttcccttagagttcagctctccatatatccagcctctcaagctcctaactccctccctgtccttcattcttcttcattcttcctctcttcattcttcctgactagtcaatgccacatcttttatggtctatttcctaaatatatcttgaacttgccccttgtttcctttccgactgccatttcctacgttcagaccctcatgatttcctccctggattcctctaagcctctggagtgatcctcctgcctccagcctactgctatcacttttgtcttccccacagctattggggcagttctaaaaatgagatcatgatcatggcgccctctgctgaggattccctttccctttgttttctctgaccagctttgctcatccttcacaacgtggaaacagcgcctcctcccataggccttccctgcctccctgcgtccccatagcacgctgagtgggcctagtagtaccttgagcatagctctattagggcactgtcaaactattttactgcgtgtttgtatctcttcctcattaaattttaacttcttaaaggtaatgaccttatctctttggcaggaaatattaagtacccaataaatatttgtggaatgattagatggcagaaccactgtctgaaaacattaacctccaattcaggctggtatttttcaattagatttgtcataagttgaacttgatcttttcaatggttactagagaaaatagaaatagggaatggagaaataggagacacaacttagaaagatgaaaatttcccttctaattacagagttgatcaggaattttgtggttctagaatccaaactgtaaaactactgcttccatcgcaaagattcattgctactgtaa

SEQ ID NO: 94416 - DNA, 1035 bp, Homo sapiens
cagagaagagaagacagttgatccaggagtccaaattcttgggtggtgacatggaacacacccatttggtgaaaggcttggattttgctctgcttcaaaaggtacgagctgagattgccagcaaagagaaagaggaagaggaactgatggaaaagccccagaaagaaaccaagaaagatgaggatcctgaaaataaaattgaatttaaaacacgtctgggccgcaatgtttaccgagtgctttttaagaacaagcatataagcggaatgagttgttcctgccgggccgcatggcctatgtggtaggcctggatgatgagtaagctgacacagatatccccaccactcttatccgcagcaaggttgactgccccaccatggaggcccagaccatactgaccacaaatgatattgtcattagcaagcttacccagttgctttcatacctgaggcagggaacccgtaacaagaagcttaagaagaaggataaagggaagctggaagagaagaaacctgctgaggctgacaggagtattttcgaagacattggggattatacaccctccacaatcaagacaccttgggacaaggagcgggagagatatcgggaacgggagcgtgatcaggagacagagaccgtgaccgagagcgagagcgagaacgagatcaggagcgagaacgagatcgggaacgagaacgagatcgggaacgagagtgagagcaggaccgagagagagaagaggaaaagaagagacacagctactttgagaagccaaaagtacatgatgagtccgtggacgttgacaaaggacctgggtcggccaaggagttgatcaagtccatcaatgaaaagtttgctgggtctgctggctgggaaggcacagaatcgctgaaaattgcagaagacaaaaagcagctgagagatttctttggcatgtccaacagttatgcagagtgctatccagccacgatggatgacatggctgtggatagtgatgaggaggtggattatagcaaaatggaccagggtaacaag

SEQ ID NO: 94417 - DNA, 1050 bp, Homo sapiens
agaaatagaattagataacagggtttcaaggtgatttcttctctaaaaaggaaaaataagatgtgctccagttcatgtatcttcaatgctttcaattatcttaatgtgtattaatatatattatatgtgataagtataggtttataagagaaaacctcatcaattagctattcttgagtacctttgcatttggttactaaggaataacctgttcatgatcaacagtggtaaaacagagcacagtaaaacactgctctatctgaactaaagtagatcttcaaaacctctttgatgtgcgtgcttctttaggtcttaaggacacattaaagtgtatgttgaactttctaatattcactttatttaacgagaaatgttttccttcctgttttgccactgtctttcccttccatatccactcccccctccttttattttattttattttttgttctgagaaatgattatgtgtgttcttttcctatttaaaatttaaagagttacatttgggagaggaacaatgtagggaaaggaaacccctggagtgtgtctgatgtgatcgttctcctctgtgccaccatttttcctcctgctgtgggagcgctaaatgataatgcctgataccttaccgaataaagcctgacacggtttccagctgtgagcatgtgatcagtttttatgtttgatttttgcacacaagtatactactgcaagcatgtccacaaactacttcacaaatgctttaaggggggaattgctcttgagtgaataaaacattaaacaaacactaagtaattgcatgaaaaaataaaaaaccttcatttattttagaaagccatgtttctgttcaaacccagacttttaaaataaatttaatttatattcaatggtcagatataaccacataaccaatcctctatgaatttacttgcaagcgaattttaatctgagatgagttgtccaaacagaaaagagactgttacttcctgtactttgctgcaatgattaaatatgattgtaattatacaatatgttgattcatttgtgagaaac

SEQ ID NO: 94418 - DNA, 1032 bp, Homo sapiens
cctatactaatttaggaagaaagtgaagaaatgtgacttttatttaaaaaaatggtctttttggcaaagcattaggtcttttcattcactaagccttaagtgtgtaagggtgcaagtgagtgtgtttgagggacgaaaacatagtcacactcatacacactgtgaagcaggtttgactgttctaggtgaggaagaatattcagttcagaaaaatttaaactcatattagattgcatatatatatatatatatatatatatatgtatgtatgtgttttttttaatttatctcaaggaagaactccaagtaattgttgtcttggggagttcttaatttatgcactagaccatcatgctgattttaggtaggtatttattctgctattcaatcaaaaagcatagtttccataacaactgccacatcagatgaaacgtacagcttggcatttgaaatacaggacttcttaggagatatgcttcctgacatattgtgttgaacttgtgttcctttcattctcttttaagctagcaagatctgtgtttctataaaggaccatcgcagttttgcataattattacaatccatctgcacatttccaggatttatattaaagtaattaaagccattttgtattagtgggtgctgtgtggaagcggcttggatgcaggattctaaaagttcccacttgcctgcttgctgtgctgtaatttggagaacagaatgttccgtaaatgaggtttgggaatactacattttttttctttcttttctttgcaaagttactttttttcctccagtggaaaatggaataaaaggttcacctagggactggaattaatgtagtccttctgcctagggttaaaaaagagcaaaatcacagctagcaacattgtgcaaaccctaatatatttagctttttctatgaagaaataataagcctgtgtttctaaggcaactttcttccaaggagcagcaagcaatttaatttatattctcattttccccagctgtatttgttcaagataaatgagg

SEQ ID NO: 94419 - DNA, 1040 bp, Homo sapiens
ctccctcttggccttggacgccatctggatagaagaagtttggtttaaacttcttagcactctaagatggtttcttaaactgctccatagaagtccctcaaggttgtaaaatctatcactcgaagccccttaccagaaaatctgtacccttttagactgcagcagatgactgataacataaatagcatacttacttttttttctcagaaatacctggtaggcccaatggatctttttacacattctgaaagccattaactttttctaattagaactagacaggattcttcaactgccccaccctcatgtcctttctaagggcccaccgtctgccagagctggttggaatacaggtggactcctgaacctggggcagcccggggactaagacaagccctggctaaatgaatcagagtttttccccatcaagaaaattagaagcaagaacagagggaatttgcagtctgtgatggacccttgagatgaaaggtcaaggtcttatagaattagagctgggtctgctttcctgatgtcacctgcacactgaagtcatgaaaggctggatagtgaagacctgagaaagcagccaagtggaggggatggatcaaatgtgcagagagaaggaaagatgacaccgtacaggccctaagagttggaggtgatggcctcagtgactgcatgcaggtttccaagtccaggcccaactctactgtgtttcctgtccttggatgcatggatgtccgtgacatcatcattgttgtgtccatctaactctcctttcactagcttgagaggttttctattcctagcaatagaaaatgctctgaacttgtccctgtcaggctttacgtgaccatggcatttattttattttattttatttttttgagatggagtctcactctgttgcccaggctagagtgcagtggtgtgatctcagctcactgcaacctccagcctcctgggttcaaatgattctcccgcctcagcctccttaatagctgggattacaggcgcctgccatcatgccccgctagttt

SEQ ID NO: 94420 - DNA, 1056 bp, Homo sapiens
tattttaggtttaaaatgaagagtctccagctcaggtttattggccattgtgacagtacaaacaggtctcttccccatcacatgcaacagtaaactgcattgctgggaggtggcaaactcatgcaaaaaggaaagcacttgacaagggctgagtgaataatgctgcgagcttaaaaagaccctgttaaatgcctttgtatgttatttgtatacaatttctgattcttaaaaactgaaaattatatttttgattctttttcttctcgcatttttatagtgatcaaataagtttcctttaacattataatattaaaaataattcaagagaatgtattttttcatattatatattaaaatgaagttaggtcatcaagggaacactaacgagggacgctattgtggtacagtgcattgctatatatgtttagaaacattaggggtcaattgaaatcctgatatgatttaatcagcatttaacatgtgatttattctgaaaatccagtagagaaactatgaaattcctctacatagtagccattcatagactgaaatgccttttagtagaaagaatggaaaacgtgttcccaaatgggaaacataatcccaaaagcgatccacaacccatattcaacatctcaacaatatgagatgttgatatgaaatgtaaaatgaaatgatctgatatggcatataagttgatttgtttagcattgtctctttcaaaagtctcttcttttttgtattatactttaagttcaaatgtctcttctttagaaattattgaatcagactaagtgatgtagctcatttgtgcaataggtcagggactgggttgcaggaagcacacacatgtagtctacaattcactacccaaaatccctgagacggagacgtgtttagaaattttcttttagaaaggtactatggtgcatataccgcagattatgcaatatctccagctgggtctggggcagcaccctataatcaaacacattcatgtttctgcatcgcagtgtatgaatattcacattgagtgggataaataaagattctaaa

SEQ ID NO: 94421 - DNA, 1030 bp, Homo sapiens
ataaccagtggggtgggtttagaaacctcatgactgattctctgcttcttgttttcttttaccttatttttcttttcttattgagctcttagaaaagagacataattacatttcatatatgagcactttcttttccagtatatatccttggaaaggaagggccagatatgtgtattttaaaaagaacctcaaattaatctacatcacttggaataatcacgcctgctgctatcatgtctttgggtccacttctcaataaaacacttatttttatattttcagatctattgatatttgcttagaatgcaatttcctcttgtatgaactgtggaataggatctatttcccttgtctgctcaatagttctatgctgtctcattttgccttctgcaccttaaatatttcttatgttgtaggtcaaattataggtgaactgtcatatccccttatgtctatgaaagcaatattcttcggagaaaaatataaagtatacatttgtagcttgtctgtatcttgagagtcttctttccattctatattttggaagctcaataaagctggagtttctaacctttgggtcacaacatatacccctgattaagtttctctggcttcaaaagtagctacaagaatgagaattgttataaaggggggaaagctcttcaataattaggattcatctacaactagagcattttattaattacacattgtaatcacatggatagtcacaaaaccaatcgtgcaagtctgtatttagagatttgtagacagaagacttaacgtaaacatagaaatgttaaacctactcaactgtaacctgcaaagaagataacaagaaggattctgttctctgtatgatttgtgaacaatgctaagtaaatattcatcattaatatataataactgttgcttttggcagttcacttttcatttaatttgataatgtgtccagtaaatgaagtggtacaggctacagtgttttaccaacacaattgcatattttcaatcattgttaaatgaaggcagc

SEQ ID NO: 94422 - DNA, 1067 bp, Homo sapiens
aagtggtgctggactcagaatcagcttgatattattaaattatttttgcttcagatctattcttttacaagatttatttttgacatttgaaattagatttgaaaatgtatttatgattggtatttaggcctaatacttatgtttatttatttcagggttcatcgctaagatttatattctaactttccaaaatttaaatttgcaaattaaattttaatttgagtattagtagtcttttctttccaatctattttcctttcacctcagattgttctttctttatgacatcttgaggatgcccaagagttttctaaagttgttttcctgattcctataaaaccaagaaatatcgaaaacttctaaatggtactctttgcttatagccatatgtaaccacaggtctcttgtttatttacattcactcaaataacaactttttccaattcattgttgttaatttgtcctccttgcaccttttcccacatactattgggtaagttgatgtgttcaccttcctttctaatttccagggaccagggatcatttacatactgtggtcttgcattactgcgatgaaatcttccaccactcccaccacccactacaagagatggaattaattgaaactacagccttcaagagacatttggagcaatactcttccagttctttcttccacattttatttgtgggtacagcgtctcccaggatgtagtgtgctgtaattattcttccacccttttattttctgggagtttctctatctgaatagcacagaaatattagtggataggaagggaatataatattctatccatctgaaaattaacacccatgttgaacagaatcccttttcagtttcctgtttactacagggtccaaatctctgagctgagctgtgcagcagataataggagaagaaaaaaagatacctgctcctctttcaaggacgtggacttttctgttttgtgaagtgatacttggataggctactggatattttctcattcttgactcatcaaccttataattggtctaagtttttcccaaatttgtagctctggatt

SEQ ID NO: 94423 - DNA, 1058 bp, Homo sapiens
atattctttccactagaattatctgctttcttgctcaaaaagagtcaactaactatctgaaaactaatgataatttgcaagttacaagaaagccattttctacctttgttatacttgtaataaatcctaggtccaatgaatatgtttttaaatatgtttcaaataggtattactaaagtaaaccataagagagacaaagtagaattatttccctcaagtttttgggaaagtaatattctgttcagagaatcaaatggcattatccaaatgaaagtattatttatccctcaaaggaatttctacctattactcacaatttagttaggtagattttcttctcatgtttgagtttcttttccaaaatcatttatcttttattcagttgaaaaatacatatatattcttaagcggtattattgagaagttttccactaatgggggagtaaagaataaaacaaaaaaattaatacatgctagaattgctcaaacaacttcaagtacccatcttataaacccataatacatttataggtttttgaaattgagaaagaaatctccatttgctctagtcaaataatttttagaggtgctagaaatcatatatacatatatgtatgtatatatgtaccagatttaataacttggcatgcattacaagaaataacatttttctcacattcttactttaaggtaaagatttttaaaaaaatactttagtgaattgagatagtcactctagaaattaatgctaaaatgtttagtgatgcacttgtactaatttaaaaacataacttgttaaccattatatagtatttgtttccaaacatttaaaaaactctaataaagattctaacacaattgtaatcagctacaatcaatatgcaggagctggttttcattttccactttgcactgagaggcagttcttaaagtgctgaagacctagctgtacttgaaaatggctgagatttagttgtgcttagatctcttatattcctcctcaactttcaagacatgctttcatttgataaggatgctttggaatctgaattttaaca

SEQ ID NO: 94424 - DNA, 1094 bp, Homo sapiens
gttgacttcacttggagcctgctctcataagcagaaatagggacactggaaagatttgttttggaaaaaaaatatgatgatataggttgtacatggtttaatttaggtggaatcattattgaaagtattcttggttctaagcatcaaaataaggctgtcaggaaggagagagtcacggccatattggacaaagggatagtaaaattaacagggatctaaggctgccaggaacgggccaaatatggaattaaaatgaatccagtcatggcagtagaaatgtgttaaatgcctggcaggggagatgcttggagtctcaggcaatcattgtggaggagtcggaggccatagacacaggaaatatggtctagtctctcagggggaaggaattagtaagaactggctcagagacaagggacccaggtacctcctgaaaaactgatgcactattcagaagccattcatacaagttgtccagacatataggtgacatgatttaggggagggcttaggtctgccaatccacaatttccatgggctcagagtagacatattggaggtagaactaatgttgacctcatggtctagaatggatgtgtcaatgtagcaatatacattagccaccttggaaacacatgacactgtctataaggtgagggtgttcctatcatattcacaattgaaagggaatagacaaggctcagactattatttaatatactgattttcaaaggatggttaatcaaaattttcttgcaggcaggtagaaatgtagttctgtccctcaaaaaagtgaatgagattctgtgttccatagaattttgagggaaaggaggaatgaaattttagatatatgataagtatagtgagcaaattgttataattagtctcactcaatttttagcagagaaagaaaaagagatgggttcatgacagggcaggcttactggttttaaataatctagtggcccgtcttgtttttagatggaagagaaggagccagcaaaactactgcagaggagggtggagggcctgtcagatggtatgaagtcctataggagacagagacaaaaggatgagcttgggtgaagagatga

SEQ ID NO: 94425 - DNA, 1076 bp, Homo sapiens
tttttttactccttaaagcctggtaacttttggttttatttgaggactgagaaagctactcacatttgaaattggaggaaggaaataatttcctttgaaacaccacaaaatcactgcatgttactaatactataaggcttctttcccattcagtttatctggagaaaaactgatttgcatatgtttgcatctatttgcatgttcaattcaagctactcccaactctaagtatataagatgaaacaaattaactccttgttttaacctgctgtgattcttgtctaatgctgtgtggtgggtttggaaattgtaagtgccttggaaattggtgtagaattcaagatgtgtggaggtgggcattcaggatatcatgttggccttaggggctcaggggctgagagctgggaagccacaagaggcctgggagagtgtcaaaatgggcaaatgtgtccccgagcgtgagcttacagagcaccccctaattgagcaagggaaatcacagaggagggttttgagaaactgccatctgcaatcagggacttagagctactagaggcgaagcttatccttggtcctctgcccttgacattactgccctcctttcaaggatcctctagcatgtccttaattttttacaaatctatattgtaaaaggatggcttatcttcatattacatgttcactagacagattatggaaaagaaaatcttccctgaattttcttcccctaatatgtgtgtgtatatatatttatgtatgtgtgtgtgtgtatatatatatatattttttttaatatatatgtatatatgtatatatgtgtgtgtgtatatgtatttatttatatatatatatatatatagtagcatatccatcaaaccataggaagtaaaatgttagaggaaattttaggttctttggaaaaccagtaaatatattttctccctgggagtaggtggtctttgaagccactacataaagacagttacttctttactttcttattgggccagactttaagcctgcttttatcagggcagtagccacttgccacatgtgcccattgtacaagtaaaatg

SEQ ID NO: 94426 - DNA, 1010 bp, Homo sapiens
tgtgtgtgtgtgtgtgtgtgtgtgtgtgtgtgtgtgtgtgtgtgtatgtgtctacaggcatgtgttctaaccctccagtcccaggtagaaattggtggggtcagttctgggatggtgatagaatctggcagcataaagtggtgtgggtgggtgtcgcttcagctagaaccaaaatgctcagatatccttgcaggtacaggtgtgctgggatggactgcaggactataatgtggagatggcacctgccaacaaattccagtgaccaaacaaagggaatgactgctctttggagactgtaattgtggtctcacagcagatctcacattgttctatgctccgtggtaaagggacaatttatgtgttgtttcaagaaattattattcacatttcttcaaaagaactctgctttgtagtattcctggggacattcctatttgactgcaacagtgactgccttaaagtggtgagaaaaagtgatcttcacacatagaagttaggaaagcaaaggtgattggggactgtggtataaatgtgttattaaaattcatctcttatatggtgagctatatctaatttcagaaatagattttatcaaccagaatcagcaatatctttcagtctgcagttctctgttacacagacacattctctattaaatatatttttctcttaaaactgggaatattatctgatgcctgtgtatgagtgacatactccaagtcccatctgctgatctacctttcaaatattccgatgtcctccttgtttcccattttttactgttcaggtcctccacagaacattactgtcccagcagaccttttatccaaggactgttgatcacaacccaagagctgtcatcctatttgcattctgtggaagcatcattattcacaacacttgatgtccataaaaacacattaaaactatttccttgagcaaaaataatcagctctctgctgtacatatcatttgtgtactcaaattgtaaaatgtaaattgatatataa

SEQ ID NO: 94427 - DNA, 1074 bp, Homo sapiens
tctcctaatctcaaaatgggcactattcacagttagcctgggagaggctggtggaagaaagcacactttgcagacaaggccactaagatgaatccaacaaaaataacaactcaaacaacaacaaaataaccagcaccccagcctgccagcctgctaccatgccacccagccttttaaaaatcaagatatgaaatgcagagctctaaggaatctgttttgttccctgtgatcacagtggtctagattccaatcggagaggtacctttccatgcctctcagccaaacttacaagacaaaaggctataaaaatgattgcacttgccttagtgctgttaggactctggtatttatgagacattatgtaagcacaagaacccttactaatttgccacgtttcatgcacacctggaataatcttccccgtgtataccggctttttttttttttccttttccttaatttccaaagaaagcctaccccaacaggaaactgttcattttgtgtcataagccccctgttctataaagctgcttgggcgtaattaagtggctacgtttacttcttcatgtggggaacaatggtctggctccttggagaggtcaagcaggatttattttattgtgtacagagtcggaggagtggaggaggttgtcaagacagtagctggtcattcctttgccatttatgtggccctctctatgtaagagtaaggctgtatatattttttcaacctctgatttgcttcccttttttcctgggatcattgctacaaaactattaggtaatactctgttgtaaggaaaatcagtcctgaggaaaatgtgctatgcatgtatgccttcccccaccctcaaattacttgattgcagcgggctcactttttgattaatgcaattttgcataaggtaatattacacgagtgtattacttttcagtaattattcaatggagttaatatggcagacttcttgaagaaaaattagaaccgtggcgtctcatttctctaaatccccagcactgttcagtagggtaacaataataattatgtataaataaataaatttcttttatcaa

SEQ ID NO: 94428 - DNA, 1050 bp, Homo sapiens
ttttatgtgcagttttgttatgctgcagtttgggagagtgacacagtgatttgttataacaaggatctttgcagtttaatcatcgtgtgaaattatgtgtgctattttgcttttgctttcccttgcacctttgagtttgcgccactccacaacggaggacaggaaaggctcgtggactccttttcctaaagcaattttctctcctttaggtctgatttcacgtgagcatcattttaaattccagcaagatgtggttctatttaactagcccttgcttacagaggtcccatgcctactattatatttccttaccatgatacatactttgcagtgcatttttctcactaatcatggtttagcaaacaaggaaggagggccccgttttatgaaactttctgatgagtgatgttcagtttatttcagtctttagtatactagaatgtacaattgctctgaagataaataaaagattcagccgggtgccactggagagcagagcagcatgtctttggcattgcttgagacttatctgatttggatttgtatacctcatggggaatggcaaaatattggaacagacggcttgatatttccgaagaatatagtgggctttattagcaccagtttcgctccctgactgacggctttttcaaattttttatcttattaatccgtgctactgtatgtaaatgttattcctctctgcataagggaggcaaccagcgatttgtaataaatgcttatgagtgcctgaggctgcacttaaactttaaaacatctattattaagttgcaaaaaaacactgtaatggccaatagtgacctcataggaattttaaactgtggtctgctcttctgcattaaaaacaaaaaaattgcctcaagttagaattatgagcaatgctattttaacagctgcattttgattattaaagtgtgttttacaactgaattacaatgcttttatggactctaggtataagatttaaaaaggtcattaaacatagtcgggttttgtcacagtaggtgtcattgtatacaatggacacta

SEQ ID NO: 94429 - DNA, 1160 bp, Homo sapiens
tccccaaagtcttagcttgagttaacactctaagctcttgatattcattccttcatttagaaactattatccaagccttgaaaagagccacttagccattcattctaggaaagtaaagatttattctggtgagctttcaaaaaccttaactttcatttcattagtcattcatgtattgtcatagcagagcgaaagtgatggcagtacacttccattctctaggcaagtgtgattcttatatgtaaagatgcacagggtatctgatgctcaaataagaggtctaagtcatggtcaaaattaacctaggaacctatcttcaagtgtttttctaacaacaattgttgttctcctgccaaagcaaagttccccttgaccatgtgtttccaattgctttctccgtgtgtagtcaattttgtgctgctttcctattttttactaccttatcccctcagctttttcacaccctgtttcttaactgattttcatgtcagccttgagccctcattgtagcagagcaccttggtttcccagtcctttgcctacctgctttttgataccaacactgcccggctagctgcttggctgctctgtggctgatgcccactgccaccacgttgccttttctcttattgtctaagtttcctaccacttcctcagcctccttagtcatcagtgtcttacctctgcccctcctgcaaataactcctcacctagtcagtgagttgccactgattaggggggagagtcactgatttgggatgttaatgatctttgttatagaaactaatggagaaatttttaggttgatgatggccaagtctttattccagtctagaactttctgctagtttccaaactcaaatatccagataattttgtcaaaaatgtctccctagttttcccacactatgtatgtacagtattgagctagttatctcccatctcccataaaccagttgtatcttctgtattcactctttccaatgatatcatcctggctagaagcctgaggataattcttgacatctttttttctctccttccctccccacatccagtaacttgggaaatgttgtcacaaaatccaaatcatgctgtcctctctgttctcctttctctaatgctggttaaggccttatcattcattttttcagctcaat

SEQ ID NO: 94430 - DNA, 1048 bp, Homo sapiens
gggtcaacaacaaaaaaaaagattcacattactcaaaacacataataccgtggtaaatgattattctgacattttagttatagatatttgattttaatttcctcagcacctgtgctcactttctagggagaaggcatgccagtaatcctctcagaatttggggggttatatatccttatggaaggcctccgctttaaaatattagaaaagttcctctattaactttctcctgtatgcccactagaatgtgtcaaattgtctctattaagtgggacataaaggcatctaatccaagctttgtgacatactaggtgagtggccttgaacaagttgcttatattcatccatttattcaattaatcagtagatatttattgatttcctatcacattttaaacaccatatttatcacaatggtcaaagtgaacatgagaaaacatagcacttaccgtttaggaaagtgcttgaaataggaaagaagagtttagaatagtgtctggcatccaggaggtcctctaataaatgtgtctaatgaataaaagaaaacccggaaaatatgcaagtaaaaaaaagaaagaaatgcacatacatacatacagacagacacacacatgtctttaatatgttagtgtatattcagactgtttttcatgaatatggaagcatctatgagttgagtttatgctatacatacatactgttttgcaatttgatttttcttctcttaataaaatacatactgaacattatttaacactaatattagttaatactttctcataagctaaccattttagtttttctgaaaaatttcctgcagaaatgataaacatccctttcttgttctaccttctaccttaagtttaagtttcatggtctttcacacttttcacacattgatttatgcacattttatttaatcatatagggattttatttttgttttacatagatagtttatatatgtatgtgtgtgtgtatatatatatatttatgtatctatgtatgtatgaatatgaaatgtgctttttaaacatatatcatggat

SEQ ID NO: 94431 - DNA, 1022 bp, Homo sapiens
aataattaaacatcatttgatccaatggaagtctagaaaagattcaaatgaaaaagaaaagcaaaaaaaaaagcatgctgaagaacaaaataacattgcaaaaataaaatatgtctaaatatatatgtaaggatcatctgtagaagctgggattgcatagtgcctggagtaaggcttctggatcccagccaggagatggggaacctggggccataagaggtgaaatgatgagttatccaagtcatgcagctaattaagtggcagaactgggattagaactcaggtttcctgcctcctaagaatgttaaaatcaacctttggaagcaaacctccagtgccttcttaaagcatatcatcagaagaccagttgtggtaaaattaaatcctggagtgaattattgaggggacctggcttgcctggatgactgctcgaatatagccctgagaaggcagaggaatatgtaagtggacaaccgaagagtaagtatgggtatgcatttctctgaggaaacaatgtgtcgcatatcagtacacaggagagaaggatgtgaagacaactagagagccacacttttcagagctggatatatatttacagattttttcctatttttggttattttgtgatataatttgtcttgttttataatagttaatgatttttcacttttgtaagataaatgtatgatattgtggatttaaatgtgaagtgttctttcacatttaagttttagtcattttcttttgcctctgtgtcagtgtatcgaatgttaaaagaattttagaagattttatatatatgacagagatacagaataagaattatttaacatggattaatctcacttattgagaggcagaggctatcaaattaaatttttaaaaaacaaatccagctgtcttctgctataagtggtacttttaaagctaaacagtgtagaaagataaaaataaagatatgcaaggaaatatatgaagcatgactagccaaaagaaatattacatatataacttgtaaaaaa

SEQ ID NO: 94432 - DNA, 1143 bp, Homo sapiens
tatgagaatgtgtgcatgcatgtgagtttacgagtgagagtgtgaacatatgtgagcggctgttcatgcaagtgagtgtgtatatgtatgtgtcagtagtgagtgtatatgtgtgagctgagtgtgcatgtgtatgtctgggttttttagtgcagaaatacagcatatgatgaaccaactagactaagggtctcttggctccacctggaagctaccatacaacccttgctccttaccttagggcaaaggtgaggctgaagttgcctggaggtatgcgatgaacaaggaccagagaaaagcaaggcagcgagccctccggggagtcagttctgtgactgaagacactctcaacatttgcagactttgctgcaggtcccaggaaagcctatcacaagagggtaaggctatggcaagatgggcaagctcccttgaacggaagggtgaggctcacagcacagctgtctgctggcgcatccatttcctcagttattacacctgccccaagctcctggctcttgcaggaaaataccgcactgcatcagaggaaagatgcccaggcataagtctgctgtatttctacatttgtgggccaagagactgatgcatccaaactgcttcaagcctcctgaagacctcattccaccattaccaaagtatctcccccatccctcccaggccccagcattctagccaccaaatgacaacagacttcagaattaaattttcctttttttcccaataaatctatagtcttcactacccccttatattttctaatctcctaaactcatttaattatgtccagagtaattaaacttgctatcagggggcatctggaaggaaagttaatacattttaattttacttatacaatgaatattcgatcccacatacagtgtaggggaaggcactggtacacacacaatcttgcataatggactcatggggatcatgggttgcaggaggttggcggggtaggagccagcaggattcacccagacatgctaggagacagggagcaccgtatggacgaagcctcggggtgaaaagggattagtgaggagtattaaaactgggcagggtggggcctcaggaatctcagacaccctttgaccaaagttcccaggagtcataccagacaaa

SEQ ID NO: 94433 - DNA, 1057 bp, Homo sapiens
gcacaccaacatggcacatgtatacatatgtaacaaacctgcacattgtgcacatgaaccctaaaacttaaagtataataaaaaaaataaaaaaataaactttctaaattaattgagacctgtctcagatactttttgggttacaagggtaaaggaaggctgccccccaaaactattcttacccagcttttgtcactgacaaactcctaccagtataatagggataagaatcataataacaactactaccaatttttgagcaacttctttgtgccaggaactttgcaaatattctttcagatcctcaccacaaccctggggaaaaaaatccagagagtttaaaccacttagtcaatggtaggcagttagcacatgtcagagctgaggttagaacaaaactcctctctcttgtatttgcttatttcttatcttctagggctgtgtgcctaaacaaactattttcaataaagttagaatttattggttttgtatgctttttatcccacttaacacattaacatgaatatttttccatgtcattaaactttttttgaaaacactatttttaaaggctgcataatattccattgttgagtggatttgcccttcccttatttttccagcctttaagctgtttccaggtgatttactgtcataaattatgctgtgataagcatccttgtacatgcatctgtgatcgcatctccaattattttcttaggctagagcactagaggagggactgccaggtcaagttagaaaacgcctttaagtctcccgatgccagttgccaaattgctttcccgaaaggttgtaccaattcatattcccaaggagataaacacttaactttgaaaggaaagggtgttttaaagtgtgagataagccggcaccttgtttaaaggaacaactccttgagttccgcacaaaggccctcagaacccctgtgaaccatgggctgaggaaacattgttcggccttcctgactggctggttaaattcccaacatcccagatgtcattttactcatggttgtaggaggagattcagtggggta

SEQ ID NO: 94434 - DNA, 1071 bp, Homo sapiens
atacaatgatgattaactatgaattcttaagacttgcatttaaatgtgacattcttaaaaaaagaagagaaagaattttaagagtagcagtatatatgtctgtgctccctaaaagttgtacttcatttcttttccatacactgtgtgctatttgtgttaacatggaagaggattcattgtttttatttttatttttttaattttttcttttttattaagctagcatctgccccagttggtgttcaaatagcacttgactctgcctgtgatatctgtatcttttctctaatcagagatacagaggttgagtataaaataaacctgctcagataggacaattaagtgcactgtacaattttcccagtttacaggtctatacttaagggaaaagttgcaagaatgctgaaaaaaaattgaacacaatctcattgaggagcattttttaaaaactaaaaaaaaaaaaactttgccagccatttacttgactattgagcttacttacttggacgcaacattgcaagcgctgtgaatggaaacagaatacacttaacatagaaatgaatgattgctttcgcttctacagtgcaaggatttttttgtacaaaacttttttaaatataaatgttaagaaaaattttttttaaaaaacacttcattatgtttaggggggaactgcattttagggttccattgtcttggtggtgttacaagacttgttatccatttaaaaatggtagtggaaattctatgccttggatacacaccgctcttcaggttgtaaaaaaaaaaaacatacattggggaaaggtttaagattatatagtacttaaatataggaaaatgcacactcatgttgattcctatgctaaaatacatttatggtcttttttctgtatttctagaatggtatttgaattaaatgttcatctagtgttaggcactatagtatttatattgaagcttgtatttttaactgttgcttgttctcttaaaaggtatcaatgtaccttttttggtagtggaaaaaaaaaagacaggctgccacagtatatttttttaatttggcaggat

SEQ ID NO: 94435 - DNA, 1027 bp, Homo sapiens
gaaacctcagcccatgtgcattttttctcgagtggttaacctttcctctctttctccttctttttttgcccccctccaaattcccccttctcttaagaaaaaacacgtgagccatgttggaagtacagccttgacctcagcctcaccaggtgcggctgctgaccggtgcaaaaaaataggaaatattatttaaaaggcagggaggggagagtttctgttccacaatcactgctgtttcagtgaaaagcaacccggtttatctgtaaaacctacttccctttctggtgaatgtggctgtttttgacagcagaggaccccagttgttgaggactaaagagagagaagatgagaaagaagatgctggaaacagaggttggagaaagagaggcaaggaagtagaaaggaggaaaaggggaagagaggaggcagggggagagagggttggaattcgagctattttcagctgaatgtgagtgcagatttcatcaggcttctgggctacagggaaactgactgtgtgcggaccttgcgtgtaacttcctgtgaagcagccgtggtgactgcattttctgacactgtcagagtctggacaaccctgccagctcctagaagggcaacccaacaactgtcacagacgaagcatcaaaagcatgagctgtcgatagtgacctgcatttgcagaaaatctgagggctttctaattaacagaggagctctaaattagagtaaagctgttcgacaagacccctcatacgcggtaagtgtcacaatgcagataatcattacatctaacaagcttctgatttttaacagaagctatgagaccaactcatttataatggttcagtttcaaagggggaaaaaaaagcaaccaagaaagaaaaagaaggaaagaaaaaaagggagaaaaggaagaaagaaagaacaaccagaagaacaaaaataggaaagaaaaataaaaagaaatcctccttctagtgctttgggcgagtgcttagacccagtccccaaattcttcctttgttgt

SEQ ID NO: 94436 - DNA, 1033 bp, Homo sapiens
tcacaagtcattctctggaaaggagccatggtccacccacagaacaaggaccctgaaatccccagtaccagtctccctaggatgtcttgcctttcagcagctgttcagtcaaatccatttcagaatggagaacagcttgtcacagttctctactcttgacctgctgatagaacaaggggcttggagattttgggtagatatggaaatagatccctaaacatactaaaaagattttttttgtacgtgtggtgggggagaggagaaccagagcagaaggttggagaaagaaagttggggaaggaaactaaaatgtgcaatctcattcctcagccttcttgttgaaaatgagaatcagatgcagcaatgtattatttccaagagctatctggtgatgggatccatctggtgaagggctacttctgggggacctggaattgctgtgtgacctttgggaaacacttgccttctctgggttgagctcagcccgtagttcacaaggggcattgctggtatttatagactgtgtttgacagtcccgagtgaaaggcaacttcacttctcaccccagaatagcaagcgttgtttctcatatctaggttgctgggacagcttcccaggaacctaatattcagcagcttcgtgacgttggatggagggtttttctttttaaatgagttgattggcttttgccactttacacattgttttccaggtctaggtttatttttcccttataggtagaatataaaagagtatggggtctgccctggctcacaccgttctgtttttgcagttagcttaaaggcatggaggacattcctgggactagcatctgctagccaagaacgaagatgacagcaacatggccgtagaggcatgggccctgctggggctaataacccactgcaggctatccttggcattcttgctggagtggccttgctccaccctacctggtcactgtgccgttcagtctgggctatggcctctcaccccacctcatcccattgcatttcataagccagtaactcca

SEQ ID NO: 94437 - DNA, 1045 bp, Homo sapiens
attaaatgcttatagatccctctctgtgctattacttttgacctgggttttaaaaacacagtaacacttacaatttattctcattatgtagaaacatttaaattatcctggaagagtttgtctcacgggctgttcaaagagtgtttcttcctttccttctaggaacatgaggagtgaatctgactatttcatcaaagcctgtaaaagatacctgagtcatgattttaactgaacaatgtctccaagaattcagactgtgagagggggaagaagaccgtctctttggtgcagtgggaattgccattgtgtcctccctggttcctctcctctgtccttggcaatccagttacaatttgacagcatttaaagatgacagtacttgagataataggacaatgccataacaggattacagcaaatgtgaaagaaaggacacacgtaggtactgtcatttaggtaatgtcatctatgatcagtttttgtttcattttttgctgacacagaactcagtgctacttatacaattcactggaaaccctgttatggctgtaaatagtttgcttcccccaatgaaagaaaatacttactgtactgcaggggaattcggtaaaactttctagttttgcttaacatgaaaataataacaaaaaatttcaaatcagtatcaatagccaaagatccaaaaacagcctaaagccactgctacccaaaacgattttgtttgtttgtttgtttgtttgtttgttttttgtttctgaggtggagtttcgctcttgttgcccgggctggagtgcaatggcgcaatctcggctcaccgcaatctccgcctcccgggttcaagcgattctcctgcctcagcctcccaagtagctgggattataggcatgcgccaccacacgcggctaatttctgtatttttggtagagacggggtttctccatgttggtcaggctggtctcaaactcccgaccttaggtgatccacccacctcagcctcccaaagtgctgggattataggcataagctaccacacccagccataccc

SEQ ID NO: 94438 - DNA, 1034 bp, Homo sapiens
cagatggggagtgggcaggaatgacgttcagaatcaagggcccatcagggtctgtattggtcccttgtccctctcctccagtccatccatgttgggatactcagggcatggatggtgtttcatgatagcatttatcattttgatgatatgtgacaaaataaggcaggcatcaaaattcatatccctgtgatctctctttaatagtgtcctcctgctttgggggttattaagctagcctgaacttgagtaaacatttttggatggggtgagaggggggctgataaaagtggttagtaaatagacagttggaaaggagaacggcccgggggctcaggagatgagccagggaacaaggaaagcagagatgctagtgacccagagtgtcctagaggggaaagaacctctgttagaatttcaaatgtcagactttcttttcagcttccttcaggtgcttcctcttctactcagaattttcttttgagataggtgctggtcaaacaagcttttgtttgtggctggtcacttggcacacagtgtggctgtttgtcatcctggatgatgaggcagctattttaatggcacgcagggccgccgtgtgtttactgccaagaaataagggcttctaggagacttggtggctttaggaacaaacttccagcggcagaaattagttaggaagcagagtagcactgggttccaaatgcctctattgtatgaatttggatatgttgtgggcaaaatgacataaaagaaatggaatgagaaatagtgtaagtgactgacaaggaccccattggcatgtgggctagtgttgactggctctcacagtgtgaatttagttaggtgtttccactttattttccccaaactctaaagcaacagtttaattggggtctaaggtaccctttagaaacattttgaccacctattatttaggacacacagcattttttttctttgaagataaatttgttttgggtatggctgggtgtggtagcttatgcctataatcccagcactttgggaggctgagg

SEQ ID NO: 94439 - DNA, 1600 bp, Homo sapiens
aggcatgtgataggaatcagtttgatcttttaagcattttcagggacagatatgtacctgatattccacctctctatataatttcaagacttgattggcattgtccctaagcaccagtagaaagcttgaagaagcttctcagtaaatacatcagctgtatttccaggtgagcagtacctgctgaaatgctgagagaacgttctgactaggagggcttgggggagacagagacagagttggctgtttcagcagactcattctgctatttgctttttgccttggagattattttttctgggtgtcccgatgctgagctcccacttcaagaagaacattggtataaatttacaaaccagaagtagtcagaggttgacttttttgttctgttattccttctttgggagagcaggctggccaggaggaaggttcaagtgtgtcatatcctagcattcagataggtggcctcctctgccttttcagtgggtggctgggctgggtgaaatcttgcagtgactaagaaaggaagggtggacccaggcagacccagaaggtactgcatcttcatcattgatcctgcatgcgtgccggtaggcagcagttctggaattgctggggaaaccacagtgcagcatgagccctggggcctgctctcttgtgcccggctgagcatctctgttctgtttggggagtcctgccaggcaagtgtgagtcaaagaggagaccagggccctatgtcatgggggcagtgtcggctgagtggtactcttcagagttctcagaatgtgccgctcgaagccatgtaggcttccagcaggcttctagcagatggggttttggctgggttgggccttaatactcagtgtctttcattccctctctgccccctcgttcctttcctgcatttcttgctttcttttttttctagaatcaacgaagcagccaataaccaattttcaggaggtttagatgaatgtgaattgctgtttaatataaaaattttattaaaataataaagctctgacaaaagatccagaatattgtcccttgcagtgggctttagggttgcatcttggctcctaaatcttctaggcgggttaaattagtcctcacaaaatgtcacatttccctggcagctataggtttccaggagggtgaacaagggccatctgggtgtttgctgagggcttctcagtcctgggtaggaactgctgggtgtggaaaccaccaaggctttgtaagcctgaaagagccactggtattgggagcttggtctgcactcagacctgagcgccacacattattttcccagatttgggcaatctaatggataggagggagggttatgccccatctgtgaataggtggaggagagggtccagagaaaattgttgcagtgctcagaggaagcaatagcctactgtcttccagggacatgtctggctcctggaatgcctgtccaggctgcggtgggtggcatgggtaagggtttttaataaaaagtcacaatgcctggagaagtgaggctccttgcagccacctgccttttctgtcttgggtctcctggttggaccccattctggctttccacctggtcagagcc

SEQ ID NO: 94440 - DNA, 1049 bp, Homo sapiens
cccaggctctcagcccctctttctagaggctccacctaagccttaggaaagactttcgtttggttttaactggctcctgtcaagggttcccccaaaccagctcaacccctccatttacattataatgcaaaagctcttccctgtgggtctcagggcctgtggggaaaatggaatctggctcaaacccaagatccaaagctaaagtgcccccaggttgggctgcctgacagttttatagatatggcattgagtggcctcctggcagtttggaattgtgaaggttcactcattcatttttcaacaaatattttgaacacctgccacatgctgggaacggttcttggtgttgggcatagaaagccttaaaaactccctgctcttgtggcaccccctttctagctggggagagacagaagatgcaccaataaatatgtgaattatatagtatggcaagagaagatcaaactgcctgcacgaaaataaggtggggaagaggggtaaggggtgcatggtgaccaggcttttaaataggataattagggaaggcccaatgagaagcaaaggctccaaagaggtgaggaagttggccatgagaattttgagaagatggttccaggaagagtgtgtagagagcagagaccttgtgtgtaatacgcctggctactggaggaggagcaaggggccctgaggtcagagtggaaagagtgcaggaggaggaggagaggagaccagctggctccttgaaggacgtagagcagggatttttggctctgactccaagggagatggaagccactggaggagtgatgtcatatgacttgcgcttccagagagtctcttgggccgcattttgagactcaagcatgggaaagtgaggcagaagcagtcagaaggcaaattttaggcaagtgatggtggcgtggaccagggtggtggggacgtgagaaggggctggattctggacatacttcgaagggaaaaccggcaggatttgctgactggtgggatgggttgtatgaaaggaagggaggagtcaagatggaccccaa

SEQ ID NO: 94441 - DNA, 1032 bp, Homo sapiens
tgctcacgctgcttgattgaacagagaaagaccgggctttgaatggatccccagctccctgtccagggaaggtgtgaggctgggcaagtttatttcccccttcctccctggggagaaagtgaaaaagtgaaagtgctggggttgggatagctggtggtgtctttgtggctttcaccccatggtcaagcagtgaactctgcttgcagattctgtctcgctcacctggaagccagtgttggggaaggagcacgtgggggaggatccttaggtctgggcaacactttggagttagggggtcccctggaggtgtgggaagctggtagtggcattctggaaacaagctagagcctgtctcaccagagggagaacggctgagttcggaagggactggggcctgctttcctttgggtggctttgactggctcttggatgagtttaaaaggtgattctctctctctctctgtctctcttttctttttttttttttcttttttctgttttagtgtatgtgtatgcaagacctttgatatttgagtagggaaatcctctcttatcaatggaattcacagcctcttatggtgccttaccctttcattgtgttgtaaagacagtcagaccaactagatttatttgcacaactctgatttttttcctaagaaactcccccacccaatttaatttttttttttttttgagatggagtctcgctctgtcgcccaggctggagtgcagtgctacgatctcggctcattgcagcctccgcctcccaggttcaagtgattctcctgcctcagcctcccaagtagctgggattataggtgcatgccatcacacctggctgatttttttttttttttttttttttaagtagagatggggtttcaccatgttggctaggctggtcttgaactcctgacctcaggtgacccacacgcctcggcctcccaaaatgctgagattacaggtgtgagccaccgcacctggctatttaattctattttcagatggcttgttctccaagtcttgggactg

SEQ ID NO: 94442 - DNA, 1018 bp, Homo sapiens
aactttcactcccagttgtcctgatgccacatttctcccatcccaggtgcccctctctgtccttgtccatattgagcttagctctccactcctgacacgagttccctgacttcctctccacttccccggatgacggtgagttacgatcttgtctcctaaggtgccccctccctcttggctcctctcccagtgacgacttcatggaggctgagaaatatagtgagtggcctttcttgcctcacttactgctcggtaagttagctcagggggagagctgttcataactttgcactgacatctggagaacaaaggttttggaagagcggagcccagattccctgtgagccagcagagccaagtcttttttgagtttccagcaaaacctgtgttttaataataggagtgggtcattgtgtttaatagtacaacaaaacctaagtgcacataataagcacatcttttctgtgtgctggggtgaggagaggtgacagtgagtgtgtaggatgatatgaaaagcattacagacatgggaaagcatcttagagcacccaaagctggcatgagtcatcacaggcttatggccacaaggctagattttcaatccctgcttccctttttcataacccagttcaatgaagacataattgaagtggtgagaagaggggccaccgcccttcagactccagggtatttgtattccaggacccctccgtgggtgttggcccagcggtgcccagagaatattcccttattggatctttctcgaattgacttgttcacttcctgttcagcgcagcctggtggtgactcggtaatccccacagtaagacctcacagtgggttgagtggcctgggagctcaagtcaggggcagaaatggggaagctggaaagttgggtgatcaagagtcatttggaagcccccatgtctgtgtcagtccactcacatctctgtccgccacccaccaccactttctccctgcctgaaagcactgggctgtgtttcagagaggtagctgg

SEQ ID NO: 94443 - DNA, 1014 bp, Homo sapiens
cagtaattgatgagtccttaaaatccacgcccggcccccaggaatgccttggggcaccccatcccacgttctgattctggatggacttttaagtgaactctgatgatgagtaggctcttaaaactctttctcaacgttctctgctgggtttgtgtgtcacctcccatgccctctctggtgtgtggtgattctcagatctagagcaatgcttcctgccttgtccccccatgcctttgcgtgtgggaagctaaaattcacatgtgcgatgccctcccatgtgccatttttacctggtcccttctgctcactctttattcatatttaaatgcaggtgagttggaatgtcatcttacaggcataatcctgaatctgctctatcgcagacattttaaaactaaattaaatgttagtactaagtagtagccaaattctctgagtctgcttcatgacaggctgtaacacactggtatggaacggtaggtctaatcctgtgactcctttatctatgatgttttatgtattatgagagctcagcagatgttgacagagggaatgagacaagatgattttaggtctaggtttgatagataaaaaactgggccaaattttatattttctttgaaaagatagctaaatctcagcaattattttattttatttattaagctttttgtagagacagggttttgctatgttgcccaggctggtcttgaactcctagcttcaagcaatcttccctctgtggccttccaaatttctgagattataggcataagcaaatgcctctggccttcaagtaattaatttaaagtcttttaaaaattttctctcctcccctaaaattgggttttagagtaaggttcttgttcctctagtcgacaagagtttctgaggaatcatagaagaaagcacagctctttgagcatagatagtttccttcgtggaaagccaaagtgaatacttattgagcatcttctatgtagacatagacttgtgaagtcatatcattaaccc

SEQ ID NO: 94444 - DNA, 1050 bp, Homo sapiens
gaaagaaggggacaaagaacacgtcaagggttaagcagccttccctttaagggaggactggggcacaagatggaagatgaaagggagcagagtggcaattgcagagctggaaaggggaattttgttcttctagatagcaaaagccaggactgtcgctgtgtgacttgaaagctaggtcactggtgggcttcgtgcagcccgtcacaggggagccatggtgggcctcgtctctgccgtatctgctgcctggaagctgagactggcctaaccacatcacaccattcccagacccaggcccaggcccaggcccgggtccctctggttttacaaaatgtccgctctctctcgcttcacacagaggctattattagcaagtgtcactcagttatctgagagtggcgcttttagctgccatctaagtgcctgatacttgggtttacagcagattaaattaaattttaggctggtttggcttcactggcagtagacaatggaaggcagctgttgtagaaatgtaacctggcaccctcaaggatttgtgtgagtgtgtgtgtgtgtgtgtgtgtgagtgtgtgtgtgtgtgtgtgtgtgtgtgtgtgtgctgaccactaggctacacttccttttcctttcctctccatttcatccctttccaaaaagtgtttagacaaatagtttcccagacttggttttatcatgctgggttgacaaaggttgtgtacagagctggaataattttttcttctttctactgttggcacatcaatatctttttttctgcaaagaaggggctaagcttgcacgaaaacaccggtgggaacccactggagaagggcatgggtggtttttggttcggttggtggctgatctgatgggtggtataggcagaatgtctggctgccccttcagattcctgtagattccgtaggcgaccaacatggggtgggggtgggggactgtctgctctttttgatgcaaatatcttcactctccttggtgcttctgtggttgtgcctatgaatttaggaccttatgcctcatagtgttgag

SEQ ID NO: 94445 - DNA, 1058 bp, Homo sapiens
gcccagaagctgtctttctgaagaaacattaacgccaccaccaccaaaaaaagaaaaacaaaaaaacaaaaaacaaagcaaaacaaaacaaaacctttttaaaaaactggaaatgacagaatagttttaaaaggaaaaaaaaaaaaacccaaaaaccaaaaagcaacaaccaccttctgacgctcaaaacttcaaactattaatagaccaccagtgagatagactgtctttgtgccttgaaatgcaaaatgagggaaataattagcagaggaacaaaattctcaaaatttgaagaacttctgtgattactgggggtacagtgaaaagaaaatgcaaatttcttcctgatcttaattagattcgattgtgcggtgggtgtgttggatttggggggaggggcagaggcagggagtgctggggtgaggcgtgaggctgagtgttgtggagacaggttagcaggggcccggcggtgtggcaggaacaaaggcagcttccaacgctggtgcaggattccgagccttaacccagatgctcatggtgccctagtcttgagttcttcatttaggtgggcttatttcccactgggtctgggggatttcatttgtcctttgaggggcagggtggacactgacagaacagctgcggccggcagagagggtggttaggaagagggaagcagcctgtgggtaacttcccgaccacatggaaaggctgaataagacgttatggaccctgccttgggtactggggtcagcgtctcctggtggtgtctgcacagggccccccaatgccagggcactgccaaaacacgctcttgagtttaatggtagtggttggtctgagtcctgccaaagtgtatggagcaagtttcattggctggactttccccttgcatgaaataataaaagccctggccaaggcttatgaatctatttttgtttcattaatattatttattatgtattttattaatattttttggagggaccttgctctcatttgaccatttgtagttataattaatgcattccgtactggttgtaaaaagtgtgcttgca

SEQ ID NO: 94446 - DNA, 1066 bp, Homo sapiens
gctgaacataaatagtgtggtcacatctcaaagtgagatgtcagtaactagaatcacgacttctcataattcacagtaatgaattaagagtttcctatggtgaagttaacattctaccattgcacataaattccgacgctctggccctcaggtgcccctgaagcgaagttctggaagacggctgtgtgtgtacccccagcccatttctctaaagcacgtctgcacaattccaagtctgcttttctttttatgatgaggaaggaaacaataacagtaatcattcagtagatatttgaattgtgtcacaaaaagaaaggagaagcaatgccttgtattaaggaaagagatatattgatgaatctctagaagaatgtgtttggcaaccacataaaaggtagtcatttaagcgtgctgggtaggaaaggctttattaaagtgatgtaagttggatttgagttcactgtgagcctgtactattttataggcaggaagcaagaataaaacagtgacagatcttcttcctaagataaataaagcttagaattcgggactttcagataggagaataaggcagagttctttaaatcttgagtaaaatggtatgcattttcactgtactcaggcctctccaagctgagttttttttttttttttttttttttagacagagttttgctcttgttgcccaggctggagtgcagtggcatgattttggctcactgcaacctctgcctcctaggttcaagcgattctcctgcctcagcctcccaagtagctgggattacaggcgtgtgccactacgcccagctagttttttgtattttcagtagaggcagggtttcaccatgttggccaggctggtcttgaactcctgacctcaggtgatccacctggcttggcctcccaaagtgctgggattacaggcttgagcgaccgcacctggcccaaactgagtattttttagaggattctttttacctggtgaatagatgggtatgtgctcccccacttcatccacgtacacatatgagctgtacacatagatgttaatcaggttgcttttttc

SEQ ID NO: 94447 - DNA, 1938 bp, Homo sapiens
aactataattaaatcaaagatgtaggataacggaggcgttgaaatagtttttgctaggcaagggtgtgacctttttaaaaaatgtatgatatatgctgccattcgagaggcaaggaaaacatatctccaaatttccttccaagcggtctaccggcattgacagtaccgcggacaaaggagagtaccaaataaatactccttcgaaccaacggtatactgagagccctgagcttgtgggcggggccccggagcctcccgggacctaaaggcagagggggcgtggctgagggtggtccagacctccaggggcggggctgagacctgcgagaggcaggctgggaagcggcgccatattggcgtcggccgcgctgtattgtcataaatagagccggttttgtggtgttttcactactcggttggatgcctcagccatagtaagtgggaaagtgagcgagcaagcgagctactagcgaccggaggaaagtgaacagggggagaagggaacagcaagaacaggactccagagcgataaacactcgctggagagggagacgcaggaagcgatgaaagagatgtctgcgtaagtggtggggggcggcggttggggtgaggcgggtaggggtgagctgaggtggtccgactgtgtccttgtttccgttccctgtcccttgcgccctgcacgcagctcgccgggatggtctccttcccggctcccggccggtccgcaagggcacctcccctaaacccggcggctcacctggccacccctgcacggactcggggactccgggagtccccagctgtcccgcctccgaggacgccctcagaaaaggatgaggagggaaagaggtgcctgtgtccgtagggagaaattgtcggtcactcgcctgcccccagcactgtctgagcccgtctgctcctgtctgcattggcgcaaataccatccccctgcctccccctcctcccttcccgaccggctgtctccaggtcttcaggagtgaaagacctatcgcagcccaagggtttctctttcatatgaggctacagtcttttcaccgccgtccccaccctctccctcaccccctgcttccccacctacccacaacatctaccggtctgtacctcttgttcacactttgataagtcagaaacagttcccgtacttggcaagattttgttgtagcttcttccattttggtctattaggaaataatttaaacatgcagaaaaatgtagagaataacataagcatcatttgtggagccaccacccatttctcccaaaacgtaactgtacacacatacacgtacatgcacacacgcacacacacggtgtgtatatacgtatctgtgtatttattttaaaaagaaatcaagcattccagatacatctgaaggactctcctacctccttctctggtcccaatcatctcttgctccagatgtctccacagtcttgaatttgatgtttatcgttgctgcctgttttttattttacttcttttttttccgccctcgaatcatgggagctgcatgttttttaatgctattactacatacacatgtgttcataataactggcatagttctagttgtttttaaactttatataactcgtatcacacttggaattctgtaacttctttagcacaacatagtatctctgagctttgttcatgttagtattttagttgtaattaattaatattaattattgtattgtattctattgtaggaaaacaccctaatttaattcttttcctgttagtgactattttatttctaagtttttaatgttacaatgtgacagtgaacgttcttttaggtgtctctttgtacgcttgtaactagaatttctctaggttgtttgcctgtaagtgaaattgatggtttgaagggaatgtgggattctgttgtttactttcccctcccctctaga

SEQ ID NO: 94448 - DNA, 1020 bp, Homo sapiens
tttggcgatgggctcttactctgtcacccgggctggaatgcagtggcgcgatctcagctcactgcaacctccgcctcccaggctccagcagtcctcccaacctccccacctcagcctccctagtagctgggaccacaggcatgcaccaccacacctggctaatttttgtatttttgatagagacggggttttgccatgttggccaggctgatctcgaactcctgagttcaagcaatccaactgccttggcctcccaaagtgctaggattataggcatgagccaccacacccggtctagaattctttcttttacagcttttattatttttttctgtagctatgatgaatatgtagaattggttcttttaaacagtgggctcagaataaagttgagtctcctaaagactacagtcgttgagtttaacatggtatttatgctatttacttttgttgccaaaaggctgtctgcctcatttctgaactcaccagggttatcaatagttgaagttattggatgagtcaaattctgagcagatggaaatgctagtgacaggtagtcaaaaaaaataaagttagttaacatcttccattgagcagatgaggtcatttttctttgtgaattgtaattgtctcttttgtgtgggggaatgggggaaggatctctcagtctgtctcccaagctggagtgcagtggcatgcataatcatggctcactacagcctcaaactcctaggctcaagcaatcctctcaccccagccccccaagtagcagaggctacaggtacacatcctgatgcctagctacttttttttttttttttttttttggtagagatggggtcttgccatgttgcccaggctgtcctcaaactcttgtactcaagtgatcctcctgctttggcttcccatagtgttgagattacaggcatgagtcacaaccacacccagcctataattctctttttttttttttttgattttaaaaaaaaaagtgacgaggtctcactgtgttgccaggct

SEQ ID NO: 94449 - DNA, 1064 bp, Homo sapiens
tgaatctgtacacaattgggatatttaaactttaaatagtgtagaatcccacatcaaatcattttggttagatactatggctgtggcaaactgatttagcatatcactttctcataaatcatgcgagaatcagacttctcaaaatagaaatgtgaactaaaagatttttttaaggtcctgtcttctctgtccatttcattcatgttaatcatcaataaatttacagattcctgggcatggtggtgcatgcctgtagtcccagctactcaggaggctgaagcaggaagatcttgagcctaagagttcaaggccagcctgggcaacataacaagactctgtctctttaaaaaatctgattaatttactaacttctttctagctataaaattatttgtgatactcttaaccttaatattcattacacagaagcattaacaaggataatatcctattatatagatacttacattcaagttgaagttaatcagcagatattctttagaacttgtactgggcattgtgagaaaatacagagaagcagtagacacagttcttaactctgagaaatgtaaatatgattgaagattaaatatgaaatatgattttacatgccaaagaagtcagtaaatatagcaaaaaagaatttaagaattgtaatggcagaaagcacagaggaaaaaaaagcttgttagggagtaaggataaccagggaaggcttcatggaagaggtggaacttgaagtgaacttctaaaagtggatgataccgatagccagaagctggacatggtggctcatgcctgtgatcccagcactttgggaggctgagacaggaggatcgctttaaaacaggaacttgagaccagcctgggcaaaaaagcaagaccccatctttacaaaaattatttaaaaattacccaggcacagtggtacctgtctgtagtctcagatactctgtaagccaaggcagggggaatattttgtgctcagtagtttgaggctgtggtgagctaagatcacactgctgtgctcacttcagcctgggcaacacagtgaaaccccgtct

SEQ ID NO: 94450 - DNA, 1052 bp, Homo sapiens
tattgaagtggatcaggatacttgagtgactatctgatgggcttttggaactagctctcaagaggtgaaaattagcttttttttctttttctttctttttttttttttttgaggcaaggtctcactgttgttgaggctgaacctcctgggctcaagcagttgtcccattgcagcctcctcagtagctgagactacaggcacacgccacatgcctagctaatgttttcttttttgtagagatggtgtctcattgtgttgctcaggctggtcttgaactggacacaagtggacctcttgcctcagtctcccaaagtgctgggattacaggcatgaccacgcccagccaaaaagtagcattttaattacattataatccaagaaatgttaattaagcttgttagaatagctctcataaggagatcatgtcaggaatgactccgttcttacagaaaggttgtagagctagaatcaagaaattaaacatacctgtcacaaaaactaaaggggatatgggattggccaagagtgttatgttttagagaggtgaaagcacattagtctggtaactgagagttccttgttgactaccgaaagagtgatgaagcgaaagacaggcagttggaggggacaagtatggtcaagtgattaaaaagaaaagcttttcttcagatagggatgtatgtatgtgtagtgggggtgaatttgttttgtctttcctctgggaatacccttattacttcagatcacaaccagaggatctgtgaagcacttttacaaatctaatcttgacaaggttggcaaatctaatcatgtatcatttgctcaataaaggtcagtagacattatggtgatttttttttttattttttgagacagagtttcactcttgttccccagactggagtgcaatggcacaatctcggccgctgcaacctccacctcccaggttcaagtgattctcctgcctcagcctaccaagcagctgggattacaggtggccaccaccacgcccagctaacttttgtattcctagtagagaagaagttttgcca

SEQ ID NO: 94451 - DNA, 1127 bp, Homo sapiens
ttagtaaagacagggtttcaccatgttggccaggctggtctcgaactcctgacctcaggtgatctgtgcacctcagtcttccaaagtgctgggattacaggcatgagccactgcacctggcctgaaatttttttttttgagacggagtcttgctctgttgcccaggctggagtgcagtggcacaatctcagctcactgcaacctccacctcccagtttcacgtgattctcctgcttcagcctcccaagtagctgggattacaggcactcaccaccacacccagctaattttttgtatttttagtagagacgggattttgccgtgttggccaaactggtcttgaactcctgacctcaggcgattcacccactcttgcctcccaaagtgctgggagtacagatgtgagccaccatgcccagcccgaagttttttaatgaacatgtaaagcttcgtagttaatatgctgtttggtttacttgagtgtagctttcaaatttaaagtggacataagataaattgtgtttgttgtttattttagggttggattagtagaatctaaaatccgtgtacttgttggaaacttggaacggaatgaatttattactcttgcccatgtgaatccccagtcattcccagggaataaggaacatcataaagagtaagttaattgttttataatactttatttcttaaataatgttatttggtatatgcatcatttcagagtaattgtgagatttttgtttaacaggcattgatgggagtatgacacattatatatttgagtttgagtgtctaggcattaaaaataagtacataactactttggtagcccacaaaccccagcaaaacaccatcacaatatttggagcatctttaagaatatatttagtaagtcattttcatagctgcttaatccttctcagaacaacaggggataacttaccagttctggatgtcacttttaagaatctggccagaccactgaaatctgtatttgtgagatagagacatagagaccaagttttaattatgaaatagcatctgtaaagttgtaaaaaataataataattaatggaaattcttaaattttactttatagcaacaattacgtatcaatgtggttc

SEQ ID NO: 94452 - DNA, 1051 bp, Homo sapiens
ggctaatttttgtatttgtagtggaaaagggtttcaccatattggccaggctgctcttgaactcctgacctcaagtgattcgcccgccttggcctcccaaagttctgggattacaggcgtgaaccaccatgcccggccctagattttgccttctttatgtaataatctttaatgccctcagaatccctcaaaccgatgtccctgaatttcataaccatcaaagttatctagcctaagtacaaagttcagttttcctgagaacttaagtatctcacagattgagtcagtggtcttcttcatgaatgtattacagaaacaaattgagggacataactctcagatattaaatttttctctactgcacacactcatttttcacttcacaccccaagagcttcctgtttagtcaccatgaacttccttttttttttctttgcttgaccttaaggactgtgttctttatgcatttcttgatccaggcatggcagttcctcttttcctgtacatattcacactcctgccacttctaccctttctcttatccctctgcttttcacctctgactgtaaaaagaagtagcagttccgaaagcaagagttccctatgaacacggaaggaaatattcattgcatacttgagtgtttaggagctagagggtttgggagaaaaactccccaagttttgtgactgactttctagctgggcctttataatatatatgatgtgcttttccttttttgtttcctctttctttctaatagagactacccagtaaagaactaccagattcatcatctccagttccagcaaacaacatccgtgtcatcaaaaattccattcgactgacccttaatcggtaaaagcagtgcctcctcacttaagtgaacaagcaatcatttagtggcatagatgcagccacttgttttttaaatagaagtggctgtcatacgtgaaataaggtgaaagtgacagccttcagtctaataaccttgaagtggtttttgaactgtcaaactttgacctgtagatgctgtagcattctctcactgat

SEQ ID NO: 94453 - DNA, 1326 bp, Homo sapiens
gtctttttttacgctgcttttttcaatgcatttcttaatattttttaagtttcatgaatgcatgctcagtttattaaaatccataaccatgtaattcttgtaatatgttgattcagtgttttgtaaatgaagtcgtatgtattttcagagtatttttgtatgtactgtaagataccatcttttcaaagagaaacgtttaaaacctttattgtctctccttagtctaattttttaaatatggattatgcttgaattactatatttaaaatgaaaatgtatagattacacagccaggaatgctagtatctaccaccttctttagatttcactcagcatttagtaggtccagtaggaaaaacccaaaatggtacattgagtagtgtggggaagacacctcgtgtattataggactcacgggatgccatctagcaagtggagaaatagcagtccattttctcttgcaagccctttaccattgagttgaaattcttgaattgccagagagccgtatcctccaggtcccactcctgttcattgccccttaggtctccaaaatgtaaattctaatgtttaccttgtaccatggaaaacatgaaaagagtcttagaagtaaagaacaacaaggaaaaaaatgtttgttctattattccctttttatatagcagcaaaagataagaataaaatcacataaccaagttgaagcttccttggcaaagctgttgtcttagctgactctttccctttattcagatgttttgggattgttctacaaatagtctatttgagcaaaaatgaatgattatgaaagaaccgaagaattatcacctgacttcaacttttgaaagctttagtaaggaatttgattaaattttatatactggatgtgtatgcatttctgcatttcatatcttttgcttttaaatcagccttcaaagtatctttaggaattccttctgtatccatgtttaccccattatgtaaatagatctttggagtgactagtggagtttttctttaataaggaagcaacaagtctaaccttgtactataggataggcatttattttagattaaggagcccattcaacatgtcaatgagtcaacattagagtcctcaaagatagcattcttcaacctgtttggtaactgaggagttgataaaatacttttgagatggtggggtttgtcagaaataaaatattttctatcctgaccagtaggtagaactttgagtacatttcgttaacttggtgggaagcttccattgtactagttccaagtaaaaaaggagaaagtatgatctgggattttgtgttatgatgagag

SEQ ID NO: 94454 - DNA, 1045 bp, Homo sapiens
aaattagctgagcatggtggtacgtgcctgtactgtcagctacttgggaggctgaggcacaataattgtttgaacccaggaagcagaggttgcagtgagctgagatcacaccaccgcactccagcctgggtgacagagtgagactctgtctcaaaaaaaaaaaaacaaaaaaaacacacttttttatatttctttttataatgttttaatgtattcttaaatttcaagcaaatttaagataaaacttgtaatggctatgccattgaaaaacttaattttttatttttgaggcccatgggccaaggtaacccctaaggggttttcttaggcttcttggagcttagatttgtatgtatatcaaaatgtctttaaaatgttaagttgggcagaaggcagttgaagtgagctttcaaggtatgggaggttttctacattttatactatttcaatctatgcctttaaagttgcttatgattttagctgtacactcattttttaaggggaagaagtttccttggaccattcgcctttcttagatgtcctcactccctgtgatctcataaaactgcctatttgacatctctatctagaaatctaattaaagctcacactcagcatatccaaaactgaattcttggtcttccctcccaaacttgcttctccttcagtcttctccaactcagtaaatggcaatgccatacttctggttgctcaggccaaaaaccctgaagtcatccttgattcttcttttagcacccatatccaatccattagcaaatctggtagaccctaccttcacaatatatctaaagctgaccacctcttttgacctctactattaacgccctattccaagccaccatcatctcttccctggattgaagctgtcatctacaaaaattcttcttatatccttgcattcctacagtctgttccccataaagtagccagaatgattatttttaaaacaagtcaactcataccattcatctgctcaaaaccattcattggcttctcatctcactcagagcagtcaaagtcctta

SEQ ID NO: 94455 - DNA, 1048 bp, Homo sapiens
acattccatgctcatctttgtatttcctctgcactaactctgcaaggtgctttttctctaagatctggtctcttttagcagaaaatggtatttagaaaccaagatctgggcagtaggtatgctcattgtttggtgccattgctgttcccaagccctctcatggaacagagctagggaacaaacatgaatgcatgtgcatgcacacacacacacaccccactcatacacacacacctatacatctctgtatctacacataccgaaagctgtaggagtttataccagtacttccaattccaaccttattctagttttcaccctttccaaatttgtaattctctgactataagaaatctggctcctgctctttccctgctgccactgaattgtatagaggcggagtctcgggtgcattcaagatccggcttcactcgtaacccactgccatggccgaggaaggcagtgctgctggaggtgtaatggacattaatactgttttacaggaggtgctgaagaccgccctcatccatgatggcctagcatatgaaatttgcaaagctgccaaagcctcagacaagtgccaagcccatctttgtgtgctgtgtgtgcttgcatccaactgtgatgagcctatgtatgtcaagttggtggaggccctttgtgctgaacaccaaatcaacctaattaaggttgatgaccagaaactaggggaatcggtaggcctctgtaaaactgacagagaggggaaaccgtgtaaagtggttggttgaagttgtatagtagttacgaactatggcaaggagtctcaggccaaggatgtcattgaagagtacttcaaatgcaagaaatgaacaagtaaatctttggcacacacacacacacacacacacacacaaaagaaagaaaaaataacctcaaaaataaccaatctattgctgcctcaattcacagtcccctccctgctgccctcagacattctcctcaggctccacactgcagcccaggaaagaagcccttcaccaaacgaggccaaatatttctttgtggg

SEQ ID NO: 94456 - DNA, 1002 bp, Homo sapiens
ataggatattgtctccattttataaatatggaaaccaaagactagaagttaaatgacttatccaaaattgttagctacttctatattgaggactagaactgaagtttcttggtttctagggtctttctaataagccctattactgagcacctgtttgtgtgaaggggcagctatggatgccatttaaactcatgtaactgataattaacttttggaatgtagttaccaaatcaaagagcttaccaaaaaatagcccaagactatttaatacaatcttatatagttaccatttgttattaagttaaacctcagttggtattatgaagaggaaaaacattaagctaaacctaaaaaaaatgaatgggtcatttaagtttcagaaaggagcctcattacaatttcagatttgagtataatttccatcaccctaattcaactatttgagctttttttaagaatacatgtgacttgactagtattagattactaaccatttcccatctctatattaaacataaatcacagataccaagattcactttagatatgaggaaaatggttttaatggacacaaaggagtcagccacgttggaaccaacatagtttcataccacgttgaaaccatgtgtttgatatgcaaataacagcaaataattttttcactcttgtcaatgccaatgcattgaaaggcccagaaaatgagaaaaggataacaaacttttgataaaaaggtaagaatttctgtgtggatgttcctcagtttctgggaaaattttgctacaaaagagatttaaataatttaggaggcagtcttttgcatggtatttttggcttacctttgaatctagtggacctgtaatatgtaagaatgaagaatgtgcttagcaaactgaaatgagaagatttctatttcttaaatttctattcctgagattatataaaatttcacgcaaagagtaagcattagctttaaatacttcttccaaatgttcctagaatttt

SEQ ID NO: 94457 - DNA, 1055 bp, Homo sapiens
actacaggcgtgtgccaccatgcttggctaaattttgcatttttagtggagacggggttttgccatgttggccaggctggtcttgaactcttgactttgagtggtctgcccaccttgatcatgttgatctatataattgatcggcctcccaaagtgctgggattaaaggtgtgagccaccacacctggccccataaataccatttaaaaaatttaaatgtattctcttatcagtcaaaaagcacagttaataaccaactgagtagccaaatactgctactcaattaattcagaagacctcaggcccaagaatacctagaacagacttgagggttaatttatggtattcaatagctcttttcttcaaatgcagtttcttctgttgcactatattaaaactattaaatttatacagcattaccagcaaatgcttaccacaacagtaatatctgttttaatgacttcttttctcccttctagtctgtagatgttgactggccacctgctctggatgactagctttcaaatttggagacaaagagtatggttttcctggcatgatgtggacatccatggagcacatgccgtaaaatggctgtttacccaccataacggtgtcttgaaaactatttggatcatgttgatctatataattgttaatttgttgtaacatctcaggatctatatatgtgtatattttgtgttaaattgttccaaggatgtcttaggatttttctcattccctctttcacccccacaaaccaaactatgaataatgaaataattctccttaattctttcatttagagaggtgcacaaacaggacacattctctgttaacctaagaagctgtaatttcagcaagatttccctccacaagagatataccacctttaaaatcatgttctaatttttgtaaattatctgaataaaagttatatctagatttatgcagcataatatcctataatagtctaagattgcaaatgcaaatctgacatcattattttccccaggaagcctcaaacaagctattaccaatgaagttcttttggc

SEQ ID NO: 94458 - DNA, 1032 bp, Homo sapiens
gaaaggtcccggtttattatgcacatcgatttgtaattattatattgaaatgtcaccctaaacaagatgtattcataacttttccagacatatccttttgtataacccttttccttcaccaaaaaaaaaccaaaacaacccacccctgacagtaggtatgtggttctccctaaaacacgcaaactcgacggggcgcagtggagcacacctgtaatcccagcactttggaggctgaggagggcagatcacctgaggtcaggagttggagattagcctggcagatatggtgaaaccgcatctctatcaaaaaaatacaaaaatcagccgggcatggcggtgtgaaatgagtaatgatagactgggttatgagaagtcccacagagtttgaacctaaggggacacaattcattttagttctctcaaggaagcatctgtggtgagctatggatggtgagggaagggctaagacaggattcactgggtggcaaagctctgactctgggactgtgtgtcatattctcccctaggacttaaaaatcgaccagaaaacacctttgcgcgtccttcaccgaaggcccctggctgtgcgagctcgcgtcattcacttcatggagacacagtacgtggatgagcaccacttccgcctccacttgaaaactcaggctggcacgtatccttccacctgctgcactgccgccatcgaaccagaactctattggaaaagttcatggtcccctagaaaacagggtcagcttggtctgggagggattcgggaaaggattatactgaagaagaatatttttgtttgtttctttgttggatgtggttttttcccacttaattttctttttcttttcttttcttttttttttttttttttttttgaggcagagtctcgctctgtcgcccaggctggagtgcggtggcgccatctcggcttactgcaagctccgcctcctgggttcatgccattctcctgcctcagcctcccgagtagctgggactacaggcgcctgccaccacgcctgacta

SEQ ID NO: 94459 - DNA, 1252 bp, Homo sapiens
tagttaaggttggattttaacgtcagaaacacctagctctgccatttacttgtgtgaccttgggaacattacctaacttttctgaagcttggtgttcttttattttatacctactttataaggttataataaggattaaatagtacatggtccaggtgcagtggctcacacctataatcccggtgctttggtaggccaaagcaggagaatagcttgaattcaggagttaaagaccagtctgggcaacaaagcaagacctcatctctacaaaaatttaaaaattagccaggtgtgctggtgtgcacttgtgatcccagctacttgggaggctgagacaagaggattgattgggcccaggagtttgaggctgcagtgggccatgatcacgctgctgcactccagcctgggtgacagagtaagatctcatttctaaaaataaataaataaataaataaaatttaaattatatatataacatttttagtccaatgcctggcatataataagttctcaataaatggtgtttactattagcattactatttttagtagagattgacattagaggtgggatgatgactctccctggggattctcctatagattgttcaagaccttcagttgggtttctagcaaaggttgggaatgaatatcttagagctatgatgtctctaatttttttttctttatctgcttttcaaaggttttaatttttcatcctctggaagagaagatgtagatgtgagaacattaggaaatggtaagactgcaacagcatcacctgattagaactaactttctgattatcatcctttctagacagcaggcttagcatagtcactcagtgaaaaacaaagtgagcaaggcccagagcttctccaagggaggaagctttgtggattatggaggcccctttatgaattatatgaaatacaccttaacaggaatcatttcttcagaggccatcctgattgcatacctataggttataagggacttgcatgtgcattaacaaagaggtgcttgattttttttccaaaagtttgattattaattttttcatttaataacatttcagaaggaccagtacagttttcagaatgtacatcttcatttaaaaagtgattctgctgtcttaaccttcatgtctctcattttaccctattgcattaccagaaagatgatgacatttaatcctgaactgtttgaggcttatagttccttcctctcatggaaccaaagcttttccatt

SEQ ID NO: 94460 - DNA, 1044 bp, Homo sapiens
aataattttacatgttgtatcagtgagaacagaaaatagaaaacaaaagatgtgggttgagtgaagtttccctgaataaaaggaatgcgttgttcattttaattattgtatagattagaataaggagcgagaaaaaaaaagctattcattattgtgattctagagtagctaataggtctactaactatccaatgaactcagtaaatataaagacaaaattgcaacatagtatggcatttttagctattcctgcccctgacccctccccgatatggaattttgtatattctccatggaggtaaaagtataaaatcatgctttttttggtgtacaaggatgttcattatagcattttttttttgttacagaaaaattttctacagcttaaatgtctgacagtccctagagttgaaaagatttccatgatataatattaaagcaattttccaaaagcatgtcttaaaaaataatacatatacatttatattcacaaaaatgcctagaaagaaacatcaaattgttaatggttctgcttcagtggcgtgggattgaaaaactgtcttgtatttgatcattttataatttatgtgtataatttttgtaataaaacaaaaaaaattaagatctggttttaaaactcaaatccattaagacgtttgagcactttaaaaagaagcttcatatggtttttagggatctgaatagtatgttttttgccttgctaataattcaaatcatagtattggcagaataattcttcatttctctctgttattatttattttcaattctgtaaattctcattcatctttatacctaatttacacatttgtccaaaaagtatacacatttattttaaaacttttttggtaggatcactaatgactgagttttagaagttaaaaaaaaaaacaaaactatttcctttacagctgccctgataacaagttgatttgagagcagtagtatttccagtttttctggtcattcttttctgagccaatctttgagaattaatttctatttccattaataagttgttag

SEQ ID NO: 94461 - DNA, 1050 bp, Homo sapiens
atcagaggagacacctagattcagtctgttacattcatttaatcacacgtctgacatccaagcctttggggaaaagaagaaagttttgagatggggaggtggcgggggtgaggagatggtggtggtgcaagagtcaactaagtggtagatcaaacagtggttataggaaaatattcccccttcctctcttaccttcctcttttttgccaccacgcctgagacacaaggagaggcagatgttcaaggttatagcatgctgccacaaccctgacacacggtgaggcacaggccctgatggagcagaagcttaaggcactagcatgctggggatggggaggaggagaaggaggaaatcttaggcagtggtctggatagagagaaggaagaagaatttctcttgtcactaacctccttattgagcccagtttccaaatggctattacagtgcaagaaaaaattacataaatgtttgtatgtatgtatgcatatgtgtatgtgtatgtgtatgtgtatgtgtatgtgtatgtgtatgtgtatgtgttgggagaagagtttggagcagggggtactgctaaatgcctccagctgcccacacaactattgtcatttttctattgtcattattctcagtctatatttattttatctttgttattataaatgagtccaagagatgtgtaagattcaaaagaatatagtttgaagggcattggtggtgatttagaaacctcaacatcactgccaatcagcaagtcctgccaatctgtgttctcaatagttcttaaagttgcctacactttatcatcactagcattgctgtaatatattttttcttgcttgaattactgctttagtttacgacaaatcttccttttctttaattcccatctttttcttctaattcacaatgcaaccagagtgggcattcctgaagacaaatatgatcatgctacttcattccttaaaatccttctgtgggaccatattgccttaaggggaatatctaaaccccttagtatgggtccagtagttctgtgatctaagtcctgc

SEQ ID NO: 94462 - DNA, 1027 bp, Homo sapiens
gattatttttatttcttttgatcaacttagttatattgatgtattttatcataatccaaaatgctacactaaattccttagcaattagaaacctttaccggatccatcttatgaacttccttaaaatttgtattttataatatgtgtgtaatgaaaggggcttggttagagagtacacaatagtgtttttcaaatgaaagctagtttttatccctaaacatgatgacttgtctgtgacagtaaaacgcagaagctgctcattagttttacttcttttctttctagttataattattcaatatgttcccactgactgaggaaaacaagcatgtggcccagttgttgctcaatactggtacttgtccaagatgtatcttcagattctgtggtgtggattttcatgcaccttacaaacttccatacaaggtattttcttttctttttttttttttttcaaattaagagaaggttctctgtattttacaatgaatgcttgtacttttgagggcaggtatctattcataactcttttttaaattaaaaaactataataaaatgagtgatattcataattttggaatagtctcagaaatgtaagttccttcttaagtgattatatctagctttctaacatttagtgtaatgggatctttgtggaggaactccctggtgcatttgaacacttgtatagatgtttcctaaaggatatctaaacagaatatcacaaaatattgcttcctcccaggaggggctaatattccttacatgtcctactatgtggaagcattgtgggtatggttgcctttttctgtttttcccattttctgtattaccagttgtgtttataaataggtatttggaatcctctagaaataaatgcttatcatcattattactgttattaatgacaaaagtaatatacagagatctttgacatttatggtaatatacagagagctttgaggtttaatataacacttttttgcataagatatgtaacatctttatgaaatgtttgattctaaaa

SEQ ID NO: 94463 - DNA, 1028 bp, Homo sapiens
aaggtagataaaaccacaaagatggggagaaaccagagcagaaaagctgaaaattctaaaaatcagagcacctcatctcctccaaaggatcgcagctccttgccagcaacggaacaaagctggacagagaatgactttgacgagttgacagaagtaggcttcagaaggtcggcaataacaaacttctccgagctaaaggagcatgttctaacccgtcgcaaagaagctaaaaaccttgaaaaaaggttagatgaatggcttactagaataaacagtgtagagaagaccttaaatgacctgatggagctgaaaaccatggcacaagaacttcgtgatgcacgcacaagcttcaatagctgattcaatcaagtggaaaaaaggatatcagtaattgaagatcaaattgatgaaataaagtgagaagacaagattagagaaaatgtttattgtatcaaccttctattgttgaaccatccttgcatttctcaatgaactttgattagtcttgatttttttctgatatgcaattccaaattctattctaaaccagttggagtggttcacatttgtaatcctagcattttggaaggccagggcaggaggattgcttgaggccagaagttcaagactagtctgagcaacataacaagactctgtctataaaaaattttaaaattggccaggtgtagtggtgtgtgcctgtagtcctagccactagggaggctgaggtgggaggatccctttgagtccaggagttcaaggctgcagtgagctgtcatcataccactgcactccagcctgggtgacatagcaagaccctgtctccaaaaagaaaaagaactctattctaatattgtgagactgttgcatacatgttcctaggtgaaattgaattttttttctttgtactattctggttttgtatcaaagttttatagctagataggtttttctgttgagtctaatttccttttttttttcagacagtgtctcactctgccacccgggctggagtgcagtggtgcagt

SEQ ID NO: 94464 - DNA, 1050 bp, Homo sapiens
aaaattcttggcaaaagaaaaggtaggaaaacggtggaatcaagtaaagtttccaagcagcaacaatcttttaccaacccaacactaactaaaggagccacggttgctgattctttggatgaacaggaagctgcctttgaatctgtttttgttgaaactaataaggttccagttgcacctgattccattgggaaagatggagaaaagcaagatctttgatatctttcatgtttgcctgcagttgaacaatactttagagtactttttaaaattatttctcacaaagaaatgaatgtacaatccaatgaaaacatttgttattggctatttcaggtgttttgctgctagaaattattaaagttacacactagtatgttggtctggtgacctggttacattttattatacacattattggaccataaggacatttgtttcacctagattttaagattatggagactgctgtcatttttatcttatttaaatctctaggtttattggaagagtaagattgatgaactatagcatgcacagtttggtacagtagagatcattaatacttttaaaagttctgcattaattgacttggaatccttagaaatggagtggtgacatgtcagtatgagaacaggcaaaaggtaaatttttttttttttttacaaccttaagtaatctcaataataaaattttctgatctgtattatatccagtgttgggtttatattttcacccacaaacaactgacactgctatcttttactgtatttttaaaaatttaatttgaaaaggtcacccagaagcattctgaaggaaatggttctagaattatagagtatgtagccctaatagttttccctcctagcaaaaagtctgaaatttatctttcttacaaactgttccatttcttctaaggatcccttaattatttatctctttaagccaggcatggtggctcacgcctgtaatcccagcactttgggaggctgaggcgggcagatcacctgaggttgggagttcaagaccaccctgaccaacatggagaaaccc

SEQ ID NO: 94465 - DNA, 2858 bp, Homo sapiens
tttatgaaggccaaacatggtgatccatgtgtgtgatgaagcaaaaaacttgaaagaagattttacttgcccgcgagatcttttgatatcagaaatgaagtactttgctgaatatttatctatggatgcccagcgctgggaagaggtggacatttcagttcattgcgacgttcacattttcaactggttgataaaatacattaaaaggaacactaaggagaataaagattgtgagatgcccactttaggtaaaaaacaatctgttgcttaatttgtagtgaaatttgtgtgtcacctggtagtttcttcaggccaaaagtgaaatgtggaaaattgtttggacaccggtgtttatgctcatattagtaacagccttttaggaaactgataacctcatcttttttagtaaattatagtaaatttatggcaaatgaacagatctctagatcagcagttcccaatgtatggtgtatggaccagtgggatactagggacccttttagagggtctacaaggtcaaaacagtttgcctaataataccaagatgtcacttgactttctcactgtgttgctcagatggtacaaaagcaatagtgggtaaaactgttgaagctttagacaagatcaaggcaggggcaccaaactgtactagcagtacatagttacatagttaataagaaaaaaaaaaagaaaagaaaaaaatctagtttcacttaagaatgtccttggtaaagcagtaaaaattactaattttattaaatcttgaccattgaatatacatatctttactgtgatgaaatggaaagtccactcctactgcacagcaacacatgattctcttgaggaaaagcacttgtgcgattattttcagtcctgaggtaaattagctgctcttttaaaaattgaagaccatttttacttgagagaacaactgacagagaaataatggtaattcagacttaggtgtttggcagacattttcttgaaaatgagctgctcagttaaagctgaaagcatttgtcacctgctgtcagtgacaaaattcaaggtttccagtgagaattacagttttggaaaacttaacttgcttccatgtgcttgacagaaggcttctcaatacctgacttttctgatgagattggtggtcatattaatgaatgtgatttttaaatatattgtacaatgaagtatttcaacatttggaatatctgtataactcattgagccaacattttccaaatgaccaatacattttattttcaaaaagtcatgcgtgagtgaaagattcatgcaaagtgaaagataaattagagaattttgttattaacggagtcagaaaagttcactgatacagttcagatacattgcaattaacctttaagaaactaccatttgtcaagtttggtgtaggctacccacaaattgaatgcagaaacagatatgggaatccagttgtcttctgttaagtcagacattgaagagatttgcaaaaaatatcaaacagtgctactctttactcttttttttttgagacagagtcctctcttgtcacccaggctggagtgcaacggtgcaatctcagctcactgcaacctctgcctcccgggttcaagcggttctcctgcctcagcctcccgagtagctgggattacaggtgcatgtcaccacgccctgctaatttttgtatttttagtagagacagggttttgccttgtttgtcaggctggtctcgaactcctgacctcaggtgatctgcccgcctcagcctcctgaagtgctgagataacaggcatgagccacggcgcccgacctaatatttttcattttagaaaaggtggttattttaggcagggcatggtggctcacactggtagtcccagcactttgacaggctgaggtgggtggatcacttgaggccaggagttggagaccagcctggccaacatggcaaaaccccgtctctactgaaaatacaaaaattagctgggcgtggtggcacccacctgtaatcccagctacttgggagggtgaggcatgagaattgcacgagcccatgaggcagaggctgcagtgagccaaaattgcaccaccgcattccagcctgggtgacagagtgagaccctttctaaaaaaaaaagaaaagaaaacatagttattttaataaaaatatgttaacatgtaaataggttttttgttctttgtaaatgaattcatattttttgatttcctctattttaatttctaatgtgataaatactggcagatacaacccacataaagaaaaaccctttaggattctcagtttttaagattgtaaaggggtcctgagatcaaaagttcaagagccagtgttctaaatggtagcatactactagtattactagtagaattactgtaataagaataattactgagtaatatttcaatgggcatatacttgtatgatcacacttgtggtttaatagtctttctatgcactagaattgctatttacagtagtattaaaatagaactcttatggaaaataaatctatgctgacagtgtaaaagttttttaaaaaacttaataatttattgtattctttagtgatcaaattaataggagaggtttctagtggtccttaaataaaaattacaagattgctaaatcaaaaatttcagccagaatccagagattccagactaaccagctataatatgtatgtgtgcaataaaaatcaaaacatgtagagagagaaaaaaaattattcgattcatcatatttatgtgtgtagtaaaggtaaaagaaatgcagcaagcctggccaacatggtgaaaccctgtcactattaaaaattcaaaaaaaattagcctggtgg

SEQ ID NO: 94466 - DNA, 1050 bp, Homo sapiens
agtactaatacatgaatgattctaatgtttagaatcaccagtaactaataacaacttgtcatataacatatgcaattagaataaagcttccatttaacatttgcctaattcccaactcttggcctgttcaaactatatttaatttgtaatcctttatctagcttagcaaaattatttggtattcaaatcattcataccttttcctgttgtccaccaaatatacaaaccctgcctctactaaaaatacaaaattagctgggtgtggtggcacacgcctataatcccagctacttgggaagccaaggcaagagaattgcttgcatcctggaggtggtggttacagtgagccaagatcatgccattgcactccagcctgggcaacaagagtgaaactccatctcaaagaagataataattaaataaataaataaaacaaattgtttatatcacttgcttgtaaaattgaggctctttctccagagataagacatgggatgttcatgagtatttgaatagtcttttcgaagaattaaaatcttggagagatgtatactggcgattgtggggaacaatcaattggctgacttgttcaagatgttatcaggtaagatttttttttttaaatatcctgctctgcaaatattgagagcaagattattttgatatctgctgtttaattgatatgtttaaatgtgttttgacaatatccaacatctttttaaagaaactagtggcagctgggcatggtggctcgtgcctgtaatcccagcacatttagagaccaaggcaggtggatcgttttagcccaggagttcaataccagcctgggtgacatagtgagactccatctcttaaaaaaatgaaactaggcccggtatggtggctcatgcctctaattccagcactttgggaggccgaggtgggcggatcacgaggtcaggaaatcaagaccatcctatctaacatggtgaaaccccatctctagtaaaaatacgaaaaattacccggttgtggtggcacatgcctgtaatcccagctattcgggaggct

SEQ ID NO: 94467 - DNA, 1031 bp, Homo sapiens
gccagtactatgctgtctgccatcaatattcacaagaatggaacaggaatttggattagtgataacagacagtagggcacagagatgcaggaaagtaatgcagatatggttaaataatccaggaccacattcacccagagaatgtgcatatgtgcttgtttataagactactttaatattggtggttactatattgtaatttaatcttaatatcaaggaatatacatttacttgagtgatagaggtacaattcaacaaatactgagtacttatgtgcctactactgttctaggttctgtgaaggaattaaaaaatatatgaagtaatgtaagcctgctccaaatataaaaattcttatgtctatttcctggatattgtgctagccagaggttattttatcagctcttgattgactgattcattcaaaagaaatttaggtaaatatgtttgaaagaattcaataaaaaatcataatattacatttataatagatttttttttaacttagaaacaacagtcactgttttcagaagaagaagaatataccactggatctgaggtcactgaagatgaagttggagatgaagaagaagtatccaagaaacaaagtattggtttataagttaaaatcaaatctccctgtttatgaaggggttacattctgaagcctttaatgcaagggatggggaattggttttatatagagagtaggttgcaacatagaaaaaaaattgaaaggagacaccatcaagatttcctaacccgggcatgaacacaaaatactcaaagctgtaaagaaagggcagtacactgagaaagaactctccaggttttcacttcaggtgcaactaaatgtgtgactcatttcagatgaaatgtgatctgagacgtgtagctgagatgatttggagtgatactcaaatgaaccattaaataacattcatcaatgtatgatttttttttttagtggaaagcatgttttttttgtgtttgtttttttttttttttttttgaggcagagtctcactctg

SEQ ID NO: 94468 - DNA, 1058 bp, Homo sapiens
gaaagagtgctcagggaaaatttgttccaaactataaccatataataaattatgtgtttgtaaattatatgtaggtctctgaaaaactttaagatgcactgtttctatttttttaagtcttaatttgccttataactgacatttcttcaaattattcagagaacagactttaataatgtgtgacaaaagagcaatttccattgaaatattgaagtgttacactcagtttacacgtacagaaatcattctttttagtgagtcttttagttgataaatgaagctagatgttatttgataactggctttgccaaggtttttgaactgctgtttagaaattttgttcccatttatatttgtttcaattgtttgatactgtggaaatagacttttattttcgaaagaaaatgtcttgtagtacatattatatgtaagtactctgttaaataccagagttttttttgtagtttactgtgttttctgattaaaggatttggatttgtacatgtaaacagtgctgtaatggtcacgactagataaggaaaaaatatatatgctcttttgatttttaactgatggtaaaaaggcaaactgcttctcccctgggaggcctataccactgaattaatttttacaaaccagagtttatcagaatttgattctcttcagaatgcttttggccaggtgtagtggctcacgccagtaatcccagcactttgggaggccgaggcgggcagatcacctgaggtcaggagtttgagaccagcctggccaacgtggtgaaaccctatctctactaaaaatacaaaaagattagccaggcatggtggcatacacctgtagtcccagctactcgggaggctgaggcacaagaattgtttgaacccgggtggcagaggttgcagtgagctgagatcatgtttctgcgctcctagcctgggtgacagagcaagactccatctcaatttaaaacaaaaaaagaatgtgtttttaattttgttaatgtttgtctgttatacatagcactggtaccgcaaacattttacttaaactcttaatag

SEQ ID NO: 94469 - DNA, 1035 bp, Homo sapiens
gatagctggtattgtcatgattctgattagttcactactgctactttccctgtggcctaggctttgcctatttccagtgggcgagctagctagatcctcctcccttaaataagccagtgtttttaagacagaatactacttgcatagtggacaataatatcttaaagaactgagcaggatgaaaagaatttgatagaaagcaggtttgaggagcacattggaggttggcaggtttcgaggctgcttgagaggacttgggccgatctgggctgggcttggacgtgaccctggcacccaggcaggtggatcccagctggggcttccattcacgactttctggtccctggcaggacagagcgggatgccaccagcttgtccaaagggaagttccaggagctcctggtgggcatcgttgtggagaatgacgctggccgcggcgagatcaacgagttgaagcaggtggaaggggaggcttcgtgcagcagccgcaaaggaaagctgattttcttctatgagtggaacatcaaactgggctggaaaggtaacaggggcctcagggtactagtggggctggggacaaagtgcgttcatcattcagcgaatgtttttacagcccctgctatgggcctggcacactgactggctcctgaatcagcgttggtagatcctgacactctggccacacttgagttccatgggccaagaaggatggggatttcccttctcgcagcactcgcagctgcttagagctcattgctgtcagctgggccctcttctaccaggcccttgtgaacaggagtctcccggcattgctgcctggagcactcttcccccaggtagctgcctgcctccttcaggtctttgtcctgagtaaagccatctctgtgcatccttggagactcctgccttgtgccatctttcttccctactttatttttccccaaggcactgaaacttgctttacaaaactattttgcttactgtcctgctccctctttctgtcattcagtagggtagggatttcttttaaaaacg

SEQ ID NO: 94470 - DNA, 3029 bp, Homo sapiens
ggccctggagtggtggaaccctgtgagggcagctgagctattcagtgaggtagggcagtttttcataaaatcaatttttttttcttttttgagacaaggctcactgcagccttgacctcccagcaatcctcccacctcagccttccaagtaactgggaccacaggtgtgcgccaccatgcccagataattttattttgtagagacagtgtctccctgttgcccaggatggtctttaaactcctgggctcaatccatcctcaccacagcctttcaaagtgctgagattataggcatgtgccacagtgcctggcccagttgttactttgtattataattgaagaacccattttgctcattttaggcatcgttaaagaatctggagtgaagcacaagggattgattgaaatacccaatctttctgaggaaaatgaagtagatgacactgaggtatgtgatcaagtttctatttcttttgttcttttttcagtcaagcttctgctacagacattgggcatttcaaatagtgttgatcagactgtgtggttcctgtgtggtagttcgggtgccttgtggagggcctgtttgccgagaaggattgccgtactgtgggggcagcgtgttgtgtggagctggagtggtacaggaaagagagtaagccccaggaagccctgagctcccccgaggaccaggcaaggggcctgggcagctggctgcaccctccttagcctcctcatctgtgaaaaggggttaatttctcttccaggggtgttgtcacgttagatgtgacagtgtgtgcactgtaaactgctcaggcagcttgcatggcttgatgaatgtgactctccctcttctcctgcacctttgccgtttccctttaatggtgaaaagtctcagcctttagctgctatctctcccttggttatgcctcacggttttttgtaaactacccagttagtacgtgttgcttttgtggctctcttggttctcttgggagacagagccttgtgtaactcccatgcttggcttcaagttagtgccctcttttggctgaaagctgggttttgggggtgagaccatttgtacagccgctatatttttcaaacgaggatagtctgacaaaggattttttttgatttgtgaacgtatttaacatgaaggcttttcaagataggctgactcctgcccagcagtatgtcttatggcacgaaggttatgcagtgccacaggccgggggctgtcccagacctctgtcttcagttatgtggttcctctgctcagggcctgagattccactttgttatattcagatccatcagctgagaaatttttcaacagaatgtttaactggtttttaagatttaatctctcagtagcattacggaacaaactctttagattcaaactggggcccgagatcaggcccccctcaactgaagcatcgggacactaaattttttcaaatcgacccctttttcttctgggaatactagagacatccccacagccctctgttgcttccttctcccttggcctcccccttcttccctctcttcttccttccctctgcctgtcttctactcttctccctttcccaattttcctctctgccaaaaaagtatataatccaaggctgggttgtatgggaacttgatttccctaattacggtggcttttgggttctataccagcactgttccatgtaaatataatgcaagccacatgtgcagtgtaagttttactagtagccgtacttaaaaagttaaagctgtggctgggcatggtggctcacacttgtgattccagcactttgggaggccaaggtacgaggctcacttgagcccaggagttcgaggctgcagtgagccatggtcatgctactgaactccagtctaggcaacagggagacccttaaaaaaaaattaaagccaggtgtagtggcatatgcctataatcccagctgcttgggaggttgaggggaaggattgtttgagcccaggagtttgggtctagcctccgcaacataacgagatgcaagctcttaaaaaaaaaaaaaaaaaaagataaacaggtgaaattaattttaataatatattttatttaacccagtatatataaaaaagattttagcatgtaattaatataaaaattatgaggtattttacattcatttttggtagtaagtctttggagtctggcacgtattatttcacacagcacatcttgattcaggccagccatatttcaggttctcagtagccacatgtgactagtggctaccatactggacagtgcatttctagaccccatgaaagccatggaccacatcagcaataggatttatatacatacacatgcacaactttgtatgcaaattaaagggtttacattctatgaagtccatgcaagatttggcccccaaccctgtcatggaccctggattaaaaacccttaaaatcctgccctatcacatctcttacatctacttctttccttcctccactgccatagttctctcatccatacagcccaatgttgtaagaatacatcaaaccagatctttctttggtttctatttttctgatttgtaggtcaacgttgagtaaaaagaaaggagatggggttatactgaaggatcttatgaaaactgcaggcactgccaaggtcagggaggcccttggagattacctgaaggcacttaagacgggtaaagaaggcatcccttgtgaatcagaggggtcccttttctatttacccaagttatactctacactgtggtcagaggctccagaagcaagtttatacttcagaataaattgtagtctggaagttgagagctagtcatcgttaagaccataattagtgataattagtattgtacacagcatgaaccattttgcctacagaactgttaattgtagttttctggaatgaaaatcagttgttcgtgtaattacttgtttaatgtctgacttccttgctagactataagctccatgagggcatggaaggtgtctgtcttgttcactgc

SEQ ID NO: 94471 - DNA, 1097 bp, Homo sapiens
cataaccttcgtgccataagacatactgctgggcaggagtcagcctatcttgaaaagccttcatgttaaatacgttcacaaatcaaaaaaaatcctttgtcagactatcctcgtttgaaaaatatagcggctgtacaaatggtctcacccccaaaacccagctttcagccaaaagagggcactaacttgaagccaagcatgggagttacacaaggctctgtctcccaagagaaccaagagagccacaaaagcaacacgtactaactgggtagtttacaaaaaaccgtgaggcataaccaagggagagatagcagctaaaggctgagacttttcaccattaaagggaaacggcaaaggtgcaggagaagagggagagtcacattcatcaagccatgcaagctgcctgagcagtttacagtgcacacactgtcacatctaacgtgacaacacccctggaagagaaattaaccccttttcacagatgaggaggctaaggagggtgcagccagctgcccaggccccttgcctggtcctcgggggagctcagggcttcctggggcttactctctttcctgtaccactccagctccacacaacacgctgcccccacagtacggcaatccttctcggcaaacaggccctccacaaggcacccgaactaccacacaggaaccacacagtctgatcaacactatttgaaatgcccaatgtctgtagcagaagcttgactgaaaaaagaacaaaagaaatagaaacttgatcacatacctcagtgtcatctacttcattttcctcagaaagattgggtatttcaatcaatcccttgtgcttcactccagattctttaacgatgcctaaaatgagcaaaatgggttcttcaattataatacaaagtaacaactgggccaggcactgtggcacatgcctataatctcagcactttgaaaggctgtggtgaggatggattgagcccaggagtttaaagaccatcctgggcaacagggagacactgtctctacaaaataaaattatctgggcatggtggcgcacacctgtggtcccagttacttggaaggctgaggtgggaggattgctgg

SEQ ID NO: 94472 - DNA, 2234 bp, Homo sapiens
cgcctgtagtcccagctacttgggaggctgagggaggggaatcgcttgaacccgggtggtggaggttgcagcgagccgagattacaccactgcactccagccttgccaaagaacaagactccatctcaaaaaaaacaaaaacaaaacaaaaaaaaaaaacaactaatgaaatgctgtagtatcttaacactggctttctggttttatcattctaagaatcccagagaaaccagggtattcttaggaaagaatggattcctgggaaaataaacatctgcaattaactgtaaacaactgcatcaaagtgttggctttagaatttgaaatgttcctatctgggtttttgtaggacctgagggcactcgctttgctcctgtcagtacacactcccaaacagttaaacccagctctaattccaactctgcaagagcttttaagcaaatgcaggacttgtctgcaacagagaaactcactccaagagcaagaagccaaagaaagaaaaactaaaggttagctttatggactactatcattacctttagggtgggaggagggagtaatacacttggtgtaactggtttaagagttgtgtgttcagctgaacctcctaaatataaatgctagaaacaaaattaacttcccacatccccccctaacgtgatcttaatgactttcagagaagtttcccttttggcatgtgttttcacagatgatgaaggagcaactcccattaaaaggcggcgtgttagcagtgatgaggagcacactgtagacagctgcatcagtgacatgaaaacagaaaccagggaggtcctgaccccaacgagcacttctgacaatgagaccagagactcctcaattattgatccaggaactgagcaagatcttccttcccctgaaaatagttctgttaaagaataccgaatggaagttccatcttcgttttcagaagacatgtcaaatatcaggtcacagcatgcagaagaacagtccaacaatggtagatatgacgattgtaaagaatttaaagacctccactgttccaaggattctaccctagctgaggaagaatctgagttcccttctacttctatctctgcagttctgtctgacttagctgacttgagaagctgtgatggccaagctttgccctcccaggaccctgaggttgctttatctctcagttgtggccattccagaggactctttagtcatatgcagcaacatgacattttagataccctgtgtaggaccattgaatctacaatccatgtcgtcacaaggatatctggcaaaggaaaccaagctgcttcttgacattaggtgtagcatgtctacttttaagtccctcacccccaacccccatgctgtttgtataagttttgcttatttgtttttgtgcttcagtttgtccagtgctctctgcttgaatggcaagatagatttataggcttaattcttggtcaggcagaactccagatgaaaaaaacttgcatcttcagtatacttcctaaagggcaatcagataatggatatgttttatgtaattaagagttcactttagtggctttcatttaatatggctgtctgggaagaacagggttgcctagccctgtacaatgtaatttaaacttacagcatttttactgtgtatgatatggtgtcctctgtgccagttttgtaccttatagaggcagattgcctccgatcgctgtggttcttattatcaaaattaagtttacttgtatacggaacaaccacaagaaatttgattctgtaaagaatcctctttagctgtggcctggcagtatataaatggtgctttatttaacagaatacctgtggaggaaataaagcacacttgatgtaaaaataattgttttatttttattgacatgactgattgattgattgctattctgtgcacttaattaaactgattgtgatgacttttcatttgtttacatacgttgcttcagtcttctcaggtgaaagtagtgagaaaaccgtgaaagaggggggaaacatttatccattatatgctgtttcactggaagtgttaccagcagtccacagaactaatgtgtccccacagacttctcaatcctctccacaccgaagtgcaaaaccacagcagggagatgtgcagggagatgtggagcaaaacacagccaatttgccctcacctcaacatgcttttgaatgcaatataccactgttttacgacctaagat

SEQ ID NO: 94473 - DNA, 1117 bp, Homo sapiens
cttaaagtcactaatagcattattttatgcccacgaaccagtaagtcagaccaaagcctgaaatagtgttttctgaaaaatggaaaaggaaatataagaattttaaaaacaaaccttgaaatcagtttctcaagttaaaattctgatggatgtcacaaatagtaaggtcttccttactgagctctgtcatctgttttggcttttatgcatactgtgatttgggaggctgctgctcaacattctagcccatttccagagtgttccattattctaggacatggctgtcatgggagtctgcacaaggcaactaatgctctagatttaactgccttttttaaatcagtagatcattaattgtttcagttacataggagccataggcagtaatagaaacatcacaagtattgtttccaaaaatatacccaactagagataagaccactaagatgttccctttattacctttcagcatttaatgataccagcttgtagcttccaaggtgatagagtgtgctgtgtacatacaaggcatagtaaacgtgtatttaaaacttgtttttttgtcgcacatggcttaagagtttgaatcagtaagttaaagttacgagagtaaaatcatatgaaggccacacagttaactgaaggacagtttaaaagtgtgtgccgccgcctctgcatagttcttaccccatttaaagaagcacttgctttggaaatttcaactcggttggagaaatcagactgtaggttctgatactggcttatcaagtttgtaataagagtgctgatcaaattggcacagtttgcttcagaaaacacttgactttgaacctgaaaaagaagatttaaaaaaatctccaaaagaccagcataatgaaaccacaagcattaactaattagaaatgacacactgagtttccaaagtactacgtacctttagaaggaaatgtgtcatgaacgtgtagacaatgttgttgtttaaaaaagttctttcatccattaggatacatttaatatattctgcgaaaacaggatcttcacacaaaagcttgatgcagttttttgacatagcagactaaagtggggagaagatggttgagcacttacggttgagcac

SEQ ID NO: 94474 - DNA, 1044 bp, Homo sapiens
cattttggagaattgattttgattcttaaaatgtgtctttttgcaacatatgctctggttacctataaatacattaatttggcccttgaaaacattcacatcctattctttgttagccttatttttccagtccttgttaactctctcagtgctggataataaacctgcatttcttttaaaacatttgttcagtttcggcatcagtgtcttcccccagcactcccttaatctaaattagtaacattttactgtatgaaaaatagttgctgttaactaaaaattcaataggtgagttagacatggcttttcaagtaggattttcagtggcttcagattccatcatacacaagtgtatgttttttctgtgtaagttttttccgtgtaagttttttccgtgctcaaccgtaagtgctcaaccatcttctccccactttagtctgctatgtcaaaaaactgcatcaagcttttgtgtgaagatcctgttttcgcagaatatattaaatgtatcctaatggatgaaagaacttttttaaacaacaacattgtctacacgttcatgacacatttccttctaaaggtacgtagtactttggaaactcagtgtgtcatttctaattagttaatgcttgtggtttcattatgctggtcttttggagatttttttaaatcttctttttcaggttcaaagtcaagtgttttctgaagcaaactgtgccaatttgatcagcactcttattacaaacttgataagccagtatcagaacctacagtctgatttctccaaccgagttgaaatttccaaagcaagtgcttctttaaatggggtaagaactatgcagaggcggcggcacacacttttaaactgtccttcagttaactgtgtggccttcatatgattttactctcgtaactttaacttactgattcaaactcttaagccatgtgcgacaaaaaaacaagttttaaatacacgtttactatgccttgtatgtacacagcacactctatcaccttggaagctacaagctggtatcattaaatgct

SEQ ID NO: 94475 - DNA, 1438 bp, Homo sapiens
acgccactgcactccaacctgggcaacagagtgaagacactgtctgtctcaaagaaaaagccattcttagctcacaagtccatataaaaacaggccatgggtcagatttggcctgagggccatagtttgctaacccttcctctactttgatgagtaattaggatacaggaacatgggaacgtaggaactctcttccctatagccacagatgtgatgacatgtccttgtttacctatgtgtgtggtgataccgtggtgggtatatgctgccaaacaccaaccagattaggttaggataaaggggaagtagcatttccttgcctcttgtgtctaaagggactcatcttgacaggaaaataaattggcttacctgtggaagggatcctaggcatccttggtaagttctgagtgagtgacctgacttgcctgtgtaggatgttctcaagtccttggtctaacccacggtttggcaaattacaacccacatgctgcctgtttttgtataaccatggctacctgctagctaagaatagttttcatatttttaaatttttttttaatatagaatattttctgacatgaaaattatgagattcccatttcagtgtttgtaaagttttactgaaagacagccacacccatttccttactcttgtctaaggctgccttcacactgcctcagcagggttgagctgtgttaacagagcatggccacaaagcctcaaacactatttggcccttcccagaacaagtttgctgactccttgtctaactcagtcttttcttaactggaagaggatggtctgtgttatatttcttcttctccatgattatacttgccctggggaccctaggggatgtggaagatgggaaattcatttaggactgtggtaatgaagcttctgtactttcagagataggatgacagaggataggggcacacatcttagtgacatattttacatctggaatagtcaagaagtggagaagtaaattcatagaggttccaaatagcactctctgacatagtgccagatgcggtccactcagaagatcctgggaacaagccaagaaactggtgttaagggccgcatttacttaaatgtaccacaaaggtcattctatctttgaagaaagaaggtaaaagaggaaagatatgtttaattctccacttttttttttttttttttttttttacctttcccctcctccctcctgcagtctagccaccctatgaaaattatctaataggcagagtggtaccttaatccaagaaagatttggagccacttgcagtaactttttcttttcccagataaagttctaatactcaaaaaagaagagttgatttaagtcccatatccttcaggaatgaggtataggatataaataaattcaaagtaccacattctaagatatttcactaaacattggaatga

SEQ ID NO: 94476 - DNA, 1003 bp, Homo sapiens
ggccaaggcgggcggatcacgaggtcaagagatcgagaccatcctggccaacatggtgaaatgtctctactaaaaataaaaaaattagctaggcatggtggtacgtgcctgtagttgcagctacttgggagactgagaggccagagaattgcttgaacctgggaggcggaggttgccgtgagccgagatcaagccactgcactccagcctggtgactaagcgagacccagtctcaaaaaaaaaaaaaaaaaaaaaaactttctatgaggatggaaatattctttgactgtaccaccatgcatagtagtcagtagcccatcatttgtgagtgttgagaacttgaaatgtgactaaggaactgaatttttactttaattttaaccaaaataaatttaaatagccaaatgtgactggtggcacagcattaaatataaatcaaaacctccacaaattgagcaagaaaaaaatttttcttggttaatacagaaaattggacattgtcttagatacaaagttcttaggtcttagacaaagacctaagaactttcctattgtttcctaaaaacaatcctatcattaatgcctcctataaatggaaagagttgtgtcccacagtttgagctgaccgaatgactgtttccaaggagaggcccaggaaagggcttgagaaaagaaagtccacattaatgaccacacagagttggtagagaattttaatttgtataatttcttcaagaaattatatttggcaacaagaaatgaaaagggtaagtttaaattggttatatctttaatcatttgaacgttgaggttacatgtccaagggccacaatattaaaatattgtgaccattggtgagaacatctcaagacctataatggattgcaagtcatttccagttatgaggaaaagtctttgtggtaatttttatatgggcaactgagcagatcttaagattggttagaggataaagagaaatatataataattacagatttgaatt

SEQ ID NO: 94477 - DNA, 1020 bp, Homo sapiens
ttatcttagtttcaacttttttaaaaacaatttttccctttatctttctttacccacacttcattcacactctcccttgcttgccatcttcggattttcagtatacttgagaagttcttataagataaaatatttaaaataattaacattacaggaataacttggaatctatttcaaaagtcaaacttaattcatttttcttgatatgtctgtagagctaaagtgtcacattttaaaatcctacagtaattttactttattaaagtatatagaaataatgggtaattttaattcatagcatttgcacactgaaaataaacttacgacaattaagatcataacattactagaaatttggattttaaaactaggttcttatagaatataaatattgaatcagctttttagttaaacttattacatttgcacaaaatatgctctttattatacaatttaagtgcaaccattttatcatctttaaccttcagggcaaagatgacgtttatgatcgtatgctgctagactacttcttttcttatcatcagttcatccatctattatgccgagttgcaatcaactgtgaaaaatttactgaaacattagttaagctgagtaagtataaaagatgagcagtaaattccactgaattattttaagcccctagtcattcaggaaggggagaaaaattatgagacaatcctttttttctttttttaaagtgaatgcttaaaaatattaatattcttgggaacattttaattttcattaagaaaacaccaacttactggtttccattgaatagttctgcccagagtttcagctggcctataaaggagtgtggagtagggctgatcacttctgtacatagaagcccacatcctccaccatctgcccagcagattctgaaaacaaaaaacaaaactgctctgcttagggaggcaggcgtagaggtggactccccagccctgctcttgagggtgcgatgagatctatagtgccagctgtgctttggagctggca

SEQ ID NO: 94478 - DNA, 1180 bp, Homo sapiens
ccaggagctcaaggctgtagtgagctgattgcaccactgcactccagcctgggagaccaaaaaaaaatccctcactgtatgttgccagaaaatatctcatacttaaaacaaaataccaataaatagtgttttaatcttttgtttccaaatgatgccctattgtcgttaataactctgttgatctaaacttgattgagcataagacagaatttctactcgtgtcaggagcttagttttagactcattaaactggttgtagtgaggcaatcataggatttgtaagatggaaagtagtaggcagatataactcttaattttttgctacccaaactttgtttttattttcagatgtcctcaaggaacttgtacttttgagtccccatgattttcttcatactctggttccctttctacaacacaaccattgtacttaccatcacagtaatataccaagtacgtatttatctagcacagtacttcaatatggttcgcatttaatcgttctgcacactgaagcatggagatttattttttccatttattcttactgtacacttttaatatcttagtgtctcttggaccttatttcccttgtcgagaaaatatcaagctaataggagggaaaagcaatattcggcctccgcgccctgaactcaatatgtgcctcttgcccacaatggtggaaaccagtaaggtatgttgggatgccaggaaaatccatgttgctatagtacaaagtaatttgaaatttttcccctggcagttatgaataggttagacttaagtgaccaattttgtggatcctaagaagattagattcatttggactttttccttttagtgctctgaaatgttggttgaacatttgcaaaaatcaacaataagcacaagtagtaagttttttttccccctcaaaaattaccttaatagtaagtcttaatatttgtcactaggctaaattataactgggtcatatatctaaatttgaaaagtcattaggtactgtttttttttttttaatttggccatataatcaatgacttcttctacttcccttaaattatattcctttgacctaagcataatattgattgatagatttgtcatcatttttagtctggttcctttcttctaactcatattctaaaataatgccaattctaaattatagagacaaggt

SEQ ID NO: 94479 - DNA, 1188 bp, Homo sapiens
ttttgcagctctttttacctctttcaggcctactcttttgagtatggctgacagtcactttaccattgtctttggacagagaccctggaaagttggttaaagcagttgcctattctccctaatcttttgtgacctactgctttgtaattttgaagacttaacaatcttagagcaagtacttttttaaaaaaatgtgattaaactatttcttcagactagaatatacacacaaaatagcagagctctgaaggtgaggaatgtttaaaagagcttaatgagagtttaacttcaggatagaaagcaaatacgtttgctttgcacacatgtgcacacacagtctgagtctgaaaacatctatcgtagaggacgagtactaccattttgtggctcagtaagcaaaaatgaaattaagttttcaattttttcaaatcatttgtagtctttcaacactttgcacatgatgtatcacgaagctacagcttgccatgtgactggagatttagtagaacttctgtcaatatttctttcggttttgaagtctacacgcccttatcttcagagaaaaggtttgctcattcctacttcttatgttttgttcgtgctactagtaaagagagagaaggttttaaaatcatgtgccccagagaaattgtttttatcctagtttatgcacagaagatgaggctgaagctagctaaccatcaggaaatgtttgtcatgaactcctgatgtaaagctggaaggctcttttatgtttttgtacctgcctgaaaaatacgcaagcaggtatcaagatttcagagattggaaaacatttccaaacacagtaacaagctgggcactttgtaaagattctccagctggaaacttctttggcttagattagatcatttgcagtttcatgcgagatgactataaaacctacctgtcttatgtccctataagatactgtgaactctgaacttcttcatatacattcctagaaagtgggacatattatcaatgaaatatgttctttaagaaatctagcaggtttaacattagtagtaatcatctcatgaaaatgacttagctttcactgaagatgtttttgtaattaacctgaatttctagcattagcattctgtagtttacagtagaaaacatttgtgaggaagtttgatctcagatggcatatttatatgtgct

SEQ ID NO: 94480 - DNA, 1593 bp, Homo sapiens
tatatctatttctttctttataacaagtatattttaccatatctgtatgttattacaaagtaaattatcattatttttcaattaagaagaaaactaagactgtagaacattgaatgatttgacctcctcaggtaccttttggtaggtcttctgactgcaaatgctgggttccctctgttaaatcatactacttcctgagaagaaataaaagataaagtgggaaaattctgcatcttaggcaagctaaagaaaagtggtttaaaaattattgccacttcaaaaataacaatggcagaatagaaggtatctatttttatcacctcttgggatctttttgtggggccaaggggaaagcagaaagatactaaaagagatgttcatgtccctttttattcattttaattattaaagggaacagtggctttgtgattaatgactgctgttcagtctattttatatcttacaaggatctgacagttttgttttacattttatagctgcagcttatcttctggtgtcccttataccaagcaattcattccgtcagatgttccggtcaacaaggtctttgcacatcccaacccgtgaccttccactcagtccagacacaacagtagtcctacatcaggtctacaacgtgctccttggtttgctctcaagagccaaactttatgttgatgctgctgttcatggcactacaaagctagtgccctattttagctttatgacttactgtttaatttccaaaactgagaagctgatgttttccacatatttcatggatttgtggaaccttttccagcctaaactttctgagccagcaatagctacaaatcacaataaacaggctttgctttcattttggtacaatgtctgtgctgactgtccagagaatatccgccttattgttcagaacccagtggtaaccaagaacattgccttcaattacatccttgctgaccatgatgatcaggatgtggtgctttttaaccgtgggatgctgccagcgtactatggcattctgaggctctgctgtgagcagtctcctgcattcacacgacaactggcttctcaccagaacatccagtgggcctttaagaatcttacaccacatgccagccaataccctggagtgagtaaaattgatactcttttatctgtatcctcaaatagattggaaatacctgtttttcccctggtgggaagtggtggcagaatatagaatagtctcaccattctttcttaagaacttaatgtgtatttgttttcttaaatacatatataaaatgctgtgttgttataaaattgataactgtgtagataacttttcttagggtgaagttaaagttgcatatccagtaaaacttacctgttttttaatttgtggttttgtaaatgtattcttcatgtgtgcctaatgaaaaaagccagcttcatggtacagttttaaggaattgagtactttgctatttaaaaatcagatacttagcaaaatctacatgctgtggtaaactgtgagctagacaattttatatctaaaactagtagtattccgcagtattttttctcaagctgcatccaaacaaatgaaat

SEQ ID NO: 94481 - DNA, 2564 bp, Homo sapiens
tgctgaagtgctctctagtgttcttaagctcaagaaggccatgatatgacttatagggaaaatacgtgttagacacatttcattcatatgagttttaatactattggcagtgagttaaacgttaatgaatcaacaatatatactaaataaggtatctttaacagaaacactcataaaacaaagtaaatgtatcgattggttgacaaaaatattaccagaggctcacagaaacttaatcgtgtatttgccctagtagtaataatttggtatttgctaattcagtatttgccacactttatagaacacaactacctcaaatacaagaattgactataaatcaaaaacttttttttttaatggtttccagtggatagaggaataaaaacagggtggaggggacaggaatggatttttgacaaatttaactttggtatcatataaatgtataattataaataaatgaataagaagtaatctctaaaaatcaaaagcacagtgaagtaaatgaacctaactatatattaaataggtaaatttctagtgggatgtatatgaaggacaaaaagaattgtaaaattttcctaaactgtaatagtaattatattatttgtaataaaagtattattctgaaagtattaatgtatattacaggatgaaacaaataagtaactgttaatgtcattggaaaccaagattttcagcaaaagaaagataaaaatattaaattgtagggttttgcataacttatttaaaactaaatttgaattggaaatatctgtagcagtttatggtatatttgcaaacagaaaatctgttacagaaaatctgttacagaaaatgttttacctaccactgttttctgaaaagacctggaaaccctgtacaacccagaatcaatgagtacccttggcatctagggtatagtctctaggtttcatttcccactgaaagaattggggttccttggaaaaacgactagttacagttcttgggaaagaaatgaatgagaagtttggaatgtcttgtcattttggaaagcaaggaggcagtctaagactactgaggtcatggtaaagaaactcaagagccaacttacggaggtttctactggtcatagattgaacagctttgagcatcggtaataactgcagtggactgtgaatcacatcaaagatgtttaaatccatgagttcataatacctaaaaagaaatttttttttagtttacttgcaacttttggagtatattaggaaatcaaatcattatttttgaaactgataaataatggaaaacagtatcaagcatttattctacttgcaagtatacttcgtggcaaccaaatggtgattgaggggaagtttgtgttcttatatgtattcaagctaattaatgagcaaggacaattggaattagaatatcactgttttggaatcccagatgaaatgatggatctaggcagttgtcaccactgacagaaaaccttacaaaaagactaacccttcattgtgtgccttctacaagatactgttaattaaaaagtcaaacctagatctcatcaagtctggatctgactaccagtttatagaaaatgcagggacagagaaacatgttaagacagcaccataaggatacaatcagcaaagtgtaaatgtgagagaaactacaggacaaatgaccttcaacagataaattgcaaacacaaagctggtggggaaaccaatagattaaaatatttaagagacttttcaactaattatggcaaaaggctttatttgaatcctgattcaaacaagttaattttaaaaatctttttagaaacttcaggaaatgtgtacgctggatattgtatgacagtgcggaattattcatttaggcatgaataatggtaccgtggttgtttttgaaacctatctgttaaagatactatgatttatggattaaatgataaaatgcctggaatttgcttcagaataattcatattgagtggatgggggttcaaatgaaacaagactggctctgattttggtaaatttgaagctgactgatggaatacttgtactattctgttttttaatatagctgaaatttttataagttataaaagaaatatgcaatctaggtgtagtggcttgtgcctgaatcctggttacatagaaggatcccctgagcctagtaattcaaggctgcagtgagctgcgatcacatcactgcattcccgcctgggcaacagaagtagactccatctctaaaaagaaggaaagaaaaaaaggaagaaatatacagtaattttaaactgggagatgaaatgctaatttctagaagtccatttggttttgaagggtctcatgtcaaaaaaaaaaaaaagtaagtaaaataagacccatcctactgttttatatactaaaatagtaagttaattaaatgaaaatgaagtacatttgggctttcatttaccaatcctggaatgttgaaaagttgcccaaaagacatttagcaagcaaatgtagctagcaaaaaatcattttatgatggcaggttaatacaattataattgaatcaacaa

SEQ ID NO: 94482 - DNA, 1084 bp, Homo sapiens
agtggtatcttattgtggttttggtatgcatttttctcaaaatggttacacatttttttcatgtgattgtgggtcacttgtgtatctttaaagaatcctcacatttccttctcctagctgctgaccccatgatgagcagcggcccttccccattccactcttcttaaggaattggatactagattttcttttctctgtatctccactagctaaaaggattttttgaagctttgtttttgatcatctgtattactgaaatgtacagtttgttgagttttttctctttatcataaaactgaatttttttaatgctacctttgcctcatttccttagtccattgttgagactccagaagagctccagaataccaagataatcttgtgcaaactataaatgggtggcagagaattttgaatcatgttaatttttcaaatctttgttacctgatgagttggctcttgtttgatctttttctttcttcacagatgtttcagcgtttgtgtatccatgtgattcagaggctgagacctgtgcatgctcatctctatttgcagccaggaatggaagatgggtaagaagtactttttgaataagtttgtgtgtctgtgttgtgtgtgtgtggtgtttttgttttttttttttgttttttttttttttttttaagagatagggtttcttcatgttgcccaggctggtctcaaactcgtaagttcaaatgatccgcccgcctcggcctcccaaattgctaggattacaggcatgaaccaccatgcttagccctaatttttaagtttcttaacaacctgcctacaaaatattttttaaaatccacactgaaatatttgttctgtttaaaaaataatctgtaataatacattcaagaaggtaaaactgtttttgttttatttaaattttgcatctgcaaaatcctctacaaattactttatggcttagtctttttgtttgcattgatttagccagtcacaataactacttaagttattgcggttcatattcattatctcaaagataaaagaaattcagagtttaaaaagtactttttctctcgaacagtatttccag

SEQ ID NO: 94483 - DNA, 1005 bp, Homo sapiens
ggctcactgcagcttccacctcctgggctcaagcaattctcccacctcagcctcctgagtagctggaactacaagcacacaccaccacacctggctaatttttgtatttttttgtagagagagtgtctctcccctgttgcctaggctggtctcaaattcctgggatcaggcagtcctcccaacttagcctcccagagttctgggattatagttgtgagccactgagcctggcctaagttacaattcttataccataaaatttacccagacctttcaaaatgtaaaatttagtggtttttagtatagtcacaaagttgtgcagccatcactactacctaattttggaacatttgccacccccaccccccaccaaaaaaaaaccctatacccattagcaatcagttcctatttcatcctgtcctctctcctcaatacctgacaactactagtctactttctatctttatagatttgcctattttgaccatttcatataaatggactcatacactattagtcttttgtgacttactgcttcgatttaacaatcttttcaggatttattcatgtcacagcatgtatccatattacattttctttttttgccaaatagtttgtcaaatgtatatagtccacattttgtgttacctgttcatcagctgaatatttgagatgtttctactttttggctgtttttagtaatgctgttaggaacttttagtacaagtttttgtttggatatactttgtcacttctttgtgtatgtttttagaactggtaaactgttttttgtttttgtgttttgttttttttttttttgagacggagtttcgctcttgtggcccaggctagagtgcagtgccgtggtcttggctcactgcaacttccgcctccagggttcaagtgattctcctgcctcagctttccaagtagctgggattacaggcgcgcaccaccgtgcccagctaattttttgtatttttagtagagacgggatttcaccat

SEQ ID NO: 94484 - DNA, 1044 bp, Homo sapiens
cagtggatttggcatgataacatgcagtttcttcaagacaaaaacatttttgaacatacatattttgggtaagtttggtaaatttcatagtagatattttacacattttaaaaaaatcttacgtgtgaattttaaatgattatttttaaattctagatttatgtggcaattgtgtagttgtattcccagtacattaccagatcctaaagctgtgtccttaatgacagcaaaggtaataaatatatgaactttaaataattctgtcaaaatttactactttaaaatgattgaagcttttttgctttatcttttcttacagttaagcacttcctttgtcctagagacatttattcattctaaagaaaaggtatgtgttttctactatggatttttttgtcatttatgtttttatcagatatcttttggtttttgttattgttggctcagaagttcatatgctttgactgacttttcttttctagcccacgatgcttcagtggattgaactgttgacgaaacagtttaataatagtcaggcagcttgtgaggtaaggtgataattcaacaactaatgcatagtttaagattcttttttttttccccccctctgatctaagatgctacagcagagttgttttatctgtcacagggagccaaatggaagtcattcttaaaatcatttggtagctgagaaagttataatttatatatcacatccattacactgattaaataattgattattaagtcacttaaaaattcatgttttggccaggtgtggtggctcacgcctgtaaccccagcaccttaggaagctaaggtgggtggattacgagatcaagaggtcgagcccatcctggccaacgtggtgaaacactgtctctactaaaaatacaaaaattagctgggtgtggtggcacatgcctgtagtcccagcacctcgggaggcggaggcaggagaatcgcttgaacctgggaggcagaggttgtagtgagctgagattgtgccactgcactccagcctgacgacacagtgagactcca

SEQ ID NO: 94485 - DNA, 1151 bp, Homo sapiens
aggtagatgttttgacatgtcagaataaattacagcttcgtgccaatgagatattttaataatatgctttcctcatttataatgttgctgagaaagaactatttaaattcagtttttatttccacttatttattgcatttaccaaaattaggacaaggccaactactttcttgcctcactgtcatcatttgttttcttttgttatagtaaaattttctcagtctcaactttatagtgttctctatctaaaaataataaaaataataaaaactaaaaaaaagatattaggatatattggccaaattgtgaagtacgtagaatttttatgaaggcggcggtgtttgaaaactacttacaaagttactattaagtataaaatagctgtttatgaaataatttatatataaatatagctgagtatacccattttttcaaagaagtaaaacttttgtatttttaaacagaccaagacctatgattctgttacagataaatttatggacttctcttttgaaaaggtaaccatttttttcatgtataattttatattgttttttcttctgcattgtctacttttagagtaatactttgtcaaaatgaaaataaatttttttcttgcctcttaaagacacacagtgcatatatgctgttttacaaacgcatggaaccagaggaagaaaatggcagagaatacaaatttgatgtttcgtcagagttactagaggtataagttaatttcatttgagcaacattttaaaaatatgttaagtgtttatgcaaggaatactgtagtgtaagaacaggttctacaggttgatatctgcaattctgagtagatcttaagagtatttacaaatagtcttggtaatactgatataagacccgtaaatgaaaatgaatgagattaaatggagtagaaaatatcactaaaagagagtaggcgactgggtgtggtgattcatgcctgtaatctcagcactttgggaggccgaggtgggtagatcacgaggtcaggggttcaagaccagcatggccaaatggtgaaactctgtttctcctaaaaaatacaaaaagtagccgagcgtggtggtgggcgcctgtaatcccagctgcttgggaggctgaggcagagaattgcttgaacctgggag

SEQ ID NO: 94486 - DNA, 1214 bp, Homo sapiens
taatacgtagtgttttttattaactgatatatatttggaagctgccagtacattggttcgttttccttttttttaaaaggaaaccatgtttaaaccacttttcttaacatgagaataaaagaagtatgctaattcctttttaggtcttaggtttgtctgctcctagtaaagattaaatagaatggagcattttatattacctatttcaaaagattagtcagattaaagaaatattttatatttatactttatattgaagttgtccataattatgtattaacacatggttgtttttctagtggtttgtttaatatgtcctttatggtagtaggctaaggatggtgaatgactagcagatagttgttttgtacctatttaacatataaactatttgtgcctatttctgtaaataaagtttattataaaagtgattctaagtaactcgtcacattgggaaaattatttttattttattaaaatgacttaaaatattgtaattgataaagtttattttaaaaagtgtttctaagtaactgttgtgaagtttggaaaattatttccattctgtgtaaatcatttcaggttttaaagaagtcagtgatcattcaaaagactcagagagctatgaatatgacttgataggagtgactgttcacacaggaacggcagatggtggacactattatagctttatcagagatatagtaaatccccatgcttataaaaacaataaatggtgagttttaaatatttcaaaacttctttaacaatttatggtagttttctgatatgttttcagtgtttagttttctaaaaacttgccacaaaagttggaaatgaggcagacaaaatttttaaatgaagataactttcaacagacagtgtaaatcagttcttaaacatacggatcttttaactcttgagaatttgaatcctttccttggagaaatgaacacagttttgcagacaactttaggagatttatagacaacatttcaactcttatcttctctattcattcaagagctgttcattgaatatcttctacagtgtagccttatatgtgccattagaagttacctgcatgctctgcttgtttcacctcctattgggaggaccacacacacttctttttatccttttatcaagttaatggttggaagtcattaaaccagtccccagtacctgttttttggtcttcagatattgttagg

SEQ ID NO: 94487 - DNA, 1058 bp, Homo sapiens
gaaagaaatagaagcaaccatttaaaactaacttagtagatttactacctgttcttttgtttttgttatatgttcattgaagaacctataattttcttatttttatctgacacttagaatgttcccctttttatttgcaggagagtgaatgcaaagcatataatcctagacctttctgtaaaacatacaccatggataagcagcctctgaatactggggaacagaaagatatgacagagttttttactgatctaattaccaaaatcgaagaaatgtctcccgaactggttagtatcagaatactgaaaagtttctttgaaatttgaacaaatttgcctgcgttttaactagtttcttattttttgtttgttttatattaaagaaaaataccgtcaaaagtttatttggaggtgtaattacaaacaatgttgtatccttggtaagtattatacctggtttttactttttggagatcttaatatattttcatttatattataatttactagtttttattaattttttatgtgtattgattaggattgtgaacatgttagtcaaactgctgaagagttttatactgtgaggtgccaagtggctgatatgaagaacatttatgtgagtaataatgcacataatttttttactttatgcttttacctatttgtgtatagcgggtttgtgttggtcatcttgatatttttaaacttttttcatgtttttatgtattttcttcttactgtactattcaaataagagttaaacatcaaccataaagctttttcttgcccaatcaaaatttaaatttttaattaacccttcaaaaaagttactaagattcatagaatatcttaatatgaggaaaaacagttttttactaaaatttaagaattcacttttaaaaaaaaaatttttttgctgagcattctgtcaaaattgtaattgccaccttttgtatatttgcatgctataaacaataatatgaaacttttaaatgtggttttatacacaggaatctcttgatgaagttactataaaagacactttggaaggtgata

SEQ ID NO: 94488 - DNA, 1053 bp, Homo sapiens
aaaacctaaaaaagttaaatggagctcgtttgaactggctttgtcataactatgtacctttctttttcttacttttttatttatttatttatttattttgagacagagtcttgctctgttactcaggctggagtgcagtggtgtgatctcaattcactgcaacctccacctcccaggttcaagtgattctcctccctcaaccttccaagtagctgggactacaggcgcacaccaccacgcctggctaaattttgtatttttagtagagacagctttcaccatgttggccaggctggtctcgaactcctgatctcaagtgatctgcctgcctcagcctcccaaagtgttgggattacaggtgtgagccaccgtgcccggagctgtctgtcagttatctctgttatttgtcataataacttctaaaagttatctcagttgtctacattctgttaatttgtcctttgaagaatctgttgtgtctcatccttcttctgtcacaaggtcctccccttttatgcttgcagctttctagctgatttatcttagtatcccttaattacaatgcctaaaactataaaagtgatcaatcttttaaaaagatagtaaatcttacaatattattcccctgcttaaaactcttgagtgcttcttcattacgaacagaatggtattcgagctcatcaccatggcacacaccctctgggttttttccccctacccttcaacctcctatcttatccctctccatttggagcccatcaccctgctgcttcattgcttgtgggtttatttatgccattgtttcctacctgtgtcactcttctccattttcttctgatgttcatttttcaagagtcagcttggtttcaaactctaagagaccatctattccacagattaaccggagtattccaagtcaccatgcctctttgttgtttctgccttgtatatatgttacttttctcacctgttaaatcttgaggacagggattgtgtcatacttctttgtgtatttttgactatttttattttttgaggcagggtctcactctg

SEQ ID NO: 94489 - DNA, 1008 bp, Homo sapiens
gttacatatgtatacatgtgccatgttggtgtgctgtacccattaaatcgtcattgacttattttattatcaacattccattgattgtttttttgtagaatgatcagtgatgtttaagactcatttggttaattgacataatgtataagtaaagagtaggtgtattacgtttataacttattgaatttgggagaactaaattattgttacctataaggaaatgattttaataattttatgtttggtaaaacataaaaaatttatatttgaatttttattttctttttgtattaagacaacgctcctcgacttagatgccttggcaagacatttggctgactgtattcgaaggtaaaatttgatgtgaaattgacatttatattgtcgaggaaagataaaagacataattatgtgaactatcttgcttgtgtgtattttttttcttttttgtagtagggagatccttgatcatcaggatggtaatgtagaagatgatgggcttacaggactcctaaggcttgcaacaagtgttgttaaacacaaaccaccctttaaattttcaagggaaggacaggtaagtgttaagataatcaaatgtttctatgaaatgtgattgaaattttttgttgttacattgtgtattagtccgtttttacactgctcataaaggcatacccgagactgggcagtttacaaaagaaaagggtttaattcgactcagagttccatgtggctggggaggcctcacaatcgtgccggaaggcaagtccgggcaagtccgagcaagtcgcatcttatgtggatggcggcaggcaaaaaaagaatgagaaccaagcgaaagcggtttctccttataaaaccatcagatctcaagagacttattcacttatcacaagaacagtatgggggaaaccgccgccatgattcagtcatctcccaccaggtccctcccacaacaatgggaattataggcaatataattcaagatgagatttgggtggagacacg

SEQ ID NO: 94490 - DNA, 1034 bp, Homo sapiens
gagctctcttctctagtaagtcacagttttctttttatctttatgatattcagaattttaaattttatttcctaccctagttcatatactagtctttaaaaggcttctaatacataataaatttagagcccactttttactaaccccagaaattcagtgtgttgttggatttacattattttcctccctgttcatatcttttttaatgtcagtaatttgagactaatattttcctaaaagttcttacgtttgtcatttttttgcctggttattctgattttacagaaactaagcgtgtactccatttttaaaaagattttgaatactgtttagtggatataggaatttatttcataaagcctctagtttcttaaatgtattataattttatttatttttaaaatgttttcacaaagtataaaatttttttaatagatagatgattatgaggaagaaccaatattaaaaccaggatgtaaagagtatttttggttgttatgcaaattagttgacaacatacatataaaggacgctagtcaggtatgttcagaaaattatatactattctatgtattctcttcttgttaatatgaattatgacatatgttcatgactttattggttattaagtgtacttcattaatctataacttggtggtggtgtcctatttctactatatttgtgcttttccaccttcttctaattcctttcgtgtttttactcagaccttagttgaaacgtcttcatctggtatctatccataatttcctgtctcttctcagtaagatacgtggatgtaacatcttatttggaaagggaaatgtagattttaaatttaaaaatacagctttctataatagcatgtagtttggagtcccaaatacgtaaaataaaattgcagttcagatagaagttactttaaagaaacactgtcagtttttgcatatctaattttcttatactggactaaaatgacatttccattcaaacaaagtaatgtttaaaacaagtaaatttcaggccaggtgcagtg

SEQ ID NO: 94491 - DNA, 1050 bp, Homo sapiens
tgcagtgagccatgatcatgccactgcactccagcctgggcaacagagtgagaccctgtctcctgtcttttaaaacacacacacactcacactctctctcactctcactctcactctcactcacacacccactgctttccttttttgggggggaagtgataaccttaaaggatatatgttaataaattgaattatttttaattcattgctgaatttaattggtggtggtggtgtttttactttacagagttttaaaagctcagtctgatcacaggtctagacatgaaggtaagggttccacaaagttaacttttaataaataaaaacttgaataatatattgatatattttacctttaatattgaacattgtgttttcattttagcacaaaccttttatagtgaactgttttctaatttttctttagtttcacattattcaatgtggctcttggtgagttgggctcattgctgttctttagtgaaatctagccttgctgatagcgatcatttacaagattggctaaagaaattgactctccttattcctgaggtaagataaagattgaaggttagtactgttattttttgtatgttttcatgttattagcattgataataaaagagctaatggaaacaaatatgcgtgagtccataaatatatcacattatctgcttaatcctttaaggtctagagtgttttgaactatgtacaatgtttaagaacttctgactattatatattatgtagcatttatatttttctgaaatgtttatagaatgattattttgctttggattaataaaaaaaagtttttccaggtagtaggaagggcttgagaatttattttggtaatttatgttttagaaaagttctgtggccttttttttttctttctttgagacagaatctccctgttccctgtatcacccaggctagagtgtagtggtgcaatcaaggctccctgcagcctcaacctcctgggaacaagcgatcctctggcttcagcctcccaagtagctgggaccataggtgcacatcaccatgccc

SEQ ID NO: 94492 - DNA, 1061 bp, Homo sapiens
tactgtgacttaacctgacagctgaactgacggcattgttttaaagcagtagtgattatgaagcagtattgcttttcatttcatcatccagaatgcagaaatgagtcgtgccattttaatatctgtgagactgaatttattatttgaactcagtaatttatatactttggggatgcatttatgaaaacagaagccatagttggtatttcaacataggaaatttaaaatagagaatcagttttacacgtatgtgttacaaggctttaaaaacaaaagggagtggtgaggtaagccagataaggagccatttatcacccctagatcttgtggaacattagggaagtggttgggttatcaggaacttagaagcttgcaggagggatcctgttaaaccggggtttaggcctctgagaaagcagttacgctcttatgctcatctgctataagattatcagaggggacctgataaagctggtgctaggagtgcctaaaaaagctgaaggctgaaacaaactctgtcttctaggtaaatacttttagataaatgctgacagaagaaagaaaggaggagtctctcaagtatcctagactggcagaacctaataggaagccacctggcaaaggaggaatttggtttttgatatatttgccctagcataatagaacaagtgtataaaagggtggatttggagatgaaagaaaatatggttggcccttgaaaaatagaggagttaaggatgctgaccctccatacagtcaaaaatctgtatataacttttgactcccctagaacttaactactgatagcctgctattaaccagaagccttaccaataacaaacagttggtgaatgcatattttgtatgttaatactattatatactgtattcttaaagtaagctagagaaaagaaagtgttaagaaaatcataagagaaaatatatttactgttcttcaagtggaaatgggtcatcataaaggtcttcatcctcatggtcttcacattgatcaggaagtagaagaggaggaggaaggtgaggggttggccttgctgccttag

SEQ ID NO: 94493 - DNA, 1203 bp, Homo sapiens
gtatatgaattttattgggtttattttcagaaaatttaatgcataattgatgttttaagcataccatttgtgccagttatatacctagtcttcatatgttttaatatgtttcaaagtatatataatattttgagtttttatgtagtgtcagtttgtttaaagtttttcttttttgtgttccctgagtaagttggcttgagaaacatgtttttctaatttaagagtaatgatggatttaattggaaagaacttctcaaaattaagagcgcccacaagctattgtatgctctggaaattattgaagcactgggaaaacctaatagaagaataaggagggagtctacggtaattgcatttccattattatcattaaatgtttgtattctctctggagcaaaattctataatgtattgtcttttccattctataataattctttcttccgccattctgccttactttttttgcctttctcatagggaagttacagtgatctttatccagattcagatgattcaagtgaagatcaagtggaaaatagtaaaaattcctggagttgcaaggtttgatcatatgtgtttttcaatgtattgataaaaataatttatcttcagtttttcaaaagtgggtaccataattcttcattgattttaaactaatatactattaaaataaagcatagtttaaaaatcatgtattactttaagttgcaataacgtaaactgagattatttaatgccttggtgctcctgcttttagctctgattttccctctattgaaatactgtgagagtcctggcatggtggctcacgcctgtgatccagccctttgggaggctgagacggatggatcacttgaggtcaggagtttgagatcagcctggccaacatggtaaaacccgtgtctctactaaaaatgcaaaaatgagctgggtgtggtagcatgctgcccataatcccagctacccaggtggctgaggcaggagaatcacttgaacccaggaggtggaggttgcagtgagctgagatcgcaccacagcactccagcctgggcagcaaaaaaaagatactgtgaggacatcccagtgtctaggactaaatggctaatggaatagaaagatgtttataggctttttcgtgtgtgtgtgtataaattttttttttttgaaatggagtctcgctctgtcacccaggctggattg

SEQ ID NO: 94494 - DNA, 1090 bp, Homo sapiens
gtgagctgagatcgtgccattgcactccagcctgggctacaagagcgaaactccatctcaaaaaaaaaataaagattttcttgccaccaaagtgcaccatgtttctgccattataccaaaagaactaagtttctttttataggcttatagaatatccctagaccatgttataccaaagaatcactgtgatagtagcagtagtaataaatttatactccgtggaaaataccaaaactgtcaattttagtttttactctttttacctctcagggtggtactttaaatttttgtttaattgcctatttcctaagtggtttttgaaacgttgtttagcttactcttgccttagcaagttttggaacttagcaagatttaacaaatgataatggaaaaaaataggtctctaaaattgtttgctttcttcttaacgtctgttcatctgagactggaaaatgaggtttagattagcaacataagagaaacaggctcttttcctaaatggaagttcaaggatttaattcacccagtctttattgtgcttagaatagtgacctgcaaaatggaaatagatgattgtcatattgaaatttgttagaattttctggcctttaaacagatgttttcacttttatttgaaaagtttcatgaggaacatgatcagtcttagaggaaagcttttctagaaaaatgttcagtaagaagttgaaaaaacactgcttggctattaattttctcaaatatgtatcatataacaaatgtttcatttctcacttttcaaaaagtgaggctaaaaactattagcaaatttgatcattactttatgcaaaaatttgaacttaaaactttttcttttctgatctgttttgataaagtagttgttcttatttgtgtagagcttacgatgtgaagaacttcatcttcatgcagaaaatctgtctaggcgggtctgggagctactgatgcttcttcctacatgtcctaatatgttgatggcattccagaatatctcagatgagcaggtgagcccacaaaatctctttactctcctagaggctgttaccagtttacattcctattgacagtgtagaag

SEQ ID NO: 94495 - DNA, 1047 bp, Homo sapiens
atcccttcccagataacaaatatgaggtgttaacaagtgctttaaagaaagataaaggagagtaaagggttaatggtgaagtgaagcttttagattgggcggtaaggaaaaagctcccattggatgagagacttgaaagaggtgagaaaataagtatcttgaattcctggagagaaatcttagtccttgagttggtaatatacttgttattttcaagaaagggcaaggaggccagttggctgaacatagtgtgagatagggaagatggtgggaaatgaagttgaaggtgtaggcagctaaaaggacttaatgcattctagaaataactatcctcaatctactgagttttctgtctttaccttagattacatttaaacttaacatacagtgtgtttaattgctacaactacatattcttatcagcaagtaagttaattcttaaaaacaaattcatttccatgttttgctgtttttaaggaggcctcatgggacctgtcaggatgatttcatctggacacgagttaacaacagattatgatgaaaaagcacttcatgagcttggttttaaggatatgcaggtacatatataaaacgtggtttgagttttaatgatctgtttataatcatcagttgaatagtcgcagatgtagtttaaaaacagctcttattgctttgttatattaaaattttaagtgattctatacttcagatttaccgttttattaaactaaaagcttgatatgcataaattttttttcctgttttttatagatggtatttgtatctttgggtgcaccaaggagagagcggaaaggggaaggtgttcagctgccagcatcttgcctcccaccccctcagaaggacaacattccaatgcttttgcttttacaagagcctcatttaactactctttttgatttattagagatgcttgcatcatttaaaccaccctcaggaaaagtggcagtggatgatagtgaggtgactatgtttcattttcacaaatcttgttttgtgtctctgttgagaggatatagtaactttaat

SEQ ID NO: 94496 - DNA, 2521 bp, Homo sapiens
aacttcttactgccttataactttaaccacttaaaaaaataaaattttaaaaagagcaaatgtggtgtaacttattcaaattaattaatacgtattataaaattcagatattacactgtgatgtagaaaatgaaagtctgctataatttctgtcttcctcgtggagatactgttaatgatacccatacttctaaaattttttctatgctgtgggatcttcaacaaaccaacaaggtcctgttgattcacacccttagtccttgcacagcattaccaatgtctaaaataagtgcttattttaagtctttaaaaatgtatttgttttttgagcattcagtggtggttttataaatttaatgaatttaagtccaaaaattccttctcagatgtacaaatttttttctgttgtgaaaaaaaaaattgttatgtccttgatatctttttatttgttcatgttttatgctaaaagttaatgttgatgttaaatagtttatataaaaattttttgttactagtacaataactaggatatggataaaattgaagagtcacaaaactaagcagtagtttaaaaaaaatttacttaggtatttttcatgcaaaattttgttcttgatgtgcttagtgctattattaattgaaaattgcctaacatctgtagattgaaaatataattgttctttgtgttctgtgtattaagggaataaacaataatgtcttaatttgtttactttttaaaaagagataaagttataatcttaaacagtggttctcagccagaagtgtttttgtttcccaagacatagtacgtaatccctggagacacttctgataatcacagcaagagagcatgttattggtatctggtgagatgctgctgaacatcagagcatgagatacagcctccttcacccctattcttctgccttctgataacaacaaattattaattgggcttaaaatgtcagtagtgccactgtggagaaactctggtcttgaatatgtaacaggaaacattgttttaaggttactcttttgctcatacattggatcatgtggaaattagacaagttcattcattccctcactttttatccttctattccaaatttgctgattagttttagacttttttttttttttttaaactcaggtaccttggatcctgtcttccacatctgaaaattagaaaattgacacgtgtttagtgattatcatgctaggtgcctgtttcctttgaaatacaagtctttgtaattcactttataattttaacagccatgaattgactctcaaattctattaggctcgttagtatatatttaccagaatgtttctgtccctgaaaattttttcttaatatcttttttccttctgaatgcaggaatcacagcttgctatttcatttgctggattagttttttttttttaattcctcctatctctcctattaatatttctactctctttattaaaaaaataataaactggccttaaggagattttttttttcctcagtaatttctcgtggtgactattttgttaggagctcttagctgttattatgcagttacgtttgattcagtatgatgaatctgaacttaaatttgttgctgtagaatacattggaatgaacttagaacttcttttggacttttccagtctgtaagatgataaaaatttgcgtaacattaaaatggtttaaaatggtatcctttctatgtgttgtttgtgtcatgttttaggtttgcatatcatctgagacagtggcaaattgaaggcactggtattagtagtcatttgaaagcactgagtgacaaacagtctctgccgctaagggttgtatgccagccagctggacttcctgacaaggtacttacatagttttaatttcgaagttgataacatttcccaggtcaaatatctgttctttttgtatttttaaattggttgcatctcatatttcagatgactattgaaatgtatcctagtgaccaggtagcagatcttagggctgaagtaactcattggtatgaaaatttacagaaagaacaaataaatcaacaagctcagcttcaggagtttggtcaaagcaaccgaaaaggagagtttcctggtaagcctttcaattcaaattttctctttctctttctctctttctttctttttctctttctctttctcttttctcctttccttttcttttattctccttttcttttctttcttggttatatcatatagcaactgtcttggtttgtcttgtgttgctgtaacaatactacagactaggtaaagaacagaatttgggaagtccaagatcagggtaccagcatctggtgagggctcctctctgctttcaaagtggcaccttgaatgctgcctcctcacaggcagagggtggaagggtaaaaaatgaacagactccctccatcagacccttttataatggcattaattcattcatggcctctccaaagaccccacatctaaaacctgttgcattggagattaatgttca

SEQ ID NO: 94497 - DNA, 1598 bp, Homo sapiens
tcccagctacttaggaggctaaggcatgagaatccttggaaacctgggaggcagaggttgcagtgagccaagattgcgccactgcactccagcctgggcaagtgagtgagactctgttctcaaaaaaaaaaaaaaattgggtgagaacttgagttagcatatgttgttaattttctgtgaatacaagaaagcagtggttttctcagtttaggttggatggattcattgaagcattgtgctcgttattgtgttggttttattcctttatagtatgtttttcaggactagaattttcgtactatgtagtcacaacttgtgagttaaacatgtatatattgttatctgctgtataaatattttttagaactagtacaggtgtatttcatcaattgaggaaatttttaaatcatttatttttattatttaatagctgaataataggagttgcctatgatttttacttttgatacttcagtcttaatgagttacatagtttgacaaacaaaatttagagataccatatttttctttcttagctgtgtggtatggaccaattttggggcattgctttaagagcacaatctggtgatgtcagtcgagcagctatccagtatattaactcctattatattaatggtaagtgatttgaaacattgtctgataggtaatttctatgtgagggtgttttgtgaaactaaaatttttctttgatatagctaaacaagaatataaggctaatatatgtgtctaaacatttggctttcaggtaaaacaggtttggagaaggagcaagaatttattagtaagtgcatggagagtcttatgatagcttctagcagtcttgaacaggaatcacactcaagtctcatggttatagaaagaggactccttatgctgaagacacatctggaagcgtttaggagaaggtaatttttaaaatatcacactgttagaatgaatttcatttttattcctgacatatccagaaatattcttaaagtgaatctaaagtttttgttggggtcaagtagaaagcataatttaccaaagtgaaggatcagtaacataagtaatttttattaagaatatataccattttgccttggaataggcaatacgggttcctgataaatattgcacacctttaataatagagtttgagcagatatgcatgaataagaattgttagacagaattccatctctaagataaagtattgactttgattaaaaaggcagaacaccactactaaaaaaagtttctctaaaactcttaccaagaacatcaaataatctcatagttgaatcaagttgagtcatatgtttcatttgctgttttttttttcttcctggactaggagacagtattttaattttgaatttccatttaccatggaaacatgaccaaaaaattctgttaatgaatatctgtataattaatttagacataacctgtgtaatacagaaataaagcaaattaatatttatgaatatatcgactgaaatgaaaggtgagtagatagttttaagaaattctatttgttaaaaattatgagcaaatgtaaaagtactaagaactgtgttgaaaaaaattgttaa

SEQ ID NO: 94498 - DNA, 1807 bp, Homo sapiens
acaaaaactgtacttgtagctatacctctcataagtttgtttagtataggtatacaatgcatgatagttgtctttatttatgtcctctgatttgggtctatgtacatcttcaaaattgaagcctgtatcagacacatttcagttattacctgaataaaatgttcattaaatcacatatatattttcatttttttttttttttttgagatgggcttgctctgtctccaaggctggagtgcagtagtgtgatcacgtctcactgtagccttgacctcccaggctcaagcaattctcccactacagcctcccgagtagttgggactacagccacacaccaccatgcccggctgatttttgtagttttcatagagatgagatttcgccatgttgcccaggctggtctcaaaactcctgagctcaagcgatctgcctgccttggctttccaaagtactgagccaccgtgcccagcaaaattattatatatttttattttttaaaattatcactaaaaattcaaactgatctgtttccttctacagtgttttcagtaaagtttatttaaatttaataaaatctgtgaattaccacactaaattagctttgtgtttccccctacccttccaaagatgccccagctaaaacctgaaacaattagcatgactggcttaaacctgtttcagcatctctgtaacttggctcgattggctaccagtgcctatgatggttgttcaaattctgaggtatggatttagacttactttattaggcaactttattcctcaaattagattatcaaattcggtttccaaattatttttctacaaagtatagaatttactacctgtgcagtgcagttgggtttgttttgagatggagtctatctctgttgctcaggctgtagtgcagtggtgtgatctcagctcactgcaacctccacctcccagattcaagagattctctagcctcagcccccgaagtagctgggattacagacatttgccaccatgcctggctaatttttgtatttttggtagagacagggttttaccatgttactcaggctggtcttgcactcctgaccttaagtgatctgcctgccttggcctcccaaagtgctgggattacaggcatgagccaacgtgctcagcccaattctgttctctggtttcaaaagttttatgaagcaaatttatttttcagtatgaaagataacattgggtgtgcttaatgaaaatctattacatgtttcttgatttataaagaagtggccatgtcagtgttctttgagtctcctagacattcctagataatacagccaaatattttacttcaaataaaagattgatttgtctcagatatgatttttatgccatttggttcagcctgggcaacaaagcaagactccatctgaagaaaaaagaatacttgtatctcttagcaagtttggggaaatttttttaaaaaggaaaaagaattatttttaaaaatttttattattattattttttgagatggagtctggctctgtcacccaggccagagtgcagtggtgtgatctcagctcactgcaaccgccacctcccgggttctagcaattctcatgcctcagcttcccgaagtatctgggattacaggggtgcaccaccatgcctgactaatttttgtatttttagtataggtggggtttcaccatgttggcggggctggtctcgagctcctgacgtcaggtgatccacccgccttggcctcccgaactgctgggattacaggcatgagccactgcaccaggccattatgattattttt

SEQ ID NO: 94499 - DNA, 1104 bp, Homo sapiens
cctggctggagtgcagtggccgatcttgtatcactgcaaccttcacctcccaggttcaagcaattctcctgtctcagcctcctgagtaactgagattacaggcacacgccaccatgcccagctaattttttgtattttaatagaggcagcgtttcaccatgttggccaggctggtctggatctcccaagctcaggcagtccacccacctcggcctcccaaagtgctaggattacagatgggagccacttcacctggctgctgtgattcttttttttttttttaatcataaatatgctgtaggaacataactcttatttatatcaattaacatatggtaaagttagtttcattatgcatcatttcaattaaaattgcaatttccaagaacctatctgtgttaagtgaggacttactgtacatacacatgcctaagagaagtttaatttttttgtatgtagttaataaagtataaaatttataatttttatctagggttaagtttagagcaagttgacatcttatggcattgtttagtagaagattctgaatgttatgatgatgcactccattggtttttaaatcaagttcgaagtaaagatcaacatgctatgggtatggaaacctacaaacatcttttcctggagaaggtaattacatttctctcagtttgttattatttttccatgttccctttttcatctcttgaaatacgaattctgtaatgcctttttttttttgacagtttttttaagtagccaaatgtaatgaattttagcagtcctaatataatttttggtcagattgtgctctaattttgttgtttacactgtttacctctaaattaatagtttatatttataaaaatgttctattagctacaataattcaacaattacaataacttttgaaggcagcactaattttcttagtgtttgtttttttgaaataatcagtaatattgtagtccaattttcaggggtggtgcccacacccacaagtgtgagagctgttttctgtgactcttcatgatttaaataactgtcattgcagtcagtcttttgggcaaagataagccattctccagatgtgtagattgtgggaag

SEQ ID NO: 94500 - DNA, 1008 bp, Homo sapiens
tagctggtattataggcatgcgccaccacgcctagctaattttttgtatttttagtagagatggggtttcttcatgttggtcaggctggtctcgaactcccgacctcaggtgatccacccacctcggcctcccaaagtgatgggattacaggtgtgagccaccgtgcccggcctccttttttcatattttacaaaaataatgcttacttatttatctcctatatacagagaatgacctttgaacatggtatacactctatttataatactcaaaccttaaccactgattcctcaatttttaggattacctcccccaatcatttttactattatacggatgtgctcctattttagggagaagaattttcttcctaaatgggttctttgagaatacttcgtaagttgtgtatttttaggtgatttacatatgggttatcttaaactacattttaaaaacataaattatgtgaaaattcgtattaaatacttgtaaaaggctgtaagatatctcctttgtgtttctggctatattggtgtttctggtacattcatttagggccaaaatgttgtatgaatgtgattttaaattttacaaataggatgacataagaaatacttattgagatagttttgttttgttttttgttttgagacggagtcttactctgtcaccaggctggagagcagtggcgcaaatcttggctcactgcaacctccacctcccaggttcaagcaattctcttgcctcagcctcccgagcagctgggactacaggcatgtgccaccacacccagctaatttttgtatttttagtagagacagggtttcaccatgttggccaggatggtcttgatctcctgacctcatgatctgcctgcctcagcctcccaaagtgctgggattacaggcatgagccactgcgcctggccatttttttgtttttttttttaaagagacagtctcgctctgtcatccaggctgaagtgcatgatcatagttcagggcagc

SEQ ID NO: 94501 - DNA, 1029 bp, Homo sapiens
ttcaaaaatacaaattttgtatcagctctacttttcatgaactagatttatggaaatattattttattagtgtttcttgggtacagaatatattatcactaaagggactatgatatgaagtatgtactttttagatagagatggtgttttttacttgttgcctattctaacttatgtgtgtgttacatacttttaaaatgacatacttcctctgcttcactgttgaatttttgtgtgctttcttatgtaatttgaaagtaaactttgttgtagttttgagatttgtgtaatttattaaatagtataaatttttttgttttgcctttatgaacttctttcgtgtaaccaaagatacttagttaaaataattatgaattattaaaacaatttttggtataagttatgcataggaccactaaatttttaaaagtaattaagaaataggatatttaattattttaatgacttttaaattataggtacagccatagtgctgaagttcaagttcgtcttcaattcttgacttgtgtattttcaactctgggatcacctgatcatttcagtaagttttttaatcagtactttttaaaaatctgttttgactattggaagaactaaatttacttttgcttctgatttctgcagtttttttttttttttagtttaatttaattttagagtcagtgggcacatgtatgtttgttacagggtattgtaacaaatccctaccagtattgcgtactggtagggattgggcttcttgtgtacccattactcaaatagtgaacattgtacccgatagtttatttttcatcccttatcctgttcctgccatatccccttttggagactccagtgtctgttagtttcatctgtatgtccatgtgtacccattgtttagctcctgcttacaagcaagaatgtacggtatttggttttctgtttctgagttagttcacttagaataatggccttcagttccatttatgttgctgcaaaggacatgatttcattcttttttcatggctg

SEQ ID NO: 94502 - DNA, 1079 bp, Homo sapiens
aaaaaattttgttcaaaaatataagcaaattaatgacaaaagatatatgcagtaagtttattgtatgccttctgtatgccagatattgtgctaagtaatgaccaaagcacatagtatattcttatatgaaagggtatcatattacttttaatattaactcaaattagtcattgataatagtactttcacaggcattttgagattaaaaacttacaaaggtactttaaattcataaaaatgaaggaacattgctttatatcttttcaccattcaaatataaataaaacgtgtatatttttcgtaactaaaattttacatttgaagattttttttagatttgcatatttactgtcatagcatagatttattctcttaccctgcccactttaaaattattttttcttttatttgggccaggtgggcagaaaaagaactgaacatgatgaagcttttctttgataatttggtatactacattcaaactgtgagagaaggaagacaaaaacatgcactgtaagtacctctcaactgggttaaatacatttgtgtcgatgtctttcctttgaaagatgattttccagtgttttaactttttttcatataataagtaattgtaacagaaaactttatttgtataaaattatgaaaaggctgctagaactttttaagctgaaagattcttaggaggttactcttaaattcttaggtaaatgtagctggctcacttttgggggttggttaaccttcactattgagatttgttcaaagataactgtttttaaggaatcaaaagtaaatacattttttcagaaaccatagatatgcttgttttaacagtttagagcattgattctaaaatttgtaaatatttacttcaaaaataattaacagttaatttaaaacattttattataattgcatactagtattagaaagtttaggacgtgtggaaggttttaaaactggtggtatatcattaatattttctcattacatcaaaatattctctggatatattcaagtgatttgggacaagaattggtagaaatggattggtggtggtatagctgtatttgaag

SEQ ID NO: 94503 - DNA, 1851 bp, Homo sapiens
tttttggtttgattctacagttgtaaaaaaccacactttttatggtttcacattttatagactttgagtataaaataatatgtaaacagtgagtattagtgatcttgcctaaaattgttctttgaatttgttttaatgaggtgtcttaataggcctggtaatatgactgtatattgtaaaattatttaataattctgacagtgtgaagttttcagtttcgtaaagctctcaacattccatattgttaataagcagatgtcggtttgtttctaagtgtatttgtaagtttaagagaggtattttttgtggttcacaaattagattcacattcgtaattactaactttgtgcttttctctgttttgtaggcatatggttgatgatatgctaagtgcagatgatgtcagttgtagtagctcccaggttagtgcaaaatcagaaaaaaatatggctgattttgatggtgaagaatctggatgtgaagaggagctagttcagattaattcacatgcggaactgacatctcacctccaacaacatcttcccaatttagcttccatttaccatgaacatcttagtcaaggtaagactctacagtaagtaaaatatattaccttcttcacaacaggaataatttatcttactttgttgaaaggactcaatagttaaggttatggtacttaaatgtttttgtcaaaataacttacatatggtagtttttttttttcccccaagggaattaaattattataaatagtccatcatgaatataaataagtcctgcagttctattgagatattcagcggggaaagaaaatatatagcaataatatgtaataattaaagctctatattttagaaaatatatggttgtattagaatttatactcagaaatcctaggacctaaaagtataggaaatcacaaaagataaaattgtatgattccatttatatgatatgtctagaataggcaaatctgcaggcagaaggttagtggttgcttggggttagggaagggtaggagggaataaggaggggcgagtgtgagaaatgattgttcaagtctaaatcactcttaaagtaataggacatgaccagacttgaaagaatggaggatggaggaaggtaaagagtagtagggaattaatgagtaaagcaagaaaaaataagaaagtgaaaaacagttttagaattggcagtttaaaggccttaaacctcttgtttggttggtatcatcaacatatgctggcctagtaaatgggttttggatagccagtacattataagtaaaccggatggattacgtttatgcaaagaggccataaacacacttagaaacacaacttgtggaccttggcaacaatttactgatttgtatgtgttttttgtacatgatctgtctaggttaagttactttgacttattttattgttgtgctgttgtggttgttgagaaaggaataggttagattgaggtcatctgactgaatgtgatgccatatttgtaaattgttaccattcttttctcaaattttcctttaatcaatattttacctattttttactgcgtggagttagaaattgaacaaaatggttttcttttcacaacccattgtagacagaataaaatgatagtatatgttaatgctttccaaatctaccttgttttacaatgtttttagtactagaagacctcctccaacagagtaagacagtcagtttaaaaatgggcaaaagtgttgatcagatactacataaaagatgatacatagaaatggtcaataagggctgggcatggtggctcacacctataatcccagcactttggaaggctgaggtgggcagatcactt

SEQ ID NO: 94504 - DNA, 1271 bp, Homo sapiens
ttgaattgggtatatatacataattcatgtttgggcttgtcctctcctttacgtaatatttttgacatcctttgagtttttaattccattttgtattgttcaaaggagtataacaagactggcagcctttttaaaaagtacagtttattaatgttggttaccttttttcttactggtttaaatatttatttaaatctatttgtttcaaaatacaggaatccatgcagggaagttctgacgaaactgccaacagtggtgaagatggaagcagtggtcctggtagcagtagtgggcatagtgatggatctagcaatgaggttaattctagccacgcaagccagtcagctgggagccctggcagtgaggtacagtcagaagacattgcagatattgaagccctcaaagaggaagatgaagacgatgatcatggtcataatcctcccaaaagcagttgtggtacagatcttcggaatagaaagttagagagtcaagcaggcatttgcctgggggactcccaaggcatgtcagaaagaaatgggacaagcagcggaacaggaaaggacctggtttttaacactgaatcattgccatcagtagataatcgaatgcgaatgctggatgcttgttcacactctgaagacccagaacatgatatttcaggggaaatgaatgctactcatatagcacaagggtctcaggagtcttgtatcacacgaactggggacttccttggggagactattgggaatgaattatttaattgtcgacaatttattggtccacagcatcaccaccaccaccaccaccatcaccaccaccacgatgggtaagcctacttcaaaataaatattcagttcatatttcctttagggaagtattatatcctatattcaatttgcaatttattctgtattagtgctattcattagtagtatagtgcaaactataaatgtaagctacaaatagataatttcaagttttctattgggcacatttaaaaacacaaaatgaagcaggttgttggccatgcacagtggctcacacctataatcccagcactttgggaggccgaggcaggtggatcacttgaggtcaggagtttgagaccagcctgaacaacatggtgaaaccccatctctactaaaaatagaaaaattagccgggcatggtggtgcacgcctgtaatcccagctacttgggaggctgaggcaggagaatcacttgaacctgggaggtggaggttgcagtgagctgagatcacaccactgcac

SEQ ID NO: 94505 - DNA, 2021 bp, Homo sapiens
tttttactgttttatgcactgccattcatcatcttagataattagcattttaccgtcatattaaaaaatattagtgtactggccaactttttgactttcaaactgtttttatatcaggtaatctacatgtattgggcaattatttttgaccattctctctaacttgattttctagttgaaacattgtagtcggtatatacatgacttatttccttcactcatcaagaatttggatcccgtaccacttagacatctacttaatctggtctcagctcttgagccaagtgttcatactgaacaggtaatacattcaaaacatgatagttttttttttttcccgtgaagtgaaaatttccttgtgattcagataatttaactttcattttattgtcttggcatttcagtttgacaaaaaggatattaaatttgttagtgttgcctggaattctcaaactgaaatctctccctcttttttttagacactgtacttggcatccatgttaattaaagcactgtggaataacgcactagcagctaaggctcagttatctaaacagagttcttttgcatctttattaaatactaatattcccattggaaataagaaaggttagtaatgtcatgtattttgaagtaaattgttgagagcttctcactcagatttgaaatattttctgctaatacattcagttcaatctttattttaaaataagtgtgggatgggtagaagagtgcatataaaaggattaatactgtgattagttcgtgttttggtttaccttttaagtgaaggatagtgatgaagtctttgtagttactggattttctcagctttggttatcttttttttttaaacaaaagctttggagatttcattttgtaaacaaacaagttttgtttcagaaataattttaagagtagaacataatgattcagttatcttgttgtgttttctgcttcaaagttttctgccatgtcaggtgctttgtggggtttttttgttgttgttgttgttgttgttgttttttgagacggagcctcggtctgtcacccaagctggagtgcagtggtgctatcttggctcaatgcaagctgcgtctcccgggttcacgtcattctcctgcctcagcctcccgagtagctgggactacaggtgcccgccaccacgcccagctaatttttttgtatttttagtagagacggggtttcaccgtgttagccaggatggtctcgatctcctgatcttgtcatccatccgccttggcctcctaaaatgctggggttacaggcgtgacccactgcatctggccagtgggtattttttttaacatacatagctttcaagggctttctgaaacattagttgaactcagtttttgtctcctgacaacatatactacccctctcttaggcttttctgtgcaggcacccccaacaactactgtaggtggtggggacttaaccttattgcaggtttctccacttacatcttgttgattatgtaatatgaacaactgatacgctgtctcaaagaagctgagtcacttagaatgtttttctcctgttttttccttttccttcagaggaagaagagcttagaagaacagctccatcaccttgtaagttgagccttagaaattcatggcaacatgacttagttttttatagtggttttctagagttcattgattttacataataatatatttgtatcagtcataaagttcattttgaggagatgtaaacctttaacatattcgtgttacccatttttcttaaaatcttaaacatcttgacttttaattgaatcttacatcttctttagaaatcatgagcaaatgttaacatatttagagattttatttttggctacttagcataaagctttggtaactaggtcaaggaatcaaatgataatgtcattctgttaagtcaatgttaatataaattagaagtaaaaacaaaaaatgtattttatatagggtcacctgcagctagtcctcaaagcagtgataatagcg

SEQ ID NO: 94506 - DNA, 1387 bp, Homo sapiens
acatgactgtctgttacttcacttttcatctattgaatcttcaatagtatcagccaggagacttacagtttggcttggggataattcttttgttgttcatccttttgacaacctattttcctgatattatctcattataaagggcatactgggaaacctttcctgagtgcttcaatacatactgtggaaattaaaaagtgggaaggcaaagacctcgagtaggataatacatcactaaatcagtgttacacttgtgtacttggtgttaatcgttaccttttcagttattcgttgcttgtttataaactcagggaatttgaatttataaattcagcatcatatttcattctagttatgctttgtagtattctataaaactgattgtatctaattctttataattcctataggaacaaatttaggttttcaattgactctaccttttagacatgagaaaagatgacaattttttttaatgtactattttcattgcttgactttaggtccattgcaaaagaacttgcagactggcttattagcaacaatgtggtggagcatatatttggaccaaatttacatattgaggtttgtggatgattacataacttctctgttctattgatagagaagaatatttttaaaaattgatattaagtttttcttttccagattatcaaacagtgccaagtgattttgaattttttggcagcagaagggcgactgagtactcaacatattgactgtatttgggctgcagcacaggtaatattaacagctcacatttattgagtgctttgcttatcatatgttctaagtgcttctctgtgaggtaaattctattatcctgttttatagctaaggagaccaagacatggacaagctgggactgaaatctggcttccgagtccatgtcttactatgttactggtagaatggaaggaaatcagagtcagtcagttggagcttcttcatgaaaccatcctggtttaataaagagacattttcctgttattctcatttatacagtctacccttctatcctgaattattgtattggtatgtttcttgtctgatgtactgtttttttttttttttttttaaataggcatatatccacatgattcaaaattccaaaagtaaatataaaaaatatattacatgtttttcctttctgccccatctctcaagcatgcagttattatcttctcaggtatatcagatttttttgtataaatagcgaactgtatacatttttcttcctctttctttttcacaaatgtagcataccaaccagatgtggctttgacttttttttttttctttcttaatttattctggagatttctcatcaatatatgaagtgctttttatcttcttgtaaaactgt

SEQ ID NO: 94507 - DNA, 1062 bp, Homo sapiens
tttttttttttcgtttttttgagatggactctcactctgtcgcccaggctggagtgcagtggcgcgatcttggctcactgcaacctctgcctcctgggttcaagtgattttcgtgcctcagcctctgagtagctcgcgttttaggcgcatgccaccatacccagctaattttgtatttttaatagagatggagatttactgtgttggtaaggctggtctcagagctcctgacctcaggtgatccacctgccttggcctcctaaagtgctgggattacaggtgtgagccgctgcgcctggccattatttagtattttaatataacagaaatagttttagtaattgggaagcgtgtgtctctgattatgtcttagattttataatattaatctagttattgtgatctacatatgtcaatcagtttaccatgttagtatttgctgacaaatgcaagaataattttggaaataaaaacccttaatttcttgtctttaatcatagaatcaactccataccttcaatgatgtgtgcaataatgaatcattagtatcggacacagaaacgtaagtaggagcattaatttatatataagtataccattttaatgtacagttgtttatatggtaaattctaatttttagatttaaaatttttactagaaattctttgccctttgacattgtgtacagttcttcatgaagctttcagaacattatgctgtctgtaacataactcactctccctcttttttttgagacagggtcttgctctgttgcccagggtggagtacagtggtgggaccatggctcactacagcctcaagttcccagggtcaggtgatcctcccacctcagcctcccggatagctgggaccataggcgcatgccagcatgcctggctaatttttgtgatatttgcagaggcagagttttgccatgttgctcagtctagtcttgtagactcaagccatccacttgcctcagtctcccaaagtgttgggattacaggcgtgagccactgtgtctggccacatttctctcttttaaaagcgtatgcgaacata

SEQ ID NO: 94508 - DNA, 1104 bp, Homo sapiens
ggcaagctcaaaggcttttctagcttccacttatgtcatgtctattaatatctcattggccaaagcaagttacatggcaaggcccagatttaaggtgtagaaatagattacaccttttgatgagaggaatagcaaagtcacattgcaaattcttgtacatataatgatgggaggaatttgtggccattttgtaatccattacaggccttgaggaagactaatgttgaaaggttggacagcagagaaggaatctgccaaagagattaggcagggcctgagaggaaaaccagaggtttgtgggttttggacacaaaaaatgttaatgcttacaatgtacattttaagttactgagtggtctttaaaaatgctttatgaatttttgtgtattttctatttctgaatcatttcaggtatttatgcaagctctcggatcaggagttacgacagagtgcagctcgtaacatggctgacttaatgtggagcacagtcaaagaaccattggatacaacattatgctttgataaagaaagcctagatcttgcatttaagtactttatgtcacctactttgactatgaggttggctggattgagtcagataacagtaagctgtatttgttttatttttggtcatcgtttatttgttttctggtctatcataatactacccactatttatggagcacttcatactaggcattgtgctaagtattttatgtggattactttatatggtcttcacaaataatttctgtgtttctcttattttaaataagtctgaagcttagatttatatggatttatactgtgggtccatttgatttccgggtccaactctttcatcattttgtttctgtctttttaaactatttaggtttttatgtttatagatgttttgagaaagaggaataattggagggctttataagcagttaattaattttccaggcagaaaccatagattattgggccgtaggccaaattttactaaatgtttgttttgaatagtcttaaatactgtttttaaataggacaaagtaacatgaaaatctgtattcttggcttctcttggtgagggggttggaagaaggcctggtattcttg

SEQ ID NO: 94509 - DNA, 1040 bp, Homo sapiens
aatcagatagtgatgaatgctatgcaagtaagttagtgtgatacagagggagtatggggcctttctgaagggtgatatctgatggacgtgagtcagctattcaaatgattattagaaagacgtattgtagaaggaacatgtcagtataggctttgaagttggcatatgacacaaactagaagcagattggtgtggagaataatgtgtaaggggatatagttttgaaggtggagagataagcaggggcagattattcaggaccttgtaggccactgtaaggagtatggatttaattttttcaatgggagtctattgaagggtttttagcagatgtttcatgattttttaaaagttttatttggcttttaaatagatcataaatatagggtgactggaatagaagctaggaggagaccaattgaaaggtttatatattagtcctggaaggaaagtgatgattacttacagtaggattgttaatgatgattttgaaaattggatgaatgtaagtgaaaataaaatcaataatactggtcattatagggtataaagaaaagggtagcattgtggatgtggatgacattcagcaccccccctcctcaattttttttatttgtactgtggatatcattactgagatgtgaaaatctgggagaacttaaagacaagactttgagaggcctgtgggacttaaatggcactggcaaattgggagtatgaacttgtagttcagaacagttttcattaatgtaagagttgtgagtgtaaagatggtatttaaaaaccataggagtcacctgaggagagcatacaggaaaagagtagaggtgagtctaagatagagctctgtatgggttggttttgctgtgtaagaaaacatccctcaaaacttagtggcttacaacaatagccagccaggcatggtggctcatgcctgtaatcccagcacttttgggaggccgaggcgggaggatcacctgagcccaggagttcaagaccagtctgggcaacatagcgagactccatctctgtgcagaaga

SEQ ID NO: 94510 - DNA, 1011 bp, Homo sapiens
aggactaaaatacaccttagagctgaatcctattagcttcagttaggagtatcactgcttatcaggagtaattgcaaaataatctgtttattcggtttttataaaatcagtcttttatagaattgtattttttaaaggttagtagttgtaacctaattttacttgcttttttttttttaattaggatatatcaactcaagaaagtaacatattaggggcattctgtgatatgaatgtaagtgtttaccttttttattcttttatggaaaattttatttttttaacaaagcctcatccatatgttttattatttatatatgtcttttgagtttctcatcagtatctttccagtattgctaagataaaaattatttgtacgttttcaaataatgacatgttttctttattttcccaggatgtagaagtaccattgcatttgcttcgttatgtatgtttgttttgtgggaaaaatggcctttctctcatgaaggattgctttgaatatggaactcctgaaactttgccatttcttatagcacatgcgtttattacagttgtgtctaatgtaagtattgttttgaattgatcttaattttgggagcaatgtctagcatatcagtaacatgaattttatgctctgaaaaggaaggttttgaatgatttgcatgtgtaatttttttttattttgacaaaatgagtacagaaacgttttaacgatctttattattaagattagaatttgaataaaattaagttacctgttttaaagctaaaaggggtcatgactatctataattatctattttatctaagataggtgactgcataaaacttttgctaattttcattttttaacttatttttttttttttttttttttttttgagagagagggtctcactccgttgtttaggctgtagcttctacctcctgggctcaggtgatcctcccacctcaccctcctgagtagctgggactagaggtgtgcaccactgtgcctggctgaatttt

SEQ ID NO: 94511 - DNA, 1056 bp, Homo sapiens
agggtcaactgtttcaaatggtcttagatcaaagacttggtagcatacatgttataaaattatatatatgtataaattttgtatgtatatacacacaattattttaaagcaaacaaattattatgaaatgtaatacagcttactagagatttttatcccacttttctttgaggaaattgtccatctagtcttttctttgtgctgctgtgctatcctttcttaagcctttgattttgatttttcgttaatattttttaaagaggcacaacttagccaaaattcttaggaggacaagattcaaaactcatgtgttagtattttgatagctgtgtctttagaaacctactcaacacttttattttatagaagaagcaactggcctacagaggttaaaagatttgattgggcatattgctgagaagagtcctagaatccgggtcttactctactgcactacttctaaatcattttgaactaattactgtattctaaataatatgggaacttggagccactccttctgtctcccttccttcttctctttcctattgtccccatcaaagctgatattttaaaaggttcggtaattggacataagtagtactaattcaggatcaaaagggggaatggcctagttttaatttttttccccttaagagacagggtcttgctctgtctcccaggctggagtgcggtggtgtgatcattggtcaccataaccttgaattcctgggctcaaacgatccacccacctcagcctcctgagtagcttggacactaggcattcactacagtgcctggctaagtttatttttattttattattacttttttaagagatggggtttatctgtgtttatggggtttatcgagaccagcctggtctcgaactcatggcctcaggtgatcctcctgccttgacctccaaagtgctgggattacaggcatgagccatagtgccttgccatgctagttgcattttttatcctgaataattatgtgtaattctgtgaaatcagataattgctctagtgttgtaagtttttttctaagtat

SEQ ID NO: 94512 - DNA, 1046 bp, Homo sapiens
ttgctaaacatatattgagtacttgacactggagaaacaaaatgtcacaattcttgtttttaaatagttccatgtgtagaaggacagacaaatccatacgtaaaactgaagataatagctgtaaacctaacatgatgactttacactaactaaaatatcagttgttgttgcgatgctatctttatgttattaaggtgtaccccagcaggaaggaaaaaataaaaacaagtctagaaataacttagtatttgcttacttgtttttttatattattaaaaaatacagctgctgctttattactaatttattcaattttttttctcttataggcaatgtctatgctgcttcaaggaatataagcatttggagatttttaatcaagtagtgtgtgcacttattaacttagtgattgcccaagttcaagtgctccgggaccagctttgtaaacattgtactaccattaacatagattccacgtggcaagatgagagtaatcaagcagaagaaccactgaatatagatagagagtgtaatgaaggaagtacagaaagacaaaaatcaatagaaaaaaaatcaaactctacaagaatttgtaatctgactgaggaggaatcttcaaagagttctgatccttttagtttatggagtacagatgagaaggaaaaactcttactatgtgtggcaaaaatttttcaaattcagtttcccttatatactgcttacaagcataatactcaccctactattgaggtatgtaaaataggtggtgtgaattttaagtaataccaagtcttaacttcgcagtctgtttcttactgataaatatgaagacagttttctgctggcggaaaatcattattgtcaccagaattatttaatgtttctccagagcatttcttcagcagtttgtgctgaaaatttgctcggcatagttcatcctatcaaggaaagatctatacattgaactcagaaattaatctggtagtgatctaaacattttactgctatagatctatgcttattttatgactcttaataaataatag

SEQ ID NO: 94513 - DNA, 1438 bp, Homo sapiens
ggccaggctggtgtcaaacccctgaccttaagtgatctgcttgcctcagcctcccaaagtgctgtgatgacaggtgtgagccaccacacccagcctgacctcttactttaaacctgatttttcctaaacatcaaaggaaaaagctgttaatcagaagaattgtaggagaaatgtgtttatttttcttcttgtgggagttgtgatactatagaattgtaaagctggaggaggccttggaggtaaaaattaaaaccctttcattttgccacagataaaaaagatgtgatgcattatttatatatatttataattatatatttctgtgtgacaaaaatactccaaaagtagtactatatcttaaaacagcagtaaacatttattatcctcaaagtttcaatgggacaggaatttgggagtcctttagctgtttggttctgggtcgggtttcctataatgttttagtcaaggtgttggccaggtcatagtcatgtaaaaagctcatgtggggctggaggatatacttccaagttggcttgctttagatagtgaccaagttagtgctggttgtttattttatttattttttatttttttgtgacagaatcttgctttgtcacccaggctgcagtgcagtggcatgatctcggctcactgcaatctttgtttccccggttcaagtgattctcctgccttagcatcccaagtagctgggattacaggtgcccaccaccacgcctggctaatttttgtatttttagtagagatggggtttcaccatgttgaccaggctgatctcgaaatcctgaattcaggtgatccatgcacctcggcctcccaaagtgctgggattacaggcatgagccaccacacccagcctcagtgctggttgttaatgagaggtcttggtactttctcatgtggtctcctctttaggctgcttgagtgtttttcagtgataggtggcttcctctagagtaagtgatccaaaaaagagcaaggcagaagtgacaatgtcttttatgacctagtctcagatgtcacacattgtcacttccaccactttctattcactagaagtgagttccgtctacacagaagaatatcaagtaatttgtggctgtacttcaaattcacacttggagaaataagattatttccacatgatcatacagggcattggtgatctatttggactacaatatagttgttttgatctgatgctattactgggtgcagattataaattatagttgcttagctgtcatctggtacaagtattattagaaccaggtacttgcgtatgtattaattgcctattgattcaccagaccgttccctgcctttttttgagacatggttttgctctgtcactcaggcatgatcagggttcactgctgtctcagcctcctgggctcaagcctctcgaatagctgggact

SEQ ID NO: 94514 - DNA, 1233 bp, Homo sapiens
cattctttcagcagaattgggctagggaaatgatattggacccactggaatatttgttgctagatggaattctaaaacctaacctggaaagaattttattttgacatgtagattcctcatgaatgtttacttagtattacttttaaaattaaagctacatactttatatgaggcatttagaaatttttatcattgcattttaaaaacataagtgcattttatttaggtgggcagcatataattctacttagataattttgtcaggctggaaataacggtaaaactgagaagaaaataagagaagctcagatggtgggaggatatgtatgatattggtgtaccaacataagtaatacagagtttaaaaaaattaattggcagggaaatgcctataataaagtccctgtgtcccctgtctcctcaccctcctttctgttgtcagctttttgagatgttggttttgatattaacctctatacagtattctgaaacactcttcttatattgctgttgcttcatctatcaattttaggtgtaacctatgaacttccagttatgatatataaggatttcattcttttaccctccccagttctctcagtatagttacatcaattcttagggtagttctaaaaataaaaatgttgctcagcaatgagccaaaaaagttctctagttcattttatatcttgcatgttctctctttcttggtgtactgtcttttcattcagttaattttctatgtgtggatcacttaattctctcaaacgctcataaactatgcatcattaggtgatcttttatccccccacccctggtcataaccctagagtattgattactttctagagttactaccttctcttcagatctcatccttataattcattttgcttgtctctgaggcaggagaaccttagggtctggaggcagggaacctaaggccaattcacgctgacttcctagaattaaaaggaaaaccctaagattccacgccctgagtaacaaaaggaccggaggctaccccgctttgcaacctccccacacatttttgtgtggcaggtgaaaaattgaaattacctctaattggtcccctcctgcaactaatcatgccggtggcagtccaagtcttcatctgcataggagtataactttgtaacttcagcctctgactggtcccactttccataaccaatcagatgtttgcatagggtgtaactttgtaacttcaga

SEQ ID NO: 94515 - DNA, 1050 bp, Homo sapiens
tggctactgctgatacctctgagaggagtaccatgagactggttcttggaatactaagctggaggctggaatcagtgctgctgctttcagatatagcaagctgacaagtctttggtctctcctcctgccttcttcttctagtaccctataggcactggagaacaagatcttaacaggaagacagctggaaatgaaaaatgtagattgcatggtcccagcctcagcatcacaacggaaggctggttttggagatgagagataatcccagaataagtggcaaagtctcactgccccccccaccccttacatctgtcaaaaatctgttcttaagtccatatgagttattaattaaaagtagacttattttctttggaagcaaaagaatgattatctgaaatgtttgcatttgtagctcttggctttattttgaactgttggctttaatactggtttagcattattcataattttaaaatttcttttttatttcagtatcagatgtagaaggtggtgatggactgcagctcagaaaggaacatactctcaaaatatttacttatatcaattcctggacacagaggtatgcatctttaggtatttcgaagactaatttttgtgagttgtgttataagttgcgatttttattgtcacattttctttttagggtgttgggttagataccattagttactaaatgacagtttgtcaatatttattaaatctttactcatgaggtcgatcatgattctgtttttaaaacatgggcataaatatcagtttctttctttgacccctgcttatttagggatatgagagtcacagaaattctgaaaagtaactattttgagagattaaataatttttatggtatagctaaaggcttgtaacaatcttaatccttaaaaaagaaaagtcattgtggtaggggatacttttaagccacttaatatctgttccgtttctataattatgtgtattagaccaatttctaaataatacatatattgagactataggaaataaaattttaggaaaacatgttaatataat

SEQ ID NO: 94516 - DNA, 1733 bp, Homo sapiens
ggctgatgaagagaaacataaacgtcaaatgtctgtccctggcatctttaatccacatgagattccagaagaaatgtgtgattaaaatccaaattcatgctgttttttttctctgcaactcgttagcagaggaaaacagcatgtgggtatttgtcgaccaaaatgatgccaatttgtaaattaaaatgtcacctagtggccctttttcttatgtgtttttttgtataagaaattttctgtgaaatatccttccattgtttaagcttttgttttggtcatctttatttagtttgcatgaagttgaaaattaaggcatttttaaaaattttacttcatgcccatttttgtggctgggctggggggaggaggcaaattcgatttgaacatatacttgtaattctaatgcaaaattatacaatttttcctgtaaacaataccaatttttaattagggagcattttccttctagtctatttcagcctagaagaaaagataatgagtaaaacaaattgcgttgtttaaaggattatagtgctgcattgtctgaagttagcacctcttggactgaatcgtttgtctagactacatgtattacaaagtctctttggcaagattgcagcaagatcatgtgcatatcatcccattgtaaagcgacttcaaaaatatgggaacacagttagttatttttacacagttctttttgtttttgtgtgtgtgtgctgtcgcttgtcgacaacagctttttgttttcctcaatgaggagtgttgctcatttgtgagccttcattaactcgaagtgaaatggttaaaaatatttatcctgttagaataggctgcatctttttaacaactcattaaaaaacaaaacaactctggcttttgagatgacttatactaatttacattgtttaccaagctgtagtgctttaagaacactacttaaaaagcaaaataaacttggtttacatttatttttcctttattgactcatttattcctatattaatgatagtgggtatttgtgtttaagcatcaagtaacattttaaatgaagttggaccccttgatttacaaacaagatttctaaggttattgttcctagtaaatgcagcagttgtgtaaaatgaacatgttcctaagataccttttgttctcaagaaacaaattcctcctgtggcattttgactcattttacctttatttgggattagagggcacttcttgtctaactctacttagcatctaaatgtaacaaagaataaacattagccttggaatgagaacacagatgtaacctggtacaaatactaattgtattcttaaaaaatgtaagtaaactaagtagccatgagccttctcaaaagggtgagtggagccaggcttggtagctcacacctgtaatccctgccctttgggaggccaaggtgggcggatcacttgaggccaagagtcccagacctgcctggccaacacagtgaaaccctgtctctacaaaaaaatacaaaaattagccaagtgtggtggcacgtgcctgtagttccagctgcttgggaggctgagccaggagaatctcttgaatttgggaaggagaggttgctgtgagctgagattgtgccactgcactccagccagagtgagacactctctctcagatatagattgatttttttttttgcggggtggggggtgggggtgatagaatcttgctctgttgctcaggctggagtgcagtg

SEQ ID NO: 94517 - DNA, 1583 bp, Homo sapiens
tgtgcctggctaattttgtatttttagtagagacagggtttctccatgttggtcaggctggtcttgaactcccgacctcaggtgatgcacccgactcagcctcccaaagtgctgggattataggtgtgagccacctcgcctggccattatgatggataattctttttttttttttgagacggagtcttgctctttcgcccaggctggagtgcagtggtgcgatctcggctcactgcaaactccatctctagcgttcacgccgttctcctgcctcaacctcccgagtaggtgggactacaggcggctgccaccacgcctggctattttttttgtatttttagtagagacggggtttcaccgtgttatccaggatggtcccgatctcctgaactcatcatccgcccgcctcggcctctcagagtgctgggattacaggcgtgagccactgttcccagccgtggataattcttatatgataaatggaatttgctttttttcctccaagaatgtggatatactgaaagatcctgaaacagtcaagcagcttggtagcattttgaaaacaaatgtgagagcctgcaaagctgttggacacccctttgtaattcagcttggaagaatttatttagatatgcttaatgtatacaagtgcctcagtgaaaatatttctgcagctatccaagctaatggtaggtgattctgatttcttacacaatgcagtataaacaaaccacttctcttctactgccttaagtcaaacatttgatgttttttacagatttaaatcagacctcccatttcccaaatgaccctagacatatttaaaacagttaagtgtacctttcccttttaaaattagtcttaaagcttattttcccaataaattttgtgaacttttggctttaaactttttaatggtaaaatggaattgcatctaatgtacacctgagtaccactgtataagtttagtggtaaaattagattccatttgattctgttttgtaggtgaaatggttacaaagcaaccattgattagaagtatgcgaactgtaaaaagggaaactttaaagttaatatctggttgggtgagccgatccaatgatccacagatggtaagtgagagatgctttgcttttgatttctagtgttgatgctgtgttttatggaatatgctatactctattatgtgcattttgctaatttaaagcatatcaactttgtggttattttatggcattttatttattgtagtccttacgttaatatactaatagctgtattccatcttcaaaagaaactgctgttaatcagtagcgaagggtggtgatatgtaacaagatagctaagaaaattgggtcattttatgtttccatagataggttaggaggatttaattaatggagtaccggtgcagtttttgcattcctcttgatttttagaacaattgctagagctacaaagttgtcattactttacctctttagcaaagtgattgcttcccagattaaaggcctgaaagtcttttttacaccctttttcctaaatgatttgcagaaaaggaaatcattttcagtaataaaaac

SEQ ID NO: 94518 - DNA, 1009 bp, Homo sapiens
ctggccagtttgggttgtttgtttgtttgttttttgaggtggagtcttcctctgtcacccaggctcgagtgcagtattgcaatctcggctcactgcaacctctgcctcccaggttcaagcaattcaaacctcccaagtaactggaattataggcacctgccaccacgcttggctaatttctttgtatttgtagaagagatggggtttcaccacgttggtcaggctggtctgcaactcctgaccacaagtgattggcctgccttggcttctcaaagtattgggattacaggagtgatccactgcacctgggccaaaatcagtttcaagacgtttgtgaattgcttgtgtgtggttttccttattagggtgtataacataaacgttaaaatgtctgctttttaaaataggttcatacgttttatgaagctgtggggtacatgattggtgcacaaacagatcaaacagtacaagaacacttgatagaaaagtacatgttactccctaatcaagtgtgggatagtataatccagcaggcaaccaaagtaagtatttctaccttttcttaaaagttttcatgggatttaacaagacgtgttctttacaaatgtattgaattcaagccttttaacatgtatgtgtgatccataagtgcttttatgtgtgtctttctataatttattatctgggcgaggtgtggtggctcacgcctgtaatcctggcacattggaaggccgaggcgggcggatcacctgaggccagaagttcgagatcagcctggccaacatggcaaaaccccgtctctactaaaaatacaaaaattagctgggcgtggttgcacatgcctgtaatcccagctactgaggaggcttaggcaggagaatcacttgaacccaagaggcagaggttgcagtgagccgagattgagctactgttctctagccgagacgacagagcaagactctgtctcaaaaaaaaaaaaataaatgaaaaatctgggccgggctcggtg

SEQ ID NO: 94519 - DNA, 2868 bp, Homo sapiens
cacacacacacacaattcagtggcatattagtatatatacaatgttatacaaccattaatacctagatccaaaacattttcatcacccgaaggtgaccctttacccctaaaacagtcactttctcctttgttctctccccaacttctggcaaccattattttggtttctgtctctgtagatatatctattctgattataccatataaagggaatcatgcatgtgaccttttgtgtctggtttcttttatttggtgttgtgttttcaatgttcttccatgttgtaacctgtatcaatacctcactttttatcatgtctgaagaatattctcattgtatgaatattcagtattttgtttgttctctcctctgtgatggtacatttgggttgtgataccacttattggcacccaaggccttttaaataaatgtcgttccattaggagacatgataaaaatacatattgatcaactactatgtgagagatttttgaagtgctttagggcatgtcagaagaagcagagttactccagagtttgctgtctatttgataagtattgaaatctgagttgtgatgaataaaacatgaatttttattttcccttaaggtgtaacaagtgaaaagcaatttgaagttggtaatgtttaagaattattttaacagttttggtcttctgtgtaggcccttcattatatgttgttggtatctgaagtagaagaaactgaaatctttaaaatttgtcttgaatactggaatcatttggctgctgaactctatagagagagtccattctctacatctgcctctccgttgctttctggaagtcaacattttgatgttcctcccaggagacagctatatttgcccatgttattcaaggtaacagagcggttggttgagtgttcttcctgttgcatactgtggttttgaggtctgaatccaaatacttctaatctgtgtaaataaattagctataaaaagagaacccaacaacttctccatgagtgtggaaaactagaacatgaaaggagttgagtctagaaccttgattctcaagagtgtggtccttctctcagtatcaacattggttgtgatttcgttaggcaaattcattggccacctgccaatctactaaaccagagtctaggaatgagacacaggaaactcctgtaacagaagttggttaaaaaaatcacattaaaacacacttaaataattataaagccatttttgtagaattacagtgaaaaaaaattttttcttttggagacagggtcttgctctgtggctcaggttggagtgcagtggcgtggtcatagctcactacaatcttgaactcctagactaaagcaattctcttgtgtcagcctcccaagtaattggttgcaggcacacaccaccatgcctagcaaattttaaattttttagttttacttcatttatatttacatagttttttctgttgtgctttaagccccagtatttttattgttttagagattgggtgtcattttgtgttgctcaagctgctctcaaattcctggccacaacagttctttttgcctcggccctccggaatagttggaattataggcatgaatccctacacatggctggcttgtggtttttttggttttgtttgtttttaactaagcttctacactaatgatttcagtgatctaacgatttttttcttgattgatatattgttgagtataggtccgtttattaatggttagtcgaatggctaaaccagaggaagtattggttgtagagaatgatcaaggagaagttgtgagagaattcatgaaggatacagattccataaatttgtataagaatatgagggaaacattgggtaagttaataaatactgttaatctttacctttataaatctattctggggtggaaatacattttaggaaatgtacttgtagtttctaaatattttctaaatgtattgttactcatcaataaaattctgctcattatttgcatttgaaaccatgtttttctttgtagtttatcttactcatctggattatgtagatacagaaagaataatgacagagaagcttcacaatcaagtgaatggtacagagtggtcatggaaaaatttgaatacattgtgttgggcaataggctccattagtggagcaatgcatgaagaggacgaaaaacgatttcttgttactgttataaaggtatgcaagggataggtatgaattagaattgctaaataagtattatgttgttacaataaataatacaaatttgtcttatttacaggatctattaggattatgtgaacagaaaagaggcaaagataataaagctattattgcatcaaatatcatgtacatagtaggtcaatacccacgttttttgagagctcactggaaatttctgaagactgtagttaacaagctgttcgaattcatgcatggtaaatctctttctttactatattttgcttttatttttattgaagaaaataaatgaatgtttttgtcttgttagagacccatgatggagtccaggacaaaataaatgaatatttttgtcttgttagagacccatgatggagtccaggatatggcttgtgatactttcattaaaatagcccaaaaatgccgcaggcatttcgttcaggttcaggttggagaagtgatgccatttattgatgaaattttgaacaacattaacactattatttgtgatcttcagcctcaacaggtatgttaagcactgagcatatgttatttttagaaagtaacacttgtatcaatctgtatgtatcaatggaaataggagggcaactattggatccaatagaagtgtttctgattaaattttctttcttttt

SEQ ID NO: 94520 - DNA, 1693 bp, Homo sapiens
cacactttaggagcttggtcttttgggagatacctgaccagacagtgggaaacctgggacttgttcctaacattgtgtctgaaggaattcttttcagccctagtttgattggttatctattaaatgatctagaaggttattcataatactgtgttcatggccaggcatggtggttaatactgtaatcccagaactttgggaggccagaatgggaggaccagttgatgccaggagttcgagaccagccaggacaacataaccagaccatacctacgaaagatttaaaaaatagctagctgtggtgttgcacacctgtagttccagctactctggaggctgaggcaataggatcgcttgagcctattaatacaaagttaaaatgagctatggtcacactattgcactccagcctggatgacagggtaaatccctgtctcttttaaaaaacaaggaaagatagattactatgtatgtttgtgatctgaatgaatgaattgattatttttacatttttcaatgtcagtgagaaatactagaaaaatttaaaggctgtgatagcggcctttaatttatttgagaagagtcaaaatctaagtcctagagatataagaataggtatactggacctaggagttctgtatgtggtttaatattagcaaaagggtgttgggatattagggcttaaaaataatagtgttggctgagtgcaatagctcagacctttaatcccagcactttgggaggctaaggtgggaggattgcttgagccaggagtttgagaccagcctggacaacataacaagataccgtctctacaaaaatgttaaaaataagcttagtgcgatggcacatacctgtggttccagctactcgggaggggctgaggaggactgattgggcctaggaggtggaggctgcagtgagctttggtcataccactgcactccagcctggacagagtgataccttgtctcaaaaaaataataataaaatattaagtgtctttagttgttttataaaatgcgaactgatcgtcccttttaaaatttgcagatgcttcctttaaataccaatattcgacttgcgtactcaaatggaaaagatgatgaacagaacttcattcaaaatctcagtttgtttctctgcacctttcttaaggaacatgatcaacttatagaaaaaagattaaatctcagggaaactcttatggaggtaagatatgtggagcttttgctcctaaaattctgctctgcctactaataactcttaaaagtgcctttttctaaaatgtatgtaccttttgagatttcttattacttaatatttgatcagtacattatatatattctcaattctgaattacagttataagcccagttttctgattttatgttctccataaagctaggactaaaaatttataatcaaaattaaattactaattattatatcatttctaaggttaaaatttcaaagaccttattttaaaatttcagttttaattcaaataacatgcatttgttcatttaaagatatacaattcatcgtgtaatcccagcactttgggaggcggaggtgggtggatcacttgaggcaggagttcgagaccagcctggcctacatcgtgaatctctgtctctattaaaaatacaaaaaaattagctgtgcgtggtgtcacatgactgtaatccca

SEQ ID NO: 94521 - DNA, 2175 bp, Homo sapiens
ctggtcttgaactcctgacctcgtgatcctcctacctcggcctcccaaagtgctgggattacaggcacgagctaccacgcccagcctggccaggctgttctcagactcctggcctcaagtgatctgcccaccctggctccccacaaagtgctgggattacaggcatgagcaaccgcgcaaggcctcctagaataatttctacatatctatcaggcagatactaatacacagacagacccattagacggattggacctttcattaggataattgaaaagggtcctgcggtgattaagataaaagactttgtgttttgttttctacccagtagggtgaagagggtggcacatttcttcctttaataaaggaggagaaaatgaaaagtgatttatccttactcctgcctttatccattacataatttctttgaagtttgttttatttgcctttgagaaatgaagtgcgattaacatttcatgtcttgttttagatactgaaacaagaatggcccaaacattggccaacttttatcagtgatattgttggagcaagtaggaccagcgaaagtctctgtcaaaataatatggtgattcttaaactcttgagtgaagaagtatttgatttctctagtggacagataacccaagtcaaatctaagcatttaaaagacaggcaagtaataattatgttttagaattttaaagtgatttctcaaacaatttcaagcagtttggatgtaaattgtagatattttaaggaactatgatcagtaatatgttaaattgcttgtagtggttttcaactgcagattaagaaatagtcctagacggggcctaataatttacctctgaaggttgaaaaatgaattgttcaagacacacttcaggaattgttttgtatggtaactagtttaataggttctaagcaaatgatttgtgtccaaacatacgtattagttattttattttattttgagacaagtcttgctctattgcctggggtggagtgcagcagcgcaatcttggctcaccacaacccccacctcctggattgaggtgattttcttgcctcagtttcccaaatagctgtgactgcaggtgcatgccacagagcctggcctcaaatcagttattgtctctgcttcttttcagttccccaattgttaacaatagtgttctttttaaaacaaaacagaaaactagatttgcctctaatagtaagcaactggtataaactatagttatacttccattaagttttaaacatttgttgtagtcattaggaaatctttttccccttgggttgcccaggctggtctcaaacaatccttctgccatggcctcccaaagttctgcgattacaggcatgagccactgtactgggctttaatcatttttattagtattatagataactgatacttatttctgtgtcttctaaatctgatatttttgtgtgtttttttttttagcatgtgcaatgaattctcacagatatttcaactgtgtcagtttgtaatggtaagtgtttttaatttcatttttaaaaacaataataggaaagcaattatttacaagtgtgttttgttataggaaaattctcaaaatgctccacttgtacatgcaaccttggaaacattgctcagatttctgaactggattcccctgggatatatttttgagaccaaattaatcagcacattgatttataaggtacagtgaatacatttcagttatttgtcaccggatagccacatatattcttttcacatgtaaagctctcatctctgcattctaaaccttattcaaccttgtttctaacacgaggacgctgctcaggagaaatttcccatattcacacctagtaaattatttaaagtgagtttcaaatctgattctgccacttagaccatgtaattttatgaattcattttgaacaatggatttgattatattgcttttagtttgagtaagttacagtgaggtaagtcaagtgctatttctgaaaaatgaaaagttcatcttttaactgataatttaaaattgataccatgttatggcttaagttctataatggtttagcctgggcaagttggtgaaaccggtctctactaaaaatacaaaacagccaggcgtggtggtgtatgcctgtagtcccagctactcgggaggctgt

SEQ ID NO: 94522 - DNA, 1252 bp, Homo sapiens
tatgaatagcacattaaattcattgattttttttttttaagtcttgctctgttgcccaggctggagtgcaatgacgtgatgtctgctcactgcaacctccacctcccggattcaagtgattcccctgcctcagcctcccgagtagctgggattacaggcacccgccaccacgcccagttaatttttgtatttttagtagagacagggtttcaccatgttggtcatgctggtctcgaattcctggcctcaggtgatccacccacctcagcctcccaaagaattgctgggattacaagcgtgagccaccgcaccgggccggaatttttttaaaatgccaatactggtgacaggattagagtatattaactgattttacttagtctttccattcccacattaattagttctcaaaatttatttgcatgctacaaaagagctcaacaatttttttattacgtgcaatttttttaataggaataaaaaaatacgttgttggcctcattatcaagacgtcatctgacccaacttgtgtagaggtaagagtttattttggagcttattgggagagcataaaatcatttagatattgagtctgactacaacctaattctgtcaagacacatagtcacacatatgcacagtcagtcatttacagtagagctgtaatcatttgttaggattgtctggttatattcttatttatacttacctcaggctctcatttaatcttttacttttccttagaaagaaaaggtgtatatcggaaaattaaatatgatccttgttcaggtaagctttaacttaactgttttccttagaagaattatgcttattatttgaacaaaatgttcgacctacttaggaaataaagtatactaatattttgcagaagtagtgatagtattcttataataataggtaacctactgtctagtacttgaatgttaatttgctgtggcagtaatcatcaaataacgttaaagccatcatttatgtggctgcagtgtggactggactctgttggattcttatttatcttttcttttcttttttttttttttttggagacagtctccctctgttgcccaggctggagtgcagtggcatgatctcggctcactgcagcctctgctacccgggttcaagcgattgttctgcctcagcctcctgagtggctggaattacgggtgcttaccaccacgtttggctaattttttgtatttttagtagagacagggtttcaccatgttgg

SEQ ID NO: 94523 - DNA, 2186 bp, Homo sapiens
gaaaatacaggttagtaaatagtaattttaggtaacagtatcaaataggaagaagtaaataaaaaagaaaggacagtgtctttccattaaaaatgtaaaaaagtttggttaaataagatgaagttatctttaagatttttatttgtaactatatttatggtgggttttgtttcttagtgttttaaaggctttttaattgatttttggcaagaggatatattgtaagcagtgcattgctttgacttactgagtcttgacaatctgattttgtgcctataaaattaaagaaaatgcttagggtagtatgtttttaaaagctaattaagaacttcaggcatttggacaactctcttttttttacatatttctcagacctagacataataaatagatatgtttttaaaagtgaacaggttagaaagcatcactatttactgctgattatgaaacattttaatagcatcaaatttgtaattttagaattttgctttggccttgtttttattttgaaagtttttaaggaatgttctgcaaatgtagtactttagttgaaatggcaaaattttcttgaagagtgtgaaatgttaaaatgaaagaaaacagcaaaaacattcactgtttgagcacaatgtagtttgggacagtctatattgtgctttggataaaatgagcattcacatgatccctttggttgaaatactaatgctcctattttattgtgtaatgactaaccattttaaagatgaactcttattctcagccaaaacttgcaatctgaggttatatgtctatatatgaatgagcttacctttcagatattatagctgattcttccctaattctctcagttgaaatgtaccacaacggttttgtcccttttcttcctcctgcctatccacactaattggtcatagtaattcaggtagtaactcctggggctttataaattattataaatattgttgactatttagagtgagtaatcagcaggagggacaaaatggcttgaaagtggtatctctgttttttaattttttatacttttagttataactttcagtatttaggaagaaatacctgaaaggtagatacagattgcaacatgcgtttgtgattattttgactgtgcacaaaagtttatctttaaattagtagaaatagcaactataagggtggggttaaaatataaaataaacccatgggttgtcttgctgctccttaagtaacacaccagtgatgcttgtaaacactttctatagaaagtatctgtgacaatactttaatatttggccaaaagcttataactcctagaggatggtaggaagcttgatagcatccaagctgctaaattcttaggagcctgttcgtgttaaagtacgtgagcctatgagcagtcatttatgctgtgaattcatatctggctgctacttttccttcgacagataagcctatttggctgctaaagggctttttatttggttcttcctcctggtgtgagcatgtataaacagcaggacgttatatagagtagcaaacaataaaatgaggaaaatgcatgaaaactcagtatatgggtgaatagatacttgtttaatatgtgtaattaaacttggtagcataatgtttttgaaactttagatgtaaatgtgtgaatgtctgtccatttgtgaatcctgagagttgccagtcctataagcaatatattcacatgcttctattctccaattttcagtactatggactacaaattttggaaaatgtgataaaaacaaggtggaagattcttccaaggaaccagtgcgaaggtaggaaaataaagaattataaattcagagttttgtttttcctggcatttttattgtagttgactgtttgagggggcatgtaatgaatctttagtatattttgctctaatggagcttattgcttttatcatgaagcaaacaggtctgtttgtattggtgggtacaggaaggccacttacaggttatcttttgggagaaagaggagactggactgttgaaaactctgacaataaatattctagttaaaaatatgggctatggcacagtggcccacgcctgtaatcctaacacttcaggaggccgaggcaagtagatcgcttgagtctgggagttctataccagcctaggcagtatagcaagacctcatctggacaaaaattt

SEQ ID NO: 94524 - DNA, 2599 bp, Homo sapiens
acttatttgcttcagaatagatctttggttgaaatgcagttcagttttgagactaaaaaataaaccagatttactcccaaaaatgttactgtttcaaataagtaaaatatttgcacctttaaagattaggagttggctgggcatggtggctcactcctataatctcagcactttgggaggccaaggcaggcagatcacctgaggtcaggagttcaagaccagcctggccaacatggtgaaaccccatctctactaaaaatacaaaaattagctggctgtggtggcacctgcctataatcccagctactcaggaggctgaggcgggagaatcgcttgaacccaggaggcagaggttgcagggtgctgagatcgcaccactgcagtccagcctgggtgatagagccaagactctgtctcaaaaaaaaaaaaaaaaaattgggagtcatatttatataattttatttctatttctgtaaggtctaatttttgagtatttctgaacatcaataatagaatctctgtccaattagaatttgtgccttgctcagtagttttcattttaatgaatgattcaaaagaatacattagcttaagttttgttttttttaataatattttagcaaagaatggctcaagaagtactgacacatttaaaggagcatcctgatgcttggacaagagtcgacacaattttggaattttctcagaatatgaatacgaaagtaagcaagtggtggttttaaaatctgttatttcttttcttccagtcataaactttgaggaaggtatctcatttttagtattagcatttgttatctcaaattattttatattgttaatttgtttcaaaatttagtcttaagcatataattaattcttgcaaatagtcctaagaattatgaatgaagttttgtaatgggactagtatgcaaggtggcttttttggttgtctgattttgtttttttctttttagtatatgtatacaggtctaagtagcataaattctgaatgttattcagagattaaacataacattaaggaattattttgggcaagtaatcaatataatacaggccaggcacctctgacaccaagttgtgtggacagcttaaaaccctactccatggcattgggcttctaatgggacagcactcagtttttatttacaatggaaaatgttataattctggtccttttttaagtttgaacagaagggttgatcaaaatgtgttttgtctgttttaggcttgatgattcacgcttctctttaaactgccttaaagtaataaatactatggcattctgtttaatacacgaaaggtttccacttgatatacattgtgttaaaacagaagatagccatattcacatctgtttctgaaaccagactttgttaattaacagttttaaaatattaattagttttgacatcttgtaaattttaggtcaaaaatacagtccagaacttcctcaaagtgctaaccttaagtaacataacagtgtttgcctgtttgcttgcctggtaaattttgctttttatactgacagacattactaatgtttaagttgatttatcaacagtatttttaaaaactcaaatttgtcttgtgaaaaatgagatgattagaggaacagaaagaaagcaacaggtaaagaattcttcaatttacataaattacaaatgatttggtgctaaatttatgcactatgacatttggcttttatgcaatcatttttttttctttaaagatgttaacactacctgatattaatcataatgttccattatgttgattgcttgtaataggaagaaaaggggtgtcttcctgtgcaactgacacagctaggctttgacggcaggcctccacaaggtctacccttttgattccctttaactgaattctgttcatcaattgtttttgtttcatgggcggtgggaggggaaaggggaattcaatgcataaaataagtatttctaagggctcagtagaaatttctaccatagggatcatttcatgcatttattttttcatttagtctttgctgttatctgtccctcatcttcataactcagcagtggatttctcaagtttggagatgtaaggcaaaagtataattcttcagaatgtttggattgtagtgatttatcattggctttcagatttgactgtcacttcagatttttgagcaaaaatactaaaaaaaaaaagaaaaaaaattctttgaagagacaggacctctgttgcccaggctggagtgcagtggtgtgattatagctcactgtaacctcaaactcctgggcttaagtgacatttctgcctcaactttctgagtagctagggctacaggtgcgtgtcaccatgcctcgctaacttaccaatttttttatagaagtggggtctccctgtgttgctcaggctgatcttgaactcctggccctcccgccttggcctccccaaaatgttgggattacaggcgagggccactttgcctggccccaaataacattttttcaaaggaatgtaaattttttttgttttagtttcataggcaaagtctttatgtctgggagagattggattttaggatattatagta

SEQ ID NO: 94525 - DNA, 1254 bp, Homo sapiens
cttttactgagttattcagaagaccctacttgggaagaaaagaaaatcacattcacttgaacttaatcctacttgcttaaaaagttttgacatcaagatactgaactgtatcacgttttaggaccataaaatcctaatagtggatgcgtttaaataataggttagcatactttataaatgttagtagaataggaaagtcttcctggtgtataaactaaacactagaaaagttgaatggaccataataatttatgtaattatcaaatagctaagtaatttcagcttttgttacttgcttttactatctcagttttctgtaattaaagtctctaaagtattcattaaaatatttgtaataacatggttgaagtaaaataacttgtaggaagtttttgataataccaaaacttgataggcagcttcaattttttttctttattttcagtaatctatgccagcaattatgacaatgttagcagaccatgcagctcgtcagctgcttgatttcagccaaaaactggatatcaacttattagataatgtggtgaattgcttataccatggagaaggagcccaggtaaagtagccaaccaaaactttataacattatgacagtgtaacagagttgttgggtttagaataaaattttaaattatcacctttaaaaaagatattccatagtttgcattaatttggaattctgtattaaccataatgaaaattggtttggagaaagaaattgcatgtttgacatggttagagtgggttgttttggaatattatacttgttttgtccttaagagccaaatgttattaaatactttgtaggtattaaaggttctctgtacttttatatatacttaatatgtttggcactaatacgattcttctacttttaaaacatttacagaagtacttcacagatatgtttgtttaaataaaaacaggaataccaagtatttttatgttagttgaattttgtgcacttttcaaagtggtactgttaatgtagggaattatcttaaacataaaccaaattttgatcagtttaagatttttggtttttttgaacccaactaaaaggtgaaacagaaatgtgtgtacaattttaaattgtatatgtcacaagaaaaaaaacttgattttttacctgtggggccaaacttttttttgagacagtctcgctctgtggtccaggcaggagtgcagtggcgctatctcagctcactgcaacccctgcctcctgggttcaag

SEQ ID NO: 94526 - DNA, 2952 bp, Homo sapiens
tcccacctcctcctcctccacccctctcctcttgcctttcgaccctccccacttcccctcccccactctgcgggcaaatcgctgctgaaaagaggtaggggccgaagcggcgggctcgtgtggagccgtgaggcgggattgactggcgctcgggccaatgagagataggctcatggcgcggctgtagctggaactgaccaataggagggcgggctgggggcggaggcccaggttccaaacgctccgcggcgccatgggctgaaaactcaaccgagatggaatctcccagtctgaaccggtttcaaccggttccgagtttgaggcactaggaggagggggagaagcggctgcagcggccgcggcaggagcagcgggagctacagcatcagcaagagcaacagtagctacagccccggcggcggtgcctgttccagtctttgctgctgcagtccgtgcaaccacccagagggggaggggggaaccaccagtcgctgaggaacaagagaaggggggaaagtttaggcgagccttgggggggggggggccagcgccggagccgcgtgagagagggagccgtgttttggtaggggggagtcggactgcaactggcagcagagcgtctccccggccgtgtggactctacaccccctactcctgccgcttctgctgctgcctgtggctggagggtccccctggggctgaatctttgggacttgaccccgttccctcccccttccctcactccccagccgggcgggagcatttattccccagattaattccccttttgggggggggcgggtgtgtgtgtgtgtgtgtgtgtgtgtgtgtgttgggggaagcgtccctgaaatagtaaatattattgagctctttttgcccttttcctgtccgtttttttaatttccttttttgaggtgggaaaactgaaacccaccttgattcgtcccctctcccccctccccaccttccctcgccctaatcccccaacgaggaaggaaggagcagttggttcaatctctgggtaagtcgactgtgtcttcggggccgagggtcgggcggcggcgcggccgggcgggcgggaggaggccggcgtggggcgcggcggcggcggccgcgggaagcgagcccgggaggcggcgggcgggccgggggcgcggcgggcccacagcggagcctgcgattgaatggagccgcttttgccgctgggggatggaggcggggaggcggcctcgggaggggagcgcttgctgggtcattcgcgtgtgcgggtggcggtggaggaaggcgaggagtgtgatagtgaagcggggccccgcgcggggtgggaggggttccccagcccctggggctggggagaagttggggtgatttcaggaacatctctgtaaattattaggagtggaagtttccagaaatatttagtgcagcagcattgaaacgtccgcctgcatcacgtggccccctcggtggagagcttgggatgggggagggaggggctgccgactccctgttcctccagcaaggaaactcgaaagctctccggttttgcagagtggcatgtgaagtaggaaagatcagtttttcaggggcctgcacatgggattccgtcttgtagttccttttcaggggtttgaatgtgataagttggttaaaccatttactgttggccttgtacagtggaggatgccctgattctccttcattccgatgtctgtgagtttgggttgggtgggaggaagtggtgtagtagaggaagcattcagtactggctcagcccggacctcctctgatcacgccgaggccatgctgcatagagaaaggggcggtgaacttaaggcgcctggtctaaatgcctcctccgagtaagggcggggtgagtgcgtgctcctgtgtgctatagttagaagggctgcaaatcggttcgggtgggaagcgaggggagggcgggccctaatgaggtgtgtttttcctgaatgaagcgggcgattgcccacacaacctaaggagcagtctttcgccttgtagcgacttgtttttcacctagtgtgaagttattaagcaacggttatgattttctgggttttgtttaggaattggcattgggtgtcacttgtagagtcacattatccattaagctggataatccctagtgtatgttatccagtgagtggattttaggattgaagagcccaatgggaatgagcgttcgtggttacacctctcgcactatggcttgtttgctgtctgattgtatatcttaagtgtgggacactgctgttagtggaaagaatgttttggaagcggtttgatttgggggactaaatgtgcttggcattgaccacaaagccgccatttctgtactatgtacagttcaggaataggtaggtgatttcgaagatagccgctagttctaaggatggcaaactactgtatttaaatccttctattctaaatctcgtttttcacatcagtctagttcggagaattttataagaacagtgtatttgaaaatgaaacttgtaagagtcattttcttaatccttttttgttttagcattcaactatggtagtaaataggtgaaaagtttgttcaatatttaaccgaaatatttgaaaacttttgatacatggatcttggtgctttgtggacattgcttttaagcctcaaataattaagattgttctgatcttttaaattttatggtacttgaaggtggaggagagtttacacattcatttgtggaatatatatttcctctcagtatttagatcttaaggtttttttgtggtgtgtaacaagtattctgctgtttaaaaacgtttgtttaatgcctactacgaaacgttttgaagtctcatcagttttgtcaataatggaccaattcttgaactcctaatttcttgagttttacattatttttacatcatatcaatcataggtgactcatc

SEQ ID NO: 94527 - DNA, 1006 bp, Homo sapiens
ataaataaataaataaataaataaatatttctagttttacaggtcagatccttttcaaaaggttaccttttttcaaattttgaattatcaaaattcaaattatcccatgttaaatctttgctaaacaacattctgattggcttaaagtggattaagccttagtttgttaccctcaggagatcacttgaggaaaagaaaatgttggaagaagagagaaatcggatcctaactaaacagaagcaaagaatgaaagaattgcagaaactcctgacaacccgggctaaggcttatgactcacatcaaagtttagctcaaatatctaaatccagagtaaaatgtctcaggtatcatgaaaaaatcttgaatctccagaccactggttttcaaactcttttttttttaatcagtagatagtaaaatatgagcagattgaaaatagcattagtgttttagcttatggatttaaattgtcatcagttacttgtgttcagtgcacacacactcacctcatggtgagaaccaacatataaactcacctttatggtgagaaccatgaagctatgttgatgaatacagacattttctattgtggccttagttaatggttataatcttataccaatatctgatcttgttctttatattatttttgattgcagtaaacagatatatcaaagagctttgttctaaggtttggatgaaatctgatagcacaaattaacacgttaaacatcggttatgtgatgtgttcattagcacatatgttaatgtttagtagtatgtgttgcattttgttagtttcaatataaaaatattcacggaattcttagaaccccttcactagaattttgcagtacaaagtttgaaaaccagtgttccagatgttgcacataaaaatgttgatgtttaagtaggaaactatctccctcaaagccaggtaagtaatgtgatttattactttttaatctgatttctaaatatgcatatgtgcttttaattacaatga

SEQ ID NO: 94528 - DNA, 2060 bp, Homo sapiens
gtgttagccaggatggtctcgatctcctgacctcgtgatctgcctgccttggcctcccaaagtgctgggattacaggcgtgagccaccgcacctagccaagatatcataatttttaactactgtgatcattttgctaattttgccaatatttaaaaataagtggccaggcgccatggctcacgcctgtaatcccagcactttgggaggccaaggcgggcagatcatgagatcaggagatgagaccatcctggctaacacggtgaaaccctgtctctactaaaaatacaaaaaattagccgggcatggtggtgggcgcctgtagttaggattgggtgactacagcattaattcagtttttccaaattttaattgaaataacatcccacagtgtagagaaaagcttagtagagtatcatattctaatcttcttagacagaaagaaaactagatttaggtcttgaggtacactggtaaccacgtggctgctgatgtgtattatcacagacactaaaagcaacttgtgctgatttgatttgcagggtggtatttccaacattttggaggaactggttgtccagcctctgttggtatcagtcagtgctctgactcttgcaactgaaactgttcggagcattctgaaaatagatgatgtggtaagtgtttccaggttgcaaattttcttaggaggtcaaaaaggcatatattttttaaaggttttttgttgttgttgttgtttggttggttggttggtttttttgagacaaagttttgctctgttgcccaggctggagcacagtagcacagtctcggctcactgcaacctctgcctctggggttcaagtgattctcctgtctcatcctcctgagtagctgggattacaggtgtgagccaccacacctggccattgtttttttaaaagtttttacttttttttttttttttttttttctgagacgaagtcttgctctgttgcccaggctggagtgcagtggcatgatctcggctcattgcaacctccgcctcctgggttcaagcgattctcttgcctcagtctcccacctcccaagtagctgggattacaggcatgtgccaccacacccagctaatttttgtatttttagtagagacggggtttcaccatgttggtcaggctggtctcgaacttcttaccttgtgatccacctgcctcagcctcccaaagtgctgggattacaggcatgagccaccgtgcctggccaagtttttacttttgataaatatttgctagtcatcaaggtgacagcagttcttaatacaggttttccttttattaattgccttaaacattttccagctttaaaattctgtcattacaggttttgaaatctaagtttttctcttatcaggtaaacactcgataatctggataactgactagcaccattatgatcaccagtattgtggctggaatggaagaagatcaccttggtgttccttgtttggaagattatttcctctgaatttctgggcttggtcttccagttggcatttgcctgaagttgtattgaaacaatttaatgaaaatattaaatatttggtttcaaaaggcagatttatcttctcccaacattctgttatttctgatacttttgaaaaactaataaaaactaataaaagaagcgtaaaaagtgagtttacatgttgaggaaaaaaatggcccaatatgctcatcactgataaatgctccctggccttaaaaactaccaacatataatatatatgctgtcttaaaagttaatgatccaagtggcacctctctgaacctactttggcttgggaggctgcccagttaaaacaaaaataagttaatggtacagaaagagaatgaaaaatgaaagcctccttttatcctatcatcctaattccttttcccagtaataatgactgctgtgttggattccttctgcaaataaaagtgtatacatatatgtagcaaatcttacttaaacaaaagggtttcttaactaatgtcttgttccagtgattttaaacatcttgattgccactgtcctgatctaa

SEQ ID NO: 94529 - DNA, 2985 bp, Homo sapiens
tccatagatgaaaagaattctctgaagtttgacagatcacttttttccttctttttttttttttggagacacagtctcactctgtcacccacgctagagtacaatggcgcagtctcagctcactgcaacctctgcctcccaggttcaagcagttttccttcctcagcctcctgaaatagttgggattacagtcacgtgccaccacgcctggctaatttttgtagaaatgaggttttatcatgttggtcaggctggtcttgcactcctgacctcgtggtctgcccccccttggcctcccaaagtgctgggattacagatgtgagccaccgtgcctggccagtattttttcctaatagacgcattcccatttactccattaatgtgccagaatgtactgtggatgttcattttatatagtctttgaagactcagaagacttggttctaatcccaatcatataatagctactgaccttgagtaaattgccccccaaactcagtttgcttatccgtataatagggatagtagtaatatctacctttctagtatcacagagttgttattcacagttcatggggaagtgtaaatttgtggagtctgaattaatacttctaaattcatgaagtattaataaggtttcacttcccaagatgtgctcatttgttaagaaaaatgaggtcaggcacagtggctcatgcctgtaatcccagcactttgtggggccgaggtgggaggatcacttgagccctgagttcaagaccggcctgggcaacatagggagaccctgtctctattaaaaataaataaatgagccgggtgcagtggctcatgcctgtaatcccagcactttaggaagccaaggcgggtggatcacctgaagtcaggagttcgagaccagcgtggccaacatggtgaaaccccgtctctactaaaaatacaaaaattagccaggtgtggtggcgggagcgtgtagtctcagccacttgggaggctgaggcaggagaatcgcttgaacccaggaggttgaggttgcagtgagccaagatcgtgccattgcactccaagcctgggcaacaagagcgaaattccatctcaaaaaaataaaaataaataaataaatggggaaaaaataatgacctagttatttcgtgtgttttatagtgtcattggggacagagtacattttaatactggaattgtactaaaatttccaatagaattggaaatcttaattttgaccttacgaacttagtaaactaaagcatttttcttcagaaataatgattggccatttaagaaacagtaattaaaaccttaaaggcatttgaagagcaaaatttttttaatctagcattgacataatcactgattttgtattttagagatgctcttagtgatcttgcattacactttctgaataaaatgaagatcatggtgattaaggatattgaaagagaagacattgaattcatttgtaaggtaaaacattaacatctgtatttgtggaaaatgtctgataattagataaatgtcttaatttgtggatttgactgttttttccagacaattggaaccaagccagttgctcatattgaccaatttactgctgacatgctgggttctgctgagttagctgaggaggtcaatttaaatggttctggcaaactgctcaaggtaacagtattacacttaaatttttatttgcttaggtttgggtatggggttttaggttgttttttttctttttttgagacggagtctcactctgtcgcccaggttggagtgcagtggcatgatcttggctcactacaagctccgcctcccgggttcatgccattctcctgcctcagcctcccgggaagctgggactacaggcgcctgccaccacgccctgctaattttttgtatttttagtagagacggggtttcactgtgttagtcaggatggtctcgatctcctcacctcgttagccacccgcctcatcctcccaaagtgttgggtttacaggcgtgagccgccgtgcccggcctgggtgtggggtttttttgacccttcaaatacttaatttggaatttgtttactgaagattacaggctgtgccagccctggaaaaacagttacaattgttgttcgtggttctaacaaactggtgattgaagaagctgagcgctccattcatgatgccctatgtgttattcgttgtttagtgaagaagaggtaatgtcagtgttacattattaagtaacattttgaacattaaaactattatattctattttttaaagatataaatagcaaattattaaaaataattttcttttggataaaataagctaaaaatatatttgtgaatttcagggctcttattgcaggaggtggtgctccagaaatagagttggccctacgattaactgaatattcacgaacactgagtggtatggaatcctactgcgttcgtgcttttgcagatgctatggaggtcattccatctacactagctgaaaatgccggcctgaatcccatttctacagtaacagaactaagaaaccggcatgcccagggagaaaaaactgcaggcattaatgtccgaaaggtaatcatttaatctctaatgtagaaaatattgattaatttaaaatattaaaagctttgtagtcatctgttgaatggaaagctctgtaatgaaaagcataatcttggatttaaatatgaggcctgctgcatgttaattaatctatgccattgagtgagaaggaagatggtgacaccttagggggaagtattatttgttcattaaatctgccacttactgactagcttttagcaagttacttagtctgttcctcagtttcctcaggtgtaaaaacagggatgattaatagttccctcataggcctgttgtgagaattaaatgcatttctagttaacaagctcttagatagatgcttggcatatactaaagactgtataaaaaatcattgccc

SEQ ID NO: 94530 - DNA, 2334 bp, Homo sapiens
cgctgtttggccaaatgacttaacctcttggcttcagtttctccatctgaagattgaatgagttaatatgtaaagttctaagaccactgcctggcatatgttaagtgattgataaatgttagcaatttttatcaacccctcatcaggaatgtacatacataacattgatgcctcatcacacattcattttagatagaaaatactcacgtaaaattaaatttatgctttttggatttcctgtaaaactttgatattctacagtcccggctattatattaataaaagaaaaaagcaagcatacatgtttttattttgtgcccctggtgacaacctgaatggaaaagacactttatggactgtcttctcatgagtgtttccctcttcatacccacaccccactgcaaaaattataagagtctttcttaagtatctttgtcattgaaaaattaggacttttttctactgtgaaggtaacttttttttttttttaataattctaggtggtttctcagtattcaagtctgctttctccaatgagtgtaaatgcagtgatgaaagtgattgacccagccacagccaccagtgtagatcttagagatattaaaatagttaagaagcttgggtaagcatctctaattacaacttgaataaaaatttgaaaatgagcatcagattgccaaaaataaataaaaacacctagatgaaagtcacaaagctctcttttctctttttggttttgttttcgtgagaatttgtattagtatgggcatctggagattttgtttatgttaccttatgatagtaaggcagcagtggatcaaagagatccaggagtggggcaataataaatgtgaggctgaatcatattttattggactgatgacttttaatctgttcatctattaaacgtacagatgtccactccctcttaactacccctctttgttttcttttatccttagtgggacaattgatgactgtgagttggtggaagggctggttctcacccaaaaagtgtcaaattctggcataaccagagttgaaaaggccaagattgggcttattcagttttgcttatctgctcccaaaacagacgtaagtagaatccaaatgaaattggttctctgtgtttaactttttaataactcaggcatttctttattaaaaatagaaaatactactagtgatttaaagcagatctcaaaagacttactagaattgagacaaaaatagtaattgttggtgccacaagtgacaagtctgtatcctcagttgggatattgaaattgagagctagccatttgcaacgatgcctgtagtcccagctccttgggaaattgaagcagaaaaattgcttgaacctaggagtttgaggttgcagggtgctattccatgacctgtgaatagtccctgcactccactccagcctgggcaacatagtgggaccccatcttttcactgttgctgttaatttacaaattcacacagattagagagggaccctatcttttgaaaacaactagggtaaccattttatattttttggttataaaaaatttacttgcaaaatgtaagataccagtgtacttagttgaaaataaaagactcaagtttgggatgtgtatcttaatccagactcttttctatgcatgtctatataatttattacttgatatagttttggttgaatttatacaacacatagtattttcgcttaaaattctacttttaaacttaaaatatcttacaatgcaaattatgatgttctttttctgaacagatggataatcaaatagtggtttctgactatgcccagatggaccgagtgctgcgagaagagagagcctatattttaaatttagtgaagcaaattaaaaaaacaggatgtaatgtccttctcatacagaaatctattctaaggtgtggggctatttattttgttcatcccttaatgataattttggatctccactagcagtttattttttctgataaaatatatgatttaagcacttactctaagttcgtatttcttaacagacaactcttaggtgaaacgaaatggagaatttttattttaaaagcacaggtaaaatgttaggcctcaatattgtaccatcatttgctcagaccaagggaaaaaatggtataagttcagttaagatgtctaggaaaagcattttaaacaaatatatgacttgtaaattcaaaacaataaaggtgtaattttcttttacaaaaaaaagtaggttttttaaaatagccaactaactgccagaatgttgtgttttggccttttaaaaaacttatttcttcgattattggcttcagggt

SEQ ID NO: 94531 - DNA, 2591 bp, Homo sapiens
ctcgggagactgagacaggaggatctcttgagcccaggaggtggaggctgcagtgagccatgattgcactgctatactccagtctgggtgacagagtaagaccctgtctcaaaaaaaaaagtttgatactctagtctcatctggaatgccccttttcttagcttccaattctatagagtacttacgatatatttttgctttctaattagaacttttgagtagcagggcagggggagatgacaacccacaatctgaactggagatcatctactagtctttaattttaaatgaaacccaaggtagacaacaaatcagaagaaatcaggaatcatgttgcatcttcaaattctgtttgtgacactggtgcgattatttgaattaggtgttactgggttctgtcatttctcattgagcaacttggcattttctgttcacttagctggtggagctgtctaaggctcaagatatagaagcaggagatggcaccacatcagtagtcatcattgctggctccctcttagattcttgtaccaagcttcttcagaaaggtgggtaggatgtactttattactgaataaagaaaagtttaaaaaacaaactttaggaaaagccaagttattcataagtaatatgggattgaagatttaatttggaataactaatctttttaccaagaatttttaaagttagattttgctatatttataatagagattagaagaaattttccttggcttctgatatttgctgggctcctttttgaatggaactcaattgaattttgctgttcaaaaatgagtggtagaggccgggcgtggtggctcatgcctgtaattccagcactttgagaggccaaggtgggtggatcccctgaggtcaggagttcaagaccagcctgaccaacagtgaaacacagtctttactaaatacaaaaaattagccgggcatggtggcgcgtgcctgtaatcccagctaaggcaggagaatcacttgaacccgggaggtagaggttgcagtgagccaagatcatgccattgcagtccagcctgggcaacaagagcaaactccatctcaaaaaaaaaaaaagaaatgagtggtagaaatattactaatcttggactcttatacaagaaagaagatttgggagagaaagtcaggattgtctttgctttagtaaatggtatttaattatagtagtgactatccaatcacttattttacttataatgtagatttgtgatattttgagaagtatcggccaggtgcggtgactcatacttgtaatcccagcactttgggaggctgaggctggcagaacaattgagcccaaggagttgagaccagactgggcaacatggcaaaaccctgtctccaccaaaaaaaaaaaaaaaaaatacaaaaaaaattagccgggtgtggtggcgtgtgtctgtagtcccagctactcaggaggctgaggtgggaggatcacttgagcctgggaggttgaggctgtagtgagctgagatcagggcgctgcactctagcctgggtgacagagtaagaccctgtctcagaaaaaaaaaaaaaaaaaaaaagtataaaatttggttttagtcaagaccattaataagtgtgtaatctgttttaagttggatggaagtaaattattagccatagttagcaggttattcaagccactatattacaactgaagcataagtttgtaattaagaatagttaaatttgtgcttgctttgacattgagtagaaaatttttaagccatgtcaaatgtgtagtttacctgttacaattaaataactagactttcacaaattacagggattcatccaaccatcatttctgagtcattccagaaggccctggaaaagggcattgaaatcttgactgacatgtctcgacctgtggaactgagtgacagagaaactttgttaaatagtgcaaccacttcactgaactcaaaggtgagacaaacactaacggatacttgtcaaattagttaaaagtgtgttactctatgattcttgatgctatacggtacataaatactaaatctcaagagtggctaggtaactgttataatctgtataattgaattggtttaagattaagagaggaaatgagccataaggctaacaaaggagttaggatatttaatatatactatatccatttccacttttctgtttaatgcattgtaacagtgttttgataaagctagatattttaatttgcctataagaaaccttttcctccaccaaatcagaaagactgccatagattactggcagtatagctaatttttattgaatatttaatatggtgggcattgtgataagttttttacatttattgtcctcttcaaggccctcagatagtcatatccccattttatagatgaaaagagtagatctagaggagtaacttatccaaggaccgctaacagaaacagctgagatttgaacccaggacaggctgcccatcgtggtccatcccttaactaatacttatgctgcttttcttatttaccaaacttaaagcggtgttgtgcttttaaatttctttggaactcatgtcacttgttttctgt

SEQ ID NO: 94532 - DNA, 1019 bp, Homo sapiens
tgatactatagattattctccgctctggatattcaaaaatctatctttcccaaaaatgccattgtcctttttgtaggacaaaaaaggaaaaaagttactgtgttgactgtaagaattgtgttcaccgcatggcatggtactgctttaggggcatccatggtggaaatcgtgtttctgattaataagaaatcattaaagatagcaagtgcttctttataatatttttccttttgtgtgtgtgtgtgtgtgtgtgtgtgtgtgtgtgtgtgtgtgtctacatttcttcacttttagattaccctgcaacaaagccacttttttcttttgtaaagttggactgttattgcgtattcttaaactattatgctaatgtaagggaagagaatttaaaattaagtactttgcaaacagaaattaacttctctattttgaaatgtaaaagtttaataaaactattaaggtgtgacattgaaatataactttaaaattttttttctagattcaagatggaaaaggtgatgtaaccattacaaatgatggtgctaccattctgaaacaaatgcaagtattacatccagcagccagaatggtaagtgtaattttaggtgagtctttttttttttttttttttgagacagagtcttgctctgtcatccaggctagagtgccgtggcacaatctcagctcactgcaacctctgcctcccagattcatttctcctgcctcagcctcctgagtagctgggattacaggctcgtgccaccatgcctggttgatttttgtattttcagtagagacgggtttcaccatgttggtcaggctgttctcaaactcctgaccttgtgatccacctacgttggcctcccaaagtgctgggattacagacatgagctactgcgcccggccagatgagtcttcttttttaagtgtgtttgatacttggtaaacagttaaatttatttgatcacatgatatttaagcacgatgaacacttttcgtgctgaacaggcatattttta

SEQ ID NO: 94533 - DNA, 4650 bp, Homo sapiens
taaaaatacaaaaattagctgggcatggtggcggacgcctgtaatcccagctactcgggaggctgaggaggatcgcttgaacctgggaggcggaggctgcagtgagccgagattttgcgccactgcactccagcctgggcaacagagtgagactgtatccaaaaaaagaaaaaaaaaaaaaaaaaaaggaggggacctcatagccgtgcaaggtggagtgaggaaatgcggatgtcctcaccactcgcctttaaaatcgcgcgttgtcattgctgcctcgcgtaaaggttcccccggcgctcttcacccacagcgccccgggcgtacaatctcgccagcccggagcccaccgcacgcatcctcctcgcccggcgcgcagcggacagcctcctacgtcacgccagcgccgcgcggcaaggaaggcccccttctccgcctccgcctcctcccgacgccggcgccgctttctggaaggttcgtgaaggcagtgagggcttaccgttattacactgcggccggccagaatccgggtccatccgtccttcccgagccaacccagacacagcggagtttgccatgcccgagaatgtggcaccccggagcggggcgactgccggggctgccggcggccgcgggaaaggcgcctatcaggaccgcgacaagccagcccagatccgcttcagcaacatttccgccgccaaaggtatcactctcatggcctgacccgcggcgccgcggggttgtgctctgcgctctcatcgtgggcttgagcgggtttggctcatttcccatttcttcgggtgatcctctcttgtcctccctatagaagcagcccagtggagggatccttatttctgtttttctgccgatgatcgccaacccggagtatggaggcctttggacttgccccattttgcatcttaatctcccttagtttttcatcctgcactgtgcatcattcatattggagccgaaagcagttcaaaatgccgaggattgcatgcagtcttcactagggatctgacgcttgagggctgtcgcttattgcttattggaactggtagaatgcacagtatctttcagctttgttattcttatttaaagaactattaaataaacttcacttggcacaactgttgagacgaattgggtgaactctccgagtctaaattggggcggggcccattgtactgggatggatgtgggaaccgacttacgtgtcgtgtttgaaatagttgcggaaaagttacgttgatgtcgtctccgcatgtgcagtgaaacataggcaaatcaagaaacaattatttgttttttttgtggaagtgtgtggcacacgttggaaatcaggaagaccagagtttcattctctgcttccgttacttcatgtcttagtgacctgtaacctctgtgccaaagattcacttataaaattggaggaaaatgtttgctttttagagttaagattaagagaaatcgagttgaaatagaaaaatctggaaggaaaagtcaggacagaggtttagagatcttgcccgagtgtatattgagtatagtagttcttttgggttggagaatagtagtatgtttacagaagaggtgagattagaaagctaggttggggcagatgttaaaggcctggtgtcctggaaagtatttggcttaatctcccccagctatgggatcatttctttttagccatcgtgtaggcttgctgtgaggattcagtgagaaagcatataaagacccacgtatataaagtacaccttacatgtgtttgcagtcatcagcccaagtaactgggaatgtgatggcgctaagataggtaacgctggatgtaagaaaaagtaatagtttctaacttgtcctaatgagttggaaaggtcagaatggccagatttaggagtcatttgtaagtttaggagataatacacctggaaacgaaggtttgtaggataattgtctagggaccatagttgaagcttacatttattagattaggaacagaatgttgaaagataaattttgggtcgggcagggtggctcacgtctgtaatcccagcaatttgggaggctgaggctggcggatcacatgaggtcaggagttcaagaccagcctgaccaacatggagaaaccccgtctctactaaaaatacaaaattaggtgggtgtgttggcgtaggcctgtagtcccagctactcgggaggctgaggcaggggaatagcttgaacctgggaggcggaggttgccgtgaactgacgtcgcgccattgcactccagccagggtgacgagcgaaactccgtctcaaaaaaaaaaaaagataaatttgggggccaagagagtttataatatggttgatattcaacaaacaaaataagtgggaaatttagcaacctttgaaacaaaagcagacaaagaactgaaacaacagaggagggtgtgcatgtgggaaggaaaggccacctaagttatctgtgaagatgacccgttatgtcttaaactcctggcctcaagtgacggcctgccttggcttcgcaaagcgctgggattacaggcgtgagccaccgcacccggccccagagatgttttataacatactgatgatgaccaaaagctatgatttgagagttttggtttttgtttggtttgttaggtttggtttgtttgttgagatggagtctgtcttgctctgtcccccaggctggagtgcagtggtgtgatctctgctcattgcaacttctgcctcctgggttcaagcggttctcctgcctcagcctcccgagtagctagctgggactacagatgcgcaccgccacacccggctcatttttgtattagtagaggcagggtttcgccatgttgtccaggctggtctcgaactcctgaccttaggtggtctgcccgcctcagcctctcaaagtgctggtattacaagtgtgagccatcacgcccagccttgttggattttttagaagagtatcttgctctgtagcatttccattgtggtttgcccttttggcggtgttggcgggccacctatctaccatgttcacattagtgaacaaaagtctttgctctcagagattacatactagacagagtaaacaaataagtgaattatctgtaaattgagcattcctaatttgaaatactccaaaattcaaaacacttctggtcctaatcattttggaaaaaggatactcctccatcagtattttagatctagacagttctgttgctgcttgtcctgttttaggaatggaggaaatagcaattctcagagctcctaactagattgtaccattttgacatctgaaggaagatgagatgaatcctcaaaatgtattctgccataagctgattacaaatactaggccaggcgtggtggctcacacctgtaatcccagcattttgggaggccgaggcaggcggatcttgaggccaagagattgagaccatcctggccgacatggtgaaaccccatctctactaaaaaatacaaaaaaattagctgggtgtggtggcacgtgcctgtagtcccagctactccagaggctgaggcggaagaatcacttgaactcaggaggcggaggttgcagtgagccgagattgcctcactgcactctagccttgtgacagagtgagaccatgtctcaaaaaataataataataatactgtgtacgttgactaacagaagtgaagcatcatacatttaaaagaaaaataattgttgccaatagattatttttagacaatgaattttcttctgtggacatggtgatttgttatgcactatatcctaataagaacacaatgatcatttgaggggaaaaaaactctattctttaagaagtcttgatttcccatactcccagctattctgggaggctgaggtgggagggttgcttgagcccaggagtttgaggccatcctggacaatatagtaagaccctgtctcttaaaaaaaaaaaagttctaatttgttttcttttttttcccccccatctgcagcggttgctgatgctattagaacaagccttggaccaaaaggaatggataaaatggtaaagagttgagtcattgaatactactaattgagcactgctgttcacactacaagatcttgttgaagggttagatgtgctgtttaaaaagtggggctgggcgtggtggctcacacctataatcccagcactttgggagggtgaggggaggatcacctgaggtcaggagttggagaccatcctgaccaacatggagaaaccctatgtctactaaaaatacaaaattagccaggcatggtggctcatgcctgtaatcctagctcctggagaggctgtggcaggagaattgcttgaacctgggaggcagaggttgcggtgagctgagattgtgccattgcactctagcctgggcaataaaagcaaaactctatctcaaaaaaaaaataaataaaataaaaatagtagaaagtgggtggggcacagtggctcgcacctgtaattccagcactttgggaggccgagacgggtggatcacaaggtcaagagttcaagaccagcctggccaatatggtgaaaccccgtctctactaaaaatacaaaaattagccaggcatggtggcgggcacctgtaatcccagttactcag

SEQ ID NO: 94534 - DNA, 1040 bp, Homo sapiens
aacaaccttttattcttataatcttgctaacttctattgctgctcttaagcaggatgtacatttttcatataaatgacaacagagttcatactttcagttatctatgtaatatcatggtctgtgaagaaagtgaaaatgaagggtgacaagagggtagaagcaaaggaaggaaggaggggacatgtacttcccagcaggggatacagcggacacacgtgttaacagcctccttattgccaactgcctggaaatatatttcacaggccatgttttcaggttcaggtgctccctgagctgtagcccttccctctgactttcatgttgtgtgccaaggtgttatgtagtgattcctggcttttgtactggttctgttttctgtttagaatggagccctcctatcctacttgactgggacattgaccctctctagctttgcctgttaatcacaaaaggacaaacctttcacctgcttgtagatatgcgaagctggccattcacttgctctagtttttatttttgggtagaccctaaggaacaatgaagtcaatgaattgggaatggtgtgtttatttaaggagataacatcctatagataaatactcttgtatttatatataaaatatataaaaggcagttgctaaacactgcccccccctttttttttaagacggagtctcactctcttgcccaggctggagtgcggtggctcgatcttggctcactgcaacctctacctcctgggttcaagcaattctgcctcaacctcctgagtagctgggattacagacacccgccaccacacccagctaatttttgtattttagtagagatggggtttcaccacgttggccaagctggtcccgaactcctaacttcaagcagtccaccctccttggcgtcccatagtgttgggattacaggtgtgagccactgcgtccggcccaacactgctattttaatctactttttttgctcacattataattcaacttcttataggtatgagtttgcgtgatctttattgctattgctgttaacc

SEQ ID NO: 94535 - DNA, 1371 bp, Homo sapiens
gcagaattgcaagaatatctcagtctgagaccactctgttgtaagttcctagacctttttctctgaattctgtagggggagaacataataaagggaatggaaaagaccttgctgttgcaatattcctttcccagtgtcttagccaccctggctgcatttgggagctttgcaaaaggactcagcttctctcattttctctgactctgcctgactgtggtacaaagtctcatcctttcatcccttaacagatcagtaatttgttgaatgcttactatgttcaaaacactgtgtagatgcaataatgaatcagattcctgttggaggaaaagagctgtgatgtacataatgttgtctttgttaggaaaggatgattgtcagacgagtggacagataaagtgctgagagggaccaagatgaggcaagaggtggtgaggttggcatctgagagggatgcataaaagaggatgtctttggcctaagccttgaagaataggtagataggagacaacagagatgggaaagaggtcaagttgaaagaacagtaaaaacagcggccgtctgcagtggcttacgcctgtaatcccaacactttaggaggccaaagcggctggatcgcttgagccctggagttcgagaccagccttggcaacatggtgaaaccccgtcgctactaaaaacacaaaaactagccgggcatggtggtgggcacctgtaatcctagctactcaggaggctgaggcatgagaatcatttgaaccccggaggcggaggttgcagtgagccgagatcacaccactgcactccagtctgggcaaaagagcaagactccatctcaaaaataaagaaagagtagtaaaaacaaaggaaaggaaggagaaagcaggggcatataccaagacaaacaagtggcttgttgagtatttattaagagtatttaggtcaggcacagtggctcctgcctgtaatcccagcactttgggaggccaaggcgggaggatcatttgagcccaagagtttgagactagcctgagcaacatggcgagaccctgtctccataaaaaataaaaaattagcctggcatcgtggctcatgcctgtggccccagctacttgggaggctgaggtggcaagatcgtttgagcctgggaggttgaggctgcagtgtgctatgattgcaccactgccctccagcctgggtgaccgagtgagaccctgtctgaaaaaaaataattattagaagagattgatgtaacttggcagagtcaaatggaaagtgttcagttacttactgtaaacagacttgctctgttaaatttggtttaagagaaggaagaaatagtatttattgttccaatttataataaaattacac

SEQ ID NO: 94536 - DNA, 1077 bp, Homo sapiens
aaacaccatcataaaagcacttttttttttttttgagatggactctcactctctcccccaggctggagtgcagtggcccgatctcggctcactgcaagctccgactttcgggttcacgccattctcctgcctcagcctcctgagtagctgggactcacaggtgcccgcaactgcgcctggctaattttttatatttttagtagagacggggtttcaccgtgttagccaggatggtctcgatctcctgaccttgtgatctgcccgcctcggcctcccaaagtgctgggattacaggtgtgagccactgcgcctggcataaaagcacttttatttagggcattatgtggatatgctttgctgggtaaaatatcacttcgatattaaggtctgagctgggcttgctggattgggaccctgggtattttgagtttggtcatgccagatggccttggctatcttgtggtttccctctaaaatatccttttatgttttccaggaatctgaatttctgtgtttggaatttgatgaggtcaaagtcaaccaaattctgaagacgctgtcagaggtagaagaaagtatcagcacactgatcagccagcctaactgaagatgatgtatgaaggagttggagttgttgaaaccaaggtgtccatgatccctccccactgaccttttctaagaaaattcttgtgcccgcattggtattaaatcctcgcattcagtcttcctgcctctacttgctcagatttctttttttctagctttcatttagtcttacatttgttccagtgcagaggttctcacccttcagtgtgcataaatgttataaggggtacttgtaaaagcattcacttttttgttgttattattaaattcggagtgttgctctgttgcccaggctggagtgcagtggtgcagtcatggctcactgcagcctcaagctcctggactcaagcgagcctcccacctcagcctctcaagtagctgggactacaggtgcatgccaccacactcaggtaatttttgtattttttgtagagatggggtttcaccatgttgcccaggctggtctggaaa

SEQ ID NO: 94537 - DNA, 2270 bp, Homo sapiens
caccttccggacaccctgctacccccgcccggttcctcgccggttccggcttcgtacccgcgccccggtggaggaagccgtccctaggtggctcctgccgcatttaagcctcccttaccttcccgccgtcccagccacccaacctcagcccagagggagaggagagggacaccgcccgctgcggggctttggaacctcccaacccattccgtgcccacctcgccctggagcccggggaccttccccctcctcgctgcaccccaacttccgggggatccggcgccggggcgatgcgggctttggcaaggggcatctggggccgggcctcctcatccggggcgcgcgggcatttcggggaggggggcgcgcgtgattcctcgctcgcacccccgcaccccaccctcgcactgcgccggcctcccgtgccgcatggggagatcaggtgttttgtgagccaaagagccgccggcagccgctccccaccccccacccccaacctctgccacttctgtctccggctcccccaaaactggtttctgccaaacttagggaaaacctttcgctttgaccttttaaaaaaaatattccacactgtttgcgttgaatgattaaccaggctgctagcccgagtcgtgggggtggggtggggcggggtggggtgggtgctgccaggccagggagcgcctgaagccggactctacgagacacccctcgtgggaaggtgggcgtggggggccctgccggggctgcgggcgcgggactggcggctactccagcacggcaggcggacccttctggaggcaataaaccgagtcacccggttaatttccaggccacggtatttgaaactcggggctggggagccgcagaactccctgtacccccatcaagtagaggagccgtcgggagactccccacaagtgtcacagcgtcaaagctcatctttaaaaatatgtacatttataacctgggttggcgaggcggcgctcttctgcccaaaacgtaggggtggttagtttgtagagtgggcttagctcacaggtgcctgagctgtatccccgtggccgcctcagccaccccaacttctcagaaagattgtttagaacaattaaactatattcttttgcccttctcttgttggaaccctaccgtaatatccgatagcgaagccagttggtgaatatagaattctacttgttaaaacaaattcttccggtataattatttgtgcctctggaggtggtaaacgaggtggccgacagggccgggactgggagtgaaaaggcggggaccctggccgagccagtcccggggctccggtgccggcttatagtcgcacccatgcggatctgacagctgacccggagggaggaccggcagggcagggcagggcggtcacttcccattgtcctaactcctgctcctggttcttttgagtagagggtggttaagcctggaggaatttgggagagttttactcggagcccatgcgctcttaaaccagattagattttaagaacacagaagtgaaggagccccatagggctgtacttgagtaatttgagtaatccttttcctccctgctcagactttacaaatgtgtttatcattagatcttctgtttgaaactacttttttagttcggaatattgctttttctccctacagcaagggttcactgtttctcatttagtttttgtgcaggcggcatttgtatgatgaaggcctaattctctgtgaaactgaccagttctcacccttgccattcattagacttgattctgccacatttaattcagtgatcttgggcaagttattcttcacctgagcctcattttacacatctggttttggggatggtggtgtttgctctgcaagattatttctgaggacaaataggatgtttgccaaactcctagcactgcaccaggagagctaagaagtgcttaataaatggtggtcattgctgtaatcaatagagaagttcctcctggcatcgacttccccttaccaaaaacagtaaccctgtggtagccttttagatttccctgtctgagactgaaatcagccacatttggcagatgcacatcagaaggttcttaaaacctaagtagtattttgaggaaaataagcatgatttgcttgttgttcaaaaattatgaatttttttctgggcttctggtgaagggctgaatatatgaaggtttgtagttttgaaaattttcttgttttaaagaaaagtcatgttttaggtttctgataaactaaag

SEQ ID NO: 94538 - DNA, 1050 bp, Homo sapiens
tttttgatggttttattggaaagtctgttagagactttaaaaattaataactgcctatggttacttttataaacattgagaccttgagatcttgcaactaggataatacttggtgatgtgtaatctattgcaacatccctgatggtggtacatacatcaccaatactgaaagattctcataaaggccttttggtctcttatgtaagtgcccaggggaaactaaagtcatttggttgcttggtatttttggtgtgtacagaaggttaaaacatgaattaaactagactctgaagtggtaaatgtttcctggctgcatccagtaaagaaaacagcacaaacacccaaaaggtgtggacccagctgtctttttctccactctctaaggtgggattgctgttcctacgtacttgccaaatatgtctgcaaattacagaatgaatacattcctctctctggagaggcaattactgtttgaataagaggtgtatgtatgtgtggggtaaggttttgggagaattgatgtaatgatttcatcatcactcactggtaaggagactttgccaggctggaacctgttacttgatggagaatttattattagggcttatgtggcacaattactttgctgctggaaaaagttatttgtactgagttttctatttgttacaaattttaagagttgagatttttgccctctgtgtgttgccctgtgagtattaacaacctctgcccaccagctttgtctttttgccttgtcttaatttttgtaacaaaaattcagatgtcttttgagagtcataacatgtatcttgtgcaattttagctttaggtattttcatatataactttaagaatgttacacattattttctgtgcatctataacttaaaaaaaacaaaaaccattttctgatgtggctacagagggggaaattcccagtagccaggaaattgatactttctacttttcattctgtggcattttaaaacagagggttcaggtgtcttcattctgatatgagtaggatgtacgtagcttaccagaatgttt

SEQ ID NO: 94539 - DNA, 1307 bp, Homo sapiens
gatgggttttacctgttgaacttcatgtaagtggaatcagtcatacagtgtggcatgtagtcttttgtgaaataggcttgaattctatttttaccacttattgtgtgactacggacaagttatttaatctgagtctcagttacgtatgggaatgcctaaagttaaaattacacgaactatttcaggataaattttctcacttgtaaaatggggaagataaagccctatgttagatttactggggaaagtaatataaagctacacctagaatacctagcactgtgcctgactgcagtttcctcttcccctttttatttctttaacagggtgataactaaagcaactagatcttttgtgtttaaatgagctatttcattaaaagttctgtaggtcttttattgaaaattagaagacaaatctttatttaatactttgttgatatagctttagctttaagatgtattatttgttagttgcctgtttttgacatttcctctctaaagacagtcattgaaatgtcccattcagagttgtttggccacctgtgtaacatgagctaggatgcagtgatgagaactggtttatggtcaattatggagcttgtggaagagtttagtttgggtaagagtcatcaataagtgcccaagatgctcacaacatctgctttatgtttagtgaaataattatttcagaggtgaaagcacaggaccaattattttaattgcttgcttcagacaagccacttaaaacattttcagctcttgtaatcttaccgtgtaagcggtattacataattccatggcctcatgtctccttatttgtttggtacttttcatttttggactcattctgcaaatgtaacttgggtagtacttggcattctttctaaatgactttcattaaatgtttatttagaaaaagtattcaagataaagtaaaggaaaataaaactaattccaccctctctcaccactataactacattaacttgatgtgggtccttctaagtgctcatttcttcttttgtacacttctagaatgaccttaggaaaaacatacttccaatactttatggaaatttaaaacaaaatatgggcctgcttagagatgtctagcagagaaggcaagagtcttcgtaggcctaagttcaaatctgtccacactgtggtccctacttgtacctttgttagtgctgagcagacagtccccagagactccatcagagggtcccctggtctccagattacagtagccaacacggaaaacctgccctggaatacttctccattaagacctcaagatgtttg

SEQ ID NO: 94540 - DNA, 1305 bp, Homo sapiens
gagttcaaatgtcacctaccaggactggtgatctgccctcctcctcctacctcccttctccccctcatttcactccaggcacaaggcccccagctttcctgcctctggcctttgtggtgactgctccccctgcctggaactatcctcacctcttctctgagaggaggttttctctgatcacccggcataaagcagcctttccttatcccctgtgcagtgcttcatatttcatctaagtgtttatcaaccttacagcaatcaactctgacttggttctttgctgcctgttttcaacactgcttggtttaagtaggcgtttgacatttgttgagttaggccacttcattaaagttagtcttagtagaggggaaactgagggctcaaaccagggcagggatagtacaagattgaaatatgtatgtgtgttgtttggaagaggtgggtgagagaaagactcctggtgggtgtaaaggaatttggaaaccaactaagggaggttaggagaagggccatgacacaggtatattggggcattttttagcatacgggatatgggagtctgtagtgatgtctaggggacaagaatagggggtaagggaagacccagcaatagacttgggcccagaactgtggagcaagtccattttgtgggatggggccaaggagcaaaggctgccaacatgcaagagaaccctgggggttcctgagcttggggtggggtagacatggtggccagcagtattgggtgccctagaaagtcaggagggtgcaaggactgcgaagattctagaaggtgagggggattgggagggtcaaggcaggacaaatgggcatgacaaggagcatgtgcctggtgcctttggagagggagaggctgaagatgggggaaacagtggagattgctattggtgcaagaccccagaagcagcaagagctgtcacagggagtggagatcctgggagttgggggtcagggactggctgatgtagagaacttgaagtaggttttggtcccagagctgacatcaaatgtctttgtagctatggcaacccacttagctcctgtttcccacctccctgcagaatcgcatgaaacctgcacagccaatttcacatgtttattattggaatccattgaactcatgaatatgaaagtgttaatgctctgggaagatatttctatggaccataaacttgctgcagtttatttgtgcttcagaattttttttgagacagaatttccctcttgttgcccaggccggagcgcaatggcatgaccttggctcactgcaacctctttctcctg

SEQ ID NO: 94541 - DNA, 2054 bp, Homo sapiens
tggctaattttgtatttctagtagagacagggtttctccgtgctggtcaggctggtctcgaactcccaaccttaggtgatccacctgccttggcctcccaaagtgcctggtagaaatttttctaattgtttattttctttgagaagcacttaacatccaactggttctccaaagtacttcttttttgagtcttgatcagggaataacacaattgtggtgagttttatgtgcatgtgtgtttttaaccctccaggtctggctctagattgttcactgggaagccgaatgatattttcagattcaaatatatttgtctaataatgaaagggtcgaagtgttacaaatgctatcctttctaaatagtcaacatttggaactagtgagatatatttttacctttattattttatggttgtctttgaagcttgtttataaggaacttttatgtaactttattcttgagatgcagccattatatttttgttcttttcctttaccacataaggaattatttccttcaaatgaacttaaaatatctctcatgaatactcctatttttaactgaatgtttctcttttttaaaaaacttttattcttcaaagttctgatggatcgtctttttttaactctttataatggaaattttcaaacaagtgcagatacagagaatggtatcatgaagcttcaggtagccaccagcggcttcagggtgatgattctttattttcatctctaccccactcacgactaggggcccatgggcaccatctagagagggagagagaagaaggtcacaatggaccacagagtgggcagccatcaatttagagatagcggaggctgggggagaagattggacgcccccagggagagtgacaggcagaccggcgagattggaagcccgtggcactgggattgctgtggtccctcgtccctccacatatgtgatcacctatggtatatgaagggaacgtgcagagactcgtttaaaactgaggtgactcaaattgcttggtaaaagaggcccagtttttaagcagttcaatagtgcccacatattgagcaaacatgttctctttttactgtggcgacaaaaacttttcttggcgggtggccggagaaagctatgttactattgcacttctttaaatacggaagcaagtcttggtcgaaggcctgaatgatgcctccccttttatagaacatttggataaaaggccaaagtgttacttttttttgaggatacgtattttaaaatgtatatggtttattttgatacttaaaaagcaacaacttgaaaacaacagtcctgaaacacttgtcagtaaggtgttaggatttaaccagcctttgagaaagggagaagaggcgggacaggaatccgagatggagcagggagctggtttgcttctttgccgccttgctctgaagttgccacccagggtcacacatcactagaagtgttttcctctgggaggaggatgatgtctgactgtggagaagaggcagcatcccagagggagcccaatttaactggatgctcagtgtgagaggaggagcgctggcatttagtggctgtgtgccgtgggcggggcctgccagcccttggctgtcatttgccacctgagggacaggctgcttagttccagcctcctggctcacctggaaccatttctcctgggaagcatggtagccaggagagtggattccaggtggtgagggcttggtactccttttgggggatcctgagtgccaggagaagaggatgaaatcgatggactgggggaatcaaggctgtcctcatggaagaggagacaggatttgaacctgggccttcaaggatgggggtaaggatggagagaagcaagataagggatgttttaagccaggagaaaccaggctgagaagaggtatgggtggggaggatagtagttgttgttaaggggtgctggtgtctagaggcctccgggatggggttttaggggtggcctgcctggatcaaggatcagcttggacgtgctcagcgaggatggggatgcccatttccctccatg

SEQ ID NO: 94542 - DNA, 1004 bp, Homo sapiens
tcactcagctaatgggtgggcactaggtgtgcagtggttaatttgttttattataaggagtgtccttgatacctttatctcatttctctattttttttcccttccccaaagtgttagaccatgcactttaatccaacattatttttatatgttttttattcttgtagagacaggatctctctctgttgcccaggctggcctcgagtgatcctctcacttccacctcccaaagcactgggattacaggtgtaagccactgtgcctggcctagtacaacattatttaaaaatctctacacatgtctactctgcagaactttctgcactctttgtgcctgcttttggaagagcgagtcaggcagttctctccaagctgctaccctacaagactccaaatggataagccaaggagtcctgcagtctgaggttgtagtacctcactttctggtgtccccttcgctgtaaccaagagcatattctcttttaagaaaatgtgtcactggaaaccttcatcctaactaccaagaaattgagacttcccaaagcaatttattaaattacttaaaatacaatgtcatttgtataattgtgaacacttattgaagttacagaaggttatttttaatatgctatatgtaatctcaagttgcagcatgttcaatgcttttttgattttgaggttacatttttattttggaaggaagacaaatgtaaacgtttatcttgcagggaaatgttggggatgctctcaaactctacagttttgtttttttttttaagacagggtctcactctgtcgctcaggttggagtgccgtggcacgatctgggtacaccgcaacctctgcttcctgggttcaagcgattcttctgtctcagcctcacgagtagttgggacaacacacatgctacaggccaccatgcccagctaatttttgtattttttgcagagacggggtttcatcatttggttagacttacggttcttgagggacaagaattgcca

SEQ ID NO: 94543 - DNA, 2283 bp, Homo sapiens
atcaaaatggtcaaagaatacaaaatgtccttagattaggtcctggttcctttactgtccctccccttcttgttctcatattgattgtgtgttgagtggtaggcactagagatgcagaagtgaatatggcccattctgcccaggagtccttggtgtgtcagacctgttatcacaccgtgtgctaagtcagataaatgtgggtgaggtggtggtaacagcaagggggaagaaatacaagcagcccaacctgggtgggggcagtggggtgggaggaagaggtgacacattggcgcttttttggttgttgttgttgcagtctcactcttgcccaggctgggtcggagtgcagtggtacatttcagctcactgcagcctctgcctcccgggttcaagcgcctcagccttcctagtagctgggattacagacatgagccaccatacccggctaatttcgggccattggctcttctgtttttatgttgatagcccagaatggaagctatagactgtgagaaaaagactttgttactaatgataattttgactactggactggactccccagtcccctgggacacgtggtagtaatcctggttctcttccccagggcagccttgggcaaggctctgtctccctgtgccttggtctcctctgctgtaaaagagatattagagtggatggtctgtaaggccctgggaaagaaattcttggagcttctttctggtaatgaaattgggtcacaatctatgtatgaattcatgtgcatgttgttgaaaaacaagtaaaagaatgaggtaagccaggcgtggtggcacacttgtagtcccagctacaagctggtggctgaggtgagaggatcacttgagcccaggaattcaagaccagatggggcaacacagaacacaggccagaccctttacccgcccccacgccgtcaccccccacacacaccaagagtgagatggtacagttggtgggtaacgctggttctttgatccctttccttcacaggagagctggggtctggaccagccctgtgccactgtcccaaccctgtggcaggttgtaaagttgtgctgatctcccttcactgcaggctgtgatgttggagggaaggaaaagcagattttctccacctgtagccagctctgacaggtgtttaagacgaggctagtttaagccccagcagtctctcatcctttcgtatgaataatcaaaactgagtcatcacaaaacatatctgcaggggattctgcctatggtgcggaagtgttaccagaccaggacccctggatacgttaaaccattgggtgattcccgactggccattttgttgtctacattattactttctcatatcaatttggaaagaaaaaaaaattcgattccccctgcctttccttggaatggtttacatcttcctggatgggtatccacaaatgcaataattttggtaccttaattttttagaactacaactttatttggggattctcaatcctcctcgagcaacggtattgtgtggtagaaagtataagagcttagacccaaggttgggaccagagtccaaacactgactccactgggattagctctgtgacctcaaactaattgcctcacattttttagtttgttgtggagattaaatgagatgagaacatcccaacattaaaaatgggcaaagggcatgggggagtaggaagaccaggaaggaagcatatgaaaagatggcatcaattaaaacagggagatgttcttttttggtaaagattaaaaaggaggacagtggccgggtgcggtggctcagacctgtaatcccagcactttgggaggctgaagtgggcagatcacttgaggtcaggagttcgagaccatcctggctaatatagcgaaaccccatctctactaaataatacaaaaattagctgggtgtggtggtgggcgcctacagtcccagctacttgggaggcagaggtaggagaatcacttgaacccgggaggcaggggttgcagtgagccgagatcgcaccactgactccagcctggatgacagagcaagactccatctcaaaaaaaataataataataataggagtacagtattcactgtcagtgtggatgacttcatgctcttgggtatacaacgagaggataaatcagtgtgacctttctttttggtgggaggttaagggtgagagtgaggggaatagcttgattctatgctaactgactttaaaaggttgggttcccttcgtaatatgtttcctccggaagtaaccagat

SEQ ID NO: 94544 - DNA, 1721 bp, Homo sapiens
gttttcagttataggaaaaatcagaaacaactcataagctcattgattagcaattgataaagcagttgggtggggtggctcgtgcctgtaatcccagcactttgggaggctgaggcaggtggatcatttgaggccaggagtttgagaccagcctaggcgacatggcaaaaccctgtctccacaaaaaataccaaaattagccaggtgtggtgacatgcctgtagtcccagctactcaggatgctgaagtgtgggggcatcgattgaacccaggaggttgaggctgcagtgagctgtgattgcgccactgcacttcaacctgggtgacagagtaagaccctgtcccccccgtcccccccaaaaaaatttgataaggcagaccacatttacctatattctggcaggggagttagagatccgacagaagacaaaccactcttcccctgtgaactgaatctgctttagagaaattaagtcttcgggacaacaaaaccaactaaagttgtaatcaatgggcatccaacttggagttcttcgttttttcccttatttcatgttcctatgtgatgtggtcagttttctgttttaagtagaggggacaggaaagaaaacacattcctccagtccatccagcagcagcatttgtgaagcagccacagcttcacatactttcttcctagcagccctgggccccaccagctcctccctgcccttctagtgtggcctcagaagctgtctgtccatgaactggctgtgtccatctctgcctgcagacgctctgtgccgtaccccatgtcttgcctgccctgcttctctctacatttctgaaatttgccctgttggaagccccactaaggtcctgccttgacccctgctgttgactaaagggctgtcacgtatttattatctctgccaattcagtgtataggacccatgttttatacccgcttttccccaaaccccagacttaaataaaaatgttcgttgttagaaatgactctgggttggtgatgtagagatctataacttgtgccagtttttaagtattgccttcctgctccaaattcaccctcagttgcctgatctctgaaaatgggtctgggccctttaaatgttttttctttgccttttgtaagtagagggctctgaaggggaccttgtaggaggaagggatttttcttcctgatttcatatgtgtgcatgcgcatgcttttcctgcactcctatattcctgcagggcacacctttctccagcatctgttgctctgttttctgcagctctggcatcggtggtaccaggagcctaagactgggtggtccttatccaacccagatcattgcttcctacagcctctcagcccccatgtgtgtaccccaagcccccctggtgctggccatctggtgagctagccacctgatctttgtcctcagcacaaccctaagctgctctggcctagggtatacattgacgtggtaagctcctatggagggaggcctcttcactctggtccagcagcacctgatgactccctgtgtgtgcccctccttccttctgtctgcttgactgtctacacccagacttgcttgcctgtaccctagagggttgcccctgctgcttggtgactgtgggggatctctggcctaggtacccaggagtttttctgccatctatactttcttcaacaaactcagaaaaaacccctgccctaccaaattttggga

SEQ ID NO: 94545 - DNA, 1037 bp, Homo sapiens
aatgtgcttcgtttagggtttggtggaaaaggcagacccctgaagagctattggaggttgtatcatcccattttacaaaggaggaaagtgaggcttagagaggtcgggtaacttgcctaaggtcacacagccagtaggtagcataaccagaatttaatcctggtcctgtcactccagatgccaaactggttttccagtctgaaaatggatctgggacatctccatcctcaaacgtctgctacccttatttttaaattgcataatctttccacctagacctaaaaccctctttagtttactaaaggcagggcagaatggcctctgggagggttaattcccttctcctcttttcctcaaaggttctgtatgtgtttatttgaagaatacttctagtggctaatttgatttgaaatgatgaatatcatttgagaaaatcggccacactgggctttcggggggttgtaatcagtgggggccagaatatgtcctgccagatgctttgatctataatgttgcctgtgggactgtgtaggtgagtagattcattataaatacgtttcccttttaatttgaacatgaaggctaaaagtaatggctgggaaccaaattccttaaatctagctgacaatagttctgtgacttacagactggagagcagaggtagaccatcatcttagctgagtgccagcctcttggtgagggagtccagggagtcctgaggctcccttgccccggtgaaaacccaggccaggcctctttccgcaatcaaggaacaagctgtaggtgtggcccagctcttctggtcccactgagctgctccactcacacccttatcactccaccatctgccagcagtgctgggagctattctctcccctagagccatttagctgcaaactgtctctgtctctgtttatccgagcagaacctggaaggggctggcaaggactaggcaacagatgggacagccagagaggtgaggacttaggtaaaccactcttgccagactcccggaggtggtggggagggaaagggca

SEQ ID NO: 94546 - DNA, 1959 bp, Homo sapiens
gtgtagtattttatctagattgtcacatagtttcagcatcatgtctactgttttgtaagccatttttcagctaaggttttctctgttatactgtctttctaaatattttcatttcattaaacaaaaccaactgaagtttcaaaactgttctgtccctgttggggacaaggtaaaaagctaaggttgctttgtgtttgtatatggggttttctcttatttctgttacaacagaaagtctgtgtttcacagcgagagtttataacatcttcccccagctttggggtgagttttcttaaattcttcttacgcaatgtaacttcctgctgaagaaaggacattggaattgggttttctgtctgcgatgggaatgtttagtcagatatttagagagctttttcccacagatatttttatgggggtcactgctttatcctcctttccatgaacttggctttgttctaagagcctactagaagccgagttctcatgcaagacactgtgcccaggtcacaagtgcacgatgacatttaaccttgatggaaatgtgcagttgagaatcttgttttctccaccttcctcttcagattggcttgaaagaaataccctttagcaagtaatgggaagagttgcctcaaattgagcctttgggaatctgaagtcttttacaagaaaggctgatctgtttcctgaggtggggctgggagcttgtaggtgcccccatttctctttctttggagcctctttaactatcaatgtaccatgatcccgtgccataatcagcctgtgggacttcactgttgacctggtccaggtaactagaatgtggttgagcctcatagaaaaaagagatccagagagtcctggattgggagccagaaggtggtcttgtctaagccttgtcacgtaactcttccataatattcaggcaaatcatcagtcccctctgagcttccattttctcctggtaaagtggcatcccgtgcaatgagaaatgagcaggaaaatgccctgcgggctggaggccttgagcacttaaatgaaagttgagggtggtgttcccgggaaggccattcattagtccctgtgtcttgagccaaggtgatgtgagaactgtaccttgacgtggccttgattgaggaaataaaaggctgaattgtagcagatgaagttggaaatcttgccaggggtcagcaagcttattcctcaaagcatcctcaaaagaaggattggtgttttccgtgatagaggcttcaagtggttatggctggattccagttattcatggcctctcccataatctagatgtataaacttgttaaattatctggagtcatttttacatgttattcactctgtatctttcctaggagaattagctctggaagttcacagcctcctatgtaaagtactgtgcttcccttttttcttccctaagctgtcctcttttactccagaaattttggtaaaggtctattaatgtttaaatccctttactgagttaaatttttgccgggtattaagctgttcatagtatgtgctgttttttcctgagtagttttgctctgtcacccaggctggagtgcagtggcacgatctcagctcactgcaacctcagcctcccaagtagcttggactacaggagtgcaccaccatgccttttttgtatttttagtagaggcagggttttgctgtgttggccaggctggtctcaaactcctggcctcaagtgatctgcccacctcggcctaccaaagcaaagtgctgggtttacaggcgtgagtcactctgcctggcccctttgcaaatctttttcttcattgtagtttttcaccatcacacatttcctgttgcccttccttccagactaggaagggcctgagacctagagacagcagtactgggtcaagggctcactttagcattaggagaattgtcccaagttagagagaaccttttctt

SEQ ID NO: 94547 - DNA, 1339 bp, Homo sapiens
ctcttctataatattcctacttcccataataatgactgatttatttgtaattcaggtatttataaacctattggctacaaagactttgttaaacattatccagtggttttcgtgaaatggaattatgtttatttttatgggatttgggtaaattttaaattgtctagaaaactgaaatttcagttgtcagttgtggaattcagtttttcaattgtggaaatttcctgccaccccaacagtatttttgtgtgttaattaattttgcaaaatgagaatcatggtgtgacactcatctaatttatcttgttgtgatgttatggtcataataaggagaaagagggtttaatttttcttgtatttggtttcctggtggtatcatagtgtaattttagtatttgaaaatcagtgtgattccttaatggccaactgaagattgaattgccgctaacaaccatatcgtgttagtgaattttcaatatggaccaggaaggcatatgtattttgaacttgagtgaaaaggttgaagttacagacttttgcatagatggtttgtcaatttaaaattccagaatttattattgccatattttcacatgctgcttatacaagattattattgagtagtaactgcttccctgtctatgtagaagtgcctgtgtttttatttattgttcagatcaaagaccaaaacattttcttaaatatattttatgtaatattttatttgtatacagtgttgttgatgaaatatttaactagagcatgatattttaaatgttaaggtgtaacatatgttaaataaaactgttatttttgaattttaaaatttgttttttgggggtatgaactactagagtttaaaattctgccaaactattacttatatgtactattgtgtaacatactttcttgaaatatttttgtttatagaattgaaggttcttatcagatgggatactggggactataaacaatggaaataaagccactgtatttttaattttttgtgtaatgtgtaatctataatccttttgtttcccatatttgagaacatttttccctgaaagaggccagtttcctccccagaaaccattacagtagtgttgaactatcactgtctctcagtgcgtcatccatctttgcatttaaaatccccaaagtgctttcccatttaaagtctttaaagaaaagtgagaatatttatttatgcttccattttcagtgagtataaataatttaattagggagtggtgtggcattgtaaagattgtgttatcctaagccatttctattttggagtttgtagccacaaagatgaaatatagaatcagccttgact

SEQ ID NO: 94548 - DNA, 1001 bp, Homo sapiens
acaggcaagagccaccatgtctggccttagtagattgtagaattctgccggaaccatcactccactacaaagccaatttggttttaagtcatgatgattctacccgccctctagaaattttttattttggccctctttttttctttaaaaaatttctgaaacagtttgttctctgattgctcctctttccataggagcctgttcttcatggatgtaaggactgtgtataagaaaatgaattagagttttttttttttttttttacaattcttatctcagggattaggtgagttgttcaccctaattcttatggagaagaacaaatactaagtgatgcttggtcctttaatgcaggactgaactgatttgtagaagttcctaggaggtgtttctttttctgggctgtttacccacaaggccacttcctacactggaaggctgggtgagggtcactgtatggacgtatgtcctggcttcctttcagggactgagcaggttgggggcaggtagacttgaccccagatcttggagctgcctttcttccctttgctctgggtctgtttcgcggtattctactcagctgcttcaacctgaaccctctacctccccttcagtttagggagcattccttagcaggtaagcatctgagctcacgtgcacttaacctgtgtgtttgcgtgtgcgcatgtgcgtgtgcatttgagtcttgaagagttggtgaagccagccccccagttagtcaccccttctgcctcctccaagctgggagcctttccagagaagtcttcctgtaacccacatcccgtgcagccttctccccatcgtgtgctgggctgtggtttcctcttccagtttgtccattaatacagtgccggatgtttcccgtctttcacaaaatgaattatttctcttggtggtattgtcttcactgccagtgcggccttgggcttcttcattatatcttttgttatttagatagggaaggaggcaaacacttctga

SEQ ID NO: 94549 - DNA, 1047 bp, Homo sapiens
gttagtagagatgtgggggtttcaccatgttggccaggctggtctcaaactcctgacctcaggtgatctgcccacctcggcctcccaaagtgctgggattacaggcgtgagccactgtgcccggacttagccttttttccccttttcttttttttttacaattttttatggggcaatatttcatcccataaaatagaatgagtgtcctccctggccttttcactaaaatgcttttatttgtgtcactataaaacaagtctgcaccctatcagtttcctatgcctttgtcataaagttgtaaaataacctaatgagtagtaaatagcaagttagacaaaggtctacacccctagaaagtcaggtaattccttgaacaggcctgccagacaatgcccaaggctgacatgactcaaaggacctgcaggaatctctgctccattttcaagtcttggacaattttccctaacaattttcctgttcctatttcccaggggaaaggaaacaggaatgtgaggcccacagctgtgcccagggaggaaatagtgaactgagctatcaaagaagggagaggcccagggatgtcctgtggtcctaaggaagctagctggtctgcatcccagcaggacatcagtggttttgaaaaatataggcattcatagaaaagatagcaggaaagaaaaccagacagggctgtctggatccacagaccacccagatcatcctcagacccaccagaatcattcttgccccagggttccagacccatggcaggtggcacagcctgggacctggcctctccctctaggtttcatgagcactgttccaactgccatgacttcgggtgagtccctcagcctttctttttcttttctttttttttttcttttttttttttttggagatagagtattgctctgtcgcccaagctggagtgtagtggcatgatcttggctcaccacaacctccccctcccgggttcaagagagtctcctgcctcagcctcctgagtagctgggattacaggcgcacaccaccacaccgggctga

SEQ ID NO: 94550 - DNA, 1010 bp, Homo sapiens
gccccctcatcaggcagtgcctacccacccctcatagaaacccacatgtacagagggactcaggttcaaggccttctcttttttggttgccccgtagataagcactcatggcattttagttttgtaagtttcacagcagataattacaggaaaacagataggggatggtcaaaagagcaaatcccaggaaggtgcgaagtcctcccaggctggtcctgactttctgggaataggaagtgttactcctgaagactgtggcgattcataggacttttatattgaacatgggaccaggacaccgagaggcaggtcagccctggagaaatttcagccagtgctagtttcctgtcaggaagggcaggggagaaatgggcagcttccactcttcacaaaggatagcagtgaatgaactccactgctacagagacaaacccctcaggtcctggctgaagacagacgaggcagccagcaatctcagatgccttacctatttccaggggacagggggctggacacagagaggagggtcaccagcctggcacagagaacacagagagcagaaaactgagccaagaaggctgccccctccaagtgtttacctgaaatattcacaaacatgatgagtcacagaaagaaagcagaaaaaccagtaagatgtgtaaccagattctcttccacaaagcaaggagaagttgtggcaataatgccagtgggcacggtgtgctctgctgagggccctgcttgagaaacctgtgtctccaccacactttcggcctcagctaaggttgagaagggaaactgacaactgtgccagggcaggaaagtccctgcaggaagcctgctgctggtctgggttaccagggcaactggcagctgctctcttctcttgaaagagaatggacttgggaggcccagatgggctctgccctagtagcccaaataagaaggcttaaccttagacagcatcaaataacatcggagtacgccgcccccacagcacttcccatgca

SEQ ID NO: 94551 - DNA, 1040 bp, Homo sapiens
ctaggaaagcccctttccacttcacccctgctgggtgagccctgtcctggtgctcttccacgtgactctacagaggcagccagcagccttactggctggctcttaaagaggctgcggtttggcccagggctgagcaaagagagaaggccgtgtgttctctagcctcaggagagctgggggcagggtatgccagcacatccctggactagcctacaccctgtcaggttttcaaagcatggaaaagaccctaaaaattagaagattgggaccccacatcttcgtttgacatttagcctgaagtccaagggacagtcatctttggccccttaaaatatcagtgacttccagtggaattacagttggggtcctgacttgagctgttgatgtttttgtcacatctacgtttaacctctagattgctagatagaactgtgtgtatgtgggtgcatgtgggtgttgggggagagggttgtcacagtggactgagtgttcaccatagagagaacttggagacacaggggagaaccaaagagtaaagtcccagactgcaagacccttatggttcagctgataagcagacagtcccatatatgtgcaagaaaccaaggatgcttgtatttgtgtttgccagcaaggccgattcagggggctgaagcccatcaagtgtggctgtcagagaactgggggatggctcagaggtgggaggggactagctagaggcatggtagctagagctagcagagtttgacagagccaagtgttgtccttggaacaagaaccaaaggtaacctagaagcccacataccccatttctgaatgcagaccatggggtcaattagggtctatgtcatgtcaggcccagcaatggcagccacccacctcttttaccctctgtcattgcatccccagatggccaagccaaacaatacctttactgttccaggaaatgtacaaatgcatttgatgatatttcaggtacacatttaatttttagttagcataaatgtgtacactatacaggcaacacttagtacagaaga

SEQ ID NO: 94552 - DNA, 1048 bp, Homo sapiens
gaaaagaaaagaatgggctctctctgggcactgtatgggttctcttgcggccacttgaatgccagtgtcgggctcgctgacagctgggtctgcagctggctggttttgtctgttttttgagggacagtcagggatagccactgattaaatcaggaacaaaacatgactacacttgcggctgtgcagaccaatgctgctgaacagcagagaacaattaattgccatgttgtggaatgtgtggatgggggcggggaggcagttggcaaatgtaagaatgtgcaggaaaatgtcaagcaaatgctcgtgttcattagaagctgagggagagggagccagctcagtgtgttcccaggacctaccacggtgtcagagctctggccactgcctgcgtgcccagcaagcagccttcccactgggggcggtcagcccactgatgtgctgcaagggggtcatgctttgtcaaataagatagggagcccctcagctcttggggtggcagttgtatccattttcttgaatatagggcacaaaaatgcccattttctatgtatgttgttgcagaaaaaggctggctccctgcaggtttgctgtgggcttcactctaggcactatgcagcatctactgtgatgctctggaagcttgcagcctgactcttatccaaaaaccagacagggagggcattggtgggaggcagcagtccctcagccttccactaccaccaggtaagaagatggctgctcttcagtgatgcagattcacaacagcttctgcagaaagacaggagcgggaggctatgtggatacaggcactcttcagcttatgatggagctacaccctgataaacccattgtaagtaaaaaatattgaagtaaaaaatgcatctgataccctgataaacccattgtaaagttgaaaaatcctaagttgcaccatcataaatcagggactatctgtatgtatttaagctagggaagtgaaatgcattcatatattaaaagagatggaaaagaagaagagcaagaatggtatccaaaggggtctggaata

SEQ ID NO: 94553 - DNA, 1020 bp, Homo sapiens
tatgtgactatcggggcaggttccccgataggtgagaaggaggaagggaggaaaaaaagagaaagaagctgggaatggttgctcaagcctgtaatcccagcattttgggaggtcaaggcggattgcttgagttcaggagttctagaccagcctgggcaacatcgtgagaccctgtctctattaaaaatacaaaagttagccgtgcatgatggtgcacacctgtagtcccagctacttgggggctgaggctgaggtgggaggatcacttgagcccaggaagcagaggttgacatcgtaccactgcactccagcctgggtgacagagtgagaccccctgtctcaaaaaaaaagagagagaaaggaagggagggaatgactgatagtgtcaaatgttactgaaaagtaaaagaaagtataaagaagtaggcatcagatgtagcaaataaaggtagtttatgacttggagaaaaggactgtaaaagaatgaagtacctttcggccagaaccgccatcttccagtaatttgccaaaatgacaaacacaaagggaaagaggagaggcacccaatatatgttctctaggccttttagaaaacatggagttgttctttggccacgtatatgcgaatctataagaaaggtgatattgtagacatcaagggaatgggtactgttcaaaaaggaatgccccacaagtgttaccatggcaaaactggaagagtctacaatgttacccagcatgctgttggcattgttgtaaacaaacaaattaagggcaagattcttgccaagagaattaatgtacgtattgagtatattaagcactctaagagctgagatagcttcctgaaacgcatgaaggaaaatgatcagaaaaagaaagaagccaaagagaaaggtacctgggttcaactaaagcaccagcctgctccacccagagaagcacactttgtgagaaccaatgggaaggagcctgagctgctggaatctattccctaggaattcatggcataataggtgt

SEQ ID NO: 94554 - DNA, 1042 bp, Homo sapiens
cagcaaggagttgtttcccagtgctttttgcattcctggctgccaactctggctgctaaagtgtctgccacctgctacaatttatgatgtttctctacgtgatgactgttcatttcttttttcattatcttttgtagcaacaggggtctcactgtgttgtccaggctggtcttgaacttctggcctcaagcgaccctctgccttggcccctcaaaagtgctgggattacaggtgtaaggaccatgcccagggccagtttttacttaaaaatttttttcctgtcatgattttaaagaaatgaacctaggatcttttcgtagtgtgtaattttcatacattattttgttatcaaatcttgatttacatactttaaaagttgatttctaaaatgaaattttaagggattatgtgaggaggttctgttcttatgatttagtttagtttcaaatgagttttgcaattaaaatgcccagggaacttaaaattaggcatttctagaaatgtgctattgatgcatcaaatgtgtttgttctgattttttaggaaatttcaacaaaagagccactgaacttgttcactgcatgatataaaaatagttcaggaaaaattgcacaaagcattttgaatactcaatagggatgttcatattctacattaggacttttgcacatttgttaaaaggagtggaactgagtttgaaacagaggcagtgaaattactgcaggatgtaattgtacctggtatttgtcttatgtatcactgttatagtgatattttttggcagctttgctaaaaggtacctgctgattttctttagtaagtttggtttattaaaacattttctggttttattaatccgggtattgttatttcgaaaatagttttaataaagttttttttttaaaaaaaacctataaaatttaactttaattataacaaacactttaaaatttgataacctgcctatgtctgaaagagtttgtcagcctaagaatttaaaataataccatgttgactaatttagggatataaatagaatgat

SEQ ID NO: 94555 - DNA, 1027 bp, Homo sapiens
tgattggctataataatgttttaaaaaccacaagcattgttcatgagatacagagatgcaaaagtagtgaattcatagatttaaattattttgcaagtgccctttttatgcttgtttacttcacattaaagggaataatgtgttagaagtatggtgttaatttatggagaagatatgtgtgtgctttttttctttttaaaatagaccagttctaaatattttattttacttggtttgtccctgtgatttaacttgctaaagtattgttggaaaaggacatggaggaaatattagttatgcaaattaggtcacatctgtagttaacatctactatatttgatagagctttattgtaacagtagctgctttatgtagcctaaagcagatgacatttttgcccttttaaaggcgctaaaatgaaactttatttatttaagataaattatgtttaactttttttttgtttggcaggcaaccagataaactggtggtagtttggaccagaagaagccgaaggaagtcttctaaggttagtgtattttctaaatttcttacctaattgttgaatacaaattagcaaactgctctggttccagtgtagaatattttaaaatattacttgatgttttgtttttttttcttgattgtctactgaaaatggattgatcagatgctataatcttttaactgcttgttctcaaaacgggagccagatacctgagttttggtcttggatttggtaattactatggtttgaaaaaaatcaggtgttgccaatgtaatagaataggttggtgcaaaagtaattgcggttttgccttaaaagtaatagcaaaaactgcagttacttttgcaccaacctaatataaggaggtggggggcctttaagaagtgattagggtaaggacttctcccttgtgaattcaattaggcatccttataaaaggacttgatagagggagtttgtttcctttttgccctctgccttctgccacatgaggatgcactaagaaggccctcaccagat

SEQ ID NO: 94556 - DNA, 1069 bp, Homo sapiens
aaactgatgctgttctttatctgccccaaataaacattacagtttagtgggaaatgaacttaaatgcaaagttatacagttagttttttcttttaaagtatgaatttgtcttaaagttcctagtccacaaaaataatttttaaaatatctcttctaataaaatactttaaacagatagtagcttttgaaaacatgagacatcatgttttcatcatttttgcatgttcttctgtgtgtatgaggggataaagatttgtttacagatagtaatctgtagctgtcatatgatataactatcttggcccaagcttaatgcttgaaaagttttatttgattaagcatttttgtttcagggatactacatagggtcaatataccattgtaaattactaacattgcatttcctgtacttcatattgaaggtatcattttattctggtaaattactaacattgcatttcccatacttcatattgaaggtatcatttttattctggtaggcacatagctggcaacctggaataaaaaatccctatcgtggtgttgttgtgtggcctgttcctgaaaacattgaaatcactgtaacactttttaaggtaagttccatttttataggctatagaatttattatataaccagggtaccaaatgacagaatatttcagtgttcattgttctatacatttgtgtccagtctggtacctactgtgcattatttttagggacatagcaatttataacaatgcaaaggaatcacagtatttcatggtttataaagtcggggatcttcttgaacttattacaattcagatcagctgacatagttcttttaccacttcctacactctacccacagaaaactgtaaaatgccttccctgtggaaagctgaggagtgtggaattctgagtcttgaccttcattttgttagccttgtttgataaaagaatgctttaaaattagtatattataaatatcttattaatgttaatgtaacaagatgtgttttaaattgatatttgataaatattttattgatattagtatttataagtgttgctgcttaaaggc

SEQ ID NO: 94557 - DNA, 1108 bp, Homo sapiens
gaaaaggaatctgtttttatgtcagaggaactatctgtgaagttaaggcctggatttgaagtcttacttgatatagttttgtacacaagtcttagaatgtccagatcatatgtggccagtatttcttatctttgctctcctaatttccatcctttgtttaactctttctttataagttgttgtcttcgcaatttaagaataaaacagagagctgagaactgacttcaaatccagccttttcttctcttttctttagtggctggtttctaaataatccacagcattttcccctataaatctttatttttcttcactccactctgtgttggtggacatgattagtgaaaatctactcaaaagtcagtcacaatatggttaaattatattcctggttttgactgcctgcacccttaaatcaaaataggtgttgtgagaaacaaaattgctacaactagtatttcttggtagcttgataaatagttttatttagaaaagtgattttataaaaattatgaaaagatagaatagacagcattttacatttctcactaactcttcttatgtattcatatattaagtaaacttttcttcaaactgaatattgtttttaatcattgtacatgtgaaaagtaaaaacactttaagtgactatgtgtcagattaaatttgggtactactttcaaataccctaaatttgaggaactccttttgcaatataactttttattctgattgctcaaaatttatgttttttaaaaaagtctctatatttaaaaattagataaaataatcatgtttgcttataccatatttactattgaatcttctttaaactttttatcatcttactgaaattaaaatactaaacagataagtcacaaagcctatttttggataaagagagaaaggtattcagcatttttctagtttctaaaaaggtggaaaaactctacacttcaaactacttaaatgtttttattgtttgtgagcctaaaacatgtataaaccctttcttttaccacgtgtgtatttaaataagtaacacttcatatcttctccatataaagtgaaatatttccttaacactaacacaagttggttctcagcc

SEQ ID NO: 94558 - DNA, 1043 bp, Homo sapiens
ttttgcacactgtattttagagaattatactgtaactatatatgactgttcagttttaaattgtaatagttaattatgacttttaaacttcggaaagtttaaaatatttttatcaccctggagctgaaaagtactttaaaaatcacctgcctaccttcctgctcttagacaatgctgtgcctaagacatcacagaaagctatggtaattacctatatgatttttttaatctaaagaaagaagatcctacaaattgccctgaggcaagctcaacactacacaaatatttaagtatttgattatactggaaactatgaagttggggcatcagtatgaggacctgaataccttcttaccctcgcctttgaattacctatagggggaaaacaactctttaaaaaacaacctaatctactcagtacaaaagcaagtatggcaccagaatatgaaagttcaaggaaaaaaagcgtgtactctaacagtggtgttttatctatatccttcaggtaattttggagttgggcatataagctgctagaatacctacctggaggaggagatgaaatgttccatgtggccaccttgtctcctttagagactgtcacattcaaagtatattgaccacattaaaagtactcgtggtagaaagcaaaggtgctgtttcgtcacctaaaggtgaaaacgtgctgtctggaacttcgaaaaactcaagtattcaataatttttatgccagtcatgtccagcccataattgggtctttcgtctccacctctctgcataaactgaatgtcccttgtccttttttgtagtgatggcagtgatgatgcttgaattttgaagccataaatgtgatgtgttaaccctaaatggtcctcatgtataggagtgtccttgaaaaaaatctcatctacctcatgatttaatatgatatagtgtctctggcagtagataacccagcttttctttctttctttaatgttacttgtaacaaaatctttagtcaccaaatctagtgactctttaaagaatgttaatatcagaaa

SEQ ID NO: 94559 - DNA, 1259 bp, Homo sapiens
gtaataacttttttgctcatgcaaactttgtgtcactaaatttattttaaaaaggggaaatgactttgttaactctaaggcttatatgagataagatgcaaagaattttttaaaaccagtttagtctgtaaagccatactatatttagaagataacggcgtattaagcattactttacaaagaaacagtatcttaatttggctttctgaatttgggggaagtatagcaaagtaaaaattaatttgtaaataatagatacatatttcattcactgtagtttatttgaaatttaaggtgaaaataatacatgatgaaaatataaatgatttgactttgagtacttaatgtaaactttataaatttgtacttaaaatacttaaaacatttaaaaaaagttcagatttatcaaatacatggtatttaacatacaatcatccaaggtagttttttttatcttgtagctcttaaaaaggttagactttgtttttaaagtgcttttcctgctataatagtttcttaacttttgggcggttatggccctgttggaaaaacaatatacttaagcaagatttaagtgtgatttacaggggtttgccactttgtttccctcttacccacaaactcaaaagcctacgtggacttcagatttaaaatcttgttctaattcctttgggcagtttgaatatttaaactctagatcttatctgatttgcaaactgtctcactgtttttgaaacaagtttttgtttccagacttaattctcaggaaaccatactttaattccatgaagaaagttttaggccaggcacagtggttcacacctgtaatcccaacactttgggagcctgaggtgggacaatcacttgagaccagcctgaacaacatggcaagacccccctctctacagaaattttaaaaattagctgggcattgtgctctacacctggggtcccagctactgaggaggctaaggcgggatgattgcttgagcccaggaagatgcagtgagccatgttcacactgctgtactccagccagcctggcttatagagtgagaccctgtcttaaaaaaaagaaaaaaaaaaaagaaaagaatattttagtcttccatatatatctacagcacagaatcgaactaattcctaaccagttaaattttttaaattatgttatttcaataaataagtgaaacaggtggtgtttggttgcataggaaagttctttagtgatgatttctgagatattggtgcacccatct

SEQ ID NO: 94560 - DNA, 1123 bp, Homo sapiens
tgatcacctgcctcggcctcccaaagtgctgggattacaggcatgagccaccatgcccggcacatatatcttcttttaagaattgtctattcatgtctttagcccactttttgatgggactatttcattttttacttgttcatttgtttgacttccttgtagattttgggtattagtcctttgttggatgcatagtttgtgaatattttctcccactctgtgagttgtctgtttactctgctgatgatttcttttgctgtgcagaagctttttagtttaataaggtcccatctatttgtttttgttgcatttgctttggggttcttggtcgtgaactctttgccgaagccaatgtctagaagattttttccagtgttatcttctagaatttttatggcttcaggtttagatttaagtctttgatctaaccagttaatttttaatcttattagctctttactaattaagcatgccatttaaaaattaatgaatatgagtatttagatttttcaatattcttgtgcaactgataagaaagacttattgacataccttatagaaagaaggaatttattgttttcttaagaaaccatcatttttctaactgtcatttagtacaatgtgttatattttgaatcattgatgtagagatgaagacatgcaaagtttggctagtttgatgagtatgaagcaggctgacattggcaatttagatgacttcgaagaagataatgaagatgatgatgagaacagagtgaaccaagaagaaaaggcagctaaaattacaggttggttttattagcattaaactaaaagtttatcttttgttgcagagttcaaaaactcattctcatttcccaggaaaaaacaattctacttattgggtttctttttttttctttaagcctttctacaataaaatataccatttagttctctgacaactttccatgctgtttataatagattttagcagtttgagatcaagtacaaggatggtcaaaataacaaaaaacattcttgaattataatacaaagcaacctaaatctggtcatacttattttgtcaatgtgtgaatgaaacctctgtaagtaaagatctgcctgtaaaggataataggac

SEQ ID NO: 94561 - DNA, 1558 bp, Homo sapiens
acagcacagatggtagtagaggagataccaattacatattaaggagctagagttgatgatggtatgactcagccctctgagattaaattctacttactagggctatgaatggagataagtaggtatcccaccttttattagaaggttccttaaaataaatatgggactctggtcagagagtaggaccattaatttgctcctggtttttacctggcatccacccaccagtacctaggcatctcgtgaacaaaatcataggattgttatgggctcaattaaaaaaaaaaaaaaaagattagccaggcttggtggcatgcgcctgtagtcccagctacttggaggttgacatgagaggatcgccttagccaaaaaaaattttgtttaaataaaaattaattaaaatggccacctattttggaggtcagttaaaaggatgagaatatctggaaaactgcctctgttatgtagtcactaaggttgggaataggaggaaagcagagaggtagggcaattctgatccctttagccaataagtttataaggtatcatagctaccttatttttaaaggagtttgaaaccctaggatgagagactgacgtcatcaggaatatatctttgcagtcttagaactcaaatatgtcaactcagagaatagtaacagtagcagaaaacacagactataaattcagcttgctttctctgtcactcttaaatgctaatgctgctttatttgtacttatgacactaaacataatctagcttccctgacttctgaggctctgggagaattctactgatgctgagaacccatctgacagggcttggatgggaacgagggctctaaaaaagaagtcagaagccttccagtatttaggggaggagccagaaggcaattaatattcaaagtacctatatgagttcactaaggatttatcctaggaattcaaggttagtttaaccacattaataaaggaaaaaaattatatagtcaattcaacagatgcagaaaggaacatttgacaaaattcaatgccaagtttcttagcaaagtttcaatagaagagaatttatttattttgataaaggacattcatgaacagctacagctaacatcatatttaatggtgaaacattgaatacttttcccctaagattgggaacaaggcaaggatgtttgctcttaccattcaacattatatttgaagttctaccaaactcacaggatataagatcaatatagaaaaatctactgtatttttatatatgaacaacaaacatttggaaaatgaaatttaaaaaatttcatttacagtagaggtaaataaaaaacagactaagaaataaatttgacataagatgtgaaaaacctctgactaaaaagtataatacattactgaaagtaattaaagaagaccttaataaatggagagataacctgtgttcatagattagaagatacagtattgttaagatatcatttttcctcaaatcaatctgtaaatccaactcaatgccagtcataatcctagcaggtgttttttaaaaataaagaaattc

SEQ ID NO: 94562 - DNA, 1050 bp, Homo sapiens
cgacattatacctaaaattctgtggaacaatattaatgttttgaaggtaaagactaactctaatacttcttctatattccctgcggtgctcaaatataacatgtttaataaatgattgatttcttctctcattaagattacttttaggaacataagataattaaaacgtcttagctatataaagaaaagtgcaaatacttgagcactgtgtaaacattttttgacctattaattgcacatataggaatataggactaataaataatactaagatacatgataaaatgtggataataatacttctttggttattgatgagaattagctgattgtggatgcaaagcctttcctactgcttcataattaactgctattatttctttttatattttatattttcatagttattcatattttatgtttacaaagttattcctgtggggcaaataaataatactaatatacatgataaaatgtgaataataattcttttttgattatttatgagaattaactgataatggatgcaaagcctttcccactgcttagtaattgttagctgctgttgttaatatttctttttatatgttcaaagttattaatatttttaaagttaaaaataaatcatttgtaaattttgaaaaatgcccaactagtaaagaatgaaaaaaaaatcagtcatgagactggtaatcacttaacagtgatcctacactccattatatttttcctaaaaattacaaaattacagtgactgcaagaggcaggtaaattatctaatttatgaattaattctacctactgagaaattagctaggttaccttgagtcagagtacgatttaaaactattggcaaaacaagatggaagaagaaactttgtaagtctgactatttagctcctactgttcaaattgggattaaaaagttcaattggtattaattgcgtttactttctgttttctatggtttactttgactatctcaagcaattttggttatgcaaaatatatttactcatttagaaaagggaagttgataagcttatcaac

SEQ ID NO: 94563 - DNA, 1427 bp, Homo sapiens
tttgaagatggaggaagggggtcacaagttaaggagtggcttgtagacttctagacaaggttggcttctagaagctggaaaagggagggaagcaaattcttccctataggctccagaaaggaatgcagcctatcgaacttcctaattttagcccagcaagtcttctgatccccacaacagttggataataattttttttgttgctttaagcaaaaaaaacctctttacttaatagaaaatgcaatatctgggaagtgcaataaaatgtggtatgcctgtaggtatttgttaagtctgtttccatgttaatttgtgtctctatagatcgtaaattccacaaggacaataccatgtttgtttttgtgtccgaagaataggtcttggcacagactgataaataaatatttgttcaatacatgaatagttgcaggcagccatattataaatgcatattaaatgatttagttcaaataaaatttaccatgtgcccttaggtttacaatgttaaagaacagtacttttaatgtcaaatttacaactgtgttctacttccaatcgttttatttctttcctactgaataatctggatctatttgctgtatcgttatacctaagctattcctaggttgtaactttggaaatatcaggaattaccccgtagtatcctaaaaggttcttatttgagtagtctaattttcacccaatgagtgataatttcacatattcagagttgttcaaaatatagatgactcatgtaaaaaattgtatcttaaatttgtttctctgtcctttttagttctcttttattgtttttattataagatttttctaaagcatatactctaaagttgccttaaaagaacagatcctattaaaaaaaaaacagtagtagaaaatagtaactgttgcttttttcttgttttagtgccgatttttaaaatgcaacatgaatacatacttattatgtatataatccatgcatttatattcttaaaactttttgtttaaatttagaatataaaacaaatgacaaatattttctgtagtatcagagtatatatattttgttctgtttttaatatatgtgtttaaagcacagctctattttgtaaatgtgaaatgtgaaaaccagtgtcaacttctcgggttattatctcgttttgtgtttattaacatagtttttatgttactagtatacattttaacaataaaatgctttctattttaaaatatgagtacagcataacattcagttaagcatatctgttatgggttcatcaaaataacatccaccgaatgtattctgttgattaaccaaacatctcctctttgtctttttgggtaacagcatgctcctacttctctttaattaaatgaccttaccttatatttgtcttgactggcttctgtttacagaaattgtaaac

SEQ ID NO: 94564 - DNA, 1425 bp, Homo sapiens
ttagcaaagtcatgtcaggatccttgatagacagtggttttaaaacattttctaagataatacttggtcatacaacatgctacttcttcagtgtgtttatatattataaatatattgtttttagaatatttgcttatcataagcccatttcagttattcctgtttgggagtgaagaatgttctttctaaaagtctatgtcaacactttttttattggctcaaattaaattgacatggaagtttctttagtacagttcattatctgacataattttcaattaatactcaaatgtttgttttgttttgtttgaaaatgttggtatgctacaaaatacttgaatggcattctgtcattggtaaaatgctatatactattatttgcaggtattattcgtgtgaacttttaccatttgaaatatttcacgaatgttcaatacttacacttaaccataatagggaactaacccatatgtttattttcagagcttatcaacaaacttaactttttggatgaagcagaaaaggacttggccaccgtgaattcaaatccatttgatgatcctgatgctgcagaattaaatccatttggagatcctgactcagaaggtagcaagtttttctgtaattttaaagtctttgtatagtcaagttgacttgaactgtaagggcaggaaaatattttcttcagagactaacacacaaaaaattattgtttataatgatattattattgtgttcaataccacttggagttgatcagcaattctgggtcacttctatggaatggcttttaaagaaaaaagaaagccttacgtaaacatttacatggggctttacaagtctcattcgtttggtctaccaagtaaggtcagaatgtgggatatactgattttgggatggtggaggtagcttctctatatggatcattttccctgacactcagtctgttgagcccttctgccccaactctatgtctctctagccgagattctctagcagagaattagtagtgagagtgagttatgcatgtgaaaacatggagcagagagtaggttaagaaccgctgctattatatatatatatacagcatacttgtgaggtataaaaccagggattttttttcctgagtcacttttcttattaagtagttttgaactcataaagcctggctaagggctgttacagaagtgagacttctgtttaattgaactctgtatgcttaacataaatgcaagaatgattaactactgtttacatctttttttgactgtgtctgagaaatcttcatgaattttaaagaattttgctactgcctgtcatggtgaaaatgaggttttagcttcaggattcactctgttatagcaatataatttcataattctttctctgtctcctcttcctttaccttctcccttcttaccagac

SEQ ID NO: 94565 - DNA, 1266 bp, Homo sapiens
tatgcccagccttaaattttatttttgaattgaggtcatgctctgtcacccaggctggagtgcagtggtacaatcatggctcactgcagccttgaactcttgggttccagccatccttccactgcaacgtccctgggaactggcactacaggtgtgcaccaccataaccagcccatttcatgttcttttaaaaacagaaatttattatgtatcggtttgtaatggcaagctggtagactacaataaaagaatataattttgcacatctaagaaaacattttcaaaattggcatatcataatgttaatactgttagatactgcagaggatctcaagaaacagtaatgatccaaaaatgccatttttgggagtaccattcctggagaaattgacagagattttagatatcacatcttctgaacattaagactacttagcccctctaaaatatattattgttttattattgctttgctctttctcagccccatagagcttattaattcaataatgcatatatttgagaacactaaacaatattagaaaatatcatatggtattcatgtgatttaattcatctgctattattttatagaacctatcactgaaacagcttcacctagaaaaacagaagactctttttataataacagctataatccctttaaagaggtgcagactccacagtatttgaacccattcgatgagccagaagcatttgtgaccataaaggattctcctccccagtctacaaaaagaaaaaatataagacctgtggatatgagcaagtacctctatgctgatagttctaaaactgaagaagaagaattggatgagtaagtacatttcattttgctgtcatcacaagttagtctctatgttacctaaagagatccttttgtaatgtacctttagatgggtacaaatcattaatgtacactttataagtcagtatctaactcgtccactatctgagtgtttatagtcttaaaccttattctcccaccctcttccaggtatgtgtgtgtgtaccctaaactaacaagtgaggaagatatattcctagaatctctggttggaattccaattgtgtcttctcacagaaactatattataaatggtatttaggtttttggtttttttttccatcaaactctgtagacattaaacttcagttatcttataggtctgttggggaggagaacaaaataatcatttgtggtattgatttgataagaagacttgtttagataccaaacagtgaaat

SEQ ID NO: 94566 - DNA, 1390 bp, Homo sapiens
cgaaggacaaagaaacaaacagaatgatccctggagtttgccccagaccaagaataatttgtgttcccaccagccagaaagaaaagacttcctaacacatgggacattcagtagaggcctcagagaggtattgcatcagttgtggggccaaattggccctaaactgaaagctgttctaggcctacctaacaaagcttaaaggcaaggctcaaaagaatcaaacttatctcaagtaatttaactgcatcacacatgaagctcaaaacagttttaatcaataccaaaaactccagcacacaaaacatgaaattcatactgtatgacagccaatcaaacatttatcaggcatgtaaagaaacaagaaaatctgacctgacccataatgaggagaaaacataatcattagtatagatgcagaaatgggacagatgatggaattaaaagatcaacctggtaaaataacttttataaatatattccagatatccaagaaggtagaagaagacagcatagatgatattagaaaattgaaattgaatttatagagatgagatttttcatctcatacaaagtcaggtgaaaaatagactggatgaggttaaccccttgttaaatactgcaaaaggaaatactagttaacctaaagacatagcaatagaatccatccagattaaaagagagaaagaagaaaataacaaaggatcagtgaactgtggaacaacttcagtggcctaacgtgtgtaaagaagtgaagagaaggtaagaggacagaaaaagtatttgaagaagtaaacaccaaaagttttagaaataaaaaaatttaaaaatataaacaaacctacaggtcaaagaagccaaatgaaactcaagcacaagaaaaatgaagaaagtcatagcaaagcttgttaacaaaaacaactcaagccagaagacaatgaggtgatattcttaaaggactgaaggaaaagtataacaacaaaaacctgtcaacataattttctattcccagcactccaaaaaagcaaaatgatactacttgaaaatttggatttacacgaaggaaaaaagcacatgaaatgacaaatatattagtatatataaaatacttgtcttatttttaaaaatctctctggtagataattgtttaaggcttcaataatgtattctgggttttataacatatagaagtaaaacgttatgatggttgtgtaaaggctgagtagcagaatgaaaggatactgttttaagcttcttatacataatgttacttgaagacacttttttcagagttgacaattgtttatatagaaaagcataaggaatctttaaaatgggtactaaaactaaaaagtaaatttagcaaggttacaggctacaatattaatatata

SEQ ID NO: 94567 - DNA, 1735 bp, Homo sapiens
tagatcacaagatcaggagtctgacaccagcctggccaacatggtgaaaccccgtctttactaaaaatacaaaaatttgctgggcatggaggcacgcacctgtaatcccagctactcgggaggctgaggcaggagaatcacttgacccgggaggcggaggttgcagtgagctgagatcacgccattgcactccagcctgggcgacaaaaaaaaaaaaaaaagtctctatatttaaaattaatatatatttcaagtaacctatgactcaagaagaaattataacagaatataaactgtaaattcactgaaaagttttagttttactacttgacatgttgacaaagaagatattacagtcaacttgaactcctgtaatcatttctatgagggctttatgttttacttaaactttttgtttggcactgttttttgatataagtcccaacttgaaaggcttgaagagcaagcctttcgtgtttgaacttggagaagagtctcaaaagcaatcatagcacaattgagttaatggagcaactggatattgtaaaataccttaatattccttttactgtctgtatccatgacatttaagcaagagttttggacatacttttattgttaatagatattctttaactggcttatatacagagagtcagactactgtgggacatgtaaacgcttcaatacctagattaaaagttgtaatctaaggattaatatatatattatatattggctccattagcgctattatcattaaaggtgtgttagcatcctcttcgcagacttgcatatagcgaggccgtttcactaggttttaagtttatggcttaggaaacttttaattttttttttaaacttccaataattagcattcagcagagtgctgcagaaagaagacttttaaagctggataaacctctctaataatgatcttattgaaaagcaaagccagtaattgaaaatacattgtgactaaattaataattctttgggaatgtaaacttataaagtatgtgactttaactggtaagttttgtagtattactgtatagtaaaatatgtttctagtgctaaattccagtttgggaccattcttatacctaaaatgccttgtgaattcaagagaattttttatgcgcatttacatcataattgtttatctgcatttacatcacaatttccaaattcttagagattaatagtgtgacgtaaccatttggataaagatactgaagctatttttccaccaccaccacgtgttattgaaacgaaattgtttagtgtttttctgtgtaactcttcttaaatgcctttttagattatactgtagctaggtgggtgttttttggtttttagttttttgtgaagaccattcacatataacttcttgtggtaaatcttcacaaggaagcaaaacagaaaaggttcatttaattgattagcataaataacaggttttcttttttattttaatcaaaaaacaatttattctttaatgttttcacagcttcagttattaagtagaggttgtcatttggcttgactttaatgaactaaatatatatgtaatgtgcacttatgattttcatacagatgtgaaaaaatttgatcatgtgttattcttattatatatttctttaaaacttgctaatacttttaattctacgtagcaaaactttaccttatacagcagatgttatcctcattgcagcccatgctattctcacaa

SEQ ID NO: 94568 - DNA, 1048 bp, Homo sapiens
atgatgtgtatgatccaagactgggtggaggtgggagacctggggtttaggcaggaaagcatagggattttaaaggatggtgagtaatactagagagtaaatacattgaaaaagatttgggattcaatacttcgaagtattttgacatcattttgtgtgttcttgagaaccattagagactttaagccgtgctttaaggagaacgatgctatgacatgggttggttaccgaggggggatttggaagaagaaagacctattaggaagattttgcagtggtgaaaggagatagattacaaaaaccttacaaaatatgagcaaaactgcctgcaaaattaactagtaagagatgatacatgaaggaagaattcaaaggtgattctgacattaaaaatctaaacagttgggacaatagctgtatcatttgcaaacacaatgaaaatgagcaggttgtaaagaaagatcaccattatggttttgaacacattgagtttgaattttgtatgatagaaaggacagccaactggaaatgtcaacttgagatagtttgaactataaatatttgggaatcatctgcatggaagtaatagttggaatcctgggaatgaatcagctcaaagtgtggtggaaaactatttagagcaatgcctagaggaatatgtggctgtatccgtggaagaagggcagacagcaaaagagaaggaaactatagttagagggatagagcagaaaaaatagaactgacatttcttattaaaatttaagaaaatttgcaagttatttgactaggttttctgaaagaaagctattaccattgttaggaagaataactaggtagctttattaccgttcacatgtaatctgctatgttaaacagaaataatgcattaaaattcattatatttgcaagtgtagttttaccttttatggacagatttttgtgtctttcttcctttggaaagcaataaattacaaagtcagttagagcttcttttttcacccaccttatagaaatagatacattgccaagcattacaagtaccatattt

SEQ ID NO: 94569 - DNA, 2049 bp, Homo sapiens
gcacatttcagtggccaagaactaaatgtcgttcagatagaggaaaacagcagtaaaagcacatataaagttggaaactatgaaacagatacaaacagttctgttgatcaagaaaaattctatgcagagcttagtgatctgaagcgggagcctgaactacaacagcctatcagcggagcagtagacttcttatcacaggatgactctgtatttgtaaatgatagcggggttggagagtcagaaagtgagcatcaaactcctgatgatcaccttagtccaagcacagcctccccttactgtcgcaggactaaaagtgacacagaaccccagaagtctcagcagagctctggaaggacttcaggatctgatgaccctggaatatgttccaatacagattcaacccaagcacaggttttgttaggcaaaaagagactattgaaagctgagactttagaattgagtgacttatatgttagtgataagaagaaggatatgtctccaccctttatttgtgaggagacagatgaacaaaagcttcaaactctagacatcggtagtaacttggagaaagaaaaattagagaattccagatccttagaatgcagatcagatccagaatctcctatcaaaaaaacaagtttatctcctacttctaaacttggatactcatatagtagagatctagaccttgctaagaaaaaacatgcttccctgaggcagacggagtctgatccagatgctgatagaaccactttaaatcatgcagatcattcatcaaaaatagtccaggtaagtgagttagaatgctgaatactatatttagtaattagttattctctgtttttgtttctttttgcattcatagatgctacaaatgattaaaggtgaagtgtaatttctattataaaaactcctgaggcatgtagtaatgtgtgcctaagtccccactatttgggaggctgaggaaagaggattgctttggcctaggagtttgaaaccagcctgggtaacatagcgagtccctgtctcaagaaaagaaaaacctgaaatatacctgctgtatatttaaggtttatgatataatattttaagcctaaaaatcccaatttcaacactgaaggatattgtgtaataaggctatgagaaaaaaattgaaggataaagaatgtcaacttttcaaataaaaatattacttataaaaacaatattctactataaaataaatcaaagatgtttcaatattccatttaataagaacatcattctaaaaatgtataatgccaaattaaatatttcccatttaaaacattttccttaggtattttagttggtttatttagtcccatcattacttgtggttaaaaatccctgcagcatccaaatttctcctcatgaagggaatactgtacggttttaacctttctcttactgatgatattaataatttactgtttttacttgtatctctggtaccatcagttataagatatactaatattttatgtaccacaacaaaaaagaacaacattgtcaataaagttatgatacctggttttcctatcactcagaatttttatagctattgaaagagctcttttagacttatttaggcatagattatttgatcagataacactcgtgtatatataaggaggaaattttaggcaaaataaattgattaaggtattcctaaaagtttttcacatttagaatccagctcttctgaatcactttttgatttagagttgttggtattccttttttttttttctgcacagttatcctctgtgccatcaaaagcattgttacagtaaatggttctcaaagccagatttgggggcctctgaagttctccaagtccctttcagagagcccccaaagttaaagctattttcataataatactagggcattgtttgcctttatcactctcattctctcacaagagtatgatggcattttctggaagttacatgatttgtgatatctcaacagattgaatacaaaagtagatataggaattcagctgctttcttttatattgagatt

SEQ ID NO: 94570 - DNA, 1109 bp, Homo sapiens
ctgatctctgttgatggacagtatctgttgttctccaaaattacattgtaaaattacagattaatccaggagaatactttttcaattctaatattttcaattgttttgttataaggatagtgagcaatggggaagactagttttacttttttttaatgaaatataatagctttgaattttctataaacattctcaaggatttaaaggattatcgccacagatatttaatatttatcaacattcaaatttggaagacatgttgttatcaattctataagactaaaaataaaactctgaactttaaaaaatgtctttgtcagattatactgtgtttatgagcaaatactgagaatatatagaatatatattagcctcatacctaatgagaatatgttctaataaaattataattaaatttaatccagttttagacagtaaagatgtatttccctcatgtcaagatttatatatttgttccacagtttctagtcaacattaatattctctataggtaatctcatgaagctacaatcttattcataatctctattatttcagcagattgtctaacctttcattagtttacaaatgtagattacccgttttttttttggcttctaattctgtatctttgcttttaagcatcgattgttatctagacaagaagaacttaaggaaagagcaagagttctgcttgagcaagcaagaagagatgcagccttaaaggcggggaataagcacaataccaacacagccaccccattctgcaacaggcagctaagtgatgtgaggagcattggttaaaaaagaccataagttgttcattgtaatcatggggaggagggaagtaatttgcttgtatttctgctatgttatttttctacggactgtacattgtgaatacttggtgcacttactgaactgataaagataaattcatacttgtaggaccatttgatcattattcctacagagcagtgttagtgatgaggaaaagtaagatctgggaatataatttccacatatacatgaataatctgttttttgttaatttatattttataactgtagttgtactctaagattgtattttgtcaatggaagttaat

SEQ ID NO: 94571 - DNA, 1040 bp, Homo sapiens
aattaactatagaaaagaaagccctctaattaatttcttaacatcttactctattttgtgaaatgtttagcaagtttattttcctctctcttcattaagaaatatgcacgactattttagtgctattttaaactattctgcctgtgagatattaatgacgtagagttttgatactgtataagaatcttacaatgccttaatgagagtgaaattgaaatgtggctttcctttttgtcacaaagtagatattcccatacttgactgattgcttatatgtgtgttagcccttggtcatacattgtgcacattagaatttaaagagtcacttgcatgttgccttctgaaaggattgtcttggtcaccttttctggaagcccttaatgaaactaaatagtttgcttggagtttggacctaaccatcagggtgtttcatgcagtcttgtcagttgatgttcatgaattgacttgaacaaagatcaaagtgtttctccaaaccaagaatctgtgagacagctccttcagttgtgccacaagagctaatcaagccatcagttctttatgcactctacgtgtctttagaatttagtaccaaatgatttgtcagtacaaattgatattctgattttttgcttttctccttcctggctctctttccctatttcctccaaaatgagggaaaatacagtgtctttttacaactagattttgttaagaagcttagattataattttgaaatggaatatttaaagtttacaaatacaaacaagccaagaacaagttaaaagttttaaatcagtgatattcatataccacaatactaaatatacagccaagcttttcagttgaacaaattaacttagagtctgattcttttatttttcttgtcacttcactgttttgataatagaactttgtcttgaagtatttcagttgcatcagagtactgtatttgttttccatgcttagattaaaaggaagttatctgaaaatacctcttagaggggggagttttataatttgaggaaagggaatagttaga

SEQ ID NO: 94572 - DNA, 1014 bp, Homo sapiens
atgagtaaataagtacaaacaaacaatttacatggaaattgataaagttcctaattagtatttagagttggttttattaaggattgactactttaaattgcactcttggtaagctctcagaaaaatttgcagatgggagtattatggggggtagaggaggtgatagcttgcaagaaaaaaattaggttgccatttcatattcagaaaactagaatcatttatttcatcttaactcagtaaaaatgacccttcattttagtttgaatcaccaaattccagctatgtaagaagttattattcactcagtgaaatacacttaaacttagttgcctgaggcatattaaataatggtttttgttagtactcttaacttttcttaagtttggaagatgaaagtttagtaaaagttccattttcctcatttgatcatataatttgatactttgggaatcatatagtttagtggttaagagcaagggctctggagtgaaacagacctgagctgaacacctggctctgacatcaggtctagctgtggaatgttgtgactctaaacttaagtattcttactggtaaaaataaagatgtgaaaattaaatattatgcacataaagcacatagcacataaatgctcaggagatagcagcagccatcatcaaactcaccattatcaatcctgtaatttcttttattcctagcatattttttaagtttagaaacactgatagtggtccagatgtggtggctcatgcctgtaatccctacactttgggaggccaaggtgcgtggatcactggagcccatgagtttgagaccagcctgggcaacatgacgaaaccccatctctccaaaattacaaaaattagccaggcatggtggcacacacctgtggtcccagctactcggggtggtggcagggctgaggtaggagaatcacctgagcctggggaggtcacggttgcggttagctatgattgcaccattgcactccagcccaggtaacagagtgagatc

SEQ ID NO: 94573 - DNA, 1032 bp, Homo sapiens
ctaagacaaatactgttaagagaattctagcgcatttttcaataatcctcaagcttctgcctatatagatgaactaaatgtatgttatttgtaagaatcatcacacctgaaaatggtaatgtgattgaatataaatgtttaagataacttgcatgtgttttgtgccattatgcatcttaccttgtgtaacattttagtcaaaaatgccacattataagactattattagactgtttatattattcccacccacatgtttccctgctttcctcacagtgattagtatttctgtagctttagggcacttccagtcctgtataacttttcacccacctgcggactatggggactgccctgctgactgaaaggatttccttcccctgacacagagatgctttgaagtcccaaaacaatgactttcattgcttttcccctatattgtcagtttctataaattggtgatgaaagtgtgtggcagcaccagaggacttttggtctctatctttgaacaaaaggaagcctggatcgggtctgattttttgcgttcaatttagctttctgcagtggatttaatgcagaatgaagctggcctaagaataatacaatagattgaaaaggctaactgaattagtgggtttagaggaatacatttgtaaagtggcagaagtccctagtcataaaaaggtttcttaagatgggatttgctggctaatcgcactgatattttagcatgttgccaggcctaaaaaaatttagctgtgtttgtttattttggtaaagacttgagtattagactattggatagttatataacagtagaactctatttttctttaaaaaaatagaataaaagccaaaactgttgctatcataactatatggctaggatattataagcatgatattaatgataaattcattagataactttaaaaaaataaaatagtgttattttcattattatggtttatctgtatagataaaattggttttgctttccaaaacactcttatatagtagtctttaaagtta

SEQ ID NO: 94574 - DNA, 1055 bp, Homo sapiens
aagaagcattcaccagattatcccagattttaaagttaccattagcatttattctattattttatttttttctgttatattttgtattgagatggaagaatatccattttgcataaattttttaaaaatacagtgacttttaaaatcaaactatcctgagaaatttagttttatgatttcttaaaatattttaactttaaatttgtcaactgccataatcaatttaataataagttggtataaattgaggtcacatatgagtacaaattacttaccagttcaaaaggtatgtaagttacacatatagttagacatatttattaatcatgagaattctaaaatatgctcataattaacataattctttattttatttcctgtttaaggagtagtgaaatataattctttatagcttctaagagattcacatgctaggaagggaagggattttacagaagaagtttgttcacatttatttctctgaataaataatgttataagtgcttatgataggagtggtggtggtaagaataatcacttaatcagttcttcaatatttcttagctaattagatctcttagccccaaaaatgtcaaaaggtaaacaggtaatccaaagggagccataattaatcagtttttatgactataccataaataaccctgactttgatgatttaaatttgtaatatgattgtaaaaattaaaggtaaactggcacacatatataaaaaatatatttttttaaacatggatggttcaaaaagtaaattttcaaattaaaatccaaacttggctaaatggaagattaaccaaatcaatatatgagttttcttagatcctatgtagcaaggtttgaaaccacctgtcaggttagtatttacaactgtaataattactaatacatcaacagaatggcatattaaagtacaggagccagctggagggaaaattggagatattgtgaacttccctttttatcatttttaaagtattttaaataatgtaatcattttgaaaaaaaatgtatctctttaattttgtatttccatagaa

SEQ ID NO: 94575 - DNA, 1022 bp, Homo sapiens
acccacacataagttaaaagcgtattgatgatattcttgaaaattattttttctaaattaaagaaattcagcagggtttttagtacatctctattgacttagttcagtgcatgagattggtggattatgattaattttaatagctacattaaaaaatacatctaacattcttaattagaataatctccaaagccagttaaatgttttagaagacaaacagtttaattagctaacctcagaggttcccctcccccatatgtgcagtggtcttaggcttggtgtgagcctttcaagcattcttaaacaattggatgaaaagggattttaggcagattagactaggggatcctttatttgttgttcctaatcatgagatatgccacatctacaaagttttacaaagaaatgaaaatttaaataaattttactttgactatctagttagcatgaattacaagctaaaacatccagtgataagactacttaataaatgtattcttttaattgtagataggagcaaaagtacatgctggggtggactagcaagtgatatggcagattaacattctaaaagggtcaatgctttttcccagaaagcatgcttttgttgtacactcctgtggtgccactaaatttttggaaattaattcagaaagttgaaatagaattgtcagatttcagtcttgtttttttcatttttttaatttctttcttgttcttgtctgctttatgccctctctaatgaaaaaaatgaaaagtttagtgtatctgttttttatttttctattacaaaacgctgaggaacttaggaatttgcaacttttagtgatatataaatcactgctttttttttaatttgtaaggagcaaaagatatctttttgtacctagaggtttttttttctttttttttttcttatttggctttctgccttttagttttccgtttgcctaaaaataataaatgttatttgtagttttaaattttttaaattataactggattgcaagattattaaagta

SEQ ID NO: 94576 - DNA, 1032 bp, Homo sapiens
tattctgaaatgactggcagcatttataaacaattgaaaataatctactttaggttctgactctctttggactttatgattcaggcaaaaggaaaagtcagagctgtgatgaacatattaaaggtatgcattaagattcacacacagtcctttcctataaagagtgaaaaaaactttttgactcaaactggaatgatactatgtagggctgaatgtgcaggaaagtttcccacaatgcattgtgcaaacctagggctaacaaataccctgctgcttgaaacccccccaaaagacaaaggcacaatgaaatagaaagcttaccaccggtagctttcaaaacgacaaactaggcaaactatacatctccaccactccaattttgtcagaatgctaatgagcttgctctgatctttactcggcttcccgtgttttctacatcttcaaggaccacatggcgctagcaaaataaagacaactaaatgagaatttcgaatgctttttgtgttaggacctggtgcttttcagtggacgcactcgttgaatattctcaacttaaaagagtacaacagggggttgggtatgaactttttaacaggaggaaatttgaacaaaagtaaattagtgagatgaggaaaatatgagaaaaatttctgattaatttccactccataatatcaatgacaccttcagccccactcatactcttctaacaagagatgctgataaaagatgaatgattctgtgttgttcacagtgaatgtttagtggttttttaatagcagcattctacataaaaggcaccaggaagtactccgcattagcagttgagatcactagttaataggatgatgtcttttagcttttgtcacaagattattagaaaggatgggtttctgttctcatcattgcatagtttggagtgcctgttgagtacaagtgctaaaatacaggtttctcagtattgtttcacatgtaaagcaaaaagccttttaatgcaacacctttttcctttttaccaggtgattttgttat

SEQ ID NO: 94577 - DNA, 1049 bp, Homo sapiens
gtagattaggtagatattttgctaagctctgaaatacgtaatttgatttgatggcgacaagtatgggaaatgaaaatgaagtactgtgtcaacaggtgtattgtgaggactaaacagattttagacagggttttgatctgtcacccaggctggattgctttgatgcagtcatagctcgctgcagcctccatctgttgggctcgggcaatcctcccgcctcaggctctgagtggctggtactgcaggtgcacaccaccacacccagctaactaacttttttgatttttagtagagacaaagccttgctatattcaggctggtcttgaactcctgagcttaaatgatcctgtcacttcggccatccaaagtgctaggattataggcgtgaggctctggccctttttaaatgggctgtagctttggagagaagggaaaggacattacaacacaaggacataaagctaactgcttgagattgacgcataagatttatgccagaatctgaggtgaactattggggtaccatgatattcttcactctatggggtattttaaaatttatatcatgataaaaggggcaactgaacatatcctggggattaagttgagaagaaatatgaaagtaacttaatccttgggaattttagagattctgggagtcacacattagattttctctagacttctaactgaacaaaatggcaattagcacaaggattttggaatacacttaacagaacatgtgtaaccttggaaaggggaatgtctaatggagggtttgcaattgagtagctgctttaagaaaagaaaaatgggtaatgcgtagttgatgggtttgggtgcattgaggggatttaaaaaggccgaatgatgttaggatgcattttggttgattggtgcagtaaaatgaatacataaagacattagaaatatactcaatgaaactaacaacttcagacttgcactgagttgcccaacatatttacttctgtggatagtcctttctaatgcttgcataggcagtcagaaaaactctgacactctgctgg

SEQ ID NO: 94578 - DNA, 1025 bp, Homo sapiens
ggagaattttaagtatctcctgtgtacaatcagttataatctaaaatgttcagttgtcactctgctcacatgttttctgaacatcatgatgttcattaaattttttttttcatagatagctgtgggtatttttttgtagcctggtaatttacagtgtatttagtaatttataagtagtctaccctattagggatgatgagttccaaaatgtcatatatatctctagtttacttttggggaggaaaataagaaaatagcaagttgttaaaaatggaaactttcacacaatctctggacttccctgatcttcctgctagtcttatgagtctcataatgattttttaattttttttaatcatgaccatatgtctctcagcactgtgagttccttattgaaacataatagcaagtcagcctctagggagaatttaaaaggtaggacattttgtttactgtacttagtgttaatatgatctatcggtatgttcacggagagtaaaatatgcatgccgaataataccaccttaagattgacttttcttttttcaggacttagactttaaccttcttataagcagtttaatatatagtattagaataagtaaaatgttttctatgtttaaaaaattatgtgctaaactactatttggcttgttttaacatcgtatagtaaaaggtaactcttcccgaattataggaaggaacacagaagaagaagaagctatgatgcaggaatggtttatgttagttaataagaaaaatgccttaataaggagaatgaatcagctctctcttctgtaagtactcatcattatgcttgttttgcctacaacattgataaatcttaggcctcttgttattgccttctttgggatttaatatttattcggtattttccctttccttagcgattacatgttttataaaaaaataaaaaatagtatatgacagttttcatcttataagaatttttaaatggaacagtagacactgaaaaagtgtttattatacagaaagccaaggaa

SEQ ID NO: 94579 - DNA, 1032 bp, Homo sapiens
tttataatttctgccatgcctgaacttgataaaagagttatgaagaagcacaaaactttacaaatcctgaattgtggtctctgtattaaatttgcactgctggtactttcatgtttcttgtattcttttcatatggagttttggaaaaaagagattataaattatgaaaaatattttagaaaatagccttatacttggcatttactacaagaagcaatgaagaaagtgagtaattatcctcagattaaaatatacctatgtaacattcagaattgaaggaggaaaataatagcactagtaaatattcgactgaggaaggttttaggtttgtgtatcattcatttggagtggcttaaacttaaagagaaaagtcagttatgagtcctaaaatcaatgtaacctaaaggttcttttaagtttttaatgatttagtaattagcatattgatgaacttttgcaacttgcccagggaaaaagaacatgatttagaacgacggtatgagctgctgaaccgggaattgagggcaatgctagccattgaaggtaagaaatgctatggtggggtgaggtatgtgacgtgtcagttgtcaaagagatttaaagaatataatacacttctggtcttactagatctggtgtactagggaccttccggaattgcaaataaatgccgtggaggcagaaagcagtatccatataaacttaaggaccctaattcagatagataatcattatgtttgctattaatagtagcacaaaattgtcttaacttttgattcagtaagcttatatgtccataaaatggaaaataaaaggagttgattgatttaattacattttacttaagtgtgatttaaagttgtttccactcgggaggtttggaaaagatttatcattttgattttttacatccagactctaaattttactttaattgatgtcaacattgaaatatgttcctgttcagtctactacagttcttaagattccaacttgtattaagtgaatatctgggcaaagattggcataaaa

SEQ ID NO: 94580 - DNA, 2349 bp, Homo sapiens
gttattgtgaagcatatggcgcccagtgtgagatacatccaactgctaaaatagagcgaagaggaaattagcgaagaatgggctgtttggggtgagagtgggggtgggggaggaggataggttctcaggcagattctctagccttttcagaatgattttatcgcccatcactgtttcccgcctcctcatttacccacttcccccactaccaacccctgggccaacctcttctgggcctctagctcccctcccccactttggctggattcaggtgcgcacctcaggctagccaccagttcacacctggttctaagcaggttccaacactgctgcagccatctccattcacaggacctgtttaggaagtagacttttagcgaggaagccttcaccacaacagccaaactccccagaaaacactagctagtggctctataatgtggtttgctgagaaatataaggaaactggaaaaggcgggaaggggagggcggggggccgggtgttcggaggccctgccggtgggtaactagcctcccgtcttctgcagactggcagaagaccgaggcccagaagcgacgcgaacagcttctgctagatgagctggtggccctggtgaacaagcgcgatgcgctcgtcagggacctggacgcgcaggagaagcagtgagtgggcagtggggtcgggtcgaggctgggccacctgccgaggggccgagaagtgtgcggaaagttcaatccagaggtcgcgggagggccggggcagcctcccactggcctggtgctccccattcccgctggggatccaaatactgggcgacgggggagtgctgctctgccctccacgaagaaaaataattttgtttcctgtttgtcctgtttgtctgacatccagggccgaagaagaagatgagcatttggagcgaactctggagcaaaacaaaggcaagatggccaagaaagaggagaaatgtgttcttcagtagccatcagatcagaaagaatctctcccaacattttagagtcttgcttcccaaaccagaaaaagtcagactcattgttgatttaaaacttttaacattttgtttggctggattgtactactttacctctactttaccaccaccacccttttcctccctcctttccaaataatatacagaactccaaaatagcttcatttaaggatttttttgtgagttaacaatttccttgaaatcctgtgaaatagatttgcacagacaccttgtgagtgattggtattggaggtgttcaagaaactgttcgaaaaagaacaaaaacacttccctcgttattttctctcattttttgatgagaggaaaatttgaaacattattcttgttgttgttggtaatagcataatgacagtgggaggggtacaaggggataagaaaaatgtcatgatttttttccggtcctgccacatgtaacacttactctgttacctaaattttatagttagatcatatccaatctacttattaaactgtgttctatttaccagtggagtttttctgcagtggttgcgtttcactgtaaggataatggagttcctctcctctgctttcctcagaggatggtcctttaacatagccagaaacaagccctgtggtttgaaggtgagctgtgaggatgggactaattgatatgcaccagtttacaaagacagtcttatcatccgagaatacaccatctttttctctggataattatttcttacatcatgcttgattcctacattttgttgggtctcaacattggctcacgaatgctgttaatatttattctgtattgataaaaagtctgtcttgccactacaagtaaatcccccatttaatattttcttctttagcatagcactgtcattttttgtgaaaatggttatgtttatttattacaatactgagtcatatataaattttcaataaaagcagaaactttcttaccttaaacacggctgctactttcttgcaatgaaaacttgacattggcttgaatggaagtttgtctatccgtaagacttttcatgtggaaaatggtcctctggaacttagggcaggatactgggctgcatttgaagctgaataagtttacaccatcccagagggggccctactgacacacgaatgcgaattgaaaagtaattagtcatattcttaagcagtataaactatcatgtcttttgtaaagggtcatctctgctaaagatttgaggaaatttgtgattccacaccaatgaaaaaccaatatttatatcttgaattttccacgtcattactttgaattgttagagttttgaagtcgtattagggagagtcgtgtcttctgata

SEQ ID NO: 94581 - DNA, 1017 bp, Homo sapiens
tctccttcaaaacaactatttatgcatgaatacaatatttgaataatacaagctcagtcttgactacttcctccaggcgtatttttcaaaccaggaaattaccagcattctttttaactggtggcacacttgagtaagattcaagatgtttagagctctttaaaaaacttgtgtctttcagaaaacctgcatgacatataatgcttgaagactaaaaaggatgttgatttggtcctctcccaccttgcccatctagttattattaaagatttttacaaacttgttttatttactccattgattttctttagttttacctggttttcttggcagatagttgaagttaaggaaaaaagaaggatgaataacccacatttgactatcttcctcccgctcccctgttaatgcatgaccacttgcaaagccccctccttaatcacacagatcttggggaatccacaagagttttgacattttgttcacaaaccagtccagttatctactaatggacattggccattttcttctcattgatgtacccaatacttgctaattattgctgctgtttcttcagatgatacagggcactccttgaccacccatgtctgcttttgctggatacagattctgctttgtctgtataccaccacattcaccattcctgcttactttctgctgcacaccacttcctgcagccacttctccattctttttttttttttttttttttgagatggagtctcactctgtcacctaggctggagtgcagtggcatgatcttgactcactgcaaccttcgcctcctgggttccagagattctcctgcctcagcttcccaagtagctgggattacaggtgcattccaccatgcccagctaatttttgtatttttagtagagatggggttttgccatgaaggccaggctggtctcgaactcttggtctcaagtgatccgcctgcctcagcctcccaaagtgctgggattacaggtgtgagccactgcgcctggcctgctt

SEQ ID NO: 94582 - DNA, 1109 bp, Homo sapiens
ctactctgcctactactctgttgtcctcaggaagccaaaggagtagagagaagaggagatatacaccattatcgcttttgcccatgaaaatggtaggccacctaccattctcatttttgtctattaattttgacattgaaatacattctagatttttaaaagtgagtctttttgaaataatagagaatcagtttgaacacatttgaaatatgtatttcagtgtacactcagaatattttaaatagattataattaaaatccaaaattttaatatatcccaaacttaatagtttataagtcttttataagtcaaacaaagttaaactttataagttgaagataacaaagtttagatggttgatgtagtatggtggtatcatggtggtgatggtaggggtttttgttttgttttaaatgctgagaactttattaaatttgtggaattactgagtaaacactaggtggtgcagttgtgcaaggaccatataatgaagtatgcattttttgaaaaaaggtgtcaggatgaaattaaaattatagtttgaagaaactctttggaaataagaattatcaaaatactaaaatagaatgaatgaatcttgctttgctattacttggtctgggatttaaatggggacctatcttgtgatttacactagaagtctcaagctattggtatattgtttgtattgcattttaagctcagctaaccataccaccctccccagagtacaaataaagtacataaaatataaaagaaaatacgacaacaaaaaactgatccaatttggttttctgtaaaatttaaatattaaattgctctctgactacaattaaagaggcttaccttctactatttcaaattattctaaaatgccctaggatttgagtaattttctgtaatattatatctcatcgagtaattgttgatcagttaaaacttgaaaagtagctttccttttggcctatgtgtcttcttttattcactgaaaaaacccttgcattcctatgtatattcaagtcattaaattattaaagaatcagcttctgcaatgaaaaataattattattgttttatttatatgttgaaataaagtaaaaaaaaatta

SEQ ID NO: 94583 - DNA, 1056 bp, Homo sapiens
gaggaaaggacctgcctgatggagcccggcaattggcgggagagatagcgtgtgtaactctagggaggggagaatcaccccttagcgacatcacccccacgcgcgtgactgagactgcatcctcccatgagggtaaacgtgggaggtaaagagaccttccgctgcgtaaagctggatcgacccggaaacaaaatcttttaaaaaacgattgacactctggaggggcgggggaattgataagttgggacgaccggacagcttctcaggttgctaagcgacgaggcgggagcgcacgcacaccctggctgctttgtagcacctgaggaaactgtggcggcggcggcggcgtcctggagacccaagagaccaagcgagcgtgtcgctccctctcgggtccgaggacctagcctaggaaccttctgcccggggtagtgtctggtgatgaggcgagagttttgctgggacgcctactccaaagcggccgggagtcgcgcttcttccccactcccgagacaggtgagccctggcccgagggcaaggggttttcttttaaccttaggatccggaatgcggttggtgcgccgtcccgctttgcttttatccgctgtgcggatgcctgcaagctcgccggtcccttttctgagcggagtatgagggctgtgggaatgcagctattttggagggggtggtgccctggagtaggtgcacccccgaccccaaatggagctcttccagagttatatcaaaaatatttattgagcatttactttgtaggaggtgagcctctcccttccaggaggtcacagtatacggttctaatttgctctaagccctccgtgaatgttgagttttgtccattcccttttggaagaaacaggatgcgccttaaaccatcttgagtcttaaagttatgccaaacaggcatttctaaggaaagactggcgactgaaggggagacactggttgtttagtcagtcagtctcagctggtaaaacaacttaagaggttctctttaaaattaatgctgccaagagaattgctgtgctttttgaaagc

SEQ ID NO: 94584 - DNA, 1086 bp, Homo sapiens
aagaaaacagaatgttatcacttaatctagaaaattgttcctttactaaaatagacatttttctcagctttaaaactatatgtatttcagcttcaggtcattgaaagtttttatgattgaaattaatctggaaaggaagattcagctcttcccactagacactatgttattatgcctctagtattagagacctacaaatagtatatttctaaatgaagcaatggttttcagtgttgttgttctttattataactgtgctaaagtcagtcatttttgaagttttttttttttagattcaaggggtttaaaattcaagtgttgagtttttattagaattatctattaattaaaatctggatttttatttactttagaatcagactttaaaacgatatacctctaaatataagttcaaacaaggttgttgcttactgaaagatcagttccagtttaaatctcttatttgcattattttcaaacagaataagacctggaagtttgttgaaggtctccctattaatgatttctcacgtgagaagatggatcttactgcaaaggaactgacagaagaaaaagaaagtgcttttgaatttctttcctctgcctgactagacaatgatgttactaaatgcttcaaagctgaagaatctaaatgtcgtctttgactcaagtaccaaataataataatgctatacttaaattacttgtgaaaaacaacacattttaaagattacgtgcttcttggtacaggtttgtgaatgacagtttatcgtcatgctgttagtgtgcattctaaataaatatatattcaaatgaaagtgactcagactctgtttctagctaatatttagtgtctattcaggaagcaaacttgcggacaggcgcagtgactgacacctgtaatcccagcactttgggaagcttgagatgggtggatcacctgaggtccggagtttgagaccagcctgggcaaatagtgacaccccatctctactaaaaatacaaaaattagccaggcgtggtggcacaggtctgaaatcccagctacttgggaggatgaggtaggagaataggttgtcccggggg

SEQ ID NO: 94585 - DNA, 1126 bp, Homo sapiens
gaccggtcggccagccagagcgtggaattggtagcgcctcctagtcccaggatgtttatggctggtgaaaatggttgcactgcccccgctggccggcctcgcccgcctccccgacccctgcttgggcgggagccgctgttaaccggggttttcgggggaggcgtttggggcctggacggcggcgcggggagggggcagctaggggcgcggcctgccagtgcctcctgcagtacagccctggagggcgtggggacttgggggcggtgaaatagccgctgtaggtccgcctctttcattgaagaaatttaagttcgtgtggttttaccttttccgggagtctccagctggccctcatttgtgtccggagctcaggagttcccaaaccgactcagtcgcaccaagtttccgtcttttggaattggggaaggagtttctttctttcttttcttttttcttgagccagttttaatcgctttgaataaatactcccttaagtagttaaatataggaggagaaagaatacatcggttgttaaagcaggagaggaagagagacctgccctgtagcgtgactcctctagaaaaaaaaaaaaaaagccggagtattttactaagcccctaaaatgtcgagatttgtacaaggtaagaaatgctgctgcttatatcccgagttgcttcaggcaaatttgggtactgacagtggagaggttggtgggtggtttggaagtggaaatgttcatttgagataacatttgcgaaacccttttcgttgaattgtcatctgagctgccttgagctgctgggttgacgttccagacgcgtataatttatgctcctgtaccctgctgggtttagttttgcctccctgaaatcaggttagtagtaccgtcgctttcctggatagtggctgtaagtgataaaacaggatttttggctgctaattaatccttgttctcttttcctggtctgtgtcaaggtacctgtgcgtgcacgcagacgggaagggctggggaagcgggaggactgagaaaagccgggtgggttttgccgggactgttggggaagctttagtgttctccgcttctacttcgtttgtgtgtacgtggtttgcgtctcagattcactta

SEQ ID NO: 94586 - DNA, 1036 bp, Homo sapiens
catttctaagaatcttaatcataccattatttccacaggaattaaactgaaggtattttctttagtacctacctttcatctagttctaaaactgggatgcctgccatgctttccacaaactctccatttattgaaacaaagtggcatttattttcccagctgacgggggtgggcaaagggaaggcatttcttcacatccttgtactcttctatagtgaggtagggggtatagcttcataaaaagttccctttccctgaagcttcatttcctgaagcttgtttattatcactgaaaaaatgatcattaataatctttccattcaggtctgctggtagttcaatttatgccttttctttaaattcatccatacttgttttgagtaggctgcttgtttaaagttcacaatataccacttaaaaaaaagttgccttttaaagtctgttaattttttacagctttattttagacagatagtttaagaaccaaagacatacctctgtaatgataaaggaaagaaaacaagctttccttttaagaaaccaaagagcacaaaataagactgtttcattatacataatcaccacaggatattaggcactctgacagggttaggcaagattcttggtgtgaggtgaagcacaggcactttatttgtacagtgctgctgattctaattttgaaggtaggtattataaaagtctttacttgtcaccttatttctggccccaacacagcagcctatagttttaaaagttctgtttctccctggtctttgttcgtatacacatcgaaagtaacttaaaaacaaggatccaagggggccatacttcatatgttatctaaatgttaatatgagaactcaaaagtaggcagattatatgaatacatattcttacctctgctacaaataaaaacaccccaaacccttcatcatacttttataaaaatacagatattaaactgtagccttttatataccatttctgaaaagtatttagttgcataaatagatgccaggatctttttttttaagta

SEQ ID NO: 94587 - DNA, 1421 bp, Homo sapiens
actattttagtcagcactcccatactctagtgctaaccaatcaaaaacattttagtttagcctgttattttctctgtatattaattcatgctgtttcaagataaatctgattttcttgggctgaatttatcatgaaactgactctaacagccattggtttattcattttccaaatatttattattgaagtacagcattaaatggcctacttattcatagcaggaatcctgctaagtaaagtatttggacacttgggcactaagaaatctgaattttagataataggactctgactcggtgagcactgttactttaattatctgaatagaaagtttgagatttaaaaaataattttctctccattatttaggttggtcacagcagatgtagctttttacactggaaatcttcaagccttaaaaggccttaaagatttggacctaaatatggccgaaatttgggagcagaagaggtgatgtcatcctggaaaactgggtagttcatctgaccatgggatgtgtttgttatgaagaaaatctggatgcctgtgattcgagaattgaacctgaaacccaaagtgaactggggtgggggaagggaaaaaggaaagtatcaagtgttgggaaactggattcagtgggatctacaaggaatgtcatttttgtgcatcctacagtgaggagtaactgatcaggtgtctataacatttttcattctctctggaaacagactcaggtttctttggaccaaatccaaaagaacacatagctgtaacacagctgtagttgactagaatgctctgtatactttatattaaaaaatgctttgcatttcttccagtgcaatgaaattcatatggtgtcccaccttatttaatgatggtacaatttaaaatcttagtcaacttctgtagaaagttttctctatgaaagtaaagctgtttgaaaaattattatttttttacagatctttctataaaaaataaacatcttttgattgcttggatttaggaattcaatttttgtttcagtgaccaatgtcaagttgcaggctttgtgtgttgcatatttaatatttctactaccaccgtatgtcaactgggtaaagccttccagagctctctaaatacctgaaagacttaagcctttttttaagtaattaatacttaaaaaaaaagatcctggcatctatttatgcaactaaatacttttcagaaatggtatataaaaggctacagtttaatatctgtatttttataaaagtatgatgaagggtttggggtgtttttatttgtagcagaggtaagaatatgtattcatataatctgcctacttttgagttctcatattaacatttagataacatatgaagtatggcccccttggatccttgtttttaagttactttcgatgtgtatacga

SEQ ID NO: 94588 - DNA, 1998 bp, Homo sapiens
atcaattcattagttatgatggaggacctactatgttggtaatcagaaacactggataggctttttgtcagtgtttctgaattggctaatgaatgcaatacctgtcttactgaagcgactcccttacttaataagaatgccatacagagagtattatgcctgttgtacagaatttaaggagccactcattctcagtgttgtgcaagctgatcctgcaattgcacagagtaagagcctctttaaattttgcattctagacacctctcttgtcttgtgttagtcaagaacctgctgtactagtaggtaaaatgcatactttaacatagttaccaaggtcattatattctcagagatcctttgtgccattaagtaatttgatttttatatgccaaatccttttgatttttcttgttttgatttcctattgggccatttttcttttcttgtagaaccgtattgctgttaataagaattatccttgaatattgccagtgtgtggataacatcccatctgttactactgacatgcttactcgtctgtcagatttattgaaggtatgtatgacttcactccattatggaaaaatttttcgaggaattaatacattagggtgtgactaatcttaactcaaagacatttcaaggtcaaattaactttaagacattagttttataacatttgattgtggttgaatcacaacatgttattggaaacaggctgcctgcttccttcttactccacagttagtgatcctcattcacccatagagttgttaatgacattggagacaggagatgatttgttcgttaggtgctgaacatgactgaggccacttaggtcaaaaaacctggactggcttcaaatgtgcatggaaggaattcactgaactttacaaaattcatctcactaaggttagagatttttcttgcatcattctttcagaaccattgatataaaatgaaaatgtgatgattttattcagccatttcatattgagatattttaaactaccagtacggaggaaatgctttattatttttttcaaacctctaatctgttaattatgttctgacttgagttgtcatgttttagccaagacagatttttataacttttgaaaataggacttcccaacaagaatgactgaaaccgaatttgttttgtacatgcaaattaaagattaatttctgcgaactgatttttagaatttttcaacttttttcttatcagtaaatattatcatttagaatctccccttctcatttctttttcattaaataaatagatactaattgcttctactagataattcatttggccattgaatgagaggaaaggggaatgtatttttataatagcacattgccaggatataaagaacagtttttagtaaattttggggtttttttctccttcttttgttagtacttcaattcaagaagttgccagttagttcttggagctggtgcactgcaagttgttggactaaaaacgataactacaaaaaatttgggtatggattcttgcgtttaattcacttgctgaagtgttaacagtgatgtcactgttctcatcatgtttttttatacctcatgttttcatggctctaaccaaagtggcattactctaaaaataaatgctacttactcttttatgtatactcatcactgaaaaaaactaaccatggggaaaaggttacgatgcatttcccctccaagtataagttacttggaagttacaccactctagaaaatattaagatataatgtgtataaagtatttgggggtgaaagctatctgaatgtcataagagaatcagttgtcttgttattgtgatactgataatactcacaacttgagtcctttgtgaaagcagcatgttcattacattattcagtatcaaattattagacaaaatgaaatatgttgccttctgccatagggctcttcgtttatgaaataaactggttctttataagtgatgttttttatttgat

SEQ ID NO: 94589 - DNA, 2359 bp, Homo sapiens
tcctagcactttgggaggctgaggtgggaggattgcttgaggccagggatatttgagaccaccctgggcattgtagcaagactctgtagtcccagctacttgggaggctgaggtagggggtttgcttgaggctaggagtttgaggtttcagtaagctctgaatgtgccactgcactccagcctgggtgacagagcaagaccctgtctcaaaacaaataataatatagataatagttgtattatctgagcatgtttaagtaatgtttcactataaaaactataagatatttggtacatcatagaatttttcttcaaatgtgaattttacagctttttcatcctttttattgataggtcacctgtggagaatactatgtttacaactttccctgactaaatcttattttgttattttcagggtcagtgaagatatgaaattaactgactcagagctaggaaagctggcaaataatatccaggaattattatatagtgcctcagatatatgccatgatcgagctgtcaaatttctcatgtcaagagcaaaggtagctattttcataaagctttatatattttatacgtaataattttgaagatctggaattatgtctttgcttcctgtgttccccataatgcatattatatttttaacatttaataaagtcagtgttaccactgatgtggtctactagggagatgttgagatatgaagtaatctaaaataaataggagttattaaagcattattttcagataaatgattaaatgacattttgaaatatatgttaataactaatttgaaattaatgttgttttacatatatagtaagtctatatatgtatacctaaatatatgtagttaaacaagtttataataaaactccaacattgtgaaaattttatagtatgacctaaattcatttgaactactatattagttataaagggatcagaatcaaatttggacctcttaagcatttcatgctcaatttctgggtctgaagtattgggaaatattattaaaataaaaaatatatagattataataatcgttaaactaacttggtttcataactcaatttggtgttacactaactctcatgatttttgtattaaaatttaggatggttttcttgagaagctaaattccatggaattcataacactttctagattaatggaaacattcattttagacaccgaacagatctgtggaagaaaaagcacgtcattacttggagcacttcagagccaagctattaagtttgtaaataggtttcatgaagagagaaaaaccaagctcaggtatcatcaccatgtccattctgttgtttgattttttcatttttctttgtgaaacacagttatgtttaaaagaggaaacctaattggccagtgaaaatgcctgataaaggtttttttaattaaaggcagattgtggaattaaaatcacatttcttggcttttcaaagtggagttagaatgtttacttctattaaagtacttatcaggaagatcctcagtaagttgacttttgttcccactcaaagttaagtaaattgtttcatcattctttttgattaggctgagatataaaaagggaactattttctaagtattggtcctgcttattaaagtgttcagcactttttaagtcttatgttctcactcagctcttcttccttttcttttaaaccaaggaagatggtattgaaatgttaaagtttaccttcttttctccttactgtggactagcctcctcttagacaatgagcgctggaagcaagcagatgttcctgcagaatttcaggatcttgttgattctctgtcagatgggaagattgctttacctgaaaaaaaatcaggaggtatgtgtattcattcacacattctctttcaattttatattgtttatttattttgtattaatgcttaatatttctttagttgacaatgcctatttcaaagctagaaccaatatttccagcttagtaaatacttgacaggaaaactatggtaatttataataattatttcaaatatttattgcgtgttataaccatatgccagacactggaccatgttctttacatgcattactccagttcattctcacaacgatctgtgatacaggtactattgtttctttgtgtaacagtgaggaggcttgaggcttagaagggttaaggaatttttatacaaatgatgagttgggatttgaaaccagctttatataatttcatagctatgttcttagctactataccgtattgtttacatacatgaattgagtaagcgctagttagcttctactttgtgtcctatattgagacagaattgagacagagataacagc

SEQ ID NO: 94590 - DNA, 1039 bp, Homo sapiens
taaactttatgttaatggaataatatatttgctcttttgtctctgatttctttcgttcagcattacagttgtgatatctatccaggttgttacatgtagcagtgattttattttttgtgtacaaataatccattttatgatacaccacaatgtatgtatgtattttacttttgataagatttgggttattttcattttggattgtcacgaacattcttctagatacctttgttgcacatgttacaagcattgctgttgaatatatacctggaaacaaagtatgtgaatggtcaatttagctaatgcctaacaatttctcaaagtggttgtactcatttatgctcccctcagaagtgtggagcagtttgtgtcactccacatcttccttcactcttaatattgccagtcttttacatgttagccattctgttgggtatgttgcaagtgtagtaattttatttccctgatgattgttaggagagcaccttttcatacattcattggcttctgggatgtccttttctatgaagtgcctattcaaggcctttacccatttttctgttggtttgtcttgatctgtgaaggttgtttatattatgtcagcacaaaccttttgccagttgtccatattgcagatatcttctcccactttctgtattgacttttcactcttattgggttttttggtgaacaaaagttcttaatataattctatgattcattactttcctttatgatttatgcttctttgtgtcctgtttaagaaatctttctctaccttaaagacttgaagatgttttctggttactgtctagaaactttgttactgtctttttcacattaagacctacaatccatctagaattgatttttatgtttagtatgagggttaagatttttttcccatatggatatgtttttgaccttgcaccatttattgaaaaggctgtctttcctactgctctataatgtcactcttgacataaatcaaatattcagataggcgtatctgtttctggactctatttcgttcattttt

SEQ ID NO: 94591 - DNA, 1891 bp, Homo sapiens
ttttggagacccgaagttagagtctgcttccctagaaccatgtagattccaaaaaaactaaccaagcgttttgagaaagggagaaacagttgtaagactgcaactgtgaatgttaaaataggcaagcagtcctttatttcttaattgtccataaagacattagtttacataaatttactcttcatttgcctagctttcaatatttactgagcacctcctatttgccaggcactattctaggcattaggattacagtgtcatggaatggagctgacattctaatagaaggagacctagaataaacaaagataattgtacataatgataaatgggtttttttgttttttgtttttatttttttacaaaaactggataatgggatagagttgctgggtggagattcagggaaggcctctgaggaagtgaccactggagccagaacctcagtgatgagaaggaaatatgtgcaaagatcaaggtgaaaagcattccggatagaggaaacagcagaggcactgaggtgggaacaatcctggaatgagggaagagtagaaagagaactagaatgtctggagagtagtgaataagtgagagaagatacgagaaaaggagaaagagaggtaggggctaggcatggtaagtaacacagattccttttcttttagacaggcatatcaatgtatatgattctctgatgggcaagttatgtttagtgtaacctttttaagaggtcagagaaatatgcaacatattttagggagatttccattttaaaaattagttaaaatataggaagtttatttctaagctttagtgaacccatttctcctggccagttctttttcacatcacttttcctatgtaataaaagatcggtagaaattctgatatacatgactttgactcatttatgattatagatgtccaaaattacatgcacagaattctcttttgggaacttcaggtaagagacattttacgtcccttaaaagtgtgtcctattttcttgtaggcaacattaaatatcattcacagtgttgttctctcagttcttgacaaaaaccaaaggactagagaattggaagagatttcacaacagaagaatgctgcaaaagataattcactggacacagaggtggcttatttaatccatgaaggcatgtttataagtgatgcattcggtgagggtgagctaacacctatagcagttgacactacctctcaaagaaatgcatctccaaatagtgagccctgcagcagtgattctgtatccgagccagaatgtactactgattcttcatccagcaaagagcacacatcatcatctgctattccaggaggtgtggatattatgtgagtatagtggctactgccaaattgacaagattttgagtcatcttattaatggattcagtaagattgattattcagtttattgaaaaaccatgtaaattttagaatttaacaaaaatatattaattttatgaaacgtatctctataaaaatgtatgagaagtaaggaggtgagcattggaagtaattgaaaattatagagttttaagattgcaaaagaactttaaagaccattttattaaatgccctcatttcagtgataaggtaattgatgcccagagagcttagatgacttgcttacagtgactagtggcagaacatatactggaacccaggtcagtttttgctttggtcatttttctttcttctgtgtcacctttgtgatttatatgttgtgaagatctgtttgatttataacttttggtttttcaaagacatgaatttccaaatggatcacatcttctcttaaaccttattttaaaaacttcttattttgaaataatttcaaatttacagaaaagttaccagaatagaacaa

SEQ ID NO: 94592 - DNA, 1038 bp, Homo sapiens
caaaaggtcaaatggttttaactaattttttaaaaattgtgttatatctcatctttcttagtaaatatagttgccagtattaaggatttgtttttcaagtaaatgtagtgtggatatagtttaaatgttttttaaattttaatgtaatataaaatttaaatgttttaaaactgcccctcaaaatagagcttaaaacatttttttccctgagatataaacatattttccattggactctttcacttaagttttgaaattctttggaccaactaggttatctaggcttctttagctcattgcttttacacagctatttgaaagtatggcagaaatccctttgtatgtgaaagtacttcatccttacatttttcagtcttgtgtttcaatgactttcagtttaatgacttaagcgatgttgcacagtaactcaaactgattataagaaagattgaattgagtccatctgtacatacagtccttcagatatttatttgcacccagaacagggcctagcgcagggtaggcacaaatgtttgttgaataaatgaatgactagggagctaccaccattgatattcagtaaatagttaataaggaaaggacttagaatgtcaatattttgtctgtggaaaacaatcataaatgtacccagtaaccaggttttctagaacacatttatttggaggctaaaggtacacctttgaccttgaacaacatgggtttggacttgtgggtccatttatacacagattttttttcagtaaatatattggaaaagtttttggagatttgtgaaagttgaaaaaacttaccacatagcctagaaatatatatgccatgaatgcataaaatatatgtaggtactagtctattttatcatttactaccataaaatatacacagcactatttaaaaagttaaaatttatccaaacttgcacacagactgtatatggccccactcatgcagtattaaatcataactgcagaaaactaactgtggtacatattgtaccactgtaataatttcataaccacc

SEQ ID NO: 94593 - DNA, 1051 bp, Homo sapiens
aaacttatactcaaacatacacaacagtaaaggaaattatatgaaaagaattataggaagctagatgaattgtttatctaagttgtcaatgcaaagcaaagtttgttttatctgtatcctgtattattttgtaacaaaccctgaacattttgtttcattcataaatatttcattaggtatctttgaaagataaggattttttaaaaatataactctaatgtcatttatattttcaaatatagctagtcagtgttcagattttcctgttagtctcaaaattctttcttatggtgtgtttattgtaatcagggtccaaataatatctatatattgcaattggttgatatgtctcaagtgttttttgatccatagttatccattctaattttctttcaaaatactaatcgaagaaactgggttgtcttatagtgcttcccatagtttggattttgtaaactatgtttccatgtttagcatgttattttttcacctatattctctgtaattgatagttagttttaaaagcttgattagctttaaattttactttttaacaagagcacctaatagacagtggtgtgtatttcagtcaagaagcatgaaaagtctctcttttgatgattagcagccatttaataattgctgtctagatttatcattaattgtgggctacaaattatgatactctaattctatcccactttctttacttattcactggaatatttctatgaattgatgtttccctataacaattatttggtcaccctttgaaggacaattcttacaagattagacaggataaatgctagattcttttcctttatttagctgttttcaaaataacgaattggaaatctagcatcctccaaagataactgatgaatttttaaagatattataaatacatggatttatatgcaaagtgttttaagttctttctttttaatttttatcaatgttcaaattgaattatcatttgtaggaacctcctcaagttcattcttgagtctttttgacatgatttcctaagtagttattgacagttttc

SEQ ID NO: 94594 - DNA, 1090 bp, Homo sapiens
gggactacaggtgcccgccaccacacctggctaattttttgtatttttagtagagacagggtttcaccgtgttagccaggatggcctcgatctcctgacctcgtgatccgcccgccttggcctcccaaagtgctgggattacaggtgtgagccaccgtgcccggccgggatataaatatttttaaccattacatgtgaaatgaaattttgctatctattaccaataaaaatgataatcattgaaacaatatatatcatttatatactaatttaactaaaagtattgctgaggctaatggcattcaaatgcttaagcagatgtagtacataagtctcgtgagcccaagaatgcattcgaatgttgatatcttgcaggttttgatacagaaaatctttagttaccttgaaacttagggctgtggtgtcgttatttgctcttactgtaaagctttgtgtagaaactcttagttttcataattgtcgttaacactctattcctactacttcataccatgattactaccaccgccattctacaacagaggacatatattgaatacttgagtattctgtaccagatactgtgctaagtatattgacatcgcccactccccaaaaaactgtgagatagggaatgttacccacactttacagataggaaaactgaggtcatatagcaagttaagtaacagtacagtagagattcaacttgggtctcactgggcttgagagctatgctttttaatatatttgtttgaggatcttatggggcctcaaatagatcactctgaacatcaatactaatttgattgtacaaactgtgggcaattgagctataggtttgctcagcagccaggaactaccatattaatggattttggcgtaaaaattactgcagctagcttgttttctacttgtaagcctttttttgttttgttttgaaagaaaagatgcaaaacactcagtttattatagattccagtttattatgatttcattgatcagtggccactgtgagattccatttaagggatctttattattggatgtatcaaaaggtatttaacatgttatttgaccttaaatctcc

SEQ ID NO: 94595 - DNA, 2107 bp, Homo sapiens
tttattttattatggccctgttaaacagtccacagattggcagcagcatataaatcacattctgggtagcactgtcctaaagttatctattctccatttactattctgggaattgagtccatgttaccttgcaatttaccctagtatatttgtgcccattttgcttttttagtgaataaatgaacagccatattgaagatgaaagagcaaaagggcataaactcaagatttaaactgtggaaaaatttcttgtttgtaacctatttagatattgtaagattattgaaggagcattattgaagatatgaatgatactctgtgtttccttagggaaacagatttgatgaccaaatagtctcttctaatcttatgagacctaaatgttgaaagttcattaaccctttgaaactatgaattatcccaagacattcagagataatgcccgaagtctgagctgtgggttaaaaaatctcaaagtaaaaaaatgggtgaataatggaaagataatatagccaaaaaaggcatatgcagttagaaaggaagaaaaggcaaaacaagttttagaagtccatatttgaaatttagaaagcattttaaatatatattaccataagaattaatcttggtaatgctactaaaaaaatatatatgagctaattgtttaaggtatttgtcgaacttttaagaggaaaattcattggaaataaactgaattttacaaattgataaaagaatcacttttgaaatgtaaaataagcagcctgaaaaaaatccaaatgaattttagtaccttatctataatttgtgactgaaccatcagtctatcttggattattcagcattttgaggcagaatggtataatagaaacagcttcagtttttcagtcagagatataccaacattttagttttgctacttagtaactacatgactgtgtttcctcatctgtaaaatgataataatactacctatatttcaagattgttaaaattagaaaaattagatgtgtataaaatacctgtgcctaatccataggaggaggtcaataaatggaaggtgtaatcatctatttagtcagataaatgatgtgcaatgatattgggggctaaggagatcattctctttctctcagatcttagaacatctgaaactggaattgtaatttgagatgtctgtggggtactcttttagaaagcagttggtgtttggaaggtgataatgacaggaacagaggaggaaagtaaatgaccttgtactcttttgtcttacatttatatctttggggtgtaccctttatcttccttccattttgttgtgcccaatttcaaggatctcacaatcaaacaattcacacaatggaatttaaagtatatgtagaaatcttttatcattgtcataaagtatttggataatcaaggaaggtatgctcatagtacttcatattttttttccttctcttttaagctgagccattatctggatattgtggaagtaaacattgctcaccagatctctctacgttcagaagcattttttcatgcaatgacctctcaacacgagttgcaggactacctcaggaaaacttcccaggctgtaaaaatgcttcgagataaaattgcacagattgataaagtaatgtgtgaaggatcactccacattttaagactggcacttaccagaaataattgtgttaaagtatacaataagctgaagttaatggccactgtacaccagactcagcctacagtacaggtgttattatctacttctgaatttgttggagcattggacttaatagcaacaacacaagaggttctacagcaggaacttcagggcattcacagtttccggtatgttcattaagtaagccactagaaataatgttagaaatttttaaaggataaaattgagcatgtaatgttaaaagtgtgaatatattcaaagttaaatggatattttttcttccagattgatcatttgtttaataatgttattctgatattgtagtattagcaaaacaaaaaccataaggaataatattttcagagacatttggatggagaagcaaaattaaaatttctaggagatgagataaatgcaaggcca

SEQ ID NO: 94596 - DNA, 1055 bp, Homo sapiens
tcatggaaaacaatttttccatagaccaaggggtttgcggggagatagttttgggatgaacctttattatgcactttatttctactgttattacattgtaaaatataatgaaataattatacaattcatcataatggagagtcagtgggagccctgagcttattttccgggaactagatggtcccatctgggggagatgggagacagtgacagatcatcaggcattagattcttataaggagggcacaacctagatctctgacatgtgcagttcacattagggtttgtgctcctatgagaacctagtgccaccactgatctgacagaaggtggagctcagacggtaatgtgattgatggggactggctgtaaatacagatgaagctttgcttgtgcccactgctcacctcctgctgtgcaacctggttcctaacaggccatggcccaggggttggggaccactgagatagcataaagccttttatgtctgattaaaaagatttgagatgtattttgctgttttattgctgctatataattgattacaattacctgaaacattgttttgttcagcgctttgcctactactaggcatgtaataggtgcttgatagataatttgttgaaggaataaactttagttatttggatgtgacccagtacaatactgaatctgtcaaaatgtattttacggagttaaaatgaaaacaagttttaaaaataatatttcccttcttttttaaatagataaatccaggacagatctggagcaagtacctaaggtaacaaagcttaaacatgagaaaattgccttataatatttgatctttaattttgccttacaagcagatttcatttggcttttttttttttttgaccctttggctactttgtctcttgtggggctgtgttgcatcacttttcttctttctttctcacttttctttttttctttccttccttctgtcttttctgtctttctttctttttctttctgcttttctgttctttctcttaacttagacagaatcttgccccgtctcgcaggctggagtg

SEQ ID NO: 94597 - DNA, 1316 bp, Homo sapiens
acctaactctttagtttccctacaagcagtggttcaatatttgctaattcaatattcacaataactttatagaacaaatacactactaataatgagaatagagtaaaattttccttcttgtatggttaatgccacagcaacatttatgtcacctaattataagccaaaggatattttatctaggagatcctgccatgatataatagaaaagaggcctacctctaaaaaacagtggggtattaaaggatagaaaatacataatagaaagcagcatagttctgatgttgaaaaaaaaagatagagtaattgtacattaaggaaaggagttcatgaaagactttctttactattcactccaccctgcaatcgtagttctcaaattttgcatatcttttatctcgtgcatatttttcaaagccttagtaattgatgctgccagctgaaggttattcaatcagattgatttttattaaatcatttactgtggaagattagttggtttgcgtaagatggaatctgtgcatttttagttttctagtgtgtactttcaaacatagaaccaattttacagcatttacagagttctcttgtttactttttgcaggtgattcacatagtttatatgttgccccatctctagttacagatcaacatagatggactgtatatcattccaaagtaaatctcccagcagcattaaacgatcctagattagcaaaaagagaatctgacttcttcacaaaaacatggggattggactttgtggacactgaagtcataccttcattctacctcccacagatcagcaaggaacattttacagtatatcaacaggaaatctctcaggtaatatctaatcttggctagttacagtcaggtcaaaagtaatagaaatatttttagtatgctttattatagatttttgaccagtaatgtttgatgaacctatagtattcttttcgttcatacaaattgtactgtcctgggttgcatttaattctttgcttaaatatattttaatacatttctcttacagtagtgatttttcagaattacacattccaaataatgctaagattcaacatgaaacctaccctgcttaccaaggagaaaatgattctgttaggcctataaagtccagatgatttgtgaggtttgagaaattggcagaatattactgtttctgtgtctgattcactgcatacaattctatagagcaccctagctctagcagatagttataatatctccagacataattataacttaatatattactttaaaccctgtctgagagcaagaactgagtatagtgc

SEQ ID NO: 94598 - DNA, 1050 bp, Homo sapiens
ctcacgcctgtaatcccagcactttgggaggccaaggcgggtggatcacctgaggtcaggagttcaagactagcctgaccaatatggcgaaaccctgtctctactaaaattacagaaattagctgggcgtggtggcatgcgcctgtagtcccagatactcaggaggctgaggcaggagaatggcttgaaactgggaggcggaggttgcagtgaagccgcgattgcaccactgcactctagcctgctgacagtgagactgtctcaaaaaaaaaaagtttataataatagttgttgcaattatttattgaatgtctactatgtaccaagtattatgctatgaactcacataagttatttcatttaaatcttatgacattcctatgaggaagatactgctgctgtcccattttacaaattaggaaacagacttaggaaggtaagacagttgtcacacaactaataaatgacagtgatctaactgattgtatggccaatactcttaactagtatatcgttttacaaggaaggtggagatctagaatcaaatttcagaaagtcaagtaatgttaatacaaacaaggaaatatattttggatttatatttttagattatttgaaatgtatgtgaaccttttgaggtattgtgttagtggcttgtgtgtcttacacactttctgtgatattcattcatttgctcattcgttcattgaatagtcatgcagtttattgaatgcttagactttgtattgggtgtggtataggaaagtgaatgaaacaaatataagtaagtaagtttacagtatagtgggagagataggaaacaagcaggtaaataatcacataatttattttagtctagagtagtttcccacctttttaaaatgactgagtatccaagccattttcttaatagactatctcatactcttaatttgtctcattgtttcctcatatatggtggtttaaaccttactatcctacttccttctatttactgtaaactcaaaggtaggtctagagcaagggtgctgaaccttgagttcacagact

SEQ ID NO: 94599 - DNA, 1025 bp, Homo sapiens
aaacagacttaatttactgcaaatttggactactattgttttgaattgttatttttgcatatgtttttgaaattgtaaatagaatatagtcatatcttttttatccagaagtgatttttttttttcctggcagcttcaactaccaagaaaggagaagtaagctaagtgtttaactttatggataacacttatgttatatatgtatgtataacacttatgttatgtatgtatgtatgtatgttgtgaatgtccagaaaaattccaagcttataatgaatctttttttcccctatgagctccactttagactatttaatgtttttaacaagcttaatttgttgatgaaagaaggtaattgacagttgagatcacttttgctatttatcatccataccttatggataagttactcaagttattctttctgagcctcagttttctcatctataaaataggggtagtgataatccatgtattacaaggctattgtaagaattattaaatgaggtaatatgtattaagatgcagtgtcaactataatatactgtagaagagttattcgcttcagaagaatcaaattaggaaggaatatagaggttgtcaaaggcaggaatgtagatagtaaggcggagaatagtgatggctgacagcctctctagggaggagagaagcactaaatacaaatattgataacaaactagtaaaataactagtatatcactataatctgaaactccttaatataggggcaaactgacttccttctgtagcacctgagagtatcaccgttatagcacagtaaaataactgattattataatggtgaaattaacttattaagaaaagattaccttgttttcaaatatgctatttgagaagacttgaaaatatatatattttacttcagagttaaaatttttggaagtgacttattcaaaaagttttagtgtttttaagagtatgctgtcgttatttggattaattcccttttggggaataatccttttgtcttcatttactatgcc

SEQ ID NO: 94600 - DNA, 1047 bp, Homo sapiens
gcctcggtgcgacgtggagggctggaggcggcggcgatgcactaggcctcgctcagggcggctgccccgggacccgcaggtaggtgtgccccgcggccccccgcgcgtctcagcccactctcaccccgacctacagcggagagagggaccgagaccccaccccctcggctctcctccccagccccaaacggaccgagtttcggtcacagctgaccggcactgaagcttccatgctcctctccgccacttccttttttttttttttttttccttttcactctccctccgggatcggggctggcagctgtgttccctgcctcctgtcagcgaccgcaaacgccgctcttgcccctctcttatctttccgggatcccagctctggaacttccatcacccccttagacgctgcccccaaactttccttttctttttccagccaggcccttagtcctattggattctactggaatcgttaaaacatttgtttgtttttctctccggggaaggctaacccaaagagttactcagtattttgcattttggcaatgtagcttgaaataatttgtgcaataattttcttcagttctgcctccttccatctctgcatagacagaaagggcaggccctctctgccgtttctgctctcccgtcgttgacttgggaactttggcttgccaattataattagccgtttggtctgttcatgtgttgagttcaagatggtatttttagcattttgactgacaggcgtttcaaaaaaaaatttttttcttctaaccagctttattttttggtctttattgaggctctttcgaagaattaaattgtttggactgtttttgtttttaattggctgtatttctgatttgtcaaatcaagggcggtcttaatactaaacgcctttaagtaataccgtgataaattacttgtagtataccgagaaatattactgcgataacctaaactgcagattttgatgtacattcacttttataaatccgaaggggagttctaattggaaaaagcaccttcagagcctaaatgatt

SEQ ID NO: 94601 - DNA, 1025 bp, Homo sapiens
accaggtgtatagggacaagagaatgaacggttcacacaggctgtctgctatctacagccaggagctcccaaagtagtatgggctcaggtggcagctgcggaggggtagtgggaggaatcccctactgcgagtcttcccaagttgttttgcacaggggttggggaagagagaacaagcagttttttggagattggtctctctccccaactcccatctccctctttttctctgtctccctctcctctctcataaacacacccaccaaagaaatcctccaaattctggaataagtatagcttctcaaggtgactaggttgaaagaaacagtgttcacttgagtgtgtaaattctaacatgtttcttagtgtcatttctatattagtcatactgcatgaatgcaaatgttgattctatttttcattgattttattcaaagaactcaactgtgacaggaatccctgaatcaagtatactatgcaaagttggtatcttgttgcaaaggtaatacaactgtgaagtgatacttgttatgatgaaattaaagtcaaagatatgactcttgggatgtaaccttttgcagagaagcattaaaagaatgttattctgctttggtatatgctataggacttttaaagtttgagagttaacaatcaagagtttctttgcagctgcttttatggtttcattattgctactgatttcaaatatagccgtatttatttaccaaagtgttttaattcctctttaaatacaaaaggaccattgaaaatgttgtctgggtggaatttcacaaatacaaggaattcttcagacaaggcatgggtccaagccttaatccagtctggcctcagataccagtccttaaatgttcctttatcaaagtaggtaacaatgggcagttattcactgtaaataaactagggactgagtgaggggagttagaaaatatcaagataagcagtttgcccttcggagaggactcagttgtactgaagccagcatttcctatcattttgtaacatac

SEQ ID NO: 94602 - DNA, 1153 bp, Homo sapiens
ctttcttaaactaaacagcactccctctgatcttttctgttgccatctgtatatcttaaaccatatttacctcattaaaaatattagacttattgattagccagatgttttaatcataagttgtctttaccataaggctaaaaagaaatatgttaatgtttgatattttatccttgattttcaaacttaacatttttcataactactgtcagtttcttgaatatttagtgaaaatcctaggaaacctcatttcttgagtaaggagtacttaaaaccaaaacacttatgtaaaaatccaaaacagagtggtgaatatgtttttcaactcttgtctcctctaggtggaaattgaaaccaatcagttacaagatggctcgttaattgacctctgtggtgcaacattgttatggcgtactgcagaaggcctttcccacactcctaccgtgaagcatttagaagctttaagacaggaaatcaatgcagcacgacctcagtgccctgtagggttcaacacactagcatttcctagtatgaagaggaaagacgttgtagatgaaaaacaaccatgggtatatctaaactgcggccatgtacatggctatcataactggggaaacaaagaagaacgtgatggaaaagatcgtgaatgtcctatgtgtaggtctgttggtccctatgttcctctgtggcttggatgtgaagctggattttatgtggacgccggccctccaacccatgcgtttagcccgtgtgggcatgtgtgttcagaaaagacaactgcctattggtcccagatcccacttcctcatggtactcatacttttcatgcagcctgtcccttttgtgcacatcagttggctggtgaacaaggctacatcagacttatttttcaaggacctctagactaacagaccattgtcttgcaggactacattataaatttataagctaagtgagttgggttttcgaacctgttgtccacgtcacagtttttctgctctggtcatttgcattaagatgaagaattttttaaaacatttataataaatagtagcaatttctgagcaaaaatctgggaaactcaagcaaaggaatttctgaaagtatcagtcttctgaattctgagttttgaaaatatattttgaggagaaaa

SEQ ID NO: 94603 - DNA, 1098 bp, Homo sapiens
aaaggaattttaaataattataatgtgttaatagataattaattgggaattgattctgcaaggcaaagtcaaacatttgttttataattgtgcagttcttgcaagagatcacctatactttttttcccccatcaggtataatgggtctctcccaaatggcgatagaggaaggaggaaaagtaggtttgctttgtttaaaagacctaaggcaaatggggtgaagcccagcactgtgcatattgcttgtactcctcaggctgcaaaggtaaaaaaaaaaaaaaaaagctacataaattaacttggagaatttgaaagacttttatgtgttgtttgtattctctagcattccccttacatttctatttcagaaattgccttttgtttggattggagaagagactttggagacatggtatttgaagagctgccatatggaaggggaattggacttttaaaaaaaaaatgacaaaccaggatcagtgggtggaaattagaaggaaacactctgtttccttattaaaagaggtgggatgggggacagggctttatctagtacttagaattatgcagctgtctgccctgagaagtgggaagttcccactctgttactagaggggtctccctggactggatgaagaatgtgatgtataatatgtgtattcaggtattagaagcacatttggatgaggtaatttttaaactaagggtctttacttaagattctttgtattggttgtattcatttttggtttataacttcatatatttgagcatagtaccttgcacaaagtagacctcaataattattaagttgaatcaaagctatgaaggcaatatccaactgcatctacaatataacttctcaaccccctagcctatttcatgcttctagcccccttgtattcttctaacaaaatttccagaagctggaccaccatttcaggatacttgggcttttcctagagtgacagacaaggagggggaatttcacatctttatattttctgtgaattcatctgcctccaattttataacactgactttgtgttacaaagaatttaatattgtaatgagcaaataagaaaaattagaaagagt

SEQ ID NO: 94604 - DNA, 1048 bp, Homo sapiens
gggcaacagagcaagactccgtctcgaaaaaaatgagaaaaaagaaaattgctaattttattttccccctactgtttccctccttttgcctaaaaagcaactctagatattgcggtatgtttgagagtcaggttgttaaagtgagaatgcgttgtttcagttgagatagtaagagaaactggggaaatcatatggagttactgagcttgactggatgttaggaatcctagaatccggtgcttgttcagcactgctagctgtgtgaccttgggcaagtcactgaaccatcctgggccttagtttccttgtctgtaaaaatgacagataagatcatctaaggccctttgagacttaaaattcttttctcagaaacaaagctttaaaagatcataaatttagcatagtaactacagtattagaacttcaaatcacatagattttaatggtatcaatgacaaacagctcttaactaccaaaaacttttccagattaaattcttctagcaggaaatttgagagtcatttgaagaatagtttaatatttagcttagggttttaaaccgccagtcttagcctatgggttcctcagttaatcattagcaacagtaattgtctctgtgtctggtacttggtgtcttaaaatgcagataatttttcttctcaaccctctagaagtgaagctggacaaggtttcatgctgttgctgcttagaaaagagctttgaactacaggaacgcaatgtgggactaaagagcaagatccagaagtgggatgagtcatgcaactcagaggacagtagtgaaggggcagtgaggaatcgacagagggtctgggggcaatacaaagcctaaaatagctaaaataattattagctaaggggctgtactttggacttacagcaaggctagcaacattaccaagggctttctccaatacaaagtattttattttttataaagggtcaatgtagtttctatatatggcagtcattgagtaaactctcttctcagctttaaaacattcttccttgccagccacaattacaggcc

SEQ ID NO: 94605 - DNA, 1037 bp, Homo sapiens
ctgacacctactgaggtaggtgctggggcatgcccggccatcagggtgaaagtcctggctccctagttggcctacttttacattgccctaatagggcattggagctcctcactatggtttatgagctggaagtcaaggctcctcacttagctttcgttggtgtgggtggtggtggggcaaaactgttttctgggtttggctggagtggagcagttactgtcaaaagttttctgtcttgccaggctgtccctttcttgtttctttggctagagagagcaagcttttgttgtggctctttttgtctgtgccagttggcatttccaggttgctgccttctttagctccaagtctgggatatattaggcaaaaagaaaacccagagaatttacaccaccgtgtcattccatgggtcctgaggtcccttacttagtctgccttctctccacttttcacagtcttctcatgttttgtatataatgtccagggtctttagttatacttagcagaaataaaagggaaaagtatgtctgctctatgcttctgtaagtggaagtcttcaaatttgcatttttgattcctttaaacagttttgtaaaatatataatcattattgggcaaaatgtcccataaaatgtatataccttgtgatggtttgcataatattgtgttcaagaggactgctgaaaaataacatctttatttaaactgaaacgaattgttcacattattaatgaaaacttttcccctctaggaaataatgcaaaaggtgtcccaaggctcctgaccagtgaacaaagatttgagaaagacagccaagctcatgttttctcctgatcaagaaaatcatccatctaaagcaccagtaaaatatggtgaactcattgtcttagggtaaggtttctccatttgatgacacacacagtttaataatatatgctaactttggcatctaggctaaaagtacttttttttttggaatttatatcttacctgcttccaaaaagaatttaaagctacaggtaatgttaccaaatcaa

SEQ ID NO: 94606 - DNA, 2082 bp, Homo sapiens
atattaatagaggagatccttgctgagaatttaaatctgcatgaaattcatagatgtgtgtagaaatttaaatttatcatacactccgcagtaaatgccaataaaggtggatggcataattaggacaaagataacagtagaagcaaaataagaattttttaaaaaccttatggatgtcacattagtctgactcagtctgtaactctagttagaaatgtaaaattttagggatttttgggctactgtaagaaaagaatctgctttgggggtgggatgtgaggagaaagaaatgtttgtggcaattaagatgtatatagtatatttaagaagtacatttgcaattctaatcacttagttcaaaaggagaaaaatatatcatgtgtaactttatttacttttaatactattattattattacatgattgaaaatagaaaatcttgaaaaattctagagggtaaaagtgttatttctaattccattagctccttttaagataggaacatttcatattagtctcctagcacagaatctgaaccataataggcactccataaatgtttactgaactaacctgaattttagaaatatcagggtgcaaagcagaattatttttctaggctttaaaactataccactgctccttacccctgtacacaccttcgaatctcagttttgatacaaataggttctcagttttgggtgtgaagaaaactggttgatatttttttttaatctactaaatgttggccagagctgaaattgcctgaaagggaacttgatttagcagaattccttcttttcagaaagaaggacttagactaaattatatgaacgggaggagcctgtttttatctgagatggttgattggaaaaagaatagataaactaaggtggagagttgatttgaaaaaaggaaaaaagatagtcctgtctagtggtcagtcctaacagtgtggttaaaggggagctaaatttcaactttcaggggtcagctgagacaaccacctagattttccaagttagttccaatttcaagtacaataatcctttgacaacatagaaaagaattatagttagcaaaattgcaattgtcacagtcaaggtcttgttggtaatagagggttggggaaaaagttaaaacagcattaaatgaatatatttttaacataacaaaagttcccagaagacatccacttcaaattcaagccatattcatcaatgttaaaaaccttactcttctccctgatagtgtgaggaaaaataaaataaacttaaaataaaaaacaagaaaacctcactcaacattgtttgaaaaacataactgtgatgttatgatctactaaagcatggtatcccaacaaatttcatacagaatcatgcctgtctgaaactttacattttttgtagagacaaggactcactctgttgcccaggctggcctcaaactcctgtgctcaagcagtcctcctgcctgggcctcccaaagttctgggattacaggtgtgagccaccttgctcggcctcaaataaactcttaatggcttggaatttaacaggtcttgtgctttcattctcctttattttgttgttgttgtttaataaatatcagcacaagtgttatttaacaacctggacttttacaaattaataggcgttaagggaatcttttctttggtcttggtagtctatccatctttctaagagtataaagagatttttctttactatacagatgtaaagaggagttaataattgtcatactttttgttttttgattcagcacttcctaacagtcactgagcttacaaagccatggttcatgatttccacaaacttactttttatttatctcctaaccaaactccagggaacctactgacttaccctttcctgagaacacaatatactttttaccccttgtcttttttatctttatgcgattgtttcttccacctaaactggtttttttttttcacttatcaaagtccggtctgtctctcaaggtccaaattgaatacctctgctatgaagcttcctcttgttcctcttcctcctaagtaataacacttttctttgaagt

SEQ ID NO: 94607 - DNA, 1028 bp, Homo sapiens
ctgtgactttatgtggatcatcaatacaagcaattgtagactatattctattatacatattctagaatcagcaatgtatttatttgtttggtgtttacgtaagtcttagtgtgttttataaataataggagggtttgtttaaagtgggcttttgaagatacagtgtgactttaaaagaatggtcttagaaaacttataaatagcctaaatatgtactgaagaacatttcataatcacaaaaaaagaaataatatatctcatgaattattaagaatttgttttttaaataaagtcctctttttgaaaaggtattaagaagaggaattagacaaaacttgtttgaatatggttgtaattgcagtttactgagttatatataaaaaagcccaattagtttaaacaaatacagtatctgggtttatggtattctgagcctcgtattttttcattgaatgtcaggggtatattaaaatgcctccctttatgtttctatacaaaagattgttctgacagtaagtttaagtgattttcacaacttattgctgtctaaaaatttcccttgacttcacattttgttctgaatatgttggtttctttcctccacccacacaatgttgaaggcaagggaagcaagagttgcaaagtaatacagtgaatttgagaaccctggctttttttcaaaacaaaataaacctttattataagattgctttttattgataccaaaaaagggtggcactttggcaaatggtcagtaagtgtatgaatagcctaattgatttagctggaatgaataagaagctttgctatttgtccttgtagatagttggctcagtaaacattgtgatggtgatagaccaaattttccatggtgaaaggtaaaacagaacagcaacaaaaaactcatcaaacttatagatccaaatatcagcaattttgtgtctgtgtcaaggtcttcaaagaaggagcaatgtgttaattaggatctcatttgaatttctatagtgaaaaaataatcattttaactt

SEQ ID NO: 94608 - DNA, 1951 bp, Homo sapiens
catctattcattactctgccaatagctctctttatcatcctttgccagctttagtcatgcctattgctcttcaacagcgttttctatgtttgtctgccatttttatacttataaagtagacttggaatgaattaaggttataaagtagtaacctgtggatggcaagtacaatacttttcctatttgtgccatacttaatctttttaaactttccttgcctatttctggtgtgtgccttggtggagatctctcatcagacactaagagataactacatgacctgtaggatgcaatacttttttaactcaataatgtaggaaacagtaggaaacagtttgagtttaaactcaaactcattgagttaatcctgcatccatccagaacctacatacctaaactagcaaagtttgatagtaaaattaacagcctagtggaatttcaaaaactattttcagctcttgatgtttgttgtcttttctaaaaatgtcaaacaattggggacctcatcattactgtaatactaaccatatatgaccttaggggaaaactgtacttctgttgagcatctctttgacagtcaagaggaaaagataaaaagataagtaatgtggtaaagaaggttataacttcttccttccacaagaatgaattatgaagtgactggccctgatatttttctagtaactcattgtagtgctcaacatatcatttggcttaatctttagaaggcacagtttaattttattttttaacaataagtgaaaacaattgaaagtgctttgttggtttttcaaaactttaatgttgaattcctggttcttggcagatactatccgtagtatttcatgttcctctgggtttatttcagatttaatgaactgcatgtactggaagcactaaaagctgattggctttaatttagactacagttagcatgatggatttttctttgaattgttctcactgtcattctttaaatttaccatcaaaggatcaaaacatccaaattacaaaactaagtttatcattcatgagaaaatgtgttaaatacgtatcttttgtaaagtagcggctgcttctaattagaaaccggtcctatagacataccttatgtatcaaaaagctttttaaatatacttactgctttactgttactttcatttaaaataggatgattcagtttctgaactagccctgtctgttctccaaaggaactaggatgaattttgaggaggggctcttaaactttgagcagatctgtaacttcattgagagcagacatttttaaaaattcatcactgacatttattcaacaaaaagaagatcagattttgctaaagccttttggttgtgtctcttttagaaataacgtgttgatttagttgcatatagttcagctcttaaggaccagtctttaaggctttagccagaatttgtctcctaaagctgactttaaaatggcttccaaaaggatttgctgagtttcagaactgagtaggctgctaatgattcagtaggccccctcattttcctcctactccttaaattgaaggctccttcataccatctaggtaccctgagtcatcatggataaactctaaagaagaattgtcatatggaaaaactctacatgaagtaagaatgtcagaaagcagtctgagtcagagatcattcattgctcacaatgataaaatctataggttgtgggcttcattttaaatcttttaacatacttccatgtatgtccttattataggattataaatcctataatgcccataaaaccatctgaggtgtttattcccagttaatttctaattggtttggtttttattatctattacatgaaaaggattttgtattttttattgaataaatagagaggagaggcaatatgatacaggataaaaaccactatatcagaagttaggggacctggagttctggttta

SEQ ID NO: 94609 - DNA, 1090 bp, Homo sapiens
aaaacaaaacaaaaaaaactagcgtaactagatcagggtgagcgtgagtacataaaatcagcatcagcatgggaaaggaaggttagagaagactaaattgtgtagggctggttatccatctttaaaggaaaaatattttatacacttatctaaaataagtcttatactttagagtagtcaccatggaagctatacacttaacaatactagcattactcaatatttttagaaaaaaaaattttttttgtcgtctaagccagtttaagagccacacgtgaaaatagctcattactttgtatttgctccttgtttttaaggaaaaaaggggtgattggccacgtgatatttcatgttatttatcagatatgactcacagaggatcttgacagaaagaaaatgggaagtaacttgaggctatttctaaaaatcagatccagtctgagaaggcagttattgtttgtaaaagtcagatccacccatagactaaaaaggaattttaataatgttgtggataattgtagcatcatttggaataagggtatataacctctgagagtgactagtatggaaggcaccatactaatttggatattttaaggtctcacaaaatgcgcacacacacacacacatacaagatcatatacaattcttaatactaagtatcaaaacagtaatttcaggtaaatttcatttatattctgcattcaagactaaagggatggtatttaaaacacagtgaaattgtttaagtcttgtcgctatggcatacacttggggaaggaactaaaagactaacacatgttagtgttaagagatgaatctggttcttaagtcttcttatattcatgcttcatttctcagattagtagttgttttgagaacattctgatttaccataagaactgtttttattaaaaaaggcataggaaaaattggatctcatctaaatgtttaaatgcccccaaaaacctcaataaatatggattgtaaaaatctactctcaggacaatatacatgtaggattactaattttgaacaattactatactagttcattctttagaggtacagtttttccaacctgagaaac

SEQ ID NO: 94610 - DNA, 2970 bp, Homo sapiens
tggcgggcgcggagggcagcggcggaacggcgggctgtctgctcgcgctccccgcgcacaacacttcaccctctcgcctcgggtctcgggggccgctctgggatcccggccaccagcaattgtccggtaagtgtgaccgcggggcgccgcgggatggatggcggcggggccgccgaggggcgcggggagggcgggcgcgcaacttcctcggcggcttccccggcggccagcagccggctctccccgcccgcctgcgcgcccccgctgcggcggggagcggagtttgcggcgcctgcatcccgcgccctggctcgaggaagcgcctttgtcaggaaccggccctacgcggcctccccctccgcccgggagcggggcgcgcggcggccaactccgagccccgcgcctggctggccgcgcgctccggctgcgagaggggagctctgcgggtggcggggaggagagggaaatgggagaaacaaaaggggcggtgggtttcccttttgtttgtgcggatctgataacttcttttcctcccttacataacgcagacttcaagttagtcattctttttattgttatgattgttgtcatcatctctgcgcgtctttcacatttcctttcatctttggatctcagagcattttaaacacgctaattaatttcacccccgggtcccctaggaaacaagttaatacgcccgtttccctaagtgggtaaactgaggtcgtgaaaagctctcaaattgatggatacgcttgatcttctaccgcgcctcgtgtctgagtatatgaaagcgtttatgaggaagaacccgttctccaaagccccgtggaaaagttaaagatgctcattttacttacaggttaactgaagtccaaaagatgtctaggtaattgttacgtagttcaaaccataattcttcttacatagtgtttgaatcttaaaacctctaaagacttagtgaaaaatgctccgagtagggaaattaatgtaaatcataaactcacgtcaccatctacttttatttttgtacgtgcaggtctgttagaggcaagagagcaagaaggggacagagggcagaggttttttaaaaatgtacatttaacagattttaatcactacacacaaggaaatgtgccttggttttaacagcaccaacaatattcctgtcgtttagtcatcaaacagtatatcaacaaatgttattgagaactttattcataaggtgctggttgtgctaaaaactgaagctttatatataagaaaaggtcatctgtttcggttcacaggctctttactttttcttactctgcaaaatgttactttgttttcattgcacatgatcttttgtttcagaaatggcattgtcctttactgtgtcgaatatgtattactcttacacttaaggataaatgaatttattattaagttttcataatagggtgaatttaaaatattttaattgtggtaaaggttcactttattcagttctgtttcagtttacgatgcgttttctttatagccaacaaaatattttctgagtgataagatttacatgtctcaaaacattgttcttagtgtacaaatacagcatatgaattccttgttttttttatttataccaacaacctcttctggggaaaagtctttaactctgaggaccttatttattttgtgagtttttatttcttcggtaccatactggaaagcaccaaaaatttaaaccaagcatcacttctactagctctttcctcaggtaaataataatcagaactgtagtaatagtgaatagtttcacttactctaaattctcttaaatttaattttgtactatatagttgtccttacattttagattttggtggttgcatcagaaaatgaaagtgagatgttcgttattttattttttttcccaaagccttctaacctgttccctttctatagtatgttaaaagagatcttgagtttaaaataaataattggaaagtagaacagttatatgtatggaaagttgcatgtagtgaagtggttatagtgtctcatgtagtgaatgtacaggttttaaagaggaaactatcacctagctttttattagcatggtagaagtgctgtaatgtaatagtagtagtatttatttgcttctaaaaagtaagctggaaatttgcctcagtggaatttgtagggggagggaatccattctttccttaagattggcatttaaatgttcttacagttggttatgttgaactttttctgtggtattttcaagccagatttaccaggaacatttgtacttcaaggaagctactaacactgtcttggctcagtcactggaatccacaggcagaagttagtgttgactggcaaagtctggctttgcaggtttcataatttctttgagaccccttaaaggaaatgactgaaaagtacggggtaggaagttagtctagtactgccaaatgccactgaggcaagtttcaaaggggaagccaaaggatgtttccatttgatttaagttcagcctcttctgggttgtcagaatgtcacttttgtattttaagagttctatcatttcagaatatgatgtattatggttttctagtaggtcaggtggtaaggactgtagatagtcattatgcttcgtggacaactaatgtttttaggcagaagcttctatagctgataaagattttaagccaaagacttagaattgaaaactaatatatacatacacattttaccataatacatcaatgtagacctatcctagtatttattaggttagaaaggctttttggattattttattatacagatatatttaactgtaaatattaaaatttcataatgactaatatatgatggcactgaggtggctttaggagctcctttggggtgggggcgggaaacatgttattccaaaagttacatttatgtctttgaggacagtaaagcagatttaaaagccag

SEQ ID NO: 94611 - DNA, 1758 bp, Homo sapiens
aggatgggttttgttcgggggtgatgagattatctaagagacggtgaagaggcatcatctgcagacactgtgtgcatgtggaaggctgctggattccaccacatctgtgtgggttcttcctccagccccccaaaaaagagcccatggaaagccaatctgtgtacttctatttttagaaactagatgatggccatttaaacaactctttgagctctccagttcaagcggacgtgtacttcccacgactggtaaatgattttgctctgtgtctctgcctgtaccttcctcctttctcattgctttttaaaattttattcatttgtttattgcattttccagtgggtcaggccttcagggtctgaggtcttggcttttccctaacaggctgtaaaattcatttttcttctcccacccttttcagatagttccattttgtgggcacattaaaggtggcatgagaccaggcaagaaggtgttagtgatgggcatcgtagacctcaacccagagaggtaaggcagagtctttgtcaggacagaactatcaggctgtggctgagccctgcccacttctgttgtggtttagcactcctcttcctctccttgtggacagtgttgctagttgccagtgccaagaaagtaccatgttcccatgaaacgaatatgtatgaatcccagccatcatttctccagacagctatttatatcagagattataaatataggcccacattttctctttgacccttagggaggccagaggatttttttttttttttttaatggttttgaaacatggtgccaggagcaagaactatcaagatgaataagaacccaacttaacattatttcccctggtcaatttctgtggctgtttttgagaattccgaagtggaattctctaattttagtcattttcaacaccaaagttttcaccagagcttgctttaggtaacaaaataagctggtttgacttacttctccataatctaacctctcttgaagagtagtggcctcttaaaaatggacaaacccagaggaggaagaagaaatataagcacttgggtcattttgaaatgtttttatatccaacccttaatcagtgggatgattttcttttcagctttgcaatcagcttgacctgtggggactcagaagaccctcctgccgatgtggcaatcgaactcaaagctgtgttcacagatcggcagctactcagaaattcttgtatatctggggagaggggtgaagaacagtcagcaatcccttactttccattcattccagaccagccattcagggtgagtacctcgagtgcctcggctccagccactggcaggctgataatgttcgacttacctagtgtgtgccaagaacacttgaagcagccagaatttctgcatgtccaggaaatttgtcacccaatggtgaaaaaaaaagatcaaaagagctctgtttgctgatataaattaacacttgccatagtatcttcttagttctattcaggtcatacatttaaatagacccatatttacatgtccaaattgttaagaataagtaacttttctatgtagtacccaacatatagtagatacctacccccaaatatctgattgattaatcaatactaagtacccacttattaaatattaatattaataaggttgagagctaataagtagctcttttatttgtatgacattttaaagaatatgatgatgatcatttcattttctcttgttccctttgctaatgaggcca

SEQ ID NO: 94612 - DNA, 1034 bp, Homo sapiens
aatgcctttggaagcttcagagtagaagatgcttcctactgtgttggctctgaggagatagtaggattagataggatccagattaggaaatgatccagttagtttatctgaaaggttaactcccaggactccaggtctttgaatccagccagtagagtgaatgcttccaattaagctgtaggtgttaccctgcacttacggaactgatcaaacaggtgactccaacaggaggttgcagtactgtaaacgtcaccgcaaggcaagggatgcttaaagtcctgggttctggactttaaaagctacattggccctggagggagggacccttggcattgctttgatcaggtagtgagggaagacagggttctggggtgggggtgtatttatatataatttaggttttgtttgtacagcatactgtgtcttgtaatgacacatccttgtcctgctttccttttttgagttttttttttttttttacacaacatgcagaggcactgaagtgaccatgtcattttcaagtgtcaagaatgtagacagtgtttcagtaccaaagtctaaaataaactaaaattatgaattttttataggtgatacatttggattcttctcaactttgaaactgtttagcacagttccattgtattatataagaagacactgtatccaacaagactggctgtacattgaaaagctttatgtaccagccaacttatttaaccatattcagcctgttccgtgggggctgttctgtggttccaggtattttcaagcctgtgattaacttctcatggcttgtcacttaaaagtccctaaatttgagagacttaaagggcaccttgaaatacatttgtggagttttgatccaacttatggtggaagagccccataggaagactgttttgagtggccaaccattcccacccactgcataattcagcagaaactagaggagcagggcgtgtactgattggaattgacacgcttattctgtctacctatcagctaactcattagcagccaagcccttaggc

SEQ ID NO: 94613 - DNA, 1033 bp, Homo sapiens
gtggcagagaagtctggggtggatagaatagggtgaacaagtagaagagtagtacaaattgtgatcagagttagagggtgagaggggcagtgttttagggtccttacagaaattctaatgacttaggctttttactgtgggagatggtaagtcattgcaggatttttgagtaaaggtgtaagataatttatgttgtaaaaggatctgtctagctgttatatagaaaatagactataggagtggaatgtaagaatagaagcagagtcaggagagaattgtgctggtagagttaagaagagatggtagtggcatgaaccaagatggtagcagtagagatgagaagtggtaggacagtttcttgaattggaatctgcaataattccctcatttttaaactcagaaagcttacagaggcactcccttctgaaaattcaaggcccttgcaacctatgtttccagcttactgcctgtacccttcatatatcctgtgttctaaccatattttattatgtgtcttactgttccttgataggggccccatgctttatctttaatgactaccatttcctctgtcaattaaatccttcctatttcaaattttctcctttttgaagttttttttttttcaccattccttctcttcccaatcaagtgtgatctttttcttagaatcttggtagccacattttacttcagtgatgtttatattctatcttgcattatttttgctgttctcttgtattattctccttaattagctgtaagtttctttaaggttgtgactccttttactcagttctaccacagttttgtatgtaatagatgctcagtaaatagtgggtgtatacatatttaaattttttaaaatagtcttattgcagaggcatacaggagcatcatagaaaatagacaagcaaaaaaaaacaaatcacttttttttttttttgagacagagtctcactgtgtcacccaggctggagtacagtggagtgatcatggctcactgcagcacagacctcctgggctcaggcag

SEQ ID NO: 94614 - DNA, 1756 bp, Homo sapiens
acacttgaaagtttctctccaggagattttagaactaatatgaatgttgttcatcaaaacaagcagttagagagctgcaatggtgaaaagcctccttgtctggagattctaacaaatgggtttgcagtgttggaaactgtaaatcctcagggaacagatgatctggacaatgtagctgattcaaagggacggaagcctcttagcactcatagcactgagtataatttagactctgtacctagtcctgctgaggaatttgcagattttgccacattttccaaaaaggaaaggatacaattagaagaaatagaatgtgcagttttaaatgatagagaagcactaaccattcgggaaaacaataaaattaatagagtcaatgaactgaattctgtaaaagaagtggctttgggtagaagcttggataacaaaggagacactgatggagaggatcaggtttgtgtttcagaaataagcatagtgactaacagaggtttcagtgttgaaaaacaaggccttccaacactgcaacaggatgaatttttacagtcaggtgttcagtcaaaggcttggagtttggtagactcagctgataattcagaagccattaggagagaacaatgtaaaactgaagaaaaacttgacttacttacttctaaatgtgctcacctatgcatggattctgttaaaacttctgatgatgaagttggttctcccaaagaagaaagtagaaagtttactaatttccaaagcccaaacattgaccccacagaagaaaatgatttggatgattctttaagtgtaaaaaatggtgatagtagtaatgactttgtgacttgcaatgatatcaatgaagatgattttggtgattttggtgactttggctctgccagtggctcaactccaccttttgttactggtactcaagattcaatgagtgatgccacttttgaagagtcttcagagcactttccacattttagtgaaccaggtgatgactttggagaatttggggatataaatgctgtttcttgccaagaggagacaatattaacaaagtcagacctaaaacagacttctgataatttatcagaagaatgtcaattggcaagaaaatctagtggaacaggcactgaacctgttgcaaaacttaaaaatgggcaagaaggtgagattggacattttgattctgtgccaaatattcaggatgactgcaatggttttcaagactctgatgattttgcagacttcagttcagctggtcctagccaagttgtagattggaatgcttttgaggatgaacaaaaagatagttgttcttgggctgcttttggagaccagcaggctactgaatctcatcatcgaaaggaagcctggcagtcacataggacagatgaaaatattgatactccaggaacccccaaaacgcacagtgtaccttcagcaacttccaaaggagcagttgctagtggccatttacaggaatcagccacttcagttcaggtatttactaattttctctattttgtatgatgtattaattgttgtggaggcttctaatttcagcttttcaaaaaatattttttcaactgagtacttgttaaaggagtctcgttatgatgtataatgcctgtctgatttgtgggttggttacatttttcacaaccctttgggaaactacaaatagtcctatagtaaagcgcagtaagatttttctttatctcaatgagtttcgttaatatttacagatactcatcaa

SEQ ID NO: 94615 - DNA, 1041 bp, Homo sapiens
gtttcacaatgttggtcaggctggtctcgaactcctgaccttgtgatctgcctgcctcggcctcccaaagtgctggaattacaggcatgagccaccgcgcccagctgagaagcaaagtattcttaatgcctaatgtgtggtttatacattttgtgtttcataatgcaatcaagatttaagtcataatgcctgtaagccaaccaccaatatccaaaatttaaactctacaaggagtaactatagcaggtttcatttatataagagactcttaaaaatagatactcttaaaaactaggtacttttttttcccccaactcaataggatgaccttgggaaggatgcagaatgcttagattatttaatttcttgttatatcataatatggtagaaattgataaattgagataagtattttcatagtgatttagaatgctaaatcatggtagagaaacattcttagtgagctttgattctagttttgccattcatttatttcattccctggcaagccccctgtgtctgtatgtatcatttgtataataacagtagtaatgataaaagctgccacctctgacaccctcggtgccaaatatttaatcctctgaattatcatccacctcgtgaggtagatagaccctgatatctccagattataaatgcagaaactgggcagaaatggtggtagacgcctataatcccagttacttgggaggctaaggcagcagaatcgcttgaacctgagaggccaaggttgcagtgagccgagatcgcaccactgcactccagcctcggtgacagagtaagactccatctcaaaaaaataaaaaataaaaaataaaataaataaatgcagaaactggagtcttggcccctggatctatagccctctattgaagtgttattataccagtcatttacttactggaattaactagtagtaagttaaatttggccttatttattacccaaaacaagatagtggtgagaaactcattacaggatgcccttaccaccaaactggtcttatggaaattgatacac

SEQ ID NO: 94616 - DNA, 1028 bp, Homo sapiens
acttccctgaagcacttgctggaaacaagcactttgccaataaaaacgagagaggccttacctgaaagtgggtaagtaggagactgtttttagatagcatgtgtttttgttatttttagtagttctaatttataagtttatcttaaaacattaaggttcaggccaggcgcagtggatcacctgaggtcaggagtttgagaccagcctagccaacatggtgaaaccctgtctctactaaaaatacagaaaattagcagggtatggtggcacatgcctgtaatcccagctacttgggattgaggttgaggcacaagaatcgctggaacccagaagacggaggttgcagtgagccaagatcactgcactccagcctcagtgacagaacaaggctctatctccaaaaaaaaaaaaattaaggctcaaaaacattgtgtcaaaacctaaactccctgcctttttacttttgagctatttctttttatatttctaaatcaataatcagttgatgttatatattattttttgacttcttagaatgaaaactgaaaatttagattttacctctgctattctcctcccctcatcttccccatatatcagtttttggttaatttcttatttggcattttcattattataatcacgtatgtattgttgactcaagccactgttttctttatagtacaacttcttcctggacttctctttttcattaatgtttccctaccctttaagagcttgttcatacacttgtgatccaacaccttatcattctgctcccatctagaatggtttcagtctgggcttacacatacattgcctcgggacttcccttcacttagatcccattttggtggagcatatcctccaatagccttctgagaaaaaaggtagatgggaggcaaatttttactctactctcacattcaatttatagtttaagatctgtttgttgctgatattctgaaatttcacagtgaaatacctttttttctttgagacagtctcgctctgttgcccaggctgga

SEQ ID NO: 94617 - DNA, 1023 bp, Homo sapiens
ctacagtagagaagacaagcacatctaccaggtaaataaatagtgtcaattatacccacattttgaattctgagataaaacgacccaaaggaaaaagcatgtcagttgacagcatttcaatatattatatcacaacttgctttataaaagtcagtcgatgcccaagtccagaaaatattatcaaattatgtttaattatgaactttattagaacaggattatttcataagagattggccaaggctgacagatgtggttttcttcccccaccccctgcccccccacctcactttgtagagactaattctgattaagtattgtgatcataaagccattatagaaacactctccctttctcttcataattactgagaagatcatctttgagaacccagttttgtaatcctggagtcacctaggctgatctttttacttgcaggctaagatggttcttggaattttcattgacatgcacctctgatttgggaggtaaagccttactttaccaggctttctagaagccccttcagaggcatggcctattgaagagcaattaccatctccctgtgttggaactaaaggcacggaatgtcactcgggccatgtgtttgcgattcagagaatctttagtttcatatgattaggctagtacaatccattgctttgagttattgttaaccataagactaagccagtttctaacaggaagatactattctgaaccaggaaatcactagtgcaaaagcaaatactggttgattgacacgccagctctgctgtctcaaatctgtgatgcatcagcattttaaagtggaactatttacctattagttgcctactttaaaagaagtgttatagctctttctcctgaataaatacatcccaatcacatgttaaattcaggtttatattttaaatagattcttctatagaaagacatccatttaaaaaagccttttttattgtgaataataaatgtttctctctcttaactttagcttgaattatcatattgtcttttaa

SEQ ID NO: 94618 - DNA, 1048 bp, Homo sapiens
ttgaataaagtaaactgcaaaaaataaagctcagcaaaatcttcttggctattgccaataagcagaagataaagtgaaaaggcattttgatagactatagggtaagaaggagttaaacagtggtcaaggtagaagaaatttgacatggaccaaacaatatccagtactctttactaagtgcctttgagtgtctcagggaatttatatgtgctcttctcttttggaacacaagttgtgaaagtgacttctcactttgagttttttaaagaagtgcaagttcttagttttaaaatagttccatcttcttgcctaactttcctaatatggaggaaaattacttcctattctaaatcactactaattagtgacagctagttagtagccatagacctgtaactgaagtttatgcaggtcaaagaaattttattcttttttaggcctttttattgagataaaaatttataattcattcaggtgttcaattcactggtttttagtatattcacaaggttgtgcaaccatcatcactatctaattccaaaacatttttatcaccccaaaaagaaaccctgtacccattagcagtcactccttatccctctcgttccccaggccctggcaactactaatctgctttctgtctctacagatttgtcttttctggttatttcatatagatggaattctatagtctgcagccttttgtgtctcggttttgcttagcattctgttctcaagttcattcatgttgtagtatgtatccgtatttgttttttggctgcataatatttcattggaaatagcacattttgcttttccattaatcagttgataattgggttgttttcactttttgactattatgagtagtgttgctgctgtgaacacttgtgtatacgtttttgtgtggacagatgtttccaactctgttaggagtggaatttctgggtcttataggaactctaacttctttggggaactgccaaacttttccaaagtgatggcaccattttacattcccaccagtaatatacattccaagttctcc

SEQ ID NO: 94619 - DNA, 1022 bp, Homo sapiens
gaatgatgcagatatccagttccccatcaaacgtccacataatagttttgccactatttaagtgcaattaaaaatgtagattttcatcagaaaaaaatgttggattgctattccattcttctaagaacctagtactgaatgcagtatttggttcatctgctatatgcctgatgctttttcccttttgaaaaactttagtcctaaaagtcgttggatttttcattcattctataaaatctttttatttcagtctggattcaaagtggtaacagaaaagtcctaggaataaaaaagcctgtagctatccttcctttcttgctttacctcctggcttcctgcaccccatccaaggaaaaaggaaacatttaggtcaaagaaataccttgtgtcacatctaagaataccagctatcctttaccataaaagagaattattaggctttttataatgaacaacttgaaatgatttttggtctaaagcgaataatatgtataactactcctttaatatatttaatatcccagaaaaagtttgaattgcaatcatgtgcccaatttgaggctcatttggcattttctgtggctcacctgctgagtagacctgggtcaccaggcattttcttgtctgtgttaggcaccaaactgctaatttcccatatcgggggccagtgcagcaaaatctacttcatctacaggacccataggatttgagatttccctcacccagagttccgtcctgcctgtgtacgtgcataataacaccagcaaccagccctagtgctgctgcttttggacctgctgtctgtatcccaacaggctgagactgggtcttctgagctgagagctttctctcctggaattccccactggggataaagagagcctgaggttaaaatgacttagtctttccctgggcacactttgtttcaggctgaggtagttttagcgggtggaggggcagggaaaaacccagttaggtggagtgttactaaggcttcagatttatatttctgtttagtaaca

SEQ ID NO: 94620 - DNA, 1037 bp, Homo sapiens
tagaaaaatgtaaataatcgggggtaaacatttttgaagatttattctttttgtgttgctggggtgtatacatttatgtctttgtgaaatacactggtggtgtccttcttacaaaacttttgaaataaaaaaaaaactcaaatcttcactgtctgtgaaatccccttcagtcttttcagattgcattgactgtcctcttgatttttcatattacatgtcaaattacttttgctatcataaataagctccaaagtcccccatttaatttttttttaattttgtgtatgatgggtttcagatctggcttttgttaacattttggggcttttttaatcttttcaatctggcgtattgctgtttgaccttttgcaaggtacttaattgctcttttgttatagggtatggatcattgtcagaacttgattggaggggtttaaagagattgtgtctgtttaaaatcagtatgattcagagaaggaccaaattatatgaatgtcttacaatggaatttacttgttactgatttttttgttctattgtaccactattttttgaggattttgcacagtgtaaaatgacataatcatagattgctatggtttaggctgtatatacagtgaaaactatgggttttaaatgtttggggaaattcctatggaaaaaagagagacatgtagaagaacctctaacaaggttaatgtgcatgcccaaggtcttttgaaatttcagtgtgtaaatttccttttagcttatacaaaaataaaataatttaaaagaaatttagcctggtgtctttgtactttggtatgtgaggaaaaatgtaatgagtttgaatgagaagttttgttgaatattaacatatttcaatccagagaaaatctttggtagggcttctactttgttgaagccaggaagaattagaatctggcctataagaattggatcagcacttttagtagctgagctgtttgtttttatatagaacatgagatcagtaaagaaattcccatgattcattataatgtgtcttcatcaga

SEQ ID NO: 94621 - DNA, 1029 bp, Homo sapiens
cttgtagttcatctttctttatagaatgagagaagcccagcactcaacatctttcttgtctgggtcctgggttcacaccacactcgccctcaggatgtgctgctttgccagcacgcaccagcagcctgcctccacgtgtccttgcttgcacctgccccttctgcttgtggaaattctgcccatcattccaaggccaaactcaaatgcctgtccatgaaacctctgcatgcctggagtcaaaaccagccttttcctcttctgggctttcccagagctccatgcctccgcaaatgcacttagcaagtcctgccgcgtcttcggattagctgtgcagtttgttgtctctgtactccctgtatccttaagagcagcaaccctgtgttgtttatctttgacagaggttggcaaactgcagcttacaggccagatcctgtccactgcctgcttttgtaagaaaagcattgctggaacctggccacgctcgtgtatctgtgtgttgccctgtctgctgtcttactacgatggcagagttgagtagttgcaaaaagaccacatggccctcaaagtctgaactatttgctatttggccctttacagaaaaagtttgccaaatcctgatctttgcaactctcccaatactgagaacagcgtctgaccatagatgggataggctcagggctacatagactggggacacacacccctggaaagatgaatacggtacaggcgtcaggggagtcctaagggtgcagaatgctggaggtggggtttcgagggccagacggggcagagtagtctggaaagttacacaagagtggacatattcagagagcttaagacttgggaggggccatagagctagatcttcccaccaaaggggcctttttgacagatgtgcaaactgaggcccagagagggaaaaggattattgtctggggcaaaatagtttatagcatcagagttcagtttggctctgctaccagatctcccaagcttgaatcctggcacctacaatcttgggcaagttcc

SEQ ID NO: 94622 - DNA, 1066 bp, Homo sapiens
tcagcttatttgtgacagtttgctcacattaagcaaagtccagcaagagagagcagcaggggggccccgaaggagtgcgtgctgttggtcttcctgaaccgtcctggtctcaggaaccacccttctctcctggttctcctcctgcttcttggacccttctggacctcctttttctcacatctgtgccccagctctctttaaaacattgtcttttccagggtttggcccatgactgcacttcactgagcctccattcctgctgcctcttgctttcccaaggtgatctaatccactcaggactctcaaaactggtctccagcccctgcctctctcctgagctccagacttcagtatctaccaagatttgctccctcactctcagcgcgtctaaagagctctcgtttcccctgggggctgattcttctgtgggctcgttgtcttcagcactctgctccacgcttggctcagttgcccacccttgcaccctgttccgcagtcccagccatgtcattccctctgccaccacctctccatcctcaccatagcgtccccagctcggaccctttctctctccttgcctctgaccgccgtacctgtttcctgactagtcttcctgctgtgatcgtctctctaccatccctgatgctggagttgacattctaaaatgccagtgggtcacgtggttgttgcacgtcctccaggtgtacccactgattataccatctggaccctgcccctgctgtcttccagtggggagtgggggagaccctgtgcaacctccttggccactgggctgtcttggatggagtcatgggatctggcctcacctggcctaggcagttttttattttggtgtggttgggccaccacaccactggcaagggaaaagggatggatgtgtgagacctgggaagtgaaggttcagctcaatcagcagtggaatgtgaggtggggtgtgaagtgctggggaggtgttaggggctgaattgtttcccccaaaaaggtaggtttcagtacctcagaatgtgactttaatttggaagtggggtctttatagaggtaatta

SEQ ID NO: 94623 - DNA, 1107 bp, Homo sapiens
acatgtgcagaatgtatggtaggaatgtattctcttgtaggaatgtaaatctgtattaaaagggggtccaagccaggcccccaggtcttctcattgtatgcacagtccgcattcatttttactcttctctaatatgggtctatttgaaatatgcaaaaggtatgaggaatgttttaatacctccaaatttttaagaaaagcatcaaagggttgatattttttaaagtttttttagtagcactttctctggatgacagaaggagcaaccacatgggcacccttgttcataccaaagggtgagcagtggccagagcctcctctgcacctctcgagtgtctttaccaattgagctttttatcgccatagccccttggagtgccccagctgccctgaggtcaatcaaggaaaatttcttaatgaaataagctccaaagagccaaagtatcaacttacagatcgtttttaaagcttaaatttatgaaccacctttgtggtaaacaatgaattatgaataccgcagggcagccttcttaaatgacaaatgtaaaaaaaaaaaaaaaaaagactctacttcgtgcagcaattgctactctatacgaattgtcttaatttgaaaaccttgctgttacaaattggacctttatacattttctgaaaacaatgaaaagagtatatttaaccttttctggctgtaaatggttaccttcctgtaactgccccgcacctggaggcatggagttgtgtgcatcctgcttatgtacaattgttttcagtgtttctaagaatgagtctgaatggttcttgaaaattagccaggatcaaatgctattgcagacaaagccaataaaaagttggacttcttttggggataacaagttttggaagagaaatgcaggccatatgtgcgcatgaccgagattttgaaaaaagatgtacatagtgacatgtttggtgcatggtttttgaggagggcttttgtcaaaaaggaggtataacctttcccccacagacctgagagctgtgccttttctatgcaatattacagacgttacatcggaacccagatggctgtattcacatgtaggtttgggctgtaatctaaacaat

SEQ ID NO: 94624 - DNA, 2241 bp, Homo sapiens
gagatagctattttgataggatttgctcacatagttcctgcaaacttcagatgtacaagttgcacttgtacttttatagagttgtaatgttttatatgtgtatggtgcaagagaaaattggatcaaatcaatctgcagttgatgtccccaaatgcaaacacaggcacacacatgcacacacccataaacacacacacagtgctttaagaaagggccaggtgatatcacacccaaatttcacaagcactgaccccctggcaccaacacccgccagtactgtgacttccaaagccagagccacatgtgctcatcaaacttgcattaagcagttggcgggagatggctgtggagctgggggtttaagtgatggttctcttttgctccctcttttgagggtaaagctactgtctttcttaagagtgtatttatgccaagtttgcgcttttaattgtttttattttgttttttaatgaaaacccagatctttcctttttggcataatttttatgatgacctgaaattttacatccgaacaaaattttacatccgaaaagcaaccaacttcttcatggaactcagccctgttgcaatgcttagggcccttaaagaagaaaatctccccagaaggcatccatcatgttgcttaattgtcttctgcagcttcctttccctagagctttccctgtgttgctaagagctgaaaatggcatcttcgtgatcaccacagtgagcttggctcgcctcggccggcccgggatgcactcttacaacatgtgtgactcttgaacctggagttcatcacattacgtcacagcttcccatctggttgctttcctgagtcagctacttcacacttgtcaaggctgttttaccccaaaactcagacaggactttctatgcatgttttccctcctccccccaattcccccccccatcaccttatctcccaggacacacttgagaagtagctttttattcctagtggtgtacatttaattttaaaaaggttgcaatgtatcatgcttgttgccgaaactgtttatggccttcttgtttcagttttttcttttcttccaatggtactttagctgttgagtgcaggttacaacctatattgttatgcagatggcttctttaggaataacttttatatttatttaaaaatttttaaattatgggatgttttgttgttgttgttgtctttgttgttggtcatttgtcaatattcagtcaccaattctgctcacttcttgccatggataaaattgggtctttctggctaattaaaaaagacaactttataaaatggcactttaagcaagccatagttagttttatttttgtaatgcacatggcaaagcaaagacgtttgtgatgaaggaactgctcatctaagcaaaagatttgagtatgatatgataaaggctttctacattctaatttactttttccccccacttgaatgtgttttaaaggctaattatcagctcagtagagcagtgagaaactgatcaaattgcacttgttctcctacaagcaacctccacgcagacacctcgtactgctacaggtgtgtcatttcctttaataggaccagggaccatgtaactgaggtgagggttgtagtagatgcttccagtgtcagtatgcctgttaattttaagagcttccctttcttgcagagaacaagtctgcccagattccatgctttctataactggaggacctggcaaacctgccgcatgctgcacacatctacctacgtacacatatacaatagtattgatgattctgaacaataacagggtaaaacagttggtttgccattgttaaaaactgatttacagtaacttacaacaactgtacttttgttggattagcaaatcatgtgtttaaacaaatcccatatgttgggcaacagttcaaataagcacggagaagtgttgcccaaacttggttctctgactcttatgtatttgtaaggctgggcttcaaaatcaaaacaaaaaccccaaaaacagcaggcaaatgctttttaactctgacaccgttgccataaatccctgatactcaaagtctaacaagaaagacatggaaaattagcagcccattttcagaaagatcaaaatgatctagggttctaattgcttttgcatcctattcttacaaagtgatgtcccaacagggaacagtaggagctggagtgggatctccaagtcccagtttgagtgtgggatgtgc

SEQ ID NO: 94625 - DNA, 1051 bp, Homo sapiens
aaatcatggtttccatggtaattcttaacttgtctgtgtcgtacacatttctcaagaaatacactcaccagactacctagtgataaaaattgctccacaggcatacaaaggtggattttctaactctctcttattgtaaaaggtcttccttcctcccacccctaattaatccacgtgtacttgtaaataaccctgggcaggaaactgaggtccaagtcctgccctctaaatcagtctctttttttatgggagaaatcagctttcatgtgattaatgccatttcctctctctcccctctgcagatatatgttgggtaaaggaggaaaacggaagtttgatgagcatgaagatgggctggaaggcaaaatcgtgtctccctgtgacggtccatccaaggtgtcttacaccttacagcgccagactatcttcaacatttcccttatgaaactctataaccacaggcccctgacagagcccagcttgcaaaagaccgttttaattaacaacatgttgaggcggatccaggaggaactcaaacaggaaggcagcctgaggcccatgttcaccccctcctcccagcccaccaccgagcccagcgacagctaccgagaggccccgccggccttcagccacctggcgtccccgtcctcccacccctgcgacctcggaagcactacgcccctggaggcctgcctcaccccggcctcactgctcgaggacgacgatgacacgttttgcacctcccaggccatgcagcccacggctcccaccaaactgtcacctccagccctcttgccagaaaaggacagtttctcctctgccttggacgagatcgaggagctctgtcccacatctacctccacagaggcggccacggctgcgactgacagtgtgaaagggacctccagcgaggctggcacccagaaactcgacggtcctcaagagagccgcgcagatgactcaaaactgatggactctctgcctgggaattttgaaataacgacgtccacgggtttcctgacagacttgaccctggatgacatcctgtttg

SEQ ID NO: 94626 - DNA, 1025 bp, Homo sapiens
ggagcgctccctcccgcggccccggtccgggccccgcgctctcggacccccggcgcctgcgggctgagccgctggggggcagggccggggtcaggagggggtcgggagctcggagagccgagcggcgggcgggggcgcctggagctgtcgcctctacagctgggatgtgtgtgcgcgttgtggcggttgtgttgttgtgaacgtgcgagactttttttaaggctcggattgctggcgcgaaggctgcttcacttttgagttccgtggccgggtttgcatccaacttactgtagtgcgtttttgtgaatttcccggtgttttttttaataatgttgaaaaccttcctctccaccctcttttctttcgtccatgcccaaatgaattgatttgggatctacatgtatattaaacttaacgtctcgttggtttttaagttagaaatctacaagtcatcttcgtggtaaccgcctatgactgaaagggagggggctgaggggagccagctgtcccaagccctagactttgtaccagtaagagagggggtgtcgtcacagggccactacatggacagaaaatcgtattttgttttgttttcttggctataagttacctttagcagaagtggtagtaatagattgcgatgggagtcgagttttaggtttagtttctaagtttcacgaaaatatcaggtatagtttgcattggaataactttttgcttgcaagccgagtcgtttcaggaggtagaaagtaagttttcacagacactgaatggggaggacagtcagcagagtgagacagccagcctcagaccacagcagtttttatttgaatcgaattgggcagcctcagttgggcttagggtagagagtacatgttttcaagctttgttcatgaaatacgctttttgatttcccaatgtatgttaagaaatatccataatgtgtgtaaagaggctagaagttgtagtcaccaggattcctgaggccctaagtgttcacagtagctttttgtagttagagacta

SEQ ID NO: 94627 - DNA, 1088 bp, Homo sapiens
catttttctttttttgtagaaatgagggtctagctatgttgcccaggctggtcttgaactcctggcctcaagtgtcctaccacctcagcctcccaaagtgctgggattagcggcatgtccactgacacaacctgatttgcatttttctttttactgatgaagttgagtgcctattcctgtgttcattggacattttagtttcctcacccatttttctattggatttatctgtcttttaaaagattgattcagaggagttctttgttaattctgaatactaatcttttgttgattctatttctatgaatcacgtatatcatttgacaatctttagcttgcctttaacttgtttgtagtgtattttatgtaagagatgtttaattttagtgtaatcaaagctattgatatttttctttatggtttgttcattgagtgttttgtttcttcaatagtcagaatccctgcaggaaacagaattctactgagatgattcaactaaagagacactagtgaagggacattttacagagatgtgacaaaagttgaggcacagaagacaaataactgtaggaagctgttactatccttaagcctaaaggggaaaggggaagaaatggtgttgctagaacctggtgggagttggcatcctggagaaggggccacctggcagaagctgtagttgtggagggatgtgtactcgcaggtgagggcccaaagcaggaaggagcagggaagaagtaccccagcttctccaccttctgacccattggtctccttctggtaccttctttgtctgaatccagttggaagctagtgagcaaaggaacttgggtgaggtggtccctagatgtcaacatttcaaggcatggagccaagcagaggcaagtggagaatgaatctcagatgaactacagtcagcacattttccttatcctaaagccataaacatattttcatatattctctcccaaaagtttaaaattttgttttacctatttagtctacctgaaatatatttttttgtaaatattaggcacctaatttatttttcatacaggtaatcaggtggccctgagctatttatttat

SEQ ID NO: 94628 - DNA, 1052 bp, Homo sapiens
aaaaaaaaaaaagaaaacaatcactctgactgctgtgttgagaacagacagtagaggaacaaaggtggaagtaaggaagtgtacttcagaaactatttcagtattcaaggtccaagaggtgatgatgactgggactggggtagtagcatagcactagagttgtgagaatttcctgacagattagatgtaagaaatcaatgatgggtccaaggctttgcagctgaggacttggacaaatagtgttgccattaactgagttggaaaaaaaacgcagggggatggctttggggggaagttgaggagtgcatattgataagacatctatatggagatgttgaataggcagttgaagatttgagactggacttcagaggagaggaatacaggcaggagatacaaatttggaagttgacaatatttatatggtatgtaaagccgtaaaactagatgagatctccaagggaggagcatattgaagaagcccaaggattgagccccagttacccttgagagttttaaaggccaaggagagggagaagaacttactaagagagactgagaggcgtggccagtgaaagaggaagaaaaatcaggagtgtagggtcctggaagccaagtgaacagagtgtttcctagaggagggagtggtcacctgatcaactgtgtaggtcaggtcaggtaaggtgtgagaactgatcattgaatttagcaatgtggagacaactgggacctccacacatcagagggaaagaattttagccattaaatgaacgtatggctcattacaagaacataattatgttttaaaagatttgttttaaaaagctacttttcacttcctcaaaaaggtaagcatagaattacaatatgatccagcaattccacttctaggtatataccccaaagaattgaaagcagaaactcagataatcatatgccagtgttcacagcagcattattcacaatagccaaaaggtggaaacaacctaaatgtccatcaacagagactggataaacaacatgtggtatgtacatacaatagaatattagcc

SEQ ID NO: 94629 - DNA, 1034 bp, Homo sapiens
tttccaccgtgatagagttactggcactggtcctccctcctatttcaagtaacaagaaaactggacacaatgtatgaaagaactgtttccaacactggacaacaggcagtgcagacagggatctctaagagaggggaacagagtcagtcttgggatcaccacaggtttctgagtgcaggcactatgcatccaccatgtagcagagctgagggaggagagagattggaggtcagtgaagctgaaaagactgggacttgtgaggcaaagtgccagagaggagggagctatgcagaaaaagaacttcacacatctgcataggatcccttgagtttgttgccagatactcagctatgcatgcctacagttaaactccccatggccagatgtgttggtggttcccagatcaccctctgtttgatgactttctaggaggacccacagggctcaggatgtactcctggctaagatttgctacagtgaaaggctacaaagcaaaaaaacaacaaagggaaaagatgcatgagatgaagtttggaggaagccaggcacaacaagcttcgaagagtcctcttctggtggagccacacaggatgcacctaatttccttagcaatgagttgtgacaacacatgtgaaatgttgtctaccaggaaagctcattagagactcagtgccaggatttttattaggggtagtcacattctgcctgccacataccaaaattccagactttcacaaagaaatcaggtgttcagcacaaaccatattgtttacacaaataatttaggcactgtgagccactcttaacagggtgttcagaatgatcctaaaatccaagttcccaggtgttagctaggggccaaccttgtaagcagggctttcaaaaggcagcatttgcatctgctatgttaactttttaatacgctttgggcagagaactgtaagagatcccagaggacatttgacaatttctggagacatttctgttgtcgtaactgggaggtccacagacatacattggatagaagccaggaa

SEQ ID NO: 94630 - DNA, 1082 bp, Homo sapiens
ctaactacagagtttagcatcaaataattttatgacagaccacatttggcatgcctagttattcagggaattttcaaagaaccatagagggactttttagtcacacatcctctctgttcttagtcatctactccttttatggtagtcattagccagtatctctcaacctcttctacaatgtttaacagttagtgtacactctctgtagcactggttttttttgagctctgtgtacttaataatgagacagtcagcatatacttgtgaaaacataaactaaatgttggtatattctccgcatggtttctttttatagaaccacagttgttaacacacattaactacttcaaaatcactaattaaaacattttctcatctgtattttgggagtattatcttttctcccctccagttgtaccacttaagtatcattggttacattcagaattaagggacaagagaaatgaaagacagtgtgatttagaagttttcctttaatgcataggaaaacagacgttttcatattctaggtaatcagaagtaccttctacatttaactacttgaccctaatgacctggtcaaattccagtgttgcacaattgcattgtaccttccctaatacccagtgaatttaattgtttggctacaaactattccccttaactttttagaaccattttgtaggctgtgctcttataaagatatatcaaaagccgcacttgtcaccttttctaaaaatgcaagtcattttcaccccctctccttctaatccttctactttctccccatatttataaacacatttcccaaaaaatattcaatcttctttttcatggatccaaaagacattggacatatggcttgaacacaacactggggtaataattaattaaggtaagaaagcaaggattttggaaagtgtgggttgatgagtcagataatggtaggatttttctcctgatctctggtaaggtattacaaagttctctcctaattgtcttgcaggcccctgacagcatatcctgaattaaacttgttctgttttcccagcttacccttctaaattctctatttcctgtca

SEQ ID NO: 94631 - DNA, 1054 bp, Homo sapiens
catgatgatgcagctcgcatcactgcattttttatttctcacttgcccaaaattgagagagtataacatagtcattaagaggatgggccctggctcagaccacctgggtttcaatcatgtcaacatcactcacaatatgtgtaactttggttatgttacttaatctcacttttcctccaatttttcatctatcaagtcagcatgaaaatagtagctacctcatctgtttgttgtgaggaccaagtaagttaatacaggtaaaacactcaatactgtcagaaattattattgttgtagtaatggtgtatgctgatgcataagtgtgatttgatgttaggctacaacttatatcacaaggtcaggcttttactggagcttaggctgtggcccagtatattatcttgcctttcaaatcaagggccagatgaaagagctgctgacaaagctcagatgttttactgcaaaaagctgtgggcggggaggcttatttatgactttaaaaaaattgagcctgcccaaagtggggggtctctttcaaaactcagaaaaaaacaaatacaccaatcaagacacaaaatcatggtctttggactaagataaattgtaaatacattgggatgtagtagattcttagttaattaaagctttttagattgtttctaccaaaacctgtggtgctctgtgtgttaaaggcagactcttttggtgatgtgatatgataaattcaccagattttaggtctcatgattttttgcaaagagagagagagagagacatttatttcaaaagagcatccctattgaaaagggacaattaaatgaagtctaatgatgtgttaatcatcattaaagttaaaggatggtggccaggtgcggtggcttatgcctgtaatcccagcactttgggaggccgaggcaggtggatcacttgaggtcagcagttccagaccagcctggccaacatggtaaaaccccgtctctactaaaaatacaaaaattagccaggtgtggtggtgtgcacctgtagtcccagctgcttggaaggctgaggcatg

SEQ ID NO: 94632 - DNA, 1065 bp, Homo sapiens
ccaccttgtgaggtattgtctcccattttacaaatgaggaaacagacttctgagagtttacagcttgtccaagggcatacagctagtagtcattagagccatcctgctccagtattccctccaccatgcaaccagcactttgatagcatctagcttcctgtcttccctgtcattctcatatttacacagaaaatcaccgtctaaaaatcttcctcagtggccattccatgttactcacaataagaacatatgtaccgtcaaagggtagcttcttgattgactttgaagtcaataattgaataaaagaggagccttgttatttcttacttagaaccatgctgaatgaaccttagggaccatttggttcaaatatgtgtatatatctaaatctagagtaaagcccttcataaggaaagtgaaactccagttaattgcaaagactagggcccacttcctcaaactcagaccattgtgttctttctgttaaagtacacctccttcaacagaggtacagttcttgtctcaagagctaatttgacttgagattctagcagatattcctgagtatctactctgtgcaaagccctgtgtggaaccagctctggaggacttttggatctagtgggagagacttaatccaggagaaaatgcacctagtgctaagtcttcagccatttaaaagactaagaatgtcatagataatccaaatttggtcttggtcatctggaaacatttatgaagaagccctttcttatatgttcttatatgacctcctatttgtagaaaaatagcaactgtggccactttggaacttttggaataatgccacccatccctgagaagctgaagtataagattaaaagcaaatcaaactgtgattgttagcaccaagtttctctttaggtcttgcccctaaaagttttaacttagaaaatcccatattactcatatcttattataaaagctctgctaataactttgaactccttaaaatacattttcaaagagctgatggtgagcaagccacatgtttcatggccttccctcagcactgatcagccgaca

SEQ ID NO: 94633 - DNA, 1712 bp, Homo sapiens
tagcagtatccctacctctcaccttaggaatacaaaatgagatgcagtatggaatacttaaatcttaacttttgaatgctagatgcaggtatcagtgtaaacttattacaccattatatgatgagggaaaaaaataggcatttttaatgactaggaaaaagttcttgacaaagaaaagttctgttttgtttagtcagttactgaaatggaactgagtcttttttttttttttttttttttttttgagttggagtttcactcttgttgcccaggctggagtgcaatggccctatctcggatcactgcaacctccatctcccgggttcaagcgattctcctgccacagcctcccaagtagctgggattacaggcatgcaccaccacgcctggctaattttatatttttagtagggacggggtttctccatgttggtcaggctggtctcaaactcctgacctcaggtgatccacccgctttttattaggtgtgtctttgaagctaaagtgattcagtgcttacagtcacctatcagcgttcatgtagtgagttcttggaaccctttgtgctcctggagaggcagtttatgtagcaaatgtatagtaagcaagtgtactatgacttttctaactatcacaccattgagcacatgatgctttgatgtactggagtgcaacaagcagtttcgccatggggtgtcaagtgggaactcgggcccttggtcaacccagttataaatgtctattcttcacatgtcctcctattttctttgtgtgcgtttataattgctttcagtgatcctgtcaatttgacaaacagaaaaggttagaaaagtaaagtcgaaatagccagttttagaattttaagtaaaagttggataggggcaaatattaagaataagggttcctgtcaattcagtttctcttactattcctcttactgattgccttgactgacaagttgactgctttactttatgtgaggttttattcttttaaagatagagttcatgaactttgtactggctccaaacgtgtgaagctctgctctaatcattgctttgttcagtcgataaaattcctgctcatttgaagcattcctaactgagactattaatgctcctgcctgccgcctttttgctatcattgtttcacatcatcattgattcgtgtattcaggtgtctttcaccacataaaggaatgaagctgatgacagccattttcaagtataatctgaaactacttccacatttttctacaaaggtgtttggcatctggattagcacttatgttggggaggaaccctgggatagatagctctttaggtttcttgacgtgtttaggatatgtggctaatgttacttgctggcaccaaccctgaaaaagttgaactggtgtcatactttttatgctcctgttatgtctaactataaaatgaaggaagtgctcatggcacttcccccttatttagtgagttctcctccgcagctctcagaggagatggccagggtccggctgaatgcgcagtccatgtttctgttcttttctagttcctgtaatgtaatgttgcataaaactttcactcgttgtcttctttttttcttatgtcctcttaaaaattgaaaagtagtattttctattatcatcaccatttctcatacactgagaataaggaccatcttggctaagtgtttgacctaggattatatgtaat

SEQ ID NO: 94634 - DNA, 1021 bp, Homo sapiens
cccaggctggagtgcaatggcacaatctcagctcactgcaacctccacctcccaggttcaagcgattctcctgcctcagcctcctgagtagctgggattacaggcacccaccaccacacccggctaatgtttttgtatttttagtagagatagggtttcaccatgttggccagatgatctcgaactcttgaccttcaggtgatccacctgcctcagcctcccaaagtgctaggattacaggcgtgaaccaccacgcctgaccaatttttaactttttcttgtagagatggagtctcaccaggttgtttaagcttttcttgaactcctggcctcaagcaatcctcttgcctcagcctcccggagtgctgggattacaggtgtgagccacagtgctgggctgaagcttctttattgttggaattaatgcctatgttaaatttagaacattggcaaattttcatgaattaaaaaaatagtctataaaaatgatcagaattgtgtttctggggttggggctaccagggcattaatgagtgatttgaaagctctagctctttttacaacactagcaggacacattggaatcacctatgtccaggccacaacccagaggtgaggccctgggttattgtaatgtgtagccacactgtgctctatgatgctgtctctcataccgtattcccccatacccaagctttctatcataaaacttttcagacatgtagaaaacctaacagaataagtcaacaaacacccatattctctctacccagattcagtagttattaaccttttgctgtattggctttatgagtctgtccctctttctctgtatgagtacttttttcctgtaccatgtgaaagtaagtttcagacatcatgagtccttaccattaaatacttcagaatatatgttctgagaataaggacattttctacataaccacaatgccattatcatccctaggaaaattggtaataacttggaatgcttttcaaaaattcagttcattaaagacat

SEQ ID NO: 94635 - DNA, 2028 bp, Homo sapiens
ctgggcaacacagcaaaaccccgtctctacaaaaaatacaaaaatcagctgaatgtggtggcacatgattgtagtcccagctactgagccctggaggtggaggctgcagtgagctgtgattacgccactgcatgcactccagcttgggcaacagagaccctgtttttttttctttttctttttctttttttcttttttttttttttttggagacagagtctctttctgtcgcccaggctggagtgcagtggtgcagacttggctcattgcaacctctgccttccagattcaagcaattcttctgcctcagcctcctgagtagctgggattacaggtgtgcggcaccacgcccggctaatttttgtatttttagtagagacacagtttcaccatgttggccaggctggtcttgaactcctgacctcaagtgatccacccctcttggcctcccaaagtgctgggattacaggcatgagccactgtgcttggtaagaccctgtttcaaaaaaaaaaaaaagaaatttagctattgaatgaattgagttgatcccctttcatttaaacttgcataatagaatgtacatacctctattaaagtgtaatacatatcacacatttgctgttatctgtggttttccctcctgttaaacaaagctctttgagggtaagaatagtatttcatttataatttaatctccagtgcccagtaccttttatttaaagaagcttaattaatgcatgtgaaattaattaaataatgctactctcatgtttatagtagttgagtgacattataagtgatacttatacaaatataagtaatactattatttgtattattgaattgaattttcactttctcaatttttgcaaatagagaataaatgagaggaattacagtataatttactcttcattatggaactattttttattttcaaggttaaacagaaaatagtctgaaaagtatgcctgtcatatccttctttgatacctgacatgtccagtttttaatcataaaatctgactcccacactttctgtcattaagttggatgttgttaataattaatatgaattatatgaattagatttggaatgtcccaaaaatgatgatatgatgttattatctgttacagattaataataataatgtatcagcctaatcctgtgaaatttaaaatggcatcatttccttagggaccacatccttattctctttccattcaagagtgaaactttctcttgagcagtcttaataaataattagctattgaaatagctgcactaaatagtgtggcaggaatcataaaggaagcatatgtaattagtaaataaaacacactctaaactttaccatacgcttaatatggttactcaattggggaatatatttttcaaaataagcaaagttcatggggcctaccgcctgcctcatttatagaatcattctattttacttgtcaataaaatccagtctaattactgagccctctgaagttataaaaagccagaattatctttcattagagatccttggtaataaaatctgaatactaatctactcagaattgttacagtgttccatcacattgttaaaacttttcaaacacatatatgaaatatctattacaatgtgggcaattttgtgtatataaatcttcgtttaaccaaatcatcagttacccagttcagttgaatatattacattttcattggctaaaataattaatttagaaaacttgcccttttttgttttgatacatttaaagcagctaatctacagtgaaactttaaaaaataataatttataagcacttagaacctatgcttaagtgtttggttgcaagatcgaaagtctatttttcacttgacacattttagcgtgccatttattctataggtcacacctctttctttctttcagcttttttttttgtgaggacatttgggtatttattagtgttttacagacatatacaatttccgcaggttttttttttaaacaatgtttgttgtgtacaattat

SEQ ID NO: 94636 - DNA, 1039 bp, Homo sapiens
agagcagtgatagccaccaatgtgatctgatagattctatcacctgcaaaaagtgtaaaagggacgatgggtacgttttcttctaattcaaagttaaacttttattcaataaaggcaaggcagaaaggtatttttaattttaatgcgtggcgatagggcagcgataaagcagagaaagacagattgtctagtggcattgcttagtgtttttatttgaaaatagttttatgggttccctattgaaaaaatatcaagtccgtatcaaaggttatgaagtctttgaacctgttgggggaaagcaaggtaagatggaaatccagcttgacacttcatctttagctcacctctgttacagggaggcattacaacacagagttttaaatttctcagtcactggacacaatggagcatgttaaggatatgagagaaatatggattatttctcttttgatatccatcttttgtgtacttcattgcttgttcagcaatgtcatactacagaattttgtaaaattttgatttggtttcttggttgtccatagctcagaagtacaaatacctgtctatatatgctttatgaggatgttgccatatgcatctttcatattttgtttgaaataaaagtaaaaattatgagaaatagttgctcagagttggcttctgaggttgctttttagaattcagctgttttaaaatggtattactctttttgagtcaagttctgggctagttgtccacaagattcaaatgaggccaaaccaaacatgttttgaaacattaaagtacaggaaaggcctcttaatagttcattctctccttctctttcagagtaaccagaataagttgttactaaatttaattttaaagaatagactgttcctgtaccgaaatctgccaagttgctacagaaatatttctttttaaagagcagaaatgtgtttatgatcagcccaaagtagtaaagatgaaaagtgacttaaatgtaaatgctgtcttaaagaaatgcttgtcataagccccaaaaccttccagagtgttt

SEQ ID NO: 94637 - DNA, 1023 bp, Homo sapiens
tggtttcatgtctttgctattgtgaatagtagcctgtagatgtggttaagaatctcaagatggggagattatcctggatatttagatgggccctaaaaatgcaatcacacatgtccttataagataaaagtggaggggcattacacagacagaagagaaggcagtgtgaccacagagtttctgcttgcggtgtcaagccagccagtgactatatagggcttttgcaacagagatacggtgtgaatagtagctacaatgaacatacaagtacgtgtgcccttttggtagaacaatttattttccttggagtatatttcctcagtaataggattcctaagttgaatggtagccttaacaacagaatttgtgtgtgtgtgtggttctagaagctgggaagtccaagatcaaggcaccagcagattctgtgtctcatttgtcctcacatggtggaaggggcaaagggtttctctctggcctcttttataagggtattaatcccatgcacgacggttctaccctgtgacctaatcacctctcaaaggccacgcttcctaatactatcaccttagggattaagatttcaacataagaatgggcattgggtggaagacattcagtccatagcattaagtttcttgccctccatattctctttcctacaggttggaactccaatatggtgctggtagccagctgtgaccaagaagaggacaaccggagcaacaatcttagacacaaggatggaagctgtaaggcaggggaggagttccagggtccctggagaacttcatggagctgaggacgtccttcctgttttgtagtgttgcatgagagaggaataacattctatattatttggctgggcgcggtggctcatgcctgtaatcccagcactttgggaggccgaggtgggcggatcaactgaggtcaggagttcaagactagcctggccaacatggcaaaaccccgtctctactaaaaaatacaaaaattagccgagcgtggtagagcatgcctgtaatc

SEQ ID NO: 94638 - DNA, 1050 bp, Homo sapiens
ggtttgtttatttgtttatttatttatttgagacagggtctcgctttgtcgcccaggctggagtgcagtggcgtgatcccggctcactgcaacctctgcctcccaggataaagcaattctcctgcctcagcctccaaagtagctgggattatggatgtacaccaccatgcctggcaaatttttatatttttagtagagagggggtttcaccatgttgcccagtctagtctcaaactcctgagctcaaagcgatcacctgcctcagcctcccaaagtgctaggattacaggtgcaagccaccacacctggccccctgaaggtttaaactcttcatcctccaagtttttgcctgcagctatcatttgtgcatagtctgcctaatgatatctctagttttctagtatgaaacagagggactgtattgggttgaataatgtcccacaactcccaaaaaattcaagtggcacccagaacctcagaatatgaccttatttgcaaatagagcctttgtaattaattaagatcaggtcatactggattagggtgggccctaaatccaatgactggtgtccttataagagaaatgagagagaaaatgagacacacacacaaacacacacaggaaagaaagtaacacagcaatggagggggagattggagagatgcatctacaaaccaaggaatgctaaggatttctgggaacccagaggccaggaagaggcaaggaagggaacatgtcctgccagcacctcacttttggacttctagcttcttgaactgtgagagaataaatttctgttgttttaagcccctggtttgtgatgatttgtcatggcagccctaggaaacgaacacagggactcttggttgactctttaaaataattctttattatgaatattttcatggatttttttttaagagatgtagtttctctatgttgcccaggctggactacttacaggtgtgatcatcatgcactacagcagcccctgttgctaggactacaggcatgtggtggcactgtgcccagaaagttttagcatatca

SEQ ID NO: 94639 - DNA, 1058 bp, Homo sapiens
atctgtccctgcctggctttcttcagcatggttttctctttctttctctcaagctggctgcccactaaggccagaatatggccttggggcactcctagttctccccttacaaccttgtaaccaatggaagccacttttcctctcctggctgatggctttagaggtaacatctcagcgagggactctggcttagcctgaaccacgcttgtaccccaggggccagggtggtgaagtctgagtagaatttggagggggtggtgccgggaagaccagggcagtctgaggcacacgttatgatgtcatatcatttgctagttgttgcaggtgttagttaacttcagggcctcaattacccttctgaatgcctcaaaataggggactctctcctatgcttgttttggtgcccagtaagcaggccctcaataaatgtttgctgactggttgattaaccattagacaaacaggcctgcccaggacggctaatccctcaaaataaacacttgtgaaactcagagttgatcccgaatcctggggatctttcaggctctttgtaaatctagtattatccagggaacggcagacctctggaggctgagctgcctttaagaataaaaacctctcctctccctcccctcccactcctcccaggacagagaagggcgacttttgcagggagggcaccttccaaggatctttgctcatttccctccccaccagggatccctaccttaaaggttgggataacaattgcctatgatggggatggagcaacagcactcgcccagcagagatgatactaaacgtgcatcttagaagacagtcaatgggttatcgtacgtcatttaacctgtccgtttgagggtggtcatttatgtgcctttcagctttttgtcatctctcttgtctcccacttggacatcccagggttgcccagcagcgcctctgtgtttcagagccagactccctcccatccttcctctggactttttctcctgagagccagtctgcagcttcaaaagcgggtggttatactcactcctcagtctgtgagcatttat

SEQ ID NO: 94640 - DNA, 1053 bp, Homo sapiens
gtcatgttctcgttatccttgggaggtggtggtgtggtgtgcacagggaccgggctccgaagtgcagcaaaatgggttggaatcccagctctcacccttgccagctgggtgaccttgggcaagtcacatgtccttccccattggcttccactggcttgttgtggaggttcatgctgtagccgtatgggcggtgcctggtaattcgtagccaatcagcagcccctaggaagctaattttactggtctcctattattattacttcctattgaggtcattgacctcaggttttgccaacagccttcccctcccgcaaaggcaactggcgccccctctcaactctttccaggtcagcagcagcaaatagctaaaatttgctgtgaaatcttggcttgcagggcccgtattgattttgttctcgaagcctttcaagtagccgctgccctgtgatctccctgcaaagccccttacaaaacccagcagcttccccagacagctactggagacacatatgcttctagaaagaaacccggacccctgggccactagaaccagtcctgtctttatctcaaagccccaaggtctcagagctcagtgtgtttatcaggtcatttagcagctacccaggtaatggttgaggagcatgggcaggaggctcctgcctcatcaccttcctctcaacagatattgatctcgttccactatgtgcaagggaaccacacacaatgctcccaggacctttgacgtcccagtgctgcttgttggctagggtagtggtaaacaaaggaaaggcaaccttagctgagtccctgcctccattcttgccaaaatttaaaccaggtcaatttttccggcctagtgcaccctttaactttgttgctgaactgtttgctagtcctggtggctcagcaaggactagggaaggcaggtggcctggctgagaccctgcagctcagttcctgccacggactcagcactagccaggtgtgtggccttcagacaactcactcacctctcagtgctgttttcacacatcattttctaagttttgtgga

SEQ ID NO: 94641 - DNA, 2684 bp, Homo sapiens
catgatcatcctgccgctggtggtctgcagcctggtgtcgggcgccgcctcgctcgatgccagctgcctcgggcgtctgggcggcatcgctgtcgcctactttggcctcaccacactgagtgcctcggcgctcgccgtggccttggcgttcatcatcaagccaggatccggtgcgcagacccttcagtccagcgacctggggctggaggactcggggcctcctcctgtccccaaagagacggtggactctttcctcgacctggccaggtaacactctccacctctcccagggcccagtgggagacgccagttctcggatgccctccagttcatacacccatatgcttatacactcctaagagttaattcttagctggctgctggtggcgtttaacgttttaaaaatatcaaaatgacgtctggagtttttgcgtgctgaccacacctttgcaaacagctggggcgcaccgcacaatcgaaagagcagggccgcatctttgagcaagaaccagtccccaccgttaggtgggcgtttgttagggaagagccagccgccccgcctgttctttactccttatactctcgcgctgctctccccggtaaaaatgttccgaccacgccccagtggcttcgcctcattttctcccacatggtgcctaaaagcttctgggagcattggttaagttttgcctcttgggtcatccggcttgcaatctatggccttctctgttacagtccttggctgcgaaggaagctggcaattttctgcagttatcagtggacccacggataatagggctggggttagttgagtgagacatattgcccagaaatatgcctctcctgagggcttggggcttgggacaggttgctgtccaccccagtaaagaccacggcagagtgctgtgtttcaaaggcctttctttgtgcgaaagtgtgagttctagaggggagggagagaagcatcttcacttagttttgcctgctttttgcaattcttagaagttgcatttcatcctttgagatgatgtagtatcctttctgtgacttatccaaaaccttggtctctcctggtttctccattagcccaaagttcacaaatggggaaactgcagcccggaggcatttactgatctaaccaggttcagttgagtgaggagtccagctggctccttctccagatttctgatgattttggattctgagccttggagttattaatatattttgtcttgagttattgaggcaaagctcctcattgctgaggttgtgaaaaacagcaaaccctgggcaaagtgacttgcctttccaactgtttccatttctccttctggaaaatgtgatggctgtctgcacttaagagagagattgttcacttaaaacaacaaaaatctaggacatccgtatttaaaaacaaacaaacaacaacaaaaaaaaaccactcatgagggagaccaaaagttcttgccaaaagggcagatagtggtggcctattaggacttttaaggggatcacagctttttttttttttttttttttttaaagtctgggtcttgctcttttgcccagactggagtgcagtgttgggatcctagctcactgcatccccgaactcctaggcttcagcgatcctcctgcctcagtctccagagtagctgagattacaggtgcacaccaccacacccagctttttgtttgtttgtttgtttgttttttgagacggagtctcgctctgtcacccaggctggagtgcagtgtgcgatctcggctcactgcaagctccgcctcctgggttcacgccattctcctgcctcagcctcccgagtagctgggattacaggcgcgtgccaccacgcccggctaattttttgtattttttagtagagacggggtttcaccatgttagccaggatggtcttgatctcctgacctcgtgagccacccgcctcggcctcccaaagtgctgggattacaggtgtgagccaccctgcctggccccagctaactgttttaaatttttttagagatggggtttcactatgctgcccaggctggtctagatcacagcctttgttctgtgactggcagcttgatatttggagtccagacactttttaagtttggaaactaacttttaggtgagtgctgaaaagaagtctcctgaggttgagagcacctttagcctattacctgtaggaggtcggtcagctctctcagggaggaaaggcaataatggggttaaaggattattctttgcagggatctgtggcccagggagggagaatggatgttcagctctgtcctgctatggtcccgcaccgggagcctcaataggatcttttaactccagaagagggggcagtggtggtagggggtacctcattacctcctgaagggacttcttgtttcctgatcatggttttctagttttagacccaagccccttcacctcctgcttctgacatggatggtgacccagcgtcatagcttagtagtgtgggtgcaacttttcaatgacttgggctgcacctgcatggagggctaagagaggctttgttgtggcttgctggggataggtattgcttcataattcttccaacagccaacttcatctaatccagcagctcacggataaaggtagggcaggtggtatatcccattttatgactgacaaaactgagaca

SEQ ID NO: 94642 - DNA, 1733 bp, Homo sapiens
aaatcatccctggataagaaccactgttgcagagggaagattattctcctggactgctggtgggaatgtgatatggaataaccactttggagaacaaagtggcagtatctactgaaatttaaaatatgcacatcctataacttagcagttcacttcttagcatctctacctagagaacaaaggcatgtggttaccacaaagtatgtttgcagtgtcgtttgtaacgataaacctgggaacaacttaaacatccaccaacaggacgatgacaaaataacctatggtatttccattctgaagataatatttaaagacaatgaggtaaaggtggaaacaacccaaatgtccatcattggatgaatggataaacaaaatgagatagagacatacaacagaatattattcagccttagaaaggagtacaattctagctcatgctccaatgtggatgaagcccgaagacatcataagtggaataacctagacacaaaaggacaaacactgtatgattccacctttgtgtacctagaatagtcaaattcagagagacaagaagtagaacagtgattctcaggaactgtgaggaggggaaagtaggctgttatgtttaatgatttcaaagtttgggatgatggaaaagttctggatttggatagtgatgatagttgcacaagaatgtgaatgaacttcatgccactgaactctacacttaaaaatggttaagatggtaaattttatgtatattttaccacattaaaaaatgaatggggtagatttctatgtattgatatgaaaagatttcaaagatgtaatatagggtgaaaaagaaaaaaacacatagatttaaatacatacctatgtatctaattgcataggaggtaggagtgtctatttgaggaggatcctggcttaaggatggtacttaaagaggattttggtgtcatctacgttttaattttttgaaaggagaatgtattcatgtattactatcgggtttttaattaataattactgcttagaatatctctagaaagaaaactcaagaaaccagtgacattgtctccagggaggggaaatctgggtgcttgggagagagatgagagggagacttcactctgttcactcttttgtaccccttgaaatttgaactatgtgacattattacctacgcaattaaaatttacaaataaagtcagcagttagaaaattcttcctgaatttatattaattcaaaacaactgacttttgttctttgtagctcccacagtccattccttcccatcctgcctttaaaaaactctcacgctccaggcgtgttcccagagtgtcattgttaatgactttttcccacggaatcatgttgtctaagccacaaagaatttaaaacttcacaaaagtcctagctttggctcaattttctatcacagccactctgtgaaataggtgttagtcttttgtgtttctaagttctcagaacaagcctgagcaaagccaaaagtcaggcttacagtcctggaggctttgatctcgatttccttgcctttcctcctgggaatccctgtgactggtagcatccttctgttaaggacatactgtatccaaggggaaagacgtctgggttctggtcctgactctgttacccttggtgagtggtcagcctcattttacccagtctcacaggctgtaaaatggggatggtataaccctgactgtttcggttcctcggggttatc

SEQ ID NO: 94643 - DNA, 1044 bp, Homo sapiens
ggatcagcaggtttattctccccatcggggccaccgtgaacatggacggagcagccatcttccagtgtgtggccgcggtgttcattgcgcaactcaacaacgtagagctcaacgcaggacagattttcaccattctgtaagttcctcattctttccctggctcaaaactgaaggcttttcttgtgatttcctttgaaaaaccaatctcaccacaacttggtgtctcgctcataaaatgaggacagtggggattcattacttgaagagcgtgtgttgactctcaagggcgtagccagcagagcctatggtggggcggtttttagtttccagccacattgcagctgcatggtctgcatttctctgtgtccactccacgctctatgttaatggctggccctgctctgccatcccttagagtgactgccacagcgtccagtgttggagcagcaggcgtgccagctggaggggtcctcaccattgccattatcctggaggccattgggctgcctactcatgacctgcctctgatcctggctgtggactggattgtgtaagtaacaagtcctgagaacaccaaaaagagtctgcactgagttccctaggagcttagcactgctgggcctgggccatgcagagaaacttcagacacactccagccttgtgaaggaggctacagtggagctaaaagggcaagatttagagctaggaaaaattaaacaatatgagagtcacatgcccccaaacatccaggaatgaccatgagatgtcattaccaagaacttgcttatagcatccagtaaagcaggggtccacagctgaggccctcagcgcaggcccaagggacacgagggtctatggagttgctgactgcataggagtaataagtcgatggagcagtgatcctttgggaatgattgtccctggcctggaagattctaaggagtgatttctgtgaggggagggaggatgaaccatgctgatgtgagtgacttgggcttgggctcagcagaggaggaggtagggaagaaggtgtgatccagacca

SEQ ID NO: 94644 - DNA, 3518 bp, Homo sapiens
tttgtttattttttgtagagataggatctcactatgttgcccaggctggtctcaaactcctggccttaaacagtcctcccacctcagcctcccaaattgctgggattacagacatgagccactgtgcctggcttatgtgtgatttttaattatggtgtctaatacatataaaatacgtgtatagaaaggtgactggaaggaaatagattaaaatgggcatacagattcactcagttggggactaggggtgagtggcttgtttgcttctttatgctcttttttattctttctataaaaataaaaagtgtttaaagaaaatcaatttagaataaggtaaagccaatgccttagaagcatgctctccaggaagcaacagggcccctcacaatcatgactttccttcggcatccaggctgcctgtgacaggacccgatcgcccagcagtagatataatagctgcctcttcttttcccaccagggaccggaccaccacggtggtgaatgtggaaggggatgccctgggtgcaggcattctccaccacctgaatcagaaggcaacaaagaaaggcgagcaggaacttgctgaggtgaaagtggaagccatccccaactgcaagtctgaggaggagacatcgcccctggtgacacaccagaaccccgctggccccgtggccagtgccccagaactggaatccaaggagtcggttctgtgatggggctgggctttgggcttgcctgccagcagtgatgtcccaccctgttcacccagccgccagtcatggacacagggcactgcccttgccaacttttaccctcccaagcaatgctttggcccagtcgctggcctgaggcttacctctcggcactggcattgggctccccagccggaactggttaccaaggacaaggacactctgacattcggcttgatccatgtccaggtgcaactgtgtgtacaccagggatctgtttggaaacaaccccttgagctgccaggctcaagaaatcatggactcacagggtcctgtgtggttacatcttggaaaaaatgcagatgtatttcactctccccggtcagctctgcatcaggtgttttctgagcaaaccaagggggtttatagtcatctgtcgcattgcctcgagttgcagtaattgaaaaaatgctcaaattcttagccatggctggcctttgctgagctgggactcaggtgtttaaagagtttgtgctatagctaggtgtggatagcttctgatccctgggttctgggagactgcaggtgccgcacattgtcaagttagaaatactccaggtgggtgttagcactgtggtggtctctggtccacagccttaggtaaacaacttagattctgaggtcaaagaaaaaaggagagggaatgcagccttgtgggggagaagcggggcagagggttctctaatctaatcaggacaggacaggtttcacatacaattgtcccagttcgcatcccagccctggggcacttttctgcttccttccagaggcctgggcctctgataacactttggctttttctccattcacgctgatttggcaaaaggccagagatgggcctccttccctggggaggtgtgatgtagttatcacattcaggacccttgttgatttatcatctattatttgaattcaactggacactctgtaaaatgctgcactgcagcaaaaacaaaaccaccaccaccccagagaaaaccatgtactaattggagtggggtacccccattcacaggttcccaggtcccctggctttggctgatttcaaaatatagagccctttcttgccagtacatccaagtttaaaattatcagcgaaatggtccatgtttttccaattacctgctgacacggttctaagctaagtgaaggggaagatctgagagcgtgctgtttgtggctgttgatgcatattcgtgatgtaacaggtcctggggcctcactttaccccatttgtaaaatggggctaatgtcacctgcctcttacctacctcagagggatttggtgaagcaaactgttaatcttcgaaaacgaccatttcacttcttggatatcaagtgctaacccagtatgttcttcttttttatgtaagggacagctttctccacagagtcctttctgctggtgaggacagcatttctgagcagggctttgttctctatgtgcattaggacttttatcatgcccttgttctgtgtgtagttacttgacagcatcaaatgccgcctcttcctaatgtccttcaagttttcatgaactagcaaccccaccttccaccatggttctgggcgcctgattttgctgtgactcccagacccagccactgtttctgccaccctgtaacaggccattaaagctccccagtgttcagcctccttcactcccttgttttccctgttgctatgtgtcacctgggccctacagacaggggcacacgcttatggatgtgtgtaccattgagatgagaatgggtagatggaacggagaccatcaagccacacccccttcttaaaactggggacatgagcctgagcagaaagggtgaagaagagccatgggacacagagttgacccagccagggggaaagcccagctctctttaaaccagctaagccattccagtctcctgtgaagccaaaagggaccaggaaccgtgcaaaggaaactggaaacttttccccgctgggtagagcatgttgctgatactcttctgttttcaagggaaacaatcacattgtttgattccaaatggtaaatgaacactcactattcttcaggcttcagtaaatctttttttcttccttcatatatatatacacaacacacacacacatatgtatatctatacacacatgtgtgttgtgtatatgcatgtgtgtgtgtgcgtgtgtgtatagttttagctccaagccaagcaagtttgtgtttggatagaggggaacttaactattaactacaagttgtatgtctgtggtatcttgattttcccatttctaaagatgaatttcacaaagccataaagcgtgaaattagagctggacttaagactcattggccgaccatcctgtgtcctggcctggccctgcagtaagaagcgtgtctgggtctggagaagggtgcttccgagagtgtgcaggtggcccttccccttggaggcgagaagagagaatgtgctgtctatcttcctggttttcagtccacagagtcggtagaccaggggttacgtgactggggaaaatctcacatctccttgtctgaaaacatttcccctgctgttctctttctaacatgttgtggtaaatctgttcagatactgctcatctgactgttttgtacatgtgacaattgccttaaaacctagcacagtcctcagaaatgaataccgtgtttccactggaatctgcagttcctttattcccttcttgtgtgttgaagcggcacttgctgatggaggagctgttgctcttctaggagatgggctttgg

SEQ ID NO: 94645 - DNA, 1087 bp, Homo sapiens
ctaaagggatttgttttccttgctccattcatcaggcacgagcccctaagtcagggcaggcatgctcagggggcagtgctaccgccggagctgctgtcgctgatccttttgcggccacctgcttgcaactgggaagcgtcaagctgctcaggggcttcccactccacaccagcagggctcttgtaaaaagtgtgtggttttgccacatacctccataaagttatgtcttgtcagaacgactaggtcaacaggccctaactgagcatctactgtaaggcaagcattaagtaggaacaacaggaagaaagccccaggccctagaattctgggaaagtccctgaaagagagcagttgtccatgcctctactatggcaccaccacacctcgcccatgcttttatataatcttgttttcaatgacaccacattccagcaacattagggaatctagacacctcttataataggaattatcctgcaaacagagtggaaacctctgaagaaacagatcccctgtctgacctgaacatttccagctcttcatataatacaggaactggttttcatttctgggcaatccccaaaggatgaggagagagttcacaccgatcaggggcctgatggggcctgctaggagtaacgatttggattcttaccctggagtgtggttgccttgactctctgttgtggagagtgtttggaggttgggattagtacttgatgagtcagttttctgatgtaaccagaccaagaggagcaaatctacactcaaaccatctcttccctggggatcagaaggagcgctgatctgatgagctacttgaacctgctcacgggaactgtaaattgtgtctgaatagcacaggcgatgtagcagggaggaccatgggctgtctgggttccactcccagctctgctgcttgcttgctgcatgaccctgggcatgataacctctccatggcttagtctcatatttaaaattgggagaccgagtgcagtggctcacaccatcatcccagcactttgggaggccaaggcaggaggattgcttgaggccaagagtttgagaccagcctgggcagcaaaac

SEQ ID NO: 94646 - DNA, 1018 bp, Homo sapiens
aagggcgtggttggcgctcggtcctgccctgcgcgttttgggctgcggttggagggccgcagttgcagtcagggtccgccagctcggggccagcgcatggggctgctgagaccgctccggacgtgcgaagcgttcgcggtgcggtaggtaggcagtgtcccgcgtgcgggtgctggtgtcgggggtgccgcggcgctgggggcggtggcccgggctagatccgcgcgcgcgcccggccccctcccccgcgtctcttcggtgcctgcggggcccttgcggtgcgggccgtctggcctcgcgtccccgccggcaagggcacaaaggctccctggggggcgggggcgcctcgtgccttcgcctccatcttgcgagcggaacggcgtgtgctgtggcggccgaggggtcggggccgaggcgggcggctgggcttgggaatgcccgggcgcggcgagggagtgcgcgagtccgcgcatctggcggccgagcagctgcgccgctggtcggcctgggccccgggggaggtcactttccctcaggcctctcccgggcgtgggctgtttacccagctccccagtcggggctaatgcagctcgggcctttccccctggaaagatggagaccagtgatgtcttcttatcgccgcgcccagatgcggagagaaaaaatcaagatgtctcattttttttgcctcggagggctaccctttctaactgtcatcactagaacagttctcagcagcctggggacgaatgtccaaaacctgttccaggcccttgatgattagtaggttgggtttagtgtattgtttgtaacaaaaatgagcggaagcctgccagggcagattggacctcactgggaattcatcaggaccacgaagggaggtagcgtttgtaaataatctaacagttctcagatctagggtatgaagagtgttgtgttaaagtgtgtaacaaaggttgttgggtcagtttgccttgggtttagttgaaagatctagaagtcaccactttttactttg

SEQ ID NO: 94647 - DNA, 1072 bp, Homo sapiens
cgtccgtgcgaagggcatgctcttctccagggtcacttctgaatcaggctggagcctggcatgccccatcaggcagagtagggaagggccctcttggattccagtgcaaggcgtcctcagtgtgtgcagtgcccatctaggtggtatttcccagcgtgtgagctgagtaagatgagcccgcagccattccccctttgcaggctctccaccagcatctcctcttaccatctgtttgcctcctgactaaggaaacaaggccatttctgcccacatttaagctttgaggttggcccagtgcactccgggtggctgccgacatcctgggcattcacggttccgttacctccccttccacatcctcccagcattggtcttcctcctgttggctttttggccccctaccccatcccaccagggctctcagcatcaacttttgctggcatgcttaggctgagggtgatgtccctctgttgttcctgaacctctttgtgttggaatggtcctgtttgcagattcagctcccaaatcatcatccttccctgagtgctcggcctgtgctccctcgcctgcctgcctgctgattggctcttgctctcatgtgcacacatgctgtgttacacttaccctaccactgttacccaccagctttccacagcttccctccatcaccacgtgcagcataacccaggccagcctgaggagagttgctgatctctttctctttggtcactggccatccttggaacaagtagctctcacctgttccacaggctggatgtggtttctgtgctttgagagggtcccagcctgggcaacatggtgaaaccctgtctctactaaaaatagaaaaattagccaggcgtggtggcatgtgcctgtagtcccagctactcaggaggctgaggtgggaggatcacctgagcccagggaggtcgaggctgcagtgagctgagatcatgccactgcactccagcctgggtgacagagtaagaccctgtctcagaaaaaagaaaaaaagaaaagaaaagagagggtcctgcctcctctgccaggcagagccaagcatcttgga

SEQ ID NO: 94648 - DNA, 1044 bp, Homo sapiens
tggggtctggagaccttctgctctccggggaaagccaggtaggtactaaggcaagactgtagatggacccattgctgtcctttgggagtttgttcaggatttcctcaccatcttgcatcctttccttgctactgtgcagggtgaggaattggaggggcctgagtatgatgatttctgttttgcgggttcagctagagagctgggcctcaggaccggccggggggactgtccacggttatctcctgttcctcaagagtgactggtgactttttaaggaccagggattataggccaagaggctgctgcccagaggtccaggccaggggaattctggcaaggagagccctgccgtgtttctgacttggtgattaaaggctttaggggtaccctgaagagacttgggaaaggagtgtccagggctttgggctcctgggggctctgaacctaaatcctcttcagacccaagggacatgtcagaaccttggagccctgtagtaggcagcactgtccctggttaaggagaattccttgggcttctctgactgccaggcagcttctcctagtgggagtcacatggggcagggaatcctaccaggttctgtgactgcaggcaaatcaccagatctttcaggccctcagtatcattgggaggtgaccggaatgatctgttctgcccagctcttacattcttttctgttctgcttgccaaggcctttcctgggaatggctttgatcttctcggtgtcattgtagccttggctgctgcagggtccccttgtggggctgcaccctgtgaggaggctctgagcgggactgggagagaacagaggctgggccccacctgcctgggagcaaggggcagtgggaggctctggcacctgtgagtcagagattcggtgaggcaggaagcgaatcataaacagacacagaaatggcctttcacggggatgagtccggtgcttattattagaattcctgttgttcgttaagctcttaccatgtgctttgcacacatgggtgtatttaatccttaccttctgagga

SEQ ID NO: 94649 - DNA, 1254 bp, Homo sapiens
agtgtggtggcatgcactagcaggaggatcactggaacccggcaggcagaggctacagtgagccaaaatcacaccactgcactccagcctgggccacagaccgagaccgtctcaaaaaacaaacaaaaactctgacgtcagtttgtgtgcgtgtgtatgtatttgggtttggttttagttttcttgtttctttttcattaagattttgttattttgaaaatactaatgtggatttttgttaacttggtcctagatttaggatgactgcgtcccagtttgtgcctgttgttctggcataataataggtcccctttcagtctcagaagtgtcctgaattggaggataaattatatagttgtcatccctaagtctaacgttaaccttggctgaactcctgccttctagcatatctggttggctgcacctttctaatctcttcatgaagaagcagagggatatccatggtctgagcctgaggctagtctggaaggagttttctaaaacaattctttgaattcctacaaccttataacctgaccatatcttcagcagcagaggacacaatttacatgtgcttgggccagggctgagctgactgagggccttcctgggaccgtactccagctagaggaagggaggggctttgttttccaacttggggccaactaaagtgtagggaggagccttgcttgacctgggcaggctgggccagctgctccaccctactgggaatgctgtttcctgcagtgtggagagaggttgctttgagttcctcactttgaggaactccacaatgagttcctctccacactgcaggaaacagcattcccactagggtggagtgagcttgaggaaggagagaaaggctgactccaagggtcctgtatgcagactccacgtgcatgcacgcagctgtgcagggcccaggaccagtaccactacagagagaggaagctgccctggtagacctagcttagtggcctttcctggcttgtcagagcaggtgcaaacagaataattccatccctccgtcttatccctcctgccagccttctgtacctcagcttctaggctagacggaaacaaccagcttgctttgtaggtagagctgagatttgagctgggagtcactcgtgcaggtcagtgaggcataggcctcttgtgtcacccatacagctgtcacaaagtgggactgtactgctagccccttgcccgcacagaattgtgcatggctcatgcgtatgtgtgtgctat

SEQ ID NO: 94650 - DNA, 1081 bp, Homo sapiens
ggaggatgagctaagagaatggtagggtaaagccttgaactgatggcagcccctaatttcctgcaagactgtaaatcaagtgctgacagcctgcctatattatgcctcattttacatttttgagtgagatgggatttatactggaatacaaccgccgaagcaaagctgggcaggtcccacgggcttgagaggcaatgaggaggcactttcctgaccagcatggtgggcaggtgcataccgtgaagggtgtacagcaggatttctcagccttggcgcttttgccatattggccgcatgattttgtggggaattgtcctatgcattgcaggatgtttagcagcacccctggccccagtaaatccctgcttcccccacagttgtgacaacccaaaatgtttctacacattgctaagtgtaccctgggaagaaaaatctctagggttgagaggcatcagtggacagggaccactgaatagttttcagcaggtaagtgattctctagtgtgaattatatgagctctttgcaatcccctgcccttttaaggcctttgttttggctcttctggcattttcactagggttcttagattttttattggggcagaaattccatgtgccaagctcctttgctgcatgtaatttacaccagcattttactgaagcagttggcacatcagtgttctccatttaatcacagccctgtgagatggatagttgtggatttgccacaggccacaggagaagtggcagcctggcagagcccctgggcactggctttccgcagcttcccagtgtctggaggtgcagaggcctgagcggctcctctcttcacagaggccatgtgtaaaagtaggcctctagtccggacacggtggttcacgcctgtaatcccagcactttgggaggccaaggtgggcagatcacctgagatcgggagtttgagaccagcctgaccaacatggagaaaccccgtctctactaaaaatacaaaattagctgggcgtggtggggagcacctgtaatcccagccactctggaggctgaggcaggtgaatcgcttgaacccaggaggtggaagttg

SEQ ID NO: 94651 - DNA, 1697 bp, Homo sapiens
cgtaagccctgaagatggcaaaaggtgtcataatctcccaaagtcatctgtatagatgcttcatttaaccctttttcttttgcagacaaagggttaaaaatctcttctttctacctatatctttaaagagggattgacaagcccaaatttccttttatgaaaagacccaaggtttctggccaacaattcacttttttcagtctcttaggtcctcttgcatgcctgagaatattgagtattcggaatctcctaccagcccttggtaaatgaccctaccaggtggaatagtttgagctttatctgctcttttttaatgggatagaggggaaggcaacacgtcttattttatcaaaaattgcaaagctacacgctctttgtggagaagcaccaaaaggaaaaccttagtttggaaggattcattgtaaataaaaatagtaactcagccctccattcagggaggagaaaggcattttaaagctagtatattgaaggtttcccccttgacttcagtgttgaatggctcttgcaaggacttcttgaaggttttttttctcactagccagtgtttggccgacaggttgcacctctgcctgagaagatgcctgaaagagaaaaggcagcatttgttacaggcataatgttgtagaggaagaaacgacaacagcagtcccctgcattcattttagaaccaagatgacgtctcacagttgctctgataaaaacacagggactccctgctcttagcatacctatagtgctcacctagaaaatctatgagttaagcactacaaacattttgttgtaggagcgacgtacgacagtccaattgcagaattatgaaaagcattggcagtagcaactctgtggtggacacacccacctttgctctcctagctccttttctgtcattctgtttgactttctcaagggagcaaaagaaagttgtactaccagttaagtctccaaggtgtctttaacccctccatccccctagcctttttggaagggagtggtgtgggagatatgtggagaccctttgtgcagggcaggggtggtggtgcaaagttatcagtaactctgggtttctctaagcacttggtgctgtcagagatgcttggagatggagtaccaaatgagctggggagaagatcctgcagaacaggggtggccaggtcatggccccatactggaaaagtgtacctgtgcagaaataaagtaggtgtacagataagttgtgctgctcttgtcttgggatggcagggttggtggtgaagaaagtgccatagaaatggcagcacagaggcaccctcatcctcagcaggcagcaggggtgaacagtaatggaaagcaccgcagtgagccttcatcatcataggaagaccagcaactccttttttagtaccattggctgtcttcttccagtatctcatttgtttaaataatagttcttggctcaacaagcttctaagtagtggccaactgttacagcagggttggtgggcaaattttctttttgagttcctccacttaccaggttaaaccccttcacatgggtgctccattgccgccatgggctttttgtcagggataagggtgcagccagccagcatgtccagagaggccaagatagagtcatacaggcgatctgcgtggctctccagctcaccagactgctttgcgatcctcccaaggacatc

SEQ ID NO: 94652 - DNA, 1001 bp, Homo sapiens
caggcatcttctcaggcagaggtgcaacctgtcggccaaacactggctagtgagaaaaaaaaccttcaagaagtccttgcaagagccattcaacactgaagtcaagggggaaaccttcaatatactagctttaaaatgcctttctcctccctgaatggagggctgagttactatttttatttacaatgaatccttccaaactaaggttttccttttggtgcttctccacaaagagcgtgtagctttgcaatttttgataaaataagacgtgttgccttcccctctatcccattaaaaaagagcagataaagctcaaactattccacctggtagggtcatttaccaagggctggtaggagattccgaatactcaatattctcaggcatgcaagaggacctaagagactgaaaaaagtgaattgttggccagaaaccttgggtcttttcataaaaggaaatttgggcttgtcaatccctctttaaagatataggtagaaagaagagatttttaaccctttgtctgcaaaagaaaaagggttaaatgaagcatctatacagatgactttgggagattatgacaccttttgccatcttcagggcttacgtctttactttcttggctaaccagtttcttagaagaaaatgtgtcagggacttggggatctacagtcatgctttagcatggctatggagctaattatcaagcttaaagggtaactttgggaggactcctcccttcactcctagtctcccttggaagagcagtccaggctcagggaagggaacggataggatgacacagtaagtacagaaactgaagctgtcaatagtgaaggaaaaaggggaattcttcgttgctttggcattgacacataagtactttgattaaaaaaaaaaaaaactatggatcaaccattcaaagcatcaattctatagctttttgcagcaagatgatcagttattgctggtaactgcagattctacagaaaagcacttttaaa

SEQ ID NO: 94653 - DNA, 1074 bp, Homo sapiens
tagctcttcaacagtagctacacataaaatgcagtatttcaagtgcctgatgctgctgtggtatgctttatcataatgcttaagggcatgatcaaaattaaaatggcttatgagtttgccatattaatcatcttagttccatacacactgagactttaaaagggaaaaaccactctagcaaataattgtcaattataaacctgtatgtaaaacattcttgaaaacctagagttggttaaaaaggtagagatgtctgacggcctcttcttaaattgatatattttaccttctcttagatgtacatttataagtaggaacatgtccttccactgagtatgttactgaatagcccttaggaaattaaacccatttatttactaatatttgacaggcatagaagtgtattaattagcataaaagttggagatgaaaaccctatagaaacaaattggccaatattatactaattgaatgcagaatgtggcattctattcccattcaactaataatcagcttcaactgacaggaatttgcacagaatgttacacaataccctgtttcccaagaaagtactaccttacctagagatgatctaagatatttttgttcatcctctgaataaggtgagactaaagggtgctaactccctggacctggctgtgaatgctactgaagagtatcaacacaactgttaattataccgccgtgctttaagtttaagacttaccttaaaactcaagctgaaggctgggcacggtggctcatgcctgtaatcccagcactttgggaggccgaggcgggtggatcacaaggtcaggagatcgagaccatcctggctaacacggtgaaaccccatctctactaaaaatacaaaaagaaattagccaggcgtggtgatgggcgcctgtagtcccagctacttgggaggctgaggcatgagaatggcatgaacccgggaggcggagcttgcagtgagctgagatggcaccactgcactccagcctgggcaacagagtgagactcttgtctcaaaaaaaaaaaatcaagctgaaattgtttcagcctagtaagatg

SEQ ID NO: 94654 - DNA, 2342 bp, Homo sapiens
agttgtctcactagctctttgttatttgtctgttaggtcaggaacgatgtttctgtttattccagaactatattatcgaactatattatcagtctttcaaatgtctttttaggagtccttcaataatgttaaacagtggctgcaggaaatagatcgttatgccagtgaaaatgtcaacaaattgttggtagggaacaaatgtgatctgaccacaaagaaagtagtagactacacaacagcgaaggtatgtttaaagtttaattttcatactgaatttgaaggtgttgaattatgtatgggttctgcagtaacagtaaggccacagccttttaaaaatatgtgcactagaatactgtgacagtgacaatttgtgtagcatctgtttggatccaatgaacttagttcctcacgctccattatggatggtagaaatgcactaagaattagtgaaaaagatttttcagtgttaattgtgcctcattattctcttaggaatttgctgattcccttggaattccgtttttggaaaccagtgctaagaatgcaacgaatgtagaacagtctttcatgacgatggcagctgagattaaaaagcgaatgggtcccggagcaacagctggtggtgctgagaagtccaatgttaaaattcagagcactccagtcaagcagtcaggtggaggttgctgctaaaatttgcctccatccttttctcacagcaatgaatttgcaatctgaacccaagtgaaaaaacaaaattgcctgaattgtactgtatgtagctgcactacaacagattcttaccgtctccacaaaggtcagagattgtaaatggtcaatactgactttttttttattcccttgactcaagacagctaacttcattttcagaactgttttaaacctttgtgtgctggtttataaaataatgtgtgtaatccttgttgctttcctgataccagactgtttcccgtggttggttagaatatattttgttttgatgtttatattggcatgtttagatgtcaggtttagtcttctgaagatgaagttcagccattttgtatcaaacagcacaagcagtgtctgtcactttccatgcataaagtttagtgagatgttatatgtaagatctgatttgctagttcttccttgtagagttataaatggaaagattacactatctgattaatagtttcttcatactctgcatataatttgtggctgcagaatattgtaatttgttgcacactatgtaacaaaacaactgaagatatgtttaataaatattgtacttattggaagtaatatcaaactgtatggtgataagtattgttttgattcttatggttaaagggaaatagagccttgcattatattcaacacagccatttgtgtgtgcacaatgcaaactaaggtattctagacctatcttagagcagcatccagtatttgctttctagataatatgcccaataacatgacctagaggggcttctgtgctgtgtagggatttaaccaacttcagtggttcagggagctcaaactatatgtaaaacaagtttagaatgtatgctatctagcccgttatctctgatccttctctaaaaccatttgaaatagcttcattgatcaacatttcataaatgcatctgtggtagaggtagaaagcagcacctttcctaattggcaaatgatcagactaatgtgtgctaatgtttttcttccatgctttcagtcagattcaactattttatcctccacagttgcttaacttggtgttggaggagggtttaagcattaagataggaagcaggaaatttgattgctctaaatttagaaattatatccctaaaaattaaaacatgaatactgggtggtaatgataattgaggcaaatgtatttattttggtgacattttgcatatatgaagattttctgaaataggaccttcaagatcctagggggttttgtttggtttttaattgtgaggaataaaaaatcttctgcccacactggcattttaaggtgactgaggtcaaacgttgtttccttaggttgaaatagcagccaaaacattcttcacgcaggggcttgggatatggctgctggcaacacattttgttgtgggctccttaatttaatgataaaatttaagctaaacacaagccaaaaatgaataggtttttttaatttttatttttcactaaacaggcaattgaaatacatggtacaaaaataagtggtaagataattgtaaaatgaaatggacagaatattcaattttccatctatgaaaatttcacaataaaaatcatagtttactttgtattataggcgtgct

SEQ ID NO: 94655 - DNA, 1028 bp, Homo sapiens
cgcagtggctgtccgggcgtcgtggttcacgcttatagtcctagcactttgggaggccaaggtgggcagattgcctgagctcaggaggtctaagaccagcctgagcaacatggcgaaacctcatctttgcaaaacatacagaaaaaaacaaaaaaaaccacaaaacctctagttgccagttattttttttatttattcctagtgattcttctttttttcttttttctgagacaaaaatttcactttgtctccctcgctagagtgcagcggtcagctcactacatgattcttttagagacatgttaattctttatattgagctgaagcctgtttcttttacttctgtctcttcttattcctccgccttgtagagctgcctgaatcagattaattcctcttttattggcaagcctgcccttcagattgatcttatcacaacctttcttctacctctgaagtcctcattctttcctgtaatgatattttcagaaccttgtgcaatttgggttattcttacattttataaatgccttttattaaatttgatttcttaaatcaagtatgagatataacacatgaggtaaatcctgtcttgatttggagcctgaatgaatttctctcttgaacttcaagggctcatggccctttcttattattaatcaaagacaaccatttgttgtttcagtagctatattatttctagtttgggtcttaaggtttttgatttgcttgttttttcttttttctttttttttttttttgagacggagtttcgctcttgttgcccagactggagtgcaatggcgtgatctcggctcactgcaacctccgcctcccaggttcaagcgattcttctgcctcagcctccctagtagcagggattacaggcatgtgccaccacgccgggctaattttgtatttttagtagagatggggtttctccatgttggtcacgctggtctcgaactcccgacctcaggtgatccgcctgccttggcctcccaaagtgctgggattacagtcgtgag

SEQ ID NO: 94656 - DNA, 1107 bp, Homo sapiens
atgcctgtaatcccagcactttgggaagccgagtcaggcagatcacgaggtcaggagttcgagaccagcctaaccaacatggtgaaactctgtctctactaaaaatacaaaaaattagcagggtgtggtggcgcacgcctgtaatcccagctactcaggaggctgaggcaagagaactgcttgaacctgggaggcggaggctgcagcgagccaagattgcaccactgcactccagcctgggcgacaaagcaaggctccatctcaaaaaaaaaaaaattgtccgggcatggtggtacacacatataatcccagctattagggaggctaaggcaggagaatcacttgaacccaggaggcggaggttgcagtgagctcaaatcgcgccactgcactccagcctgggagacagagcaatactgtatctcaaaaaataaaaaaacaaacaaacaaaatgttcaaaatgaggccttcaggcatggaaaagaaattcctattaaagatgaaagacagacaaagatgaaagacagtgtcctataagatcccttccagccacaggaaagtaacaaaatatgaatgtttcacacacgaatacacacccaaatcttataaacaccaatgatcacacataatacaattattccataccagtgctttaaagtacagttttgggtagatctttatgtgctctttatggtgccaaataaaaggttgagactgtacttatatcgtgggaaaaaatatggagggtaatttgttcactgattgaaagtatttcaagctatttctgaaaactaaatccttgcaagtcctaatttgacacatcaagtgtgtttacttatatcaatatccacagccacctatcttttgttaacataccttcttttcctcatcagagtcatgtaagaaaagggagcaacttaacctatcaaacacccatttatctgggcatgtcatatcataagtagtatctatatgctgcccaaaagtttacaaagggctttcacacgtattgtcacatacacaaagctattacagttggttctcacaactagcttataaattagtaaatcaggtgtcatcacacacattttagaaaggaaactgggt

SEQ ID NO: 94657 - DNA, 1106 bp, Homo sapiens
ctttttaaaaattttaaaatctcaaactggaaaggatgtctagttcattctatgcttcagtcccctcttctgatttacttgtttagaagatttttgtttccttctctgacttctattttgctgctgactggcacttgggatttttaaaaaattattttcctcatatataattaaagacaataagtataacaataagtataatatggtaatttgctaaaacccaaacaatgttttaagtaatgcatatcattatgtaaacctacgtaatagttgaatattcacaaagataatcgcttatagaagttttatatcctctcttctttggcagtgcaattaaaacaaaaaaaataagttttatgtcttgtttacatgtaaataattttaatctaaattgtgacgtggttttcactttagcatatttttgaaagtaaatcaaaaaggacaaaatacaaaatcatgtatatcttctacaaaaacgatatataaattctaaggtttttgtccttttgaaattgcttaaaagaatgcatagaactggtgtctgagttgggaaggatctatgagggatttccttggagactgtgggtgaataataatgttgtcttagttccatgaaggaatctctggggatagtttttgagttaggcctggcaatgttagagatacataaagagagccttgttttatcactgggtgcggtggctcacacctgtaattccagcactttgggaggctgaggcgggcagatcatgaggtcaggagatcgagaccatcctggccaacacggtgaaacccgtgtctactaaaaatacaaaaattagctgggcgtggtggcgcatgcctataatcccagctactcgggaggctgaggcaggagaatcacttgaaccagggagttggaggttgcagtgagccgagatcgcgccactgcactccagcctgggtgacagagcaagactccgtctcaaaaaaaaaaagcttggttttcaatggttctgaaaaatgctttaatacaagtgtagagtgttagtcaagttttgcacttggataaacagcctgtgaatttatcacatttctagtttataatatgggctttcagaagttat

SEQ ID NO: 94658 - DNA, 1008 bp, Homo sapiens
gtgtcaagaaaataattttgattggttcatctttaaggaatgtgttaagaataaagcatgtctacctgtcttcagtataccagctaactatagtaggaagaaatatagtagtctacttagatcaactataattctttaatgcagaaaaagtttaaagtatttaccttatttttagcccccatccccttaagtatatcatggctccagaatctctgaaaatgttatcagtctttcagactttgctcttctttcatgttatactcaagaaacatttgacctttttttttttttttgcttgcattgtgtttcaaataatttttaacaaaacttaagtgtttgaaagtgaaagcaggttgtctttgtgacttttggtggtggtttgaaaaactcagaaaagtttaaagaagaaagataactagtattctcattgtccagaatatgattttttaaatgtctatagaatatcaccatctgtaattcttccggtaatttaagtattcagtagttgtataaaacctttaaaatatatatattgagaattttgtgtgaatgagatgatgagataatcttgtaggatcatttaaagataagaactgaggcctggcacagtggctcatgcctataatcacagcactttgggaggcccaggcggtagatcacctgaggtcaggagtttgagaccagcctggccaacatggcaaaaccctgtctctactaagcatagaaaaattaattgggtgtggtcgtgcctgcgtgtagtcccagctgcttgggaagctgaggcgggagaatctcttgaaccctggaggtgggcattgcagtgagctgagattgcgccactgcactccagcctgggcgacagagcaagactctgtctcaaaataaagtaaaataaaatgaagataacaactgaaatttcacattaaaaatttttttgtagcgactgtgcctcctatgttgtgcaggctggtctcaaactcctggcctcaagcgatccttccaaagcac

SEQ ID NO: 94659 - DNA, 1863 bp, Homo sapiens
atcctccccgccaggtttcaggtaatatggatgcttttcgggactgcgtgggattgaggggaatgagtagatggtgagaagcaactgaacatttattagttctctttttgagttgtgtcttggaggagttgtttaagagctcgccgggtccattgccctcctataaaaacctgggcatttgtgagaattttgttttttttttttttaaagaggacacctaagtcattttgtcttctgtgggtcaagggaaaaaaaaaaaactaaagccaagaaatgtctttttgatactcgcagattaaaggaagcttgctgtcaagttgaaagagaaacgaacgggacctatgatagatctgtatgtaggttttggattacctgcttggatgcttgcagatagggaatgaggttccatgacgtgtcatgaaaagttaatgcatttctttttcttgcttactcaagaagtcaccacagcagatgtgacacacctggcacctttcctgggaactggtgttcacttcccttgggtagagtttgttgggctctcctcaatggccctttaaaaatttcctctacagtttacatgcatgtaaagtaatgaataattggaagagaccgaattggtattccttttcagtgtcaaaggcctttgagggatgggggaacatcagtatttgttgtaaaagttgagtttatttgctggtttggtcaattactgctagacattttcccctaaaaggtccacccaccagtttagctgactgtcatatgtgtgtcacatggctcttgcaaaatgcttacaagttttgtaatagtgtggcttgaagctgaaatcttttgcactaaacagaaaccgtagtattttattagaatttcatgttttagaagttgagggtagtgttcttgtagtgacatttgctgtgttgacagtttaaaaaaaattttttttcaagggctccaaggacaaagttggttttgcacagttgaacggaggtgaacttgaggttcttaatttagtagttttcttggtaacaataaagaacatggatttactgctttatcgaggtttatagacctctactgttcaggaaattttctgaatttgctatatatatgtttattagtgtaaataaatcttcaagattagttgagaactttgacaagttactcagcctctgaattttttttcccttttgtaaaataggataattggagtcattattcctgtcagggtagtggtgaaattcaaatgtatataaaagaatttgaaaaaccgtgtgagcattcttcaggtggtatgcatcattttcatgaaaggcattctattagtaccaggatttaggaatataatccttgcgcttaagaagtttagatataggccaggcgcggtggctcacctcagtaatcccagcactttgggaggccgaggcgggcggatcccgaggtcaggagatcgagaccatcctcggtaacacggtgaaaccccgtctctactaaaaatgcaaaaaaattagccgggcgtggtggtgggcacctgtagtcccagctactcgagaggctgaggcaggagaatggcgtgatcccgggaggtggagcttgcagtgaaccaagatctggccactgcactccagcctggacgacagagcaagactccgtctcaaaaaaaaaattatttattgttttgagacggagtttcaatcttgttgcccaggctggagtgcaatggcgcaaatctcctctcaccgccacctccgcctcctgggttcaagtgattctcctgcctcagattcccgagaagttgggattacaggcatgtgccaccactcccggctaattttgtatttttggtagagacggggtttctccatg

SEQ ID NO: 94660 - DNA, 1105 bp, Homo sapiens
cccggtcccttgcctcccccgacccccagcctccgtcggccgccggcaccaccctccgcccctctccgccccctcccccgtggggcgctgactcgcccggctgccacgtctcactgatgacatcactagggcagctcggccttagccaatccgccagggggagtccgagcgaagtcctagccagcgagtcagaggggaggggagcagggaggggccgagggtggggaggtgagggagtggggaatggggcgggcgacaacccttcaggtacgcatgccccagaggcgcggcgcttggcgggaagctgagtcctggccttgcgtcgcactgtctgtcctcagctcgcgtagccgcgctcgcgactccctttcccggcatgccaggcggtgcggccgccctctgggccgtgtaaaggcccctcggtctaaggcttccctatttcctggttcgccggcggccattttgggtggaagcgatagctgagtggcggcggctgctgattgtgttctaggggacggagtaggggaagacgtttgctctcccggaacagcctatctcattcctttctttcgattacccgtggcgcggagagtcagggcggcggctgcggcagcaagggcggcggtggcggcggcggcagctgcagtgacatgtccagcatgaatcccgaatagtgagttcaggagagcaccggtcggctgggtccgtgggccagcttgggggatcttaaaggggtcgaggagggttggggcagaagtcggggcatcggctggggtgaggcgagggtgatgggtcaggagaggctggcggccgggagtcgggccccattgtctgacgcggaggggcggccgcgcgggggaggggtcgggccggaggggtgagccgcccgggcctggaccgggtcaggttagagggcctgactgcggggcgggtgctgaggaagcctgccgaggggcctggggcggtgtgaaggggtatcttctctcggaggcagtgacttttgaaggaggacttgtctctaaggggaggggatggggtgggagagcccttctagagggcactgtcagaccctgcgcccgcactctgcggagctgtcaggatcttc

SEQ ID NO: 94661 - DNA, 1079 bp, Homo sapiens
ccacgttggccaggctggtctccaactcctgacctcagacgatctgcccaccttagcctcccaaagtgctgggactataggtgtgagccaccgcgcttggccttatctctggatttctagctacagccaacatcaacttcttttttattatttattattaaatacatgtctgatgttagttccacatatgatttattttgttggttgttattttctgagtcgtaaagggaggggttccagtgttcaggaagcccaaaatgaatgaaatttgcttgactgcttagcaacctcctacctaaaaatcaatcttttgagccgggcgtggtggctcttgcctgtagtagtcccagctactcaggaagctgaggtgggaggatcctttgagcctaggagttcaaggctgtgataagtcatgaccatgccagtgcactccagacgaggtgacaaagcaagaccccctgtcaataatcaatcaatccatctgtttgtagttatgcccaaggaccaggtacaggaaaggagtttgccctgaagctgcagataccctattttatgtcagctgtggacaggctatgaataatatttacgacgaaagaaggtagtttcagtttttaaaaaaaatttaaatatgtcttgcttctttgaacagtcatacttttagtttttaaccagtttattttgtgtaggttgatgtgaggagcactttttaaaaagtgttaactctgtggttaaaaaaaaatcaaaattgtcattcagcttcttaatttcctaaattagcctctgactttgattgattggtttgctttgagtttgtgctgaaaactgaactgaatctttgccaattcagacagcaatactgtgacttgatatcttcttcttctttttttttttttttttttttttttttttttgagacagggtctcactcctctgtcacccaggctggagtgcggtggggtgatcacagctcactgtagcctttacctcccaggctcaggtgatcctcccaccagagcctcccaagtagctgggactacaggtgcacaacaaagcccagtaaatttttttgtaaagatggg

SEQ ID NO: 94662 - DNA, 1082 bp, Homo sapiens
atttgatttttgtatatggtgagagataggtatctagtttcattcttctgcatatgttcttggcacctttgttgaaaatgagttaactgtagatgtatggatttatctccgggttcactattctgtttcatttgtcaacatgtctgtttttatgccttgctgttctgattactactgttctgtaatataattttaaaaaatttttttgagacagggtgtcgctatgttgccaaggctggtttcaaactcctgggcttatgcaatcctcctgcctcggcctcccaaagtgttgggattacaggcatgagccaccatgcctagctctgtaatataattttaagtcaggtagaacagaggggacaagagtgcaggggttcacatgcagagtcagaaagggaaagaagaagcaagaaattcagactccatgtgtttgagagatcaagaaagactaaaagccagtctgcagcaagcactttggagagtgaatctgagtggagagtaacgtggagtgtcaagagatgtgcagaaaatccaaagaagtctgaggacattgtgtgcatcaagaaaagaagaaccagaagtcactgggacagtgatgatacttaacgtagaaatctaagtgggaaaaatataacaaagttagttttgtgattaaaaaaattttaagtcaggtaatgtgattcctccagttttgttctttctgctcaggctggctttggctattctgggtcttttgtggttccatatacattttaggtttttcttttttgttttttgtttttttttcaatttccatgaagaatgtcattaggattttgatagggattgcattgaatctatagattgctttgggcagtatggacattttaacaatattgattattccaatccatggacatgaaatatctttcaattttttgtgtcctcttaaatatctttcttttttttttttttttttctttggagacagaatcttgctctatcacccagcctggagtgcaatggcatgatcatagattactgcagccttatacttggaactcctgggctcaactgatcctgccaccccagcctcccaagta

SEQ ID NO: 94663 - DNA, 1049 bp, Homo sapiens
aaagtggaacactgataacactctgggaacagaaatcgcaattgaagaccagatttgtcaaggtttgaaactgacatttgatactaccttctcaccaaacacaggaaagaaaagtggtaaaatcaagtcttacaagagggagtgtataaaccttggttgtgatgttgactttgattttgctggacctgcaatccatggttcagctgtctttggttatgagggctggcttgctggctaccagatgacctttgacagtgccaaatcaaagctgacaaggaataactttgcagtgggctacaggactggggacttccagctacacactaatgtcaatgatgggacagaatttggaggatcaatttatcagaaagtttgtgaagatcttgacacttcagtaaaccttgcttggacatcaggtaccaactgcactcgttttggcattgcagctaaatatcagttggatcccactgcttccatttctgcaaaagtcaacaactctagcttaattggagtaggctatactcagactctgaggcctggtgtgaagcttacactctctgctctggtagacgggaagagcattaatgctggaggccacaaggttgggctcgccctggagttggaggcttaatccagctgaaagaaacctttgggaatggatatcagaagatttggccttaatatatttccattgtgaccagcagcaggcttttttcccccaagaagatgatcaaaacaaaggatgatctcaacaagagctgtattttaagtatttagacagttctttgttagctggtttctagttgaattggttatctagttaccaatgctgcagtcctgcagtcacctatacattatttaaatgtatttaactgttaaatgcgctacccaccaataatgaaatagacctttatgaaaaaaaaaagtctaagaaagctgaagtttttatattaacataagataaaataaacctcaagacaggaataccagctgggtgtggtcactcacacttgtaatcccagcactttgggaggccgaggcgggaggat

SEQ ID NO: 94664 - DNA, 1062 bp, Homo sapiens
aatttttttgagataatttatacgcatataagtgagcattttcatccggataaatggatacttttgactatatctgtttattacttggaggtaggcataataatttaatatcaaaatagtatttaattcccatatttgagatatttgtgtaaattatgactgacattaggctggcgatcatgacagatgttatacagaaatgtgggaacaatagggataatgatgagaacagattctcttccatatcatttaagtttgtatcaagtaaactggattttgacttaaaagagagtttgtgatttgggagagaagagtgtgtgagaggtgtgtgtgtgtgtgtgtgtgcacgtggtgtgtgtgttatgttttagtttgaaaatactaaaaaatactagatgttattcttttcctctgaggtagtttttcctccatgtcttaggtcacattatttaagaagacactgagaaaaaatgaactactactcctgaattctgttcattttaagggtgggaagtgtattccagttcatcactatcaaccactgccaaggggaaatagctgtgagcaagtgggttatctattgcatatgctatcatatcatgctaacttctgccttaaaaagtaatccaggctgggtgccgtggctcacgcctgtaatcccagcactttgagaggctgaggcgagtggatcacgaggtcaggagattgagaccatcttgaccaacttggtgaaaccccttctctactaaaaatacaaaaattagccaggtgcagtggcgagcgcctgtaatcccatctactcaggaggctgaggcaggagaattgcttgaacccaggaggcagaggttgcaatgagccgagatcacgccactgcactccagcctggatgaccgagtgagactcagtctcaataaaataaaataaaataatccaaaagaattgtattatacttttagaaatggatagctgtacctgaaaaatgcccttaccttggtggctcaatataaactaagactaggtttgtgggcttgtaagaagacatctgaataatatgttttatgt

SEQ ID NO: 94665 - DNA, 2320 bp, Homo sapiens
ttattttttgcttctttcattatgctttatagtacttacatttatcattttgatatttagtgcaaagaaatgtgctgcatgcattgagcatttttctacaagtttttttccccctgatgtgctatttcacatatcacaggccttattttttgaacaattgagcaaaagaaacagatgaaacctcatacaaaaccctccaaaatatgaaaatgtggggtttatttgtgctaatgctcttcttttggaaacatttgtgttaaaggtaaggtcaatttattgatttaaaccacattgtatgtaaaaatgtattatccatgattaaactttctaagacattgttcttgatagaaaagattttctaacttgtggaataaaaagatttattttgcaagtgtcagaaatattaaaattaattattcccaagttttcttaaatattatgcaaaactttgatctacagctttgacataattttctaggatcttatggttggtgatgaggcaagtgaattacgatcaatgttagaagttaactaccctatggaaaatggcatagtacgaaattgggatgacatgaaacacctgtgggactacacatttggaccagagaaacttaatatagataccagaaattgtaaaatcttactcacagaacctcctatgaacccaaccaaaaacagagagaagattgtagaggtgagtttttatgcaggatatgcatatgtgtatttctgtgatattatgttaaatcaaaaattttcttactgttgctatggataaagagaataaaaataattgttttccttcagatcttattaagtatctactatatgctagtcattattctaagtaggaaagtaggatagatcagtaaacaaaaaatcctactgccatggagtgtatatattctaacagggaaaaacagaccaaaaaaattaagtttttaatttagtgagttaattaagttaattaagtttttatggaggagccagcagaaggagactgaaaaggctaatacaataagcagttacagagttaattaaatggtttgttagaaggtgagtgatccagttgacccatgagcaatgcaggggttaggggcaccaaccctccctactcacgtgcaaacttaactaccacccaaaatacttaacttctaatagcctactgttgaccagaagccttactgataacataatatgtattatatactatattcttaacaataaagtaagctagaggaaatactgttaagaaaatcatggccgggcgcggtggctcacgcctgtaatctcagcactttgggaggcggaggcgggcagatcacaaggtcaggagatcgagaccatcctggctaacacagtgaaactccgtctctactaaaaatacaaaaaattagccgggcgtggtggcgggtgcctgtagtcccagctactcaggaggctgaggcaggagaatgacgtgaacccttgaggcagagcttgcagtgagtggagatcgtgccactgcactccagcctgggcgacagagcgagactccgtctcaaaaaaaaataaaaaatcataagagaaaatacatttactataccttaagtggatgtagatcatcataaagatcttcatcgtcattgtcttcacaccgacgaagaagaggaggggttggtcttgctgtctcgggtggcagagacagaagaggtgcaaggggaggcaggaaagatttattgacaaaaatcgtgtataagtggacctgtgtggttcaaacttgttgttattcatggatcagctgtagatgctaaaggcaaaataaatcaggttaacggggagtgggaggttgtaattgtacataggttgtgagaaggtgatgtttaaacagacagggtaagtgagttagccagggtatataggagaatggtattccagataaagggagtagccagtgtaaaggtcttaagttaggaacaagcttggtatattaaagaataagcaaggaagccagtgtggttgaggagagagcaacagaagatgaggtcgagtaagtaatattggtgccttgtaggctctaattaggaattgggcggctggaagtggtggttcaggcctgtaatcccagcacttctgggaggccgaggtgggcggatcacgaggtcaagagttcgagaccagcctgaccaacatagtgaaacgccatctctactaaaaatacaaaaattaactgggcatagtggtgcgtgcctgtaatcccagctacttgggaggctggggcaggagaatcgcttgaacccaggaggcagatgctgcagtgagccgagattacaccactgca

SEQ ID NO: 94666 - DNA, 1063 bp, Homo sapiens
cgctctattgcccctgctggagtgcagtggcgtgatcttggctcactgcaagctctgcctcccgggttcacgccattctcctgcctcagcctccccgagtagctgggactataggcgcccgccaccacacccggctaattttttgtatttttagtagagacagggtttcattgtgttagtcaggatggtctcaatctcctgaccttgtgatccgcccagctcagcctcccaaagtgctgggattacagacgtgagccaccacgcccagcctggcataacatttttaaaagcaaaacagaatgtgataagagcagttacctaaatctatttaatttacctttttttccccaaatatattttaggaaaaattgttgttggtaatgattttggttacagaacagatgtatttataagtactagtgttccggagaacactgggaaattttaatcttttgctgattagtacctgattattcttggtttctagctcccagatggacgtatcatcaaagttgggggagagagatttgaagcaccagaagctttatttcagcctcacttgatcaatgttgaaggagttggtgttgctgaattgctttttaacacaattcaggcagctgacattgataccaggtacattagaagtggtgatttcaaagttatttatcagaaaaatcataaaaatagttttaaagttatttatcagaaatagatggaattaaatagaatgactaagtttataaacttacttgaaataatttcagacttacggaaaggttgcaagaaaaatgcagaaaacttatctgtatcctttatctggatttaccattttactaattctaatgttcttcatgtttgctttttcattctgttttttctgaaccgtttgagggtagattaaatgcatcagttctttactagttggtgtttcctaaggataaagatactctcttacatagtcatgctgatttcagatcctttggagatacacccagtagtggaattgctggatcatatggtagttctatttttaactttccgaggaacctccatactgttttct

SEQ ID NO: 94667 - DNA, 1190 bp, Homo sapiens
ccatcacggttggaacgagaacttaaacagctttacttagaacgagttttgaagggtgatgtggaaaaactttctgtaagtattagtaaatcaactattactaacattcttttaaaaggctatacagtagtttgtgaatcttgacaaccaccagagggagcaagacgtcttccaaaacaaattcctactgcagtcaagtgcatcctggaaatgatagcaagaaggaaatagttcaagataagctctggtcacctctatagagttggtggatggaggcagtgaggtcagggccaaaagttctggttcatctgtaacaaccagcacggactctgaggcacctgtatatgcatgagaagaacctgctgtactatagggaaataaatgccccacttgagttttgttctttttttaaacttattttttggatatgcaatcagccttcagcacttctcttgggctatctcatatttctgactttatttgttgcatatgttgtcttctcagtcagattgaaaaacatcatgtctcaaaattttttgcattccggtgactgtcataactcttgaaacagactttaattggttgttgttggtatgtacagtagaaagaaatttttaaactagaaatagttgatgtttctttggcataggtttttgtgttttttccaccagactctggactatgtgaagtatacagtatgtgctgtatacttaaccaagagttatctaatcctgagttaatctctgagctttgtctcactgactttgatcaactgttttagataatgagattatgtattacagagtactgtatgttacatctttcatatatgactcattgttgaaattaaattgagtatgggctcacatacattaaacagattaacagactggaaaggagccatactgtctaagtacttcacttatttttctgattttattgagttttacatataatttataattaatctcaggtgatcatttattcagcaaacatttcttgaactcctgggtgccagacataggtctaggtgccggggacaaacaaaacaatgaaaacagaatccctgcttttagtctaaataatgtattagtggtaataagtgatatgaagaaaagtaaggtgaagagctggaaaatgttagtggttggggaggtagtgtgctccttcataaactgtgatcaggaaag

SEQ ID NO: 94668 - DNA, 1457 bp, Homo sapiens
tcctgacctcgtgatccgcccgccttggcctcccaaagtgctgggattacacttgagccaccacacccagccatgcaagtcctcttatccagactttgcttgacagcaaagtgactttcccaagtggtcatctgccattggatgggaaatttgctctaattatgtcttggatgtttggtctctcagtagggtgttaagtcatgtaatttactgatcaaattaggacactcaagaatggaaagggtggtattaataatgatgggacaccacgtgtaaatcaggactgttccaagcatgctgggatggatgtgtggtctcctaaacatgagctttgggcaaattactaaatgtttctgtacctcaggtaccaaatattacgttctacttatattacaggactgttgcaagtttgagggagagcatatatttaaaaagccattttcataaagcagaaagcactgtgcacatgtaccatttcattatcctttctttctcctttagaaatttaagatccgcattgaagacccaccccgcagaaagcacatggtattcctgggtggtgcagttctagcggatatcatgaaagacaaagacaacttttggatgacccgacaagagtaccaagaaaagggtgtccgtgtgctagagaaacttggtgtgactgttcgataaactccaaagcttgttcccgtcatacccgtaatgctttcttttttcctttattgccaatctttgaactcattcaactccaggacatggaagaggcctctctctgccctttgactggaaaggtcaagttttattctggtgtcttggggaagctttgttaaatttttgttaatgtgggtaaatctgagtttaattcaactgcttccctacatagactagagggctaaggattctgtctgctgctttgtttcttctaagtaggcatttagatcattcctataggcttcctattttcactttactgctctaatgctgctagtcgtagtctttagcacactaggtggtatgcctttattagcataaaacaaaaaaaactttaacaggagcttttacatattactgggatggggggtggttcgggatgggtgggcagctgctgaaccctttagggcatttcctctgtaatgtggcgctttcaactgtactgctgcagctttaagtaccttaaagcttctcctgtgaacttcttagggaaatgttaggttcagaactaaagtgttttgggtgggttttgttgcgggggggagggtaacaatgggtggtcttctgatttttatttttgaggttttgtcaactggagtacgtagaggaactttatttacagtactttgatttggcaggttttcttctacttgtgctctgcctggagctgtttccatatgatataaaaagcaagtgtagtattccattactatgtggcttagggatttatttgttttttaaaatca

SEQ ID NO: 94669 - DNA, 1191 bp, Homo sapiens
gccagtgtcagaaaatcctatttatgaatcctgtcggtattccttggtatctgaaaaaaataccaaatagtaccatacatgagttatttctaagtttgaaaaataaaaagaaattgcatcacactaattacaaaatacaagttctggaaaaaatatttttcttcattttaaaacttttttttaactaataatagctttgaaagaagaggcttaatttgggggtggtaactaaaatcaaaagaaatgattgacttgagggtctctgtttggtaagaatacatcattagcttaaataagcagcagaaggttagttttaattatgtagcttctgttaatattaagtgttttttgtctgttttacctcaatttgaacagataagtttgcctgcatgctggacatgcctcagaaccctgaatagcccgtactagatcttgggaacatggatcttagagtcactttggaataagttcttatataaatacccccagccttttgagaacggggcttgttaaaggacgcgtatgtagggcccgtacctactggcagttgggttcagggaaatgggattgacttggccttcaggctcctttggtcataattttaaaatatgggagtagaaaacaacaaagaatggaatggactcttaaaacaatgaaagagcatttatcgtttgtcccttgaatgtagaatttgtttttgatttcataattctgctggtaaatgtgacagttaaaatggtgcattatgtatatatattataatttagaaataccattttataattttactattccagggtgacataatgcatttaaatttgggatttgggtggagtattatgtttaactggagttgtcaagtatgagtccctcaggaaaaaaaaaaaattctgttttaaaaagcaatctgattcttagctcttgaaactattgctacttaaatttccaataattaaaaatttaaaatttttaaattagaattgccaatacttctacatttgagaagggtttttttagaaatacatttagtaaagtccccaagacattagtcttacatttaaacttttttctttaaaacatggttttggtggttaacttttacacagttctgagtactgttaatatctggaaagtatcttgagatatcagtggaaagctaaacagtctaaattaacatgaaatacttcattt

SEQ ID NO: 94670 - DNA, 3304 bp, Homo sapiens
cagtaatttcaggaagggtctgtttcttcacggagcatcgtgatggagttatcgagaaaggtgcattttggacggctagggagggagaaggtggggtgtttttttgtttgtttgttttttggccgctgctgtaaaataatgtctcctctcctacgggacagccgatgccaaggccctaccgccaggtgagcttcccggacgacgacgaggagatcgtgcgcatcaacccccgggagaagatctggatgacggggtacgaggattaccggcacgcacccgtcaggggcaagtacccggacccctcggaggacgcggactcctcctacgtgcgcttcgccaagggcgaggtccccaagcatgactacaactacccctacgtggactcctcagactttggcctaggcgaggaccccaaaggccgcgggggcagcgtgatcaagacgcagccctcccggggcaagtcgcggcggcggaaggaggacggagagcgctcgcggtgcgtgtactgcagggacatgttcaaccacgaggagaaccgccggggccactgccaggacgcgcccgactccgtgagaacttgcatccgccgggtgagctgcatgtggtgcgcggacagcatgctctatcactgtatgtcggaccccgagggagactatacagacccttgctcgtgcgatactagcgacgagaagttttgcctccggtggatggctcttattgccttgtctttcctggccccctgtatgtgctgttacctgccccttcgggcctgctaccactgcggagtgatgtgcaggtgctgtggcgggaagcacaaagcggccgcgtgactcagtttccctcccttctccctccatccgcagccacaggggaactcgtctcttacatactctcatcttctcccccgctcccttccactccaaggagcgaggagggcaagcggcctcccagctccctggtacctcgaggcaccattccagccagggacgctgccgggtagactctccactccccctgccgcccacactgcagcagccacatccatacacacacgctcgcacagtgttctgaggaaggaaccttcgccacagactcctgtactattaacaatctgtaaccaagctaactgtctcatccatgtgttgatttcctgtttcctcctcccccgcctcttccagttcaaaggagtctgcaattggaactgctgattttcggtgggttttgtagttgatttttccaagagcgtcgaagactctctttctcttggttcaccttgcctgtcgctagcaagcatctggttcagcggaaatgggatgtgagaatgatgaaacccgacagaagtatctcagcctgcagtcagttattatgtataggaggtgagctagttaacaaacttgtaccacaaaacaatatcgctttaacttttctaaagccaaatttcccatgtaagctgcagtttctatctttagcccatcatcattttctgcccccccaaaatctgttgaaatgattcactgatgcaaaacattcacccgtaatagactgagaattgagccttaacttcagattaacttgtgagaatcaggaaaattccttcaactgcattgcatcctcttggaccagggctagaatggggatttcaggtttctatgagcctccccattacccctaaagtagaacattttttaaattgtgttgccaccacttctaaaaatttagcaatattagaataggatactagtgaagtaagaaattttgcttgttgttttgcaaaccaaatagtttcctcaaacacaaatcagtgttcccacgaacaagttccagttgagaaacactaaggttatggtgaataaaaccatagggagcttcttccccccaacccctggctattttatattaatggggagaggggatttttaaatgtcataaatttgaagagtggtgggttgcattttcttcatgggtttatgttttcgtttcattttggactcaatttcacatcaccaaattcctcatttatacttggggaaaaaacaaggccatatgtaaaaacccttccaatgcctaagtgtctttctcctgcaactccaaacccagactcgccactttgggtgcacaggtggttaggtcagccaactggttctgcctgtcgccttgccacggaggaggcttctaattagctggaaaagagtatttttctaatacgttgcaaggattagccaaatcttcttattgaagaaagaagaaaagtgaagagtggttacctatacctagcatagtacaatcagaacctcgtggagaccaccggggacaggcttgcggacgccggctgttcttcccgccacgatctttctgtggtagcggccagcagaagacatggcctgctccccactccctttccccactccttctttattgcacacaggacaccagtcttcaaggaaagggacttttttccagtctgccaatcatattgggaaagtgctagctgtgctcaccttcatggggctgtttccagctcgtccacaagctcatcgattttctttagtagattaccggtgtaaatacccagtgtgcttatgagtcagttagtagacgtcttcattcattggagtaactggtttaggctttccagtttggaaaaggagcagagagctgtccatctggattgatggaagaaaagagaacctcatccatgcctggagaacatctagaaaaccttcagccagcctccagtgctgtcgagagaccaccttcccccgacccggaggcacttccttggggtctttctctagggtctcttctctacaaagcacaacactaatgttcgtttccttagacctcagttcaagtgcccctatttatttcaataagaacgcacatatcccagctgttttttgtttgtcacctctatttagttgttacctgtttctctcttctttcaccccttgtccttttccacccttttaagagttacgctagcagatcttactccacgtatactttttggtttgtgaaggcatcggttaagggcacaaagacagccatggggacatttatgtaaatacgtctctaattgccacactgcagctgaacagtgtgtagtattttcccagtcagctttgccatactgacgtcaatcatttgagagaaattattcagattttatttttgtatctgtggtaacaaaacattaaccaaaagattttctgtccagaagcctccccgaccccccaagctatttgctcacattaacaaattaaagtgcctgaagcataattcattctttacctgtatactaaaa

SEQ ID NO: 94671 - DNA, 1052 bp, Homo sapiens
ctgcactccagcctgggtgacagatcaaggctctgtctcaaaaaaatgtatagcaaaatagaaattttaaatcccattttatttttgccataaccccaaggaagattttggcccaattttacagatgtaaacactggagttagagattaacttgaccaaaatcatcttataattagcagagaatgattcaaatctaatctgcctgagctgagaccctgttgtttttagcattgtaatactcccctcgtttctgttgttcagtgcctcatattaggttgcacacttcttaattggacatcttttttttttttttttttttttttttagacagggtcttgatttgttgcccaggctggtctcgaactcttgacttcaagcgatcctcctacctcagcctcccaaagcgctgggattacaggcatgagcagctgcacccagctggacatctttttagcaacaggcattgacattgagtcagagtcaaacccaaaggcaagagtgtttttagagggtacatttgcaggtggcaagggctgtgctccctgcatcatagtgcacaagacctcccagtgtcagctggggccagatggcaatgccagcctcagtgtccacagcaggagacattaaacgcccactctgacctgctctctcaggatgctgcagtcatgccttctaggagcctgaagtccccgagcacagagtagtcacaggggacctctgcttttgttcttcaaagccctaacagttcttagacccccactggagagcaaggggagtgtagatacagttgggagcatgtgattgccaactttttcattgaaggtgacagctttcagattggtaggttggtaggtgtcagtagcttgtgcacagaaataacagagagatgtttaagaatcttgcttgtgtattaggtatgtgcatacctcaggtgggctgcttttctgcagcccacggaaaccagggcagagttataggagagccagttcagaggtgcatgagggtaaaaggagattttttttcccctttgcctttcttggagatgccctggt

SEQ ID NO: 94672 - DNA, 2822 bp, Homo sapiens
tgttgctcacgctgcagtgagcaacactgcacatctgccacacagcacagcagtgtcagctctcccaggtctgtccaaggttgtcttaaagtctttgctcagatttaggatgaccagctgccctggtttgcccaagtctgtcctggttttagcacaaaatgtccctagtcctgggaaacacctcaatcccaggcaagccaggacaatcgcttgccctatttggagtcttctgtgaacacgcttccctccctggcatcaggggggaaagccagcagtatctttcctgatgagtaattaaacatctgataagaaaggcctgcaggctgacttaaggttaggcccaagtgtgctaacgcaggaaagggtttttagctgttttgacacagcttgagttaatgggatgtaactggaaacaaaatgatttctcagcttgctgcttcagttaaatcctgtgcttctagaagttaattaacaaatagttcattgcctgcctgctgtgtgcttagagcagcaagttacgcgggacagcattttctttctttcctttttatttatttatttattttcaaagatggggtttcgctgtattgcctaggctggttttgaactcctgggctcaagcagtcctccaacttcagcttctcaaagtgctgggattataggtttataggctttagccaccacgcccagcctggacagcattttcaaattctgggccttgacccacaataagaaatatatgtatgttgtgacccaggacacatatgtcaatagaaacctaaagcaaatcatatttcatcctctgcattctgattttttttctgtttcattttcttccattttttattataaaacttttcaagcacacagaaaaatgtaaagaatagtacagtgaatgcctgcataccgtacacctaacattcagctgttgtaacatttgggcacatttgcttgatctgtgcaagcgtgtgagcttatacacacacagatatttttgttgttgatccatttgaaagtaagtcacctctcgtactttagcatgtgtcccctgaggttcacaaaggaatttaagggcagtgacactactctgtatgtcaccgtaatggcagatgcatgtcattatgcatttgtccaaacctgtagcatgtataacacctgaatcctaatgtaaaccgtagcctttgggtgatagtgatgtgtcagtgtacttcatcgattgtcacaaatgtaccaccgtggtggggatgttgataatgggggactttgcatgtgtggggacaggggaaatctctactttccactcggttttgctgtgaaactaaaactgctccaaaaaaaaagtctaataaaaataatttttaaaagaaataaggcattttcctgtgtaaacacaccaccattacgatcccttagaaaattaataagaatttcataatgtcatctaatatccacttcatagttccccagttgtcccaggagtgtcttttgtaagctggtttttattttatattttaatatattgggtgcaacccattaaacttgtctcccattgtactcatggtttgcaactggtgatttgaaaaaccattaccttgggaatacaaaggtatgtgagccatggctccaaccctcaaagagatcacaagatggtttgcagaaatgagactgacccatgagaggcttacagactgtgaaaagtagtctggttgagagatgagggaggggcatgggatcaaaaaagtcctcgctgggggtgaggctggactgaacctctcagttgcatttgaacggggttcaagaaggggctttgagaactgggagccacaggggcaaaggtggaagcaggggtttgcgtggtgcatagcctgatcattgccgacccaacctgacttgaactgagtgtgcagagggggtttcaggaaatgaactcagttgtccttccttggattggctggtgtgatatagctcccaacagacttcctatagtgctccgagcagatcctctcaacagttggcatgttgcttacatctgttcctttgtcacgttttgagagacaaacaacagcaggcgggttaaaaggtggcttcctgtgctccagagcaaacctgtcattcgcagctgcttcccagctacctgccagaagtgatttatagaatcagaagagggtgagagggaaagggatgatggaagccagaatccctcctggttttgtcctttaatccacgggggatccatgtgctactctaggctaacaccaaatgcctggaagaaagtttaggagcagccctgctgcttccgggcacttgcagactcactgcagaaagagcaccacttaatttcttgtattctgtatagaccctggtgtctgcgatcaattgccttcattccatttgtttacaaacaaggacctattaacaatagtacctcctttccctagaaaagcccagtaattaggccattgactcttaggaacacactccatcagggcttacaaaccaggtcccccttcatttatgagctccctgtcattagattttctgtcctgagataatgaaatgtctggaacctagagccagggacatgagcactgctttagctcacatgtggtccacagcttcccagagtggggttgtgttctaaaacttactggtaagacagatatttagaacttggaactcagcgcagttgtgtctaatgacatcccagccccctcccatccacctcaggtgttgtctaaggcatggatagagcacatagttaaaaccaaagcaccaagacaatgttggttttgtcctagatgggcttttgggtatttgcaagt

SEQ ID NO: 94673 - DNA, 1107 bp, Homo sapiens
attcatggagcatgccattgaggtttggatggtggcaggtaaaacagaaaggcaagatgtcatctgacattaggctacttataaataaatgtttatctagcttttatttcatgccctaatgaataaaacatgcttggaaaaagaaagtaacaagaagtagtggtatcatactttgtgggtttttttgggttttttttttttttttttttttttgagacggagtctcgctctgtcacctaggctggagtgcagtggcatgatattggctccctgcaacctccacctcccaggttcaagcaattctcctgctgagtagctgggactacaggtgcgcgccactacacccagctagtttttgtatctttagtagagacagagtttcaccatattggctaggttggtctcgaactcctgacctcaggtgatccacccacctcggcctcccaaaatgctgggattacaggcatgagccaccgtgcctggcccatacttctataaattattatccatgcttatagataaatactttggaaagtaatcatcacctcccaagggtgggggattgacacttcataatatatggtcttatggaggaactcaaatgttcagttctatgttatgaaggaatctatgataggaaggaaaattgaatgtccaaaatctgttttaaattcatggccctaaacatggaagaacactacttctatctgtatttgatcatggagtgtatactcagaagccaacagatgattcagaatgtgcaggattgtgcaggatcccacagagaaaatgcaaagacaccacaagaatatgtcagtgttacatctgagaccctttacagcagcatctgttgggttttatgtgttaagtgtacaaatttaaccttcttttgcaagcacttcttatagtttaaaaaaatttagaaaatagataagacagaacaatttgtaaatgttacatgtgggttaacagaaatgttattttcacatttgatttcatttctgaaaatttaaagggagaagacagctaattttaagaagtatttgttcaggaaataccctatataatagtcaaataatgaaaacattcttgtttataatatttttg

SEQ ID NO: 94674 - DNA, 1058 bp, Homo sapiens
aagggaatggtagatcttgggttgggggggccaagggagatcagttgggtggcagtggagggtgagccatagggggtcatagaaaatctggtggctttgcctttagcggtgagtgaggtgagcagggctgtggggcacagggactgcctccacgtctctggccaattgtggggaccaggttctgagtgcccagggtgagggcgtcttccctgaggcccagggaataatgggggttctttgttactctgcaactttgtttcctgagaatctgttataacgcctggcatatacaacacgcaaatatatgtttgaatgagtaaaaatgaattctatccaaagaaagaaaacagcaagtgagaatgtaatggccttgccaaaaatccaaataaatttcccccaaaagtgatgaagaatgaaaagaagctagaattggtctctgggggagaaaaaggatttttggcaaatgtgcagaagaacttattgtgaaattgaggttttagactggaagaaataaaatcataaacagaagtctacaaatatgtaaagggttattggaattgaaatattttcctacctagatacgtgatttcatggtgaatttatgatttgcaagtagattatcctattttatgctaaatgagattcttggctttataaaatgttaaaacttggtcattcattttcaactcattttaaagggttgaaaccataataccgtcttaataggtttgtagtctgggcgtggtggctcccgcctgtaatcccagtgctttgggatgccaacatgggtaaatcacctgatgtcaggagttccagaccagcgtgccaacatggtgaaaccccatctctactaaaaatacaaaaaactagccaggcatggtggcaggtgcctataatcccagctacttgggaggctgaatcagaatcgcttgaacccgggaggcggaggttgcagtgagccgacatcgcgccattacactccagcctgggcaacaagagcgaaactccgtctcaaaaaaaaaaaaaaaaaaaaacaacaactaaaaaccaaaataggt

SEQ ID NO: 94675 - DNA, 3041 bp, Homo sapiens
cctcagaaaagcagggacacagtgaagactggacggaagagcctgttttctcctcttgataaacatagagcatagtgccctggcactgtgagctcacaggaaagtgttagtccctgtttaagtacacgggttcttttactagtactctccattgagtgtatttgttggctgatttcactgatgttaaataactgtggagaagcctgttgttaagtgatcttagcccacttttcaccttctgtacatcttacatcatgcaaactggttctctttatgaaacaaacgtttaatgatcagaaaatctcttctctgcctcacagtgcctgctcatccatgtttgagagaagagctgatggcctttgccagaattggctactgccagatctggcatctttgcgatcgagtctttctactgtgggcatttatgagctttcgttaacactgttttctgtaatggcctaccctaaccacacaaacagtacatattttggtggttaacacaaaggccttattttctgggacattatagcgtgtagagcaagtgttctaccttcaggggcttgtacagagcagaaaatcatgttaccaccatgcataaaattacgttatgttaactttccttgcccataaagttcagaatatataaacttccaaaaccagggcagtccgcttttaaaaaattcttgagtagttgatacttaagacgaacacccacaaaaccaccacccgacttaacaaatagaaagtatgaccagtaccctcagcttctcaacacatttgattctactgaagcattttgttgattctttttaaaaagatcactagtcatatgtattttatattcacatatacttcatacacacatatataatattttaaacatataattcgatgaaatcaaagagcctttataaatctataagcacaaggaagaccgggggcgggggatgtgattaaaataaagtgagtgtgcctggctccctgcaagaagttggtgttatatttggctcagctggcgtctgggagttgggctggagaggctgggatcttggctaatccctctcaaggtctggtgaagtggagaagaggctgggaggaagtgaatctaatgttgagcataatggagagataaaggagccgtgtaatcagataagggctggctgtaggaagtatttatgggggaggtaaaagtcccagtctccatccctgaaagaaatggggaggggcaggagcagagggccagttcacagatggcggacagcattattttcttctacaggtatgcctgcagtggacgactaaacctggtctttataaacctgacttctcttgacaattgctggaggtccatgtcaaatttcctcctactgtcaagagcctgacagcttccctgcccctccactctctgatagctggaaagggcaggcagtcgaaacccactcctcagtggccagggaagctggtgtttcaaggacctgtttttgtcactgaggtagcctttcagcaaaaatgatgatggttacaacttaccaaacttctggatctgacacgacctgtaacactactttcagccagcagggtagatcccctattcattttgcaaaggaggaaactgaagcttaaaaagaggtttcttcagctcctgagagggctggggacttcagggccgcctggccctagagcacacattctttgtgagacccagtgctgcctcgccgtcatctcctacacttccttggtttatgtctgtaacgtggcccagacggggcctgctttgaaactggagaacacttagaacataaaggctgaggtctaaaactttcctgtggagatgctaatccagttttgaaagatttttttctctgccttcctatcctgacttacaatgtcacctgcctcttttgcatattgcgtgatcccgggacaggaagccctgtttttacaaaaagtccacatgttgggaacacaaggctttttccttaaagaagccacatttaaatgggagatcctcagtccagccagttttgctcataacacaactaaagaatatggtattgagggctggtcgtccaacaccatttgtaataacattgttggggctgttcagctcaagttcagacactcgggctccattcagttggggtttggacccttggctggagcttcactagatccacaccattacagcagttgttaatttcagaagcattcttttaaaatgttgttatttttgacaaagatagcatgttttgacatttttttctaaggcataccagcagcagtttccttgtgcaaatttttaaaactaatctgcccttgcccttcctgccccatccccccaccactaacaaaccctgcatctgttttaaacagatgttgtttaattctttccagaaagagggggagggaaggtgggaagagagttttcctcctttatacctttttggtagtggagttcattgtcatttctgtgctgggtggggtgaagtgcctgagtaacgtaaatacaccatggataggaagcagttggcacgcagccatgcagctggattatccagacatcctttgcagcttttagtccagcactttatccccctgccttgttttaaatagccagatgcctcagttaatgctggctgtcggggctgttgccggaggagacaaagggggcttctgcccctgagcctccccttcccccaatcccatcacagagaagtctataccctggagaaggcacttgataggaggcatcgaggcaggaaggaggaggcctcagagtgcaagcaaaggccagagttaacagccttgtagtctggacacagaagggtatggtatttttaaattctctaacaaatgggtactttttggaaataagtttatggcactaacataagtaatgcaaacttctctttttcatgtttacttaatcccctcaaagaaacagaacagcacataactgcaacacaaaaaaagtgaaagcatgttttaacaagaggtgcacagagtttcaattcttcaccttagccatctcctgttgagat

SEQ ID NO: 94676 - DNA, 2603 bp, Homo sapiens
tctttccctatttttaagctaaataattgctttgttaccttttcctaacattttctccttttcactctgaatgtagtaaagattggggctggggagttcatgttgagtcaactgataaggcagatagaatcaactgtttgggagaaaaagggtagatctctcttctcttcttggcctgcatttgttccataaatatgtcatggggtttttcttccatgtggctaaagagaatctcacatttgtggatgcgtaaacccagctagatgaccaggttgtaccttttattttcccccagaggatcttattaaacttattaaaactcaattttcatcattttcttgctttttcaaaatacttggataaaccagtttcactcctggaaacttcataattgtgtcataacactggcactgagagaacatatctgttagtctgtcatggtttcaggtctttgtggtttcaagttttttctctactcaaagtatactctcagttgcattttactgctgaaagttttctgatctgcttttgtagggtattttagtggcttaagtttgctaagccctctgccacaactacaggactttaaggccatttttttaaaacacaaagcatgaaaagggatcaaagttgaaagggtctcaaaagtcatttgtggtctctacccctcattttacacataaggaaactgaagctcagtaataagagtttggggtgcctcacccggttgtgagaagatgtgtaatggaggttaggtcaggttaggtcacctgtcctgacttacggcactcattacaacagatccaaaaaggaattacctctattggtgtgaaacttcagcaggatgagtaggatcaccctctagctctgtgattttttcatgtagctgtgttgccagtgttacctcttcatttctccttagaattcctttcacaatcagttgcctatccagtaaatttcaagggaccaagataaggaataacttatcctccagagcacctaacttgaatatgcgcacttctgccaccacacgaggtcctttcaaaagtgtgatcgggggttgtcacagagactgatcttagtcctttatctgtccctaatgtcagtgaccttgaacaagtcccttctgcagtctggattttaatttttccacgtgagagaggagtctagcatagacggtttccacagttctttgtatgaatagcttaagaggtggaactaatgtgaagacctgaactctgccttcgggctgacctctataccactctccaggagggaagtgaagccgtccagcatgcttcagggagaacaggtgccttgactgtgtgttgtttgtttatctgtgtgtttagctctccatctctaatgagggaggtggcagaatcctagaaaaaaaggaactaaatgcattagtaattcttgccatctgagagggcatccatttctagtggacctgtgggaatataaacaggctcttaaaaatcctgtcagcttattgctagcatgatctgctgattttcctccctcctctataggttaaattatcaccttcttttgtttgagagcaggttttttgttttgttttgtgttttgagacagagactcattctgttgcccaggctggagtgcagtagcgtgatcttagctcacttctaactccgcttctcgggttcaagcgattctcctgcctcagcctcccaagtagctgggattacaggtgcccgccatcacacccagctaatttttgtatttttttagtagagacggggtttcaccatgttggccaggttggtctggaactcctgacctcaggtgatctgcccacttcaacctcccaaaatgctgggataacaggcatgaaccaccgcgcccggccagagaacaggtcttattaagggctggcttgtaaaggattttgtaggtttagaatttggtattaacatagtttggtagagtcatttcctgaccttcttattaggttttctttggggtagagggcaggtggtagatagcaggtacacacacacaaaaaaaaaaaaaaaaaaaaaagagggaactggggaactgcactctaaatagcagaaagaaaagtaatcagattctgtttagtaccattatcagcatcttgtagatttagtgttgatttccatttagaaatcaaccataacactacaaatctctcactctcccaatatttatgattttcaggtgttcagaaaagttgaaagaagtgtatgctcaacatccatatgcctaccacctcaagtctgcaattagcattttgctattattgttttatcatacacatatctatccatctatctccatccatgattccatgtttttttaaatgcatttcaaagtaggttgcaaatatcatggcatttcttcctagacatttcaacgggtgggttattacatactcccttcctttgttttctccaataatgtgaaagaaagcaaaaatattctgagaaagtcaggcataggagttcaagggctgcaatttaaagccctaaattggagattattaactttaaacaactcctctttgccatttgttttttgaagtaccaatttttctattacatgtacactttaat

SEQ ID NO: 94677 - DNA, 1035 bp, Homo sapiens
cacatctgagagcagctcagacagttagctgcatcatcttcatagagttcagtgtataagaactacagcaagattactatctctttcttgatttcaatcgaagagatgacttcattcattcatttgtaaagattcttcagattggagatgtccaagctagatttggctttttttgttgttgttgttttcttttaaacacatgttccctgtacccatccagtggaggagatgggttgcctgttgttgccctggccctgtggggctctgctgtttgactgggcctcttgaattccattaaatgaagcacagacagcatgtgtcataaaggctgcttgggaggggtgaagagcaaaattagtgtctgtgggtgggcatgtgttctcatcacgtcgccagagaactgcaatgtgcaaaatctggctggaacctgttccaaagaaaaataaaacagcccctttttccctgctttgagtaatattaaaaaacatcgcttaacccccatgtagaagaaatggaactgtcaggaaattcttgtgattatgtgtgtgtgtttaataatctgtgtgtttaatctttacaactgaggttagaatacaagagatgaaaagggactaatcatgaaaaatattttggtgtattctgttgctggtgttgtagacattgtaagtgttctttctattaaagtagaactgcctaaggattagaggaatttgtcagagctaacaattcagggaaaatctattttgtttaactttcttctgttcttctttgaaatgattttgtaagaaaagccatttttgtctcagtaaaaccagtaccaaaggaaatgtttgtgtttttcttatatatgattcacctggtaccccaaggaacaaagcaaagccaacatttacacttacatttgaagcataagatcttccttttatagttttcttgagaaggtcttgcatatttattaattgctcctcatagtatagaagaatgctttttaagggagggttgtgatgtatgtagtttgcataatggggacatatg

SEQ ID NO: 94678 - DNA, 1050 bp, Homo sapiens
taaaaaaatactttgtgagtcttgcttgttagggacagatgctatagttagtttatagcagtactatttatgctttcctggtctgtctgtccagaatggctaggtcaggacctataacacaactgcccacaaatttgcctaagatttagcatttgtggagcagcccagtgtatagcagtaaatcctgttatcactcagagagcattaaacagatctggggttaccaagctggaaaaatcggcaatctttgtttctcttcccctttcttataaaatccataataatgacttgttttccttgaagtgtatgaattttaagctgtcagtaaatgcattcaatttacttaactacattcagaaattcctataatttggaaaaccagcatgaagggagtttgtttctgtttgttttgtagattaaggggtgtactttttatagaatggccaatttgtttttggagacaagaccatctctaaatttcattaattttgcattctataaatgaaagccacctgttatgctgtaacgtgctaattatggtagaggacaataatgaagaagaacagtatttgaaatatgtgggggttttgctaagaattttcatgcccacatctgtagtgcttatttttatgtgtgtatacatgcatatatagtacacatttaataatagcacttggtgacattaaaaaatacttcagattcaaagtgagggccattttttattaacaacatttttttaagttgtgaaagaaaggctactttaaaagtgttagcttgaactaagacccatattttgccatcttatagtaaacggggttttttcttatagttttggtgaatgccacactcaacttagggttcactttatcaaattcattagaaaaatatacattaattttgttttattttaaagacagaataactaatttcctgtgctttcacggaaacattaggtttcatggtagcattttttttttccttgaggcctatggtaaatgattatagtcagggataaaaaaaacatttattttaaagttcttgatttagtga

SEQ ID NO: 94679 - DNA, 1496 bp, Homo sapiens
ccacatttctttaccccgtcccttatttattttttgctaaaatattcacaacaaaccccagatatcatatcattttacccctaacatacttcaacatgcctctctaaaaaagtagacattttataaacacaatgccactatcccacctataaaattaatccaggaccaaaattttgatgtatactttttacatagcttctgcagctgggtaacctcacagcacaagaatcaacaagtccatgcctacacgaattcagctgataactttaaagagagggatccttgctctcaactttggacgaaattctttggtttggggctgggggcaggtgaagaatttgcacttgtggttctccagaatgtaatctcaggtattgaactgtgccatttgcttcctgggcatttcatcctttcatcaatgattggtaatcataacttacaggaatttttaaaacaatattttaattggaaaacgcatctgtcagctgtcaggcttccagtttccacttttgagaagcaggatgttgaatgtgagtaatgacacaacaggcctataaaatgcggactaaccctcggatgactcatccggtacaatgcagtatatttgtcaaggagactgaatcatatatgggggaaaccacttctcaggcagccagctggttctcaggtcagcaagagacgatccatttttatcggaagctttatagtagcaataatgctaatacccagcactcgggctccacaatgtagaggaaatggcatcgcctggcaggtacgtgcttactgtttacatgaactttattttttcattgttctcttattcttaacctttctggtgcctgcttttagcatttttttaaaggagaaaatttatcctagttgtagaggaccacagtgtgtatgtgtttgtatttgtgtgtgcccacgtgcaaggacagataggtaacctctggtctgttgatagacacagagctcttagcctctcatgcctctttctgaaaacaaatttctccttagatattctgatagaaatgttttgttgttgttgttgttgttttttattattaagtcctgaatctaaaagatgctgcctaggaaacagcttgcagagatggtatacctcttgggtgggtagtgtagagctttaaaacaaatgaataagcagaggtgagctgaaggaggtggtctaacaattactattgtgttacgttggatttctttcagtactgtgcttttttcctacccccatgatgcgtgacttaatgcaagaaagctttattcccctacggagtgaatagggtgggttttgtttgtttgtttgtttgtttgtttttataaatcacaatttgctcatactgaattcatgcattaactttttctaggtgggagaaagggtagtggggatttggtagcaacatttaattatagcgttcacatgatctgaaggatcattctgcataattgggaggctgtgtctgcctgtctgaccctctctc

SEQ ID NO: 94680 - DNA, 1071 bp, Homo sapiens
atttgttaccattttactatctttgccttattctcattgtttgtgcatgtgtgcacacattattattgctattatttttgtatttttcattactgaaatctgaattataaaattcttcaatgaactgtgaacttatttctccaaaatactatagaaactcaaattagactacaagtttattaatttcccccatttctacctgctgcattaaggtaaattatgcttttcaagtgtgtgaaaagttataaaatttcaaggaaacattttgataaggctgcagcctgcagtcctcgtgaggaggaaagaattgtcaaagccaaggaagtcttcagttgaggcccatgcacaatcctaatcagtctggattagtgaggttgtaatttgatgttggatgggactgtcccaaccatttggagccagtttgaagtcctattagacagggtcctttaagaattagagtcagctgtttgctgaggtgtgaacctcagcctgaaacatgcttccatttttaagtttcaggactaagggggccatgcaggagctctgggctttagtgacccctctattttgtttcctgtggtgacttgtcatgttttcacagcgcatcaatatggatagtttttaaagtgacagccagtttcaacagtggttttatttcacatacattggagcttccatatctggattttttttttgtcagccactaaatcaaagctcttcctcctccagatggtttaagacacccaatttgaacattaagtgagtcaagcaaaccctgtgccacattaccaaagggcctgctggtttaagagactatggatgtgacttacataacctctcatggagcatttccaaaaccttgtaaggaagctgggtatagtcacctctccttcataacgttaacactgagccatgaagccagggcttgtgtcctcagagaatgcataaggaaacaatcaccagatcgccctgggaggagaaggcactaggcgtttgttcaggaggttgatgcaacactcacaacagccgcaggatacatgtatcatacctcccagctggaaggcagaaaca

SEQ ID NO: 94681 - DNA, 1013 bp, Homo sapiens
acagctggctgaggcttcttttttcaagagaacataactgaaggcagttagaatggtttcttttgtgcaaatttcccctcccagagaccagtcccaggagttccttcaactgcattatccattaatgctgtggattcatttcccccaaataaacaagttttcctgccaaaaaaaatattcagtatgattggatgcggggatatgtcttgggacctgattttgaggcacgttcttcatttttctgggttggccctcattttccttactgagctcttacgggcagcgacagggtggctgtagccctcatttctgaaggccctcactgccttgttaatcctgtgtgtggctattcagcccccttgaaagcatccttcatttctgtttgcttagtttcctgcatgcctcttccagatcatctttcacctcttgcttcaacctctggggacatgtgtggtttctacataatgcacaaatgtgacttcgggggaggggaggatggctgtggactcatacacttcagctggaatcactggactctgaaataggggaggtcctttctgaatgggctggtcaggaaagaggggagatggaaagaccaacaggcaacctcaggcactgtagatttcccctcctaccgcaagacagaaagctgtgtatgtgttttgcattataaggaaagtgtgaactacagatcctgtggaccaaatcactataaataacactcttgtatctgattctaaattgggacattgaggagaataagggaccaacaaccaacatttctgtaggaaaaagatctggttctttattcacccaaatgttgatcactgggggtcaacgaattttctctatgaaagttagatggtaaatattttcagctttggggaccgtatggtttctgtcacagctgctcagtcctgcctttgtagctctcaagcagccatagacagcatataaacactcgaatgtgtggctggccataatttgcccacctctgagagagtctaaattca

SEQ ID NO: 94682 - DNA, 1016 bp, Homo sapiens
ctcttttagaccagttccccctcccttctccctttggagtggttactcaagcgcagacatatattgggaaaacacaaggtggatgtgaaaccaaggaaactcctgctttgagaagtacagaagtgcagacccacaaccaacctcctaatgtcaagctggcattttaggaaaaaggtgtgtgtggtggggggaattccactggtgtctgaaagcccccaagtaattccctgttgcaaggaggagtctcatgttgacttcagaggtccaggcagaacctgttgaattgcacagttcccatttgctagaggatattacacggtgagatctctctgctcagggaccggggctgagggcttctgtcatcagccagtggagcggccctgcaccgaggcacctccctgcttttgccacattttgcccaccctgctgtctgtcatgtactgaacctttgctggaataattgccataggtgtcaacatgtattaagggcttgctgtatgaaggtactatgcaaagtgccttttgctatgtgcagctaactagcataacaaaccccaagatgccccagaggagatactcttgtttccctgttttgcagatagagaaactgcaggttagagagatgaaataagttgaccaagctagaaattggtgggcagggaacacaacttgggccatgctgctttagagctgccgagtgtttaactgttaaggtgtcattctgcactgcctagaccagcccatgtatgttaccgttccattctgcatgagcatttgtctattatcaagacatctgctggtgcaggctgggacacaacaccaagggagggttaaattctgggttgccaaaccagctgagctacgagttgaggagcactgagcgcctctgagctttgctgggctaacttggtgaggtttggaaatgagcaaaggggtaagaaagagccatgtgtctggagtcaggctgcctatttggtttgacctctcaatggcttcataggttgggctactccttc

SEQ ID NO: 94683 - DNA, 1089 bp, Homo sapiens
taataaataacaaattattttcattttgtaccaggccctgcaaatcatgcagctggtcctgcctatggagatgggactgtaaaagtagatttggctggattgtgaagagctttgcccgtcaagcttgggaacatctgactttattccataagcagtagggagccatggaaagtatgctgacagggttgggagaaaggggcactggaggctgtgagaccagggaggccagcagtccaccgagggaggctgataacaccacgctgggatagacaccgagagctgcagttcccacacctggtggagataggccggctctgggcactgggaaggaggccgagagcggccgttgcaggtggctgaggcttctagctgagcagatcctgcacatcaagaatgcaggagaaagaagtccctcagccagtggcagcgaggcagatgttttgcaggagtggggcaaggctctttccagaaagacccggaaatctctggtgggacagcttgtagaaacatgcactgcagctgctcagctacagcaaatgacctgcagatcaaggtttttgtcagtatcgagagcttcactagaacaaatattcatccaaaaataaacttcccgttcttcctgtttttataacttgcctatttcctctgagtttgaggctgggctccagttccatgggttattaatcttcagaggatcaagacctctatagaagtatttcctgtacatgtttatctacccagccctaaattatattctccaaatgataagagaacttttccatactcgtgtgtcagacttctccttagggagatttcgattaggcaccacagcaagtagggccaaaccagaaagccttatctcagaacatagggaacccacgtaacggtggggagcggcctttggtgggttttgatgggcactcagcctccctcctccatgtgaaaggtagcttctttctggccagagttctaaggacataaagtaatagctgaagagggccctatctgaggatattttaaattccctgttgaataccacaggggatattagctaaagaaattctgctcctttgaagagctcaaaatacc

SEQ ID NO: 94684 - DNA, 1077 bp, Homo sapiens
atggcgcgatctcggctccctgcaacctccatctcccgggttcaagcgattctcctgcctcagcctcccgagtagctaggattataggcacccgctaccacgcccagctaatttttgtatctttagtagagatgaggtttcaccctgttggccaggctggtctcaaactcctgacctcaggcgatcctcccgcccccgcttcccaaagtgctgggattacaggcgtgagccaccgcacccgaccagtcctgtgctttctgatacaatatcatcccccttctttgcctcaccatctcccatgggcatgatcagttaacaattgctggaaaaatcaactttacctgaacatttaggaagctatttgggatgtccagtgtttttcttcctcttgaaaaacactaacgcaggtctgcatttattaggggagtggggatcatcatctgtctcttctgccgctttgctctaaaggaactcaagagcccataagcattttccctgaaaaggtcatcatttccaaagaaatgagagctcatttaaagtttctaggtatgaaaatcctaggttcttgcccttctccttccacttcttggtggcagtgggtagggaatcaaacatcagatgaccttcttcctctctggtttctccccaccgctgtatcagaccaggaaggtgaaagagggtcatgctgactctcctaactcccatccctctgccacgcctcccctccactgcagcactggcatggttacctgtgaagcaactgccaaagacaacatgggcagcctttgtgtctgggtagcccagttcacaatggcggttaatggaagttcctgttcagacgccctccaactccccagagggcgtgggcatctcctcttatgtaaaggggaaatcttaggaaatttttaatttttcctttaatcagtcagcaaggtcataagaggctttgtaagtattcattagaagtggaaagcaggccgggcgtggtggctcacacctgcaatgacagcattttgggaggccaaggcaggcggatcacctgaggtcaggagtttgagaccagcctggcaaacatgg

SEQ ID NO: 94685 - DNA, 2808 bp, Homo sapiens
ctgtcacccaggctggagtgcagtggcatgaacctggctcactgcagcctctgcctcccaggctcaagcgattctcccacctcacctgcccaagtagctgggactacaggcatgcacccccacacccagctaattttattttgcattttttgtagagacggggttttacatgttgcctaggctggtctcaaactcctgagctcaagtgatccactaccttggcctcccaaagtgctgggattacaggcatgagccactgtgcttggcccagggagtagattttctgatgataaaattaacgtgacttgttctagaaaatacagggaaagagtaaatgtgcaaagacttaaatagcatttacatgtagcccacagtgctctaaatgcttttggtggttcacagtttaatcatcataaccctatgaactagatactgttgttgcatccccatttacagaggcatagagacatggagtaattcacccatagccacacagcccttgacagaatctggatttgaactcaggcagttcggatccagagtctgggccattgaccacctcctgcatctctgtagatccccgactccagcctctcctcttgctgcctctctcaacagtaacgatgctgttactccccacgccaaacctctgggctggccaggctcactccagtcccacagtcattgccaggactgcctttgaccttacacagaggaaacatcttccacctgtcgggagggagccggggcggggatttccatggcagagttactgttctctggtgatagagttctttcagttttgctacatggtcttgtggcaaaggactgggtgcaggtgcagccttggttatttctggaaacacttctccttttcttttattttgccaggtctggctcatcagtcaccttcctctcagaaaggtgattttggctcctctgcccagaccatcaaacatttctggaggtgtcacaagcttccgtgagggttctggtctctgcgaattgcaggaagaatccaaacataggaaaggggtgatgtgtatcagggtgtccatcctcagctttgctccacaaagaccctcacacttgcacattgttttgttaacagtattatctctgagtagtgggtttattgtttttgcttacctgttttaaacacttcttcaacaaacttgctttactttccattttttaaaagtgtatttcaattttttattaataatgccattttactcctgcaaaatttctcactccttcaaagtctgtgtatggcaaagatcttcctaaccatcattcaagttagagcaactccatttctgtatcaaaaagaaatacctttagttattgtctgaacttgtcagaatttctgagaacgatgccagaaattctataattgttttgtcacattaattgaacaatgagagggcaccagcattcctcactcatgaggtagaagcaccacatctacatttctttttagctatgggtgatgtttttgcttttaaatcttagaaatctgttaataaacaaataacacaacaaagtttggggtacttccttgtggggactgggatgcttaagctaaaacaaagtttaaatttggactgtgtgtgttatgtttcgcagaatctatatgtttctcaaaagtgggtgtcaccctccttcctcccccaacacacccttcaggggtaagaggagaagtaatgtagaaaaattaactgtttctccactgtaaaagtagggtgtctttagaatgtttcatgttcaaaggaaagattgtgcttctcccaaggcaaggtgttcccttaaaaaaaaaaaaaaaaaaggttgagcatgtctttgtattgctgtctctggaagaggaaatgaggcatctcttggggtgagaacaagggagaattgaactctcgggcctggccagatggattcctcacactggcacagagctgtgaagggaagggcctttcatcctccagaggaaagagggctggggtctcagaggccagagcatagggacaggcaggagtcctgcagccctgatgcctgcccctcccagtacagaatctctgtcctgacccccacctgttgaacctttcaaatcccagtgactcgccagctttctctgtggatattggctgaattggtggcttgtgtggctgcctgggagagcaatttacccctgagccaaggagggggtgggctacagtgagatggagaaagaccattttaattaaagaatagggcctttataatatgaaaccacatgctcagggtttgggttttgctttgggtacctaggaaacatccgtgaacacaacagtagtgtttttagttggggtgtgtgtgtgtgtggtgtgcctgttttggggaaaaattgcttttcaccacccccctcctgcttttggtcctttgtctgccctggaagaatcactggaggggactgagggacttcctgcctaattgataacagcccctaagagcacatggtaaaccctgcagtaggagaccaggacatctcccagccaccctcactgtactcactatactcttatgggctcaagaagtcactgaaaatggagccgtaagcccatgggccttggctaatttttcaaggcccaggatcaagtaggagcaggtactttagctgggagccaggcactgggcaggcagggcggccctgcccacatgccgcctagggctggcatgacctcaccgtcatttgttgggcactgataatgtctttggcccggcccctaataggagacacgcgatctctaccttgagggctcatattcagagtttcat

SEQ ID NO: 94686 - DNA, 2224 bp, Homo sapiens
gatcatttgaggtcaggagttcgagaccagcctggccaacatgatgaaaccctgtctctactaaaaacacaaaaattagccgggcggtagtggcacgtgcctgtgtagtcacagctactcgggaggctgaggcaggagaatcacttgaacccgggaggtgaaggttgcagtgagccgagattgtgccactgcactccagcctgggagacagagccagactccatctcaaaaaaaagaaaaaaaaaaaaaagccttatgattaatcactaaacaggtattgcataaaatagcaattttcagctctggattttggggaagggagtagaggctggaaatgtaggtggagagtcaggctggggagagatgccacattcgcaacattgggttttttacaatagtactgcatctatctctgtgcaggagtctaaaagtggttggaagctacatttaggattatttaaaataacatactgccttatttttatctctgtagcaacaactttttgtaagaaaaatagctagttccatgatcttttgccttttgaaaaggagagatctattttaaactctttgcaggctcctcgaagttccttttcttgctgttgagtagcaggtagaatctctagttcatggaggtctgacggatccatggtcccgtgctggtccatgtgctgccctctgcttccgtccctcatccttgccactctcaacagtcttccccgacaacccttaggaagacaagggcttggaggagggggaggactgagtgtccctggcatgttctgattaatcctattcattgtcaagtacagctttttaatgaactgattcattactgagagtaggtctcatgcaaatccctagtttgtatcctgtggatttaatttctaacaatttcctcatttcaacacaactccattgtaccatgggctttgtgattttgttctaatatagagcttgacctcacattttaagactataagatgaatactaaaaaaacgaaatccttaaaataaaaaataaactagaagaacatgtaggtggatattcaactcctctctaaaggaagaagggttgtccacacataaaagttttggaagagactgggtttagtggctcacgcctgtaatcttagcactttgggaggctgaggtaggaggatcacttgagcccaagagttcgagaccagcctgggcaacataatgataccctgtctctacaaaaattaaaattagccaggcatggtaatgcacacctgttgtcacctgtggttgggaggctgagtgggaggatcgcttgagcccagaaggttgaggcttcagggagccatgattgcaccactgcactccagtgtaggtgacagagcaagaccctgtctccaaaaaaaaaaaaaaaaaaaaagaaattctggaagaaatgacagaggaaatcactgataaatttcgaaacataagtttgtgcaatatcagagacaaatttaacaaatatgtaaaatttgcctccattatgagttaatataaaactatgaagagttcaggagattataaaaagagacaaagacaaccaggagaaaacagataacttaatactttttaaaaaaacaccaggctaacaaaaaagaaatatatagttgactaaataaatatagcacaatatatttaaccctacaaatttcaactaatgcaatgaaaacataatagcagcttttcaactgttattattaccagaaagaaaaatattttaaaatgctattgtggttttggtgagggaacatttttcatgccctgttgtttgagagtagaattcagtgcaccctttctggaaagcagtttggtaacctgtaatacttcttttaaaaaaaaattcatcctcttgtctaaaaatttctcctctagaaacttaaagataatagtcaagtgaaaacacatttatgggcagtgtttaaagttttgtgagtgaaactgttgataagaacctattacaatggttaagccacctggaacattctattgatatattatgcagccttggaaaatagtacttttaaggaatgttaataagatgggcaatacaaaactgaatgaaaatccaatacagaattctgcctacataacatgatccaaattttgcctaaagtttgcctaaaacgtgcatagcaaaagaatttcgggaactacaccagaatgttagcatgggtccatcatttctgagctgtggtgttact

SEQ ID NO: 94687 - DNA, 1415 bp, Homo sapiens
tggaccaagaaattatcttggtttaggtagttgtgaaaagcttgacagaagagaaaggaattgagctttgctttgagtgattagtagggtttaggtaaaaaggaaaaagagagacatgtcataagccacaacccattctggttgccagtgagaaaagttaaccctgctcatttgttcaggatgggggcggtgagggctgggtttattacttggcgctgtctgtggctaacttgtgacaggcctgagtcattttcagggtactcaggagtaaatactgtgataggggtctcagaggccaggccatgcagatgcataagcctggtgccaagatgtagtgtgtatctgtttctttatcaaaatttttctactttggtatttcattcaaaacaaggagagaaaagtcaaatctttttccttttcccttttctgatggctatgactgaatttttttttttcatgaacgattcttgtgttcttatttaaaagaagaatttggcatatggcagacctcctcaagctatctttagttggttgtggggtgtaagtgattaagaatgcagctgtacttgctaccagcacatgcttttaaggagattgctaagcagacaggcctggttagaagtttagaatagcctcttggaaacaaagatctaatttttcaagtgcatggtatacaagagtccctcccttcaggactgaagcactgagggctgtttgcatcagagcagggtgacttatttgtttaaaatggcaacacccttggctctggggaggcggccatgcttcacttggaggagacaggggaagctggcttcacttcactttgtatagtttggcttcactgctcctttggaataaaaaaattctttacttctctagtatgtcccaggacaaacccatctctgtcctgttgctcagttatactacagtgctggttccgtagtcttcaaagcttggaactccctcttgcctttgctccaaaaatttgttctttcactcagcaaatatttaccaagtttctgctatatgcaggaccgtgtggagaactcaaagatgaatcagacgtggggcctgtccacaaatgttgtcagtcaagtgtaggacatagggcaagcacacgggagcttttgctgttgtgtccaagaatagcatgatgcgccgtaggtatttggtgggggaaggaaattagtgggtgggtttcaagtaaacccacatggagaaggtgacatttgagttgagccttgaaggacaggtttatctgtgcagagagggaagttttaggcagagatatagcacaaaagttagaaaacaaaaccaaaacaggtggaagagaggaagagtaatcaacctttaactgcgttgccatgcccttgactgaggcctcacccacattatcccatctaatcctcctcata

SEQ ID NO: 94688 - DNA, 1851 bp, Homo sapiens
taagaagatggaaccagcaggcaaggagagaagctcaagagactggttttatgaggagctgaaatcagactgatgggtaaaaggaagatagcctgggttggtggcctattagggaatgcctctctacacagggaccatgtcataatcgttttgataacattctttcttcttgcccctttagacctctggctcccttgcccagcttttgatattttgttgttgtttgttctgagaagtaaaaatatagctagagctttgcactcggtcatgttagtattttaagacactcccaagagtggaagagagaactgtcctccagttggagttatggggaggttccctgtgctccacctttcccacccttttctgtctacctgtgtgcacggaggcatgagtggataccgcgtctccacgggtgaaaggacaagtgatccagctgaggagagttgatcttttggtttaaccaaaccagacacccaaacctagatttccaaggcatgtgaacagggatgtgcatgacagtcattgacatgaagactcagaatgagataagctttaagttggcagcacttcccaccccctgcagagaggaagtttgcatgccatgcacctaccttcttgattgcagctctcatggctacacagcaatagattagaaccccctcgtgctgaatcttgacttgatgaagacaatcaaaatgccccccaaaatgccccccaatacacaacacacgcacacacacacacctgcagccacctcagtttcctgttaagttattgtggtttgggagtcttcattgtcagttcacattagctgtgaagtcagaatccttctgtcatgggacttttagcaaaaaaaaaaaaaggagccagcgccccatttgagaaagagactatggctcacacctgtaattccagcactttgggaggccaaggcgggcagatcatggggtcaggagatcgagaccatcctggctaacatggtgaaaccccatctctactaaaaatacaaaaaattagccgggcatggtggtgggtgcctgtagtcccagctactcaggagctgaggcaggagaatggcgtgaacccaggaggtggagcttgcagtgagccgagatggcaccactgcactccagcctgggcgacagagcgagactccgtctcaaaaaaaaaaaaaaagagagactaaactttccactgtccagtaacttggaccagagccctgcctgagcctccaaggcaggcagcttgatggagggccctgcctcactctcaaggctgagctctcaggaaaggtggattttatctctaaggaagtgcggctgcctttatcaggccattctggtggaacaggttagcttcctgcaagggtggaaaggaaaacgatgttactatttttagcctgcctcttgtgtacagcaaggtgggctgatgtgctaagcagaaggaaagtgaagtgtgagttgctttctgcccccaaccttccatttccacccctacttcccaaaacctcccccagaggtggaatgtcaggacatctcacatgtggtgcacgaagagtataatgaccaactttatttctacaactagtgaggctccttgtcactgcctttctaaaagcttgcagtcttacaaacaaacttgtgtgcacagacatgagtggataaaatattgggtcctgcctagcaaaaccaggatctttgatttggggggaagggttggtgttgctctctgttaacatttccatttattcttgacctctataaagagtaaattataagaatggggtgggaggattggaaagttggtggatggtaagtttgggtgtcaagtattaagaaatcctggctt

SEQ ID NO: 94689 - DNA, 1109 bp, Homo sapiens
actacggagtactcaatcctaaaggccacctctgtgccttactctagccacccagtgctttttaatagttcctgagtatgtgtttacacaatctgaattttatgaagtccataaagacatatttacccaacaagtcaccagcgttccaaaggtcagctttccttgatttgtatgaaagccacttaactcaaagtcaattaacactaagatagaagccaattaaagcaaggaagtgagctgttcaggccaacattccatccctcacttttgtcccctgttgtagcttaatttcacaagtcccttcaagccatttacttcacacaacctatgcatgtgtggcccgtttcagcatataggaataagtaccatttgtcatgtcatcatgtgggagtgctgtttaaaagcatgtaatttaagtaactattaaacgatgccatattagcacttttgcaaccaattcaatcgccctcccaccgcaagcagcagggatatcacagcaatgttaggaaagaaggaaagagaggctcggtgtccctcaatgttgctatcagagcctgctgttgaatctgagtcttgcctgggtccagaaagtacacaaagtaattcctcaaaagattgctggaggattaaatgagataatgtgggccaagtgctcagcacagcacctggtacgtggaaagcaaactttttttcttttaaaggtagctgctgcagcagatgatgattataatataaaaatggaaaaccctgaaagagaactaacccttagagttagcaattgcagtaggtcaagcgcatcctctgataggttttccacagtgaaggcacctcgaacaaacagtctgaggtccttctgtgcagaccatgacccctgtcccgatggcagttggttgccctgcactgagaaccactctccaaaggaaaagtctacaagtacaataggctccttcccgtctcacgatagaccctctgcattacatctttcaagctaactgattatctataaaagcctcatcctttaggttcttttttgattgggaaccaatttttttttttttttttgagacagagtctcgctctgtcacccaggatgaagtgcagtggcgcca

SEQ ID NO: 94690 - DNA, 1602 bp, Homo sapiens
gagacggaggttgcagtgagccaaggtcgtgccagtatgctccagcccgggcaacaaagtgagaccctgtcaaaaaaaaagaaaaaagaaagaaagaaaaaggaaagaaagaaagaaatatttatcactgcaccagccaggggagagttcacttccgacaaggtgagtcttgagtctttgaggactcagaaaaggatgatggtagtatttaggggaggagacaggtcagcaaggtggagaggagacatctcatgtccaaaggtttcttccacagatagggacactccatgtctgagtttatgctgggggagctcagagaaagccagtcaagtcaggtgaggctaaatttgggaggatattgagtaccagccaggctgacaaagcacgtatttggacttttgttctttgagtagaacagagctggttgaggctttgaaacaaagagacgatgaagtgatatgttggtagaatcaaacagattagttagagagtgcaggctaggctggagtcagggagaccactaataattctgtctgacagatctcagctggatttttctctctgactttagttaaatgcagtgagcctggatatagaaacatatattgtgaagagatagttgttggggaagatggtcaagggggctgtgaaattcagaacaaaattagccaacttattttgtaaatcagacatacagcctagaattaacccaagtgaagttttgtttttgtttggtttcagtattgttacttctcacagcactcgtcagtgaagtggtgaatgctttgccctttctcgctgaagtaaaatggtttccatctgaccataaccttttagaactagagaggatcttaggaaaatacgagctcagctccctcttttttacacataatttgcaatctggagaggctgagtgactaactcagggtcacaaagctagttagtttgggctagatcagtgagatatcatctggttccaggcctgttttgggtactgtgttaaacattcatgacaactgctttgagttactgaaccctcaggagataggaaaaagatggtggaaattaattgagataaaggtggcccaggtagatgttgaaccaccagcattgaacagatggctagccttggtcacaccctgcatgaggtggaggtagatgagcttcccagatgctcttcttgtgtagctctcctgaacatggtaggtaggggtcttaagctttggtttccgcatgtctgtgttccaggtacaggagcactgggagtggaggcagggaagggccttcagctcactatcctgggagagagaaggtgggtccttagatgatcagctgaaatacatgtgaagttccaaggtttttgcacctgggcaccagaaaaatgtttatgaaacattacctatgcttgttcttcccccgctgctccagtgccttctgttctccccatgtgtttgcttttgatgttaactgccaaggtggtgtggtcatagacagcaggaagtaatatctgatatgcaggtctcctggggtggggggaggtgggtgccaggatgggaagggtggcggttttggcacattgttgtgagaactctgtgcacttag

SEQ ID NO: 94691 - DNA, 1802 bp, Homo sapiens
agcaaatgaaattagaactcatttagaatcctgtaaacacctcagaactatgtagtgacatttcttccttgcattcctgttcagctctgtggaatagggagccagtgccaatccaggtggccttttctgtactgagatataaacagcaactctacaaatacttgttttggaaagagtaagccaacttacccctgatggaaagcttgtgagagcaatgtggctaacacagcattgtgttcacctggacctgtattgtagccttgctgttttgtggggaggatcctgtagccgtgcttctcaaacctgagcttacatagggattccctggggaaatctggtaaaatgaggattctgatcctgagattctgcattcttaacaaactccccaggaattatgccactgagggttcatgggcttatccatggctgtgatggttttatcttcattgtccagaccctaataaaaagatgacttcacatctttggcattttgaatgtttgctgaagaggctcatttgataagaaggtggtgatcatacactgagaggtatcatcaggtgcctgtccctccccattcttagcaggacttccagctttgaggtacagcttgattttaaatggaaatgtactagaagaattttttctttttttatggctgaaagaaagttctcggtgaatgctaggaggcccatgagatccatcacttaaaaagaaatgtgaagtcccaaactgtatgtgtaatgtctgactgtcagacaaatcagtcatgtatgcacggaaaggctgccgccctgggaagcttgggcgctcagccctagaagaaatcacaggaagtaattaaacagagaaggtcagagaaagaggaagtggttgtgttgtttctgatgcaaagagcattgttgttactgggaatcaagatgatgatgtttaaatctcttggaatgtgactgcttggggatttgattgtattgtggtccttttagtttattcttttagacagcaatgtagttaggaaatgaattgcttttaggtcttatcaggaatccccacgtgcctaagcagaagtcttaagcgggagttggttgtagcttggcaaattgcacttaaatgaaatgaatgtcaagactattagaggttaattttaggtgtctggagttctccctaattctcctgattaaacactttaacataatagtttccttaattggaataatgatggaatattagcatgcatattaaaccatttacccaaatttgaatagggttaaaatgcaaattatccatcacttgtcagtgcttactctttacagataattctggtgagaaatcgggaagagactggaatatgaattggaatagggctttctacttgaggcagctttgctgggaaagtcaagaataaactagaggactgaaacaagtgagaggcccctttgtttccccccaaaaggggtactaaaaatacgaaggcctgtgctgtcaataactccaacacggaggtgggtacaatgggaaatctgaaataaactatagaccctccagttgtatcttcattaggttgtcatatttttccttttttttttttttttttttttttgagacagagtcttgctctgttgcccaggctggaatgcagtggtgcagtcttggctcactgcaactgccgcctcctgggttcaagcgatcctcccacctctgcctcccaagtagctgggtctacaggcaagcgccaccacgcccagctaatttttgtatttttagtagaggaggggtttcaccatgttgtcctggctggtctcgaa

SEQ ID NO: 94692 - DNA, 2597 bp, Homo sapiens
ttttattactttttttttagagatggggtcttgctctgttgcccaggctggagtgcaggggtgcaatcatggcttactggagccttgaactcctgggctcaagcagtgctcccatctcagcctcccaagtagctgcgaccacaggtgtacaccaccatgccctttgagaataatttattaaccctcatacccatggcctggcagaacactgagcacatagtaggctttctgtaaacagttatcaattggttgaagtaactattcattaattgaaaaaataattgtaccgtgtataaaaatttaacaatttttcacaatttaacaattatcttttttggatacctatatccaaaaaagactttgagttgctttttcaaaactactaaaggagaggctgccatgatggtagtggaagaatcatggactttggagtgagaccgtacctcttcccctgccactaagggaccctgctaagtatcccaagccaccagccctggattaatgtaaatgaggttcattctgctgtatacctaataggctgttaaaaagtagaaatggaccaggcatggtggttcatgcctgtaatcccatcactttgggagtccgaggtgggccgaccacctgaggtcaggagttcgagaccagcccaaccaagatggagaaaccccatctctactaaatatacaaaattagttgagcatgctagcacatgcctgtaatcccagctactcgggaggctggggcaggagaatcgcttgaacctgggaggcggaggttatgccaagcagagatcgtgctaagcagagattgcaccattgcactccagcctggtcaacaagagcagaactccatctcaaagaaaaaaaaaaaaaagcataaatgaggtagccttggtaaaacattttagcacagcacctgagaaattgagattcagtagcatccatctaccccaggtctgtcccccatcatgtaataaggtgttctttcttttcagaatttacaaggcagaggagatccatgaactttacaaggcaggaaacaagattttcactttgtaccttagagagctgaaatgacttgctcaaggctcctcagggagcttgtgggaggataattaggatttagaagtcatgttctaagactgactgtttcttttggctttctaatggtgtcctggtagtttttgtactgtgataatcaataatgcccagctgaccattggcccctttactcagtgatcccagttggctgtgctttttgagattctgagttttatagcttgtctgttctcttagggtaagagtacctacctgtaatagcatccttggctcccctgccatccctacgccattcctgatatgtggtctagataccttattaccagcagcattcaaattctctctaaaacaaaagtcagtaggcttggtgtggatgggtgggactgaccatcctcttaggagtcacttggcttatgacatgttttgtctacttgaatgccatgtttggcatttcattttatttttccagccaaggaataaagtggacgatggagtgggaatacagacatagtgctagactagaggtttaatttatcaacatcccagtaattttactcatttttatagatcttttaaagcagcgtaagtgtgactatagtcttaatatagttattacatttctcccttttgcttaaaggttaagtcaagtttgatttttttctcaggctcagactcgcaaagcaaatctgccttgctagaatgatgtgcctgggctcaacagctcacctctggccctgaaggcctaataattggttgccttctcattgatctgtgtgtgagcacacttcagaacagtactctgctgtttgttaaaataaaaaacaacaacaaaaaacctttgaagaccttaccgtccattctaagatgtcttttgtactaaggaaaattggggatactagattataggtgttgatttggagtgtgatatactgtgaatcggaataacttgaatttagaatgtacttaggccccagttgcaaaattatgtgtaaattattgtattggataaaataaatgagtggaagtacagccagaggagagggagccactagccattgaatgcctaccatgtgccattcacttactgcaaatatagagcacctagcctgccatacaataccagagctgtggctcaggaagtccctgctctcggggcacttacattctaggatgctagacagtttcatctgctttaaggtgtgaggacagccctcttgatgactgactaactgattactaactagagttgttttcctttttcttcccctccttcctgctgggttcctcctagagctgcaaactagaaatgtgatgtgttggggttctcatatttggggtaggggaactcttcatgcacagcattgaaggacctacaggcccttgccagaatcttcaaacaagcaagcttttcaagtcgtttttaggtatgagagaaagaatgagtgagggtaagagagagagagagagagagagagagagagagtgtgtgtgtgtgtgtgtgtgtgtgtgttgtacatacaagcacgtacacattcacac

SEQ ID NO: 94693 - DNA, 1340 bp, Homo sapiens
aattctcttctttcttccttcacttctccagtaggtgacattctgctcatgcccccagccatctctgagccattgcgtttgggtggtcctttttgactttcccaccataaccccctcctcccagtcaaaatcaagtcaaagtcaaaatgcaagtcaaaatcaatgtctgtgtgtattatttttttccctacattacatggcaattattatttcaagttgggcttatacccagctagattctgcatccgaatttgagttttttggattcaaggttacttctcaaatgcctagttttctagttgttggcccaacaccattgggcacattgtggttgcttaatgtctattgaataaaataatggatttaattattttaaagtgctgtttcatccctactgactaatgcaataattacaattgttgtatttggttaacttagggtatatatatatataagcctcctgagaaactcaaccatgttcacattgagcctctggtattttgtggaaattccatgcagaactatctggtggtagtgatctgtcattggtaactcaaaacccatttttattccattcattgttgcgagaactgacaagtaaaaaatcttgaccacaataagacagggcctgtttctatgcctctgtaggagaatctctgcagaaatcacagtattaacaattttcaatagctgcagggttctgctggagtcttaacacttgagggtggatacagctgtgctgatgaactccaatattggcatcattcttgtattgccggctgaacacaaatacagtctaacagcaaaattttcagaaattgaacaagtgataatagaggcagaccagaaagttttggtgtatgtgattatttgtttgggcttgtttttactaaggtaaattaggccgagttttttaaaaagaccccgtcatctcaataaacttgataacttattcttagaaatatttaaaaattactatttaaatctagaacattgtgatggtgcttttaaggcattttctagggctcttagtgactttgaagtagaagaaatattttgtattgatgctccagtgccccgtggaacaaaatatattttttatatgctttccctggatagacatgaaggattgttacatcttgacatatgtcccatgtcatggaaagaaagtcaggccaggatcatgggagtttgctaaattaagtaacaattgtttcataactacccatttccctttctcatgtaacctttatcaacattatgttcacatgtggcatattgcacacgtattatcaaattgtgcttatgttcttcctgctactctcaaagggtagttgaat

SEQ ID NO: 94694 - DNA, 1218 bp, Homo sapiens
cagtttactttcatatgtcatgtcagttttatatggagtggacaaaatgggaatagacactacctattttgtggagctgctgtgagaattaaatgagacagcctacgtaaagcttatagtacagggctaggcataaaacaggtgccctatgtggctctttgcagggcactgagatagatttctttcaggctgagcttcattttcagataaccctgtgaagaaggtattacccccatttaactgatgagaaagccaaggtcaagttagttgcccgagacagcaaacatttttttaaagcactttattcatttagtcttcttaaaaatcctgcgaggtagttggtattattatccctattataatagggagaagtgaggcacagagaggtgaagtcctttcctcaaggtcatcctgtgagtaactgaaggagctgggaatggagcactccagtagcctggttcaggaaggtctctgtgctcttaactaaccactatgaaccattggggtggtccagcctcagtcgttctgactcagagctcgcagcctttctgccaatcatgcttgttcattattcttctgaactggtgacaatctgtcattgccatcatttttctcacttcacttatcttcccagaaaatgctgtgaagcatgaggggcatactgaattaaaatggatttaaataaatttgggcttgagaattctgtgatacacctcaaagataatgggagtagtgcaaattcagagttggttattattggaatgttagatctatgttaactgaaataacagttgtggaaattaaaccgatacagtgagtattgatccattttctttgtgtttgccttaaaaagggaggtatgtttctaccagggggtatggttctactatacatgagtagaacccttaaatgttaaaaatatggagttgactgtgcagaattagaatcttgatttattcctcagaaaatccccacactactggagacccaggcctggaggatgatagcttgaggccaggaaaaccagcctgggcaacacagtgagaccctgtctctaccaaaaaaataaaaaataaaaattagccgcgtgtggtagcgcacacctgtagtcccagctactcaggaggctgaggggagaggatggcttcaggccaggaggtcgaggctgcaatgagctgtgatcgtaccactgcactctagcctgggcgacagagtgac

SEQ ID NO: 94695 - DNA, 1072 bp, Homo sapiens
ataccacattttcattcataaaaaacacggcggagcgagaggaggacaggcgcgggctgcgcgggggtctggtgcgccagggtccccgcgcgggccggcgtgctggagccgcccgaggggccccgcggcgcgtgagtgcctgtgcacgcgcttgtggccggcacacgcgtcctgcggggtcgggcggctcggggcggaccgaggcgtgtgcggcgggggcgtgcggggcatcgcgctgggggcgcgcgtgtgtgtgtgtgtatgtgagtgtcctcgcgggtgcgcgtgcacgggcttgtgcctggcccgcgggcccgaggggaacaatgctcggggcgctccgccggagggatcctgggccgccccgcgcgggacccgtgactgtcgccagcccggggcggaggtgcagctgcctcctgcctcgcggtccaggggtccagtttggcattttccctccctggtctgaggcgttttcagtctcgggtgcgacgggggcggggccgcggggcccgacgcctcaagtcttatgcctggggtttgagcggtcaccgcgcggcggccgccgctgctgctcagtggctgtgcccgccaccagccacttttttttttttgtgaataagacgcgctcctttattgtcacatgatatccctcccctcctcccctgcacattcataaatccggagcctgcatccgttcctttcattcagtgctgccattagccaaggtagcggcggcgcgggcttgggcgcaaagagctggttggcagccgcggggacgcgccctggagggaggccccgcgcgcgtctttgcaggggagtgtgggcttcggaaggcgtgctccggaggccccaggtcttttgccccccgcaggcattgagcctcaagagtgctgggaggggaagtgactcagggctgggcgactgggaggcttgtctcttgcagcaggtgacagtgctgtgccctactctaggaaatctactcactttattaaatataccccctttatcctttggcgtctgctgttgccagtccgggcgggagtggggctggtgtttgggaaagggaatttca

SEQ ID NO: 94696 - DNA, 1029 bp, Homo sapiens
taacctgaggtccagaatcacctatggaagattttagggtggtcttgttggaataatatttgggtttatgtggatacttgcatatttttcccaaaggatagggttcaaaactttttatcagattctcaaacaggtatacagtgctctcaaaatttgagaaccactgctctaggagatgttcacagggctagacaaaacaacaagaacaacaacaacaacaacaacaacaacaaagaagttgttgggaaaaaaaaatcttttgctggaaagacctgaaagatcactgaatgtacactctaacttgttattgacagccagtgtcctccagacactatttctattgtcataaatggaggcaggcagctagaaactgcactccatcagtaagttcttcttgatcgatatataatatataaactaacttaatttttgctcatgttttttctagttctagggccccaagagacagccatttaaaatatttgaagcaagctatgattctcctcatatcttctctctttgacagctagaacactcccattttcttctatcgtttcttaagaacacttcaaaataagttgtttggggttttttctgattccatgtatggtattttcaatctctaaggcaatcttactggcatctggtagtaaaatagaaagaatgagctcccctgactcctccatgagtgagaatggtatcttaatcttctctgtcttctcctttcctagctcagcacaatgcatggctcatgttcagcaggcaccaagtgcttagggaatgaatctgaattgttcattagtcactatgccaccaacatcccaacaaacaaactgcaacttcaaaaactatcttggcttcctgaataaagttaccactggtgacttttttttcttctaccattcactctttttcaatctatgccttaaatttggacagaggtcaggacctcttatcactttccaggtattccttggataattccctcctccacagtggtttgatttcctatatgctaccagacgtgtg

SEQ ID NO: 94697 - DNA, 1040 bp, Homo sapiens
aacttctctgtccatggatttggggggagttcgttctgattagggctgtcttacatatttatactagaagagttcatgagctatttctgatacttagactttaatcatgcttaatgaactgaactaagcataattcttgttctgtttttgtaactttgtggatttcttctaatgctcagtttcatgtgactactcattcttaaatgctaatacacaaaaatgctaattcaagaaaggagcacaaaagttagatttcacttcagagaagtgcattcagtattcataggccttctggaggagcaaggctgtgagaagaatgatattaggtgaaaaatattggctcctacctttggtgaacacacaaatttaaacatataggttgcacaaaatttggataaactgaggtggaatccaacatttcttgcatgaattcctgtataatgtggcgatagctgtgagaaaagaggagcccagcatctaaggcccaacacaatgaaaatgcaatgaatcggaatgcctcacagatcatagcggaatcagaatttccagcaaggaaaatcttttcatggtgaattaagtggtggatgaagaaaaatggtgatgaaaaaaggtaggcacagatcacaaacactgggctcagggctcactgctgaagatttaagaaccttagctaaagctatgcagaatagaatgtggaaaattgaatttactaaacaattaagcattgaattaatctacatcctgcacagtagaaaagtgggggagggagcagagcagagctgaataaatcagtggagctcattaaaagatagtgaatatatcaggtctgttgtagcataaaggaggacagcttcctgtataacaaggaataattctttggttctaagtcacctttttggagtcctagtcttaatcagattaacaaacatgcttctgatgaggttggtctgtggctctgtattttagcttgttatcgctagcttttctattaattaccagtcagatcaccagtcaacaatagtagtgagggacaacataaa

SEQ ID NO: 94698 - DNA, 1025 bp, Homo sapiens
ttattttagcttggaagcagaaactggcaaattataaatgtgccaatgcagctctgagctggaaccatggttgaagggggatgggaaaggtggcatggttatgtgctccagccctccatggctttgtcattatgccatgggatcctaccaataagggttcacagatgcctcttatttgggtttctgatttgtgcccccacagccctcttggaacagagatcatgatgacacggcatctactcgttcaggaggaaccccaggcccttccagcggtggccacacgtcacacagtggggacaacagcagtgagcaaggtaggagagatgttattctcttttgctacttgtttcatttttaaggattgaaaaatcagaaatgtctagtgagttactaagtatacagtttttcctagaagataaaccccctttaacttgagaatcagctcatcttattttattctctgaccctgctcttctgtgctattccagctgcttaactgtctgtcacctggccagcttcataaaacagggtagtgaattgactcagggcaagattagagaagtagcttagaagtttgaatgtgaataaatagtatgccattcataccctgctatacaaataaaaagtattattactacttgccctcagaggcttttcaagagctcatgaagaaacatccactaggattccaagttaatgatgtcttaggatgcttataaggctgtgagccctttagtagcacatgctcggcttccctctccactgggttgaagtcatttttttctggttttacttatctgaatctcctaagtgcttgacttcattgcaaagccagactaaataaaatttaggaagacatggaaagataacaggttaatttgtgttgtcctgtgaatgcacatacctatgtgtatgtgagtgtccatggattatgcatgtttgactataactagtaggaaataaagtttaaacatcaagctagtcttcagcaaaagggcgaattgagtattcaaatgtctgtactg

SEQ ID NO: 94699 - DNA, 1031 bp, Homo sapiens
cgcagtctgactctagagcccaagctcctaactatgacatcctatttgatacactgttttactggagaaacagatcatttgacagacattctttctgttagcaatttgacaactctttccccagttgtctgtactgaacctggcgctgtgctccgtaatggtgacctagctgtgaataagatagaatcaccttaaactcagaggggtaatgttctgttggggagggagaacctagttttgcatgctaagtagaatgatgaatgaagtatttacaaagggagcatgatgactgatatgattcattggtattatgtattaagagcctatatcatttcactcattcaaagacttagtgaattaagaatagaagcatgggaacaagtaaagatattgctcttgcagaacattttccactgaaagctcatcatattttcctcttttgtgaggataaagaaaaagtattatttctacatggaaatttgatgtaatacatttcaaccctaaaggcttttaatgattgctggaatctctaaaacccacttatgaacttctcctttaggaggcaggactcagaataacaatagtaccacttaaaaaaaaaaaagcaaaaccagcatgccaggatgtttctttaaagaagattaatgctaagcactgcatttctctatcataatgtatcaatagttgcagtgcctcccactgccccatccccctccacaccagcttttgtgtgagtccaggcaacctataggcagaaggcaattccatttattattgaggggactctccaggcagttgttccagacctgtgaagccagcaggcagagcggcctgagagggggtggggagcaccgggcgagggaggtggggaagggccacattatgttccagatgactgagtaacgatttatatatcactcgccttttttacatgaagaagaaaagtaataacagcccaaacccaggcatttgaaacagtcagctgtccgatgaataatgggataggtgggaaggagcgctctgattggatg

SEQ ID NO: 94700 - DNA, 1050 bp, Homo sapiens
ccacatgggtgctaggaaaaagtgtggttacaaagtggctctgggtcatttggaataaatcagttggacaactctttttttgttgttttattcaggacactggaagtttgtctcattgctttaatgagagttgcatcttcttagttatgctgttgaacacatctggggcctgttactgcacccttactcttagataaattgtagcacccatgcccacacaggtagacctcctaccttcataaagggaagtcagaggaagctgataccccactcaggtggcctttaaatttgaggggcggactttgggaccatgttgcttggcaacaaataacatatagcaaaaacaaacacataaagatatgacccatgatattcaaactttaaattctataacactagtttgcttaagatatcagctgctatacggtaaagtttttaaggcagctgtaatttgcggaaatgctggcatttactttttccatagtcttatcttgaaggcataaattggaactaaatctgggttcaagccccttctcatttctctggtactcttccagtaatatagttaacatttggataaggacgcatattatgattctatctatagttatttaccctctcccagtttaacatgaagccttgctagcttcctaactataatatttccaccttattttttagttatgtgttggaccctgagttgtcttaaggactgaggaatttaagactcattaatatttttattagtgttatttccttataaatgaattatccctttcagctaactatatctttagaaaatgatcttggttttcttccatcatcatatcaataataataaaattagctaagaagttgtaattactcttcctatattctctgtgatgtgcttaaatagaatatccacttattatgatgttaatttccatttattacaaatgagcaggaacaaaatgttcctaactgtctgactccaccttttcctgcacattatgactcccctataagtaaaccacacagcccactatcgtatgttctctaatgtacttt

SEQ ID NO: 94701 - DNA, 1099 bp, Homo sapiens
ttttttaaactaaggaaaagaagcaagtctagaagacaggcaattagcatgatcactcaggccagtttttataattttggttttcatccaaactagtcacatttcatacttttaaagtttttaggcttttctgctggagatcatcttcctcacactgtgattcttaaaggttatgtattttttttaccctgatcatacttacgtcttttgacaagagagaagacggacatccagctttgggtctgcagtgatccatcattcaacttccggtctttttcatcatattagattgtgctagtacttgctctttccttaagctatctccattacaggagggggaacttattgccccaaatataacagagatgcctgacttatggagagttacttcagagatgtttctggaagaaagagttctttgggtataaatgagaaacaaggggacagttgtgtttcccacaccatattttggtatctagcatgtaaattatactctcatagaccacctggatctgaatggctgcgatctggggccctttcccagttttgcatggcagatgaggaaaatgcaggaaacgctgaggctttgaagatgtgctagaacctcagcaacacagagccactgagcagcaagaggaggctgagacagggcagaaacacccccactgttaagagtgatgagggtttggagcacctaatctggatctagaaattggccgctgtgcaggcagctgggtggttcaagatctagcacccaaagagtgtagcaagttcaggcctgggcatttcggcataaccagtctggtaggtggggccagcaagaaggaattctaggccacaggccaattcagaagtcaggcaggcctacgattggtattcggagatctgtttgggaagagatgatcatccctccagctggcagcacaggagagcagtattcagttctggggaaagaaagggctgggccaggggaggggaagagagattcccagccagctgatgttggagagaagactagatccagaagaggaccaagagcagagaaggaagtaattccttggtttctgtgacttctttctcacccaagatagatttcagg

SEQ ID NO: 94702 - DNA, 1232 bp, Homo sapiens
attgatctttgaatattgactttgtatccagcaactcttaaattaatttagtaattttttctactttcttttggatttttctatgcacatagcatctatgaaaaattaactgtatttcctcttcttgagaaattcgaagactctcaataatctgaatttgactaacgtgcaattttcgttgtaaattcaataaaaagttgctagtgtattcaatctttccaactcacaagctcccactctcagtttacgcggacctgactactacccgaacaacccccaccagtctggaggattttgagcctagacactcctccagagcaggctcctgtcccggctgcggaagtgcgcgcgccctcggcaccttaacagttccgcccctctcccggacccagccaatcagcggccgcctcttgcgcgcgccccaccgaccaaaatggcggctgccgttggtgcggggtgcggtttgtagtgctgttgccctactcatccctttgcaaaatgtgaaagaagaagcggctggtggaggcgggccataggcaatgagtcggcgaaggaaacatgatgacagccctagcccgaagaaaacgccgcacaaaacagtggcggcggaggaatgcggctcggtggtcgagccagggaggaggcggctgagatcggcccgcggttcgtggccctgcggggctagagaggggcctcccgggccagtgcggcagcgagagcagcctccgaccgccgccctgtgcagtaaaagtaaccccgagggtgagacgtcggcagcgcggcctgccttggcttcggcgccgcatccccacatcccagcttgcaacagggaaatctggggtgggggtggagtctggagcgtgtattctgtctctgggattcacccctcgagagtccaaaaataatcctataccactccccgatgggcttttgtccccgaacttcagcactaccccgttaggtttgaccatccatttgcctccgccacaggaataggtaatgtggtttacctgtttgcgggagggcggctgctttccaggctgctcctccagtcagcagcagtggtggagtgagaagaaacagctgataggcccgctaacctcagtttttgcccggagaagttatttctctttaaaccctttttttccctgtgacctgctttagagaagagttcataggaaaagttaaagtttgtctcaaagcctggtagatgtctcacctcattgtgaata

SEQ ID NO: 94703 - DNA, 1215 bp, Homo sapiens
ttagtttttattgtcttttttctttcttttgtttttttggaagacgggggatgctacactggtactttatacctctttttttccctatctgccaaaggatgaaaaaccaacaacaaattctatgctggacatgtggattggtgaaactgctattccttgtactcccagtgtagcaaaaggaaaatcaagagcaaaaatcagctgcacaaagtaagttaagacttttcagcttttctgaaattcagtgaagcaaatattttttgataatactccattttggttttgtgaatatatcaaaatttttgttaataaaatttccacagttttgatctatcaaattttggagttaaaataattataactgttaaaatcttagagctttaacatcaaaatatgttaaataacagttggatataatgtttcagaacatttttagttattttttaatcttgtttaataggttaaaaacacaaagtcaagaagaagaacttatgaaactggctaaacaatttgataaaaatatggaagagctagatgtgattcaagagcaaaacaagaggaattatgattttacccagatgatttcagaaacagagattttaagtaattataaagataatatacagatgtggtcattacataatatagttcccgaaatagataatgctacaaaaaagccaatcaaaggaaacaccaagatatctgtggcaaataatcaaaatagcagtcagaagccatttgaccaaattgctgaagcagcctttaatgctatttttgatggttctactcagaaatgtagcggacagttaagccaagaactgccagaggctttttggagcaccagtaatactacctttgtaaagacaaatgctttgaaagaggagaaaatcattactaatgaaactctggtcattgaaaaactgtcaaataaaaccccacgatcactttcttctcaagtagatacacccataatgacaaaatcatgtgtgacttcctgtactaaggagccagaaacttctaataagtacattgatgcatttactacaagtgattttgaggatgattgggaaaacttactaggtagtgaaccttttgctatgcaaaatatcgacatgcctgaactctttccttctaaaacagcccatgttactgatcaaaaggaaatttgtacctttaatagtaaaactgttaaaaatacgtcaagagcaaatacaa

SEQ ID NO: 94704 - DNA, 1508 bp, Homo sapiens
agtaaaaccagtgttagtaacccaaatcagactagtgcatcaaaagtaggttctttctttgatgattggaatgatccctcatttgccaatgaaattattaaagcatgtcatcaattagataatacctgggaagcagatgatgtagatgatgatttgttgtaccaagcatgtgatgatattgaaagactaactcagcaacaagacattagaaaggacagtaagacatcagaaagtatatgtgagatcaataataattccgaacatggagccaaactaactcagcaacaagacattagaaaggacagtaagacatcagaaagtatatgtgagatcaataataattccgaacatggagccaaaaacatgtttgctatatctaaacaaggaagtaatttggtacaatcaaagcatttgaatccaggcagcatttcagtgcagacatctttgacaaatagctcacaaatagataagccaatgaagatggagaaaggggaaatgtatggaaattctccaagatttttaggtgccacaaatttgactatgtattctaagatctcaaactgtcagataaataatctgcatgtgtcttatactaacactgatgttccaatacaagtgaatagttccaaattggttcttccaggaagttcaagtttgaatgtaacttcagatcatatgaatacagaaattactacttataagaagaaattgagtactaatcagccatgccataagactgtaacagatgaagctcagagcaaccttaacacaacagttggattttcaaagtttacatttacaaggatgaaaaattctcagattctttctcagtttaatcaaaattgtataactggaagtatgtctgataccaaaattacacagggtgtggagaaaaagaaaggtgtcaacccattactggaggaagctgttggacagcaatctttggtgaaactttctgaatctttgaaacaatcttcaaaaggtatgtatgaaatatgaaatagttttctttgaaaagcatcttaaaaagtagtaaaataattatttgttgtttttgagtgtgagtaatgtataaggtaaaactattctatgactagttaattttaagaattaactagaattcttaaaatgatacttggaaataattatacggcattatacagagtagttggtttatttttcaaaatattacattgaattctttcccagcacttaatacaatgactggcatatagtaggtactcagtaaatattttttgaataacttattctttcttggaaaatcatacctttagatatatgtattatagtgttcattaagattgtatttactaaattgttttaaaacttgagtaatctgggaagcagatgatgaagcagtgaggtaaataatatttagaaatttagagcattctaattaaacgtctttactagtgtgatatttgatataaacgtgctagcggtgatggttaaaattatgatttacttatttgataacagctatcatt

SEQ ID NO: 94705 - DNA, 1317 bp, Homo sapiens
cagagtatatatgaacagagtcaaggaaataacagacaagaaaaaggctggcaagctggacagaggtgcagcttcaagatttgtaaaaaatgccctctgggaaccaaaatcgaaaaatgcatcaaaagttgccaataaaggaaaaagtaaaagttaactttttggttttgatgtacacatattcaaaaagtacatcttcccccccccccccccccccgcaaaataattctgtggcagggcaaggtttaaatgtgtttcttattaatatgtaaattcacagtaaatatgtaaagctaaatactttcctctccaaagatcattatctttattgattagcactgaggattttaacattgtgatatattatatatttataatttaccatctcttgatgagactcttatttctttatataggtcagtcttgcaagtaccattttataagcagctgtgaaatttaagtgaaatgttctttgtaaacatttgtactattttaaatgaataatgaccttatgaagtatgctatctgtaggctgaaattataggtacatctgttttcactatatgatattaagaaagcgtgaaatgacttaaatgttcatttttttctgtatagatactttatcatgttttcatgattttaggaattactgctttgttgatattcaaagtgtgaaactaaaactttatggttgtactttaattcttggcatgttgcctctatgtcccatttaaaataaaatacattctcattaactttagatgggaaataaggttgtatgttgatggatgaattttggcatgatgactgtactctcaataaaggctgaaaatgttgtataactgacctgtgtatttttatcttttgagtaaatttgccttccaaattaggaagataggttttagaagtcatcacaaatagagaaattcttgagtttttgttcctgatgcatggtgtccacagttcttttcatctcattttttttcagattttttttatttcatgtttttgaggctgtatcaagtacatacaagtgttttggaacaacttcttaagttacctaatgccacttaagcagatgagaagtccaaaggagattacactgtgtttgtattgtggtttatttttctggaatattagttacagagagtactacatagtaaacctttttttaaatgtctaagcccatgaattttaattatatgcccttaatgctttcagtgtttgaatccatatcattatgtgtaggaatgccaagtatagtaaagtactttaatttttgaaaaaggagttgttaaaattttctgtgtgattaat

SEQ ID NO: 94706 - DNA, 1052 bp, Homo sapiens
catgatgtctgtttctagaaatgagttgttgcagaaggtattttaaaaatgtaatttcctaaaaatgaatttcataaaacagaatgctattttatgaaacatgtggaagaagaaacagattaatgacctatgccccttttcccctttatttcaattttattagtgtttgggtatttttaggggggaaacaaaacaaaagaaaactccagccttaggaaatacctcctaactatgtttttaacttagttttggaaaaaaaaaggagcactcacggtattctttttgacagactctatctttgaccttttaagtattacaatgatgttatcagggtttctggaaaccctataggacaaaaacagtaaattgactttgacagtctaaaacaaatctcattatgtttcttctgtctttcgtattgcctaagcctgcttcttatacataaatgcatcatgtacaatgtttatattgataaattacttttgacttacaaagcccagatcgtaactcccgaaattaaaataattcaaaagaatttttcttgggttatgcactttccttgtctaactaaagatgataccctaaggtgaaaatgtgtggacaaaagtcactcattaagaaaacttctttttacaaattattttcagatcatttggttattggattatatgaagtgaaaaaaacttctttgatacattgtacttggtaaaagtcaaatgttatcagatggtgttcaaagtttgtgtattttttttctgtctcactttctctctttccctctctctttcttttttaacagttggatccacttgaacaagcaaaagtggatttggtttctgcatacacattaaattcaatgttttggggtatgtgtgttactttggaattaattagaaagcaaattacttattgtgtgaaagatgatttatttttaaaatgctaacaatttatttacaattatactttataacacttttaatagatacttatttttaaatctagatgccagtgagccacacatagatttagtattacatggaaattgaataatt

SEQ ID NO: 94707 - DNA, 1523 bp, Homo sapiens
gtctctactaaaaatataaaaaaaaatttgctgggtgtcatggcgggcatctgtagtcctagctacttgggaggctgaggcaggagaatggcgtgaacccgggaggcggaggttgcagtgagccgagattgtgccactgcactccagcctgggcaactgagcaagactgtctcaaaaaaaaaaaaaaaaaaaaagactttggacttgaaaccttccagaggaacactcacacaatttaagataggttctggagtcctctgaccctcattgaacaaagctggatttggctgatgataaaagaccccagccacaagcctctgggccagcctccagcctctctcggggcttgtttgctgacttgctgctgcacgtgggtatcagaagcaccaagtaaactatctccagggccagttcttttctctcccttccatttctaagtcaatagttgtctataattaaacatatttcagatttgttctgtgtccctgaagttccatattttatctttatgcttgtgttatgttttagtgtctataatgttgtggtgggaatcatttcatttggtttaaaagagtttgccttggaaaaactgaattaaccttcataaatacattttgagagatttcagtgtgagtaattttctggacataatattattgtataaaatatcaaaatggtgggccaggcgtggtagctcacgcctgtaattccagcactttgggaggctgaggcgggtgaatcacgaggtcaggaattcgagaccagcctggccaacatggtcaaaacccgtctctactaaaaatacaaaaaattagctgggcttagtggcgggcgcctgtaatcacagctacttgggaggctgaggcaggagaatcacttgaacccaggaggtggagattgcagtgagctgagattgcgccactgcactccagccctggcgacagagtgagactccgtctcaaaaaaaaaaaaaacaaatatatatatatatatctctctctctcaaaacggcacggttggtctagatttgggtagctattttctgcaatttaattcataaaacaaaatgctttgattttaaagagctcttttttacttaaaatacaggaactgaattggtgagacttttggtttttgactgtggtaagtgatggtgaaatgtacaagattgtaggggttttgtagtcttatttttggtcatactttaaaaatgcattttatgaataaacttctgtttttgagatctacagaagctttgattctgttaccttaacagtagtaataaagttaacattgtcacatcattttgctttataaatgcttaattagtagttttaattcactttgtttctttaatgttcaacatatctttagctaagccttttggaattattgactttaccacattttcattaagcctaccctcccccacctccattgaagagaacgcagccacctaaaacattcacaatatgtaaagtatatgtgatttcaggggatcatggagagtcacttatttggaa

SEQ ID NO: 94708 - DNA, 1088 bp, Homo sapiens
tacaggcgtgagccactgtgcctggccaaaaaaaaaaaaaatgttttttttttgagacagagtctcactctgtcgcccaggatggagtgcagtggcatgatcttagctcactgcaacctctgcctcccgggttcaagcaattctcctgcctcagcctcccaagtagctgggactacaggcgcacgccaccacgcctggctaatttttgtatttttagtagagacagggtttcaccatgtaggtcaggctggtcttgatctcctgacttcgtgatccacctgccttggcctcccaaagtgctgggattacaggcataagccaccgcgcctggctggaaaaaaatttttatgggaaaagttaaaagataaatgattgttggagtgctttcacattatctgaccattttaaagctgttttacttagtataaaagagcctcctgagtaatactggtgagactaccaataataagtattctctgttttcaggtgtgtagcttggagtttgacagaaaagacataagtatgaataagttagtagccacatctctggaaggaaagttccatgtttttgacatgagaacacagcatccaaccaaaggttttgcctctgtttcagaaaaggtaaatatgagggaaatgtctttctatgaagaagaatgatagcttggtttagactgataagtagaattagtcaccaaggtttcttccaggtctttatgtgaagggagctatttttgatatattcctgtgagatcttgacaagtttttctgtgcaaagagtacttccccaaagtttatcaactttagacttcttgattataataaagatctcaggtaggaatcttattttgtagtttaggagcaattagaagaaacctagctgatattaggaatttgatcaacaaaacccagcctggtgtttcctaataagtatataatatttgtgctaatacctggttatatatttttcaaaataaactatatgtacatgatgtcatttcattacactttgttttatattccagtttgctatattaaatgaaattatttgaatcactgagtactgtgattatagtaaatgttcaaaa

SEQ ID NO: 94709 - DNA, 1030 bp, Homo sapiens
atggataccacattaataatcttgatgtcctctcaggattggtaagatgggatactacccagtgtgatttttaagatctgatttaatataagttttatgttagtttcataagacttttttaaagcagcctttataaggatgcatttataaggatgtgaaatgttgtatcttgatttccaggcaatgcttataatcaagaagaacgtgttgtttgtgctggctatgacaatggggatatcaaactatttgatctcagaaatatggcattacggtgggagacaaacatcaaaaatggggtaaagtacattctgaggctttttggtttctctgagcatgtttccattcacctctgaactattacaaaaggaaaacacctctagtaactcatctgagtcaacccctctgccaacggttcttaactttttgaggccaaatccgtttgagaatctaatgaaaatcctggatcctctcttcagaaaatgagctcacacccacatgtggtttgcacagcgttgggggagtcaccagccccttcagcctgtctgcagacccctgtgggccatgtagtaagatttcaaaataagcaagtaaaaggtctttttatgccaatatcagaaagcctgaaacagtagtcacctccccagctcagatttttggttccttagttgtgcacctttagcaaagaatgtggtttcctcctgttttctactgttagcctttacttaactgttaaataatgtaaaaagttaaataatgattccccaaaggcattcactgagcatgggaacccaagattgttttgttgatcttactaatggaaaaaaaaaatgggttttttgtttgtttgtttgtttgtttgttttgagatggagtcttgctctgtcgcccaggctggagtgcagtggcgcgatgttggctcactgcaagctctgcctcccaggttcatgccattctcctgcctcagcctcccgagtaactgggactacaggcgcctgtcaccatgcccggctaatttttcatattttttagt

SEQ ID NO: 94710 - DNA, 1050 bp, Homo sapiens
ggcagagatctgaaagtaggtttaattcatgccgttgtgccatttacctcagcaatcaagatcggaacatttctttgatacttccaataacgctcaggtttacagaatgaggactccaataataaaatgtttatttaattgatttacatataagcctggaggcagcctagtttagaggaaaaagtctggattgtatctggctcttgggaccttaggcaagtcactcagtcctctgaacctgtttcgtcatcttgaaagtggtgttctgaacacttagtttgcagtgttgtatatattagaaaagggatggtctagactggaagaatatctaaaatgtatctgaaatgtaggtgttcaatagatggttgctattttcatgattgcatgtcaatgacaccagaaactgaacagtttgtcagaaccctggcacatgaaagtatggtaggagaaaagagagagcaaagaaagtgaactccagccctggtttgtctgtccctagtgttagggctgagagattcatggatggtcatttataccttcattcaacaaatgttgaatgcctgctatgcgttaaaaaaattaggcaaggccctgctctcatggtgctcacattctagaaagggggacataattgcatgaataaaataattttgttgataagtataatggatgattaaacagggtgagtgacagtaatttaggggtttttcagattggagggacaaggaagacctctttgggaatgtggcatttgaactgaaatctgaatgaagagaaggatagaggcatggtgacctggggaaaagtagtccaagcagtgggaacagcaaattcaaatggcccaagtggaagagaccttgacaagtatgaagaacaaaaagcaagctgtctggtgtggctggaattagtagagaaggcaggaaacaggaaatgaagtcacacacacaagaccagatcccaaaggactttttgcattttgtataccataggccttcatgccactcttgtgagtctgtgcttctcaatgtagatacattttacttctttcct

SEQ ID NO: 94711 - DNA, 1026 bp, Homo sapiens
aacgcagagcgccagggcagaggagggctttacccaggtcacccgcaagggtggccgacgggcgaagaaacgacaggctgaacagctgtccgcagcaggagagggcggggatgcgggccgcatggacacagaggaggccaggccggcgaagaggcccgtcttcccacccctctgtggggacgggctcctggtatgtggctgggaccctaggacagcaacgaggcaagggccagacgcggatcaagccgatggcctctggagaatgttgaagctgcggtggggctgttctgccgtgatgctcagagagaagtgattctttgaagtgtaactagttcagttaaaggaggccctttgtggatcagatgtcattttaaactccatcaccgtccctccatagccttctgagttgtgtgttcttttatttacagagtgggaaagaagaaacaaggaaaattccagtcccagctaacagatacacaccattgaaagaaaactggatgaagatatttactcctattgtggaacatttgggacttcagatacgctttaacttgaaatcaaggaatgtagaaatcagggtaaggaaaatctcaatcatttcccaatacaccaggctttctctcctacagagatgaaaaggcatgaataggctttacttaatgggacttttctgttgtatggtttttgtccagtttaaaaatttaccatattgagtttgaacttcccaaatgccttaaaaatctgcattcgatacaaatattaattgaatttgtaaattagttctgagatcacaccaaaatactggctcttcttctgtgtatcttttataatgttctatgtcaaattgagaaaaggtcgagtaaagagattgccataaacagaagcaggtaaataatgaatataagcacttgctgctttacaagaagtatatacagtcagcgtcgggaatatgttctgggatatgttttgtcagatgacttagtccttgtgcgaatattatagagtgtacttacacaaacctagatg

SEQ ID NO: 94712 - DNA, 1040 bp, Homo sapiens
agtctaataagggaaattttctattatactagtagggaacactcaggatcttctactctgacctcctcattttactgatgagaaaactcaagacctaaagtatctatgggacttgtctaaggtcacatataggattggaactagggtctagttttaaatgggaaagctctggggactctcccattgcacaagcccatatggttttacatttgttgaatacgtggtctcttcaactagactgtgaatgtgcatgggacagtggaaataacagttttgaaatcagacctgtgtttaaatcttaccttttttgctttttagtactttagtttcctcacatacgaaggtagtcatatcacttaacattcaaagttgttgtgaaggttagagttatggtgtgtaaagcatgttatttatagtacgtgttatttacagtggtaggctttttatgaataacagttatttctgcatttctcaaataaactttgaggacaggttcagtgcttcattcattctttatttccccaatcagtgcatgcaggtagttaggcctggagctgttggtttaagaaacatcagcatataaatgataactaagaagattaagtcaggaatcccagggaagactgccttgagagagaagagaagaggacattgggcattgaagggatggacagaaggtagaggttcttcagaatgggagagattgggttgtgccagaggagtcttgctgttaaccccaaaatctgatcatatagtgcggttagttatttgacactctttgggtggaacagccaagctttggagctgggaacgttttgttttgcaaataaagtacagcacttatctgaccagaacctgtgtcatacagaatatattagggaaaggtggtggtgaaggaaattctccaataatgggaaaggacatttccagtattttgttaggacattttctgtttgattctcaacggtattttgtacccttttttgttttttaacagacttgtaaagaaaccaaggatgttagtgctctgacaaaagcag

SEQ ID NO: 94713 - DNA, 1036 bp, Homo sapiens
acaactgggctggggctatcagtgaacaagagacaaatcactacccttttggagctttcattttattcagtagtcagggaatacaaaatacgtaagtaaactgtgtcagaaaagaataaatgccattgtagaaggaaaaatatagaggaggaaagaagagccaggcgtatctgtattttttaatagggtagccaggacagttccttttgagctaggctgtaactgaacaaacacctgaaggcattagctatgagatactgggaaaggaaaggggcaaaaagggactgatagcgcaagggcctaagagacacaaacccaagactccaggtaccaccggaggctaacatggctggagtagagagaggggtagcagtaagggaagtcatggcaggaggtgatgggagagtactacaggaatttgtaggtttttatagagattaaatgtcactttaccagactgtttttaagaatttaaaagcctgagaggaaaaaaaattctcatagctatggaaaccatcaaagaccactgaatacattcaagcaagtttcaaatattttattttcttattcatacagtatgaagttttctaaagatcccacaacatgacgtatcatgcagaagaaaaactaaacattcaacataaaccatcccctcccttacccacccccacacacaaactaaaaaaaaaaaaaaaaaaaaagaaaaagaaaaaaccctcattccccggtaaggaaataatgtttacactatttttctgtaacgccagccaagatatgcacaagcaagagaaatagaaagcatttgctaaaatatttgtaacaaatacttatgtacaaaaaattcacaaaaggctagttcccccttgaagcagagcacatggcagttgacactggaacagttcaaaccactggctgggattataagccatgccactgatccagaggaagaaagttacatgtagtggagattttcagtctgaacattaacatttccaaagtttggcaacattatcttttaaaattatgcaaattatgt

SEQ ID NO: 94714 - DNA, 2521 bp, Homo sapiens
caccacacccggctaagtttttgtatttttttagtagagacaaggtttcaccgtgtgttagccaggatggtctcgatctcctgaccttgtgatccacctgccttggccttccaaagtgctgggattacaggtgtgagccaccacgcccagccccctagtaatattttttaaaatttgatgaagtagttagaccacgaatgaggagtttctcagacactgtgaagcttgatttgttcctgtctgttgcaggttgtaggtggcctagatatccacaaaaagatggtggtagatgtgtgactcttatcagagagtaccacccaacacttttgctttcttctccatctctgaagatctgctcaagacgtccagcaatgctctctgtgtatttaaatggaagtatttttctctgtgaagccacattttccaacatgagcctcatgaagccaactaagtgttattgaactgtaattctctcaataactcagtgtagcactttaaagtctgaaggacagcaacatgaaaagagcatatcaatgtggtggagaaagggaaggggttggctttttaatttatttttcttcatcttttataacaagaaagtatctatatatacatatgtaaatatttatatatagatatatgtagctttctatatatgtagtaggttggctttaatttaatatacttgattcagaaacaaaacaatagagtacaaaagtgccaagcagaacataaaacatccttacttttatttcacacagttttatatatagatagaagactgtacaatttgagccgggtgttaggccagctattttccttttcctgtgctttctcctttgagagattgacaaagcatttgttaacgtcctattatttaccttaattacatttttgtaacaaaggagtctgtaactttatttatacttatgaatatatccagggactacttctcattgctgagcagcttttaatacacctctgcttgaggagaaagtctagttcattgctactgccaagagctagttcttgtgttcatatagtaactgcacagggcttatagctgcttcattctgctactttgtaactaggagccattgcatttattaaatgtccctcagtaacgttaagtgctagttgtgattttatacataaaggccagaagctgtctgaggcaatcatgattgattgtatgtatcacttactgaagaatacctgaagtgatcatgtaactacttataagggatatccatttgtttgattacatgggtaaataatttgtcattaaacttgtgtttgaatcatgaattcccttgtttcaaaagacttgcagctaatctaaaaaactggtgatatttaatatgcatgtatgtatctaaacacccacatatatttgtggtttaagtgtgagaaatcttgctaatctatatgccacagaagagcaaaattgtatccaaatttatgccacttaaatttctttaccacgagggatagagcatgcatactggtttttttttcttgatttgcccatataattggtaatggataacttaataaatttgtgtgatataaaagtagtgtatcatgttctactgtttgatcttatcccttcccatttctgcaaaggtactgttagctggaagaaaaacattttggttagctttgtatgacagtagtctttccctttatagtttctctataaaaactggttttaaaatcagtggaaaagggcaggttgaatcaaggtgaatcaatctgaaattgagcacacctgcctgccatcgctgttccttcaactgagtgctgcacatcatgggctctgtctgtgagagaaaaatcccggtgcttggtgtccttgcatgacatggagttttgcatgtagatcaatttaaaatgtacctcttgtttacataatttgcataattttaaaagataatgttgccaaactttggaaatgttaatgttcagactgaaaatctccactacatgtaactttcttcctctggatcagtggcatggcttataatcccagccagtggtttgaactgttccagtgtcaactgccatgtgctctgcttcaagggggaactagccttttgtgaattttttgtacataagtatttgttacaaatattttagcaaatgctttctatttctcttgcttgtgcatatcttggctggcgttacagaaaaatagtgtaaacattatttccttaccggggaatgagggttttttctttttctttttttttttttttttttttagtttgtgtgtgggggtgggtaagggaggggatggtttatgttgaatgtttagtttttcttctgcatgatacgtcatgttgtgggatctttagaaaacttcatactgtatgaataagaaaataaaatatttgaaacttgcttgaatgtattcagtggtctttgatggtttccatagctatgagaattttttttcctctcaggcttttaaattcttaaaaacagtctggtaaagtgacatttaatctctataaaaacc

SEQ ID NO: 94715 - DNA, 1103 bp, Homo sapiens
gtctgtacctttaaaagtattttattatgtttattattcagcacagctttgttaatatttttactaggatttgtattgtttttgtagtactgtggttacagagttgcataggttttaagtgtctgttccggactgaattttccttaagccatgttatttttaatgggtggttttaagaacacgaggtttttttcagggacataaatatcatgttatatagcaaacgtgtcttttcatttagatcccccaaatgccacttgaatctgctacttcttcatccccattgccattgacatcattgtgctaccatttatttctcaggtgggctattttgatagcccacataatacttttttctttttgcctgtggtttcttccttcattctgccttacctattgccatgagagtttttctttggatgaggaaatcttatgtcaatgctttcatttgaaagtcaaggctacgtctttgagaattaaaaatctaaactgttttgcatgacagtcgggctctgacccttatttctagccatccttatgctgtaactggttcaaactgctgctttctcagattccttatcctttttcacttattgatgcctttgtactctttcttctgttggcaatgtctctcccctttctctgtctggcaaacgtcaagatccacagtggcattgtgtgaaaatgttcccaactctcccaggcagttaatggccatttgtaagtaactttcactgtagtacattccatatttcattatgtttaattgcctgccctcctaaactgttggctcctcgagggcagtggatgcattttttttttcatctttgtaaatctaatccctgttgtggtatctgtcacttaatgcagaggtgcaatggagctaagttatattagtcatctaggactagggagacctttgcaagtcctgtggataagtgtttagaaaacccccagtgtgttaggcacaaataggagagctaccagaaaggaaactgctattgattgtaaaagagatcttttatgcttcaaaattcttgttacatatctgagtagagacttatatgtcaggttgttactttcaataagtaaacattttcata

SEQ ID NO: 94716 - DNA, 1602 bp, Homo sapiens
ttttttttttcctgaaagttaaagtctttccctcccttcacccttatttgagttttaaattgttaagcgtccagggagaatgaaggttatatgttaaaaaaaaaaatcttgtaaatagtgagctcctaggaatttcccctgaacgaggtgttttatatatgtttttgttgaaatagataatacggattttgttctggatacttaaatgaacataatataaaggtaattgttttacgttttgtttcttaagggaactttaaattttataaaggccttttcatgtctttgtgcttttaaacttttaaatttttttttatctccatgatctgcatctagaacttaaaacaaatttattgccgtctataactgtatgtagagttttacacaacatattctagttcagattctgtggcaaaggccactttttagaaaaaaaaaaacctgtcttatgaccagcggaattaaaattcacatctgtcctgagaaaatttatccactcattttgtcccatagtgaatgagaaaattaaaatggttcaaggtataaagtaaagaagctgactaagggtcagtcagcaatgagagggacagacaagtatggaaggatcaggcaactgttataggtagtaaggcagtataaggaagtcaccttgggccaggaggatattaagtcagacagtgggcctggagtctggggcaagcaacagggattcattcctatcaacaaatacttgtagattttgtctgccgtttactggttgttgtgctctctgttgtggaggatattgcaatgattaaggcaggtttcctaccttcatttaagtagagaatgtaagacaaatggcagtaaccgtgaagtaagttagcatgtgatgagtgtcatatgaatagtacacacaaagcatgatagaaatttaagaaggagcaagatcattttcacctgggattaggaaaagttttatgaaggaggtggtaattgagctagctgggtctaaaaagatcagcgttgcagtaggcagagttggaggcatctagaagaaggcactttaaatcctaaagggaggaagagacaatgtacatttggagcactgatggttcccgaaccaacagcaacagcatcatctggaaacttgtcaggccccaccctggaacaactgaatccaaaattctggagatgagccaagcagtcttaagttttataggtcttccaggtaattgtgatataggctgaactttgagaaccactgtttagagaataggaaggaatgtgtaaagttgagtcaagcgtctcttaatgtacctagcactaactatatgtacttaagacataattgttatctacaaggaaattaatcaagtagggtaaataagacagtgattatgcagtgtgctatgtgctattaacagactaaacatgggatgctgtaagagcacatggcagggaagaggcttaatccacactggggatgaatgtcacttaaagtttcctggaagaaatggtgtctgaactgagtcttgaaaggatgagtatttagccagtgaggaagggcacaccacatagagagcttctgttcgaagtcatggaagcatgagatatacaagc

SEQ ID NO: 94717 - DNA, 1562 bp, Homo sapiens
gcactttacataagacccacttactctccagagctgctgctgcttccactcactgcctgtttcccagcagtgagtcttggcagggaaccctgccactcacttcccctctcctgcgagcgtcggtttagctgcggtgcgcagccctgcggggtttccgttcgctgctgctttgctcgctgccctggcgaaccggaaagatccaaggtgtttgttcacgaaaacatacgcgaacttggtttgggagaaatgggggcgcttaatttttcatgcttccgttactaccaagggttttttcattttctttggtaccttcttgtgtctctctcttggagtggttgtttttgaatcatggcgattttaatttgtctttccttaccctcacattaatccctaggtagaattcgctgctgtagtgtttcagaccgacgctaggggtgtgtctcccgcctctgtcgctgcagccaagaaatcaacgacgcccttttagcctgttaccttaccggttctctcgctcggggaagccctagtcgttagtttcctctttgtaatcaagagttgtatacacagtagagaaagttcagagtgctattccgcgtatatcagatactccatcatgcgattcagttattaggctttctctaaaagtctttgaacagttgtcagaagacttaaactggttgacggtgggtaatttctcgcatcttttccactgtatggtatcccaccctgtatgtagaatttaagtgcttcagtgtacgtggtggattactgaagggaggaatgctgttgcttacaacttaaaatcgatttggtgaaatcgattttaagggaagaacgtgaaattagaatattcaggtaagtcagcttttatttaaaatatagggcaaatgagtaagtgcttactggtgcacttaaaacccagattaagagcagacttaaatgattgccgattttgatgtgtagagaaagtttttccttgccaacttgcgaggcagctcagagaggcaactttggcacctgaaagtcacaaaacaatttaggaagatcatagccattcatcatataatctttttgttggcatagtcttttgaagtgaagaattgcatttcagtgctttaatagaatttccttatgcacatgctttacttgaaggtcaggatcttgaagatctttgttcattgcagggaatgtttttacttagctttataaacagcacatttgaggaacaatgatctagccttttgttgtttatatattatacagcgaagtggtatggtttccaaatagtaactctcttgcggtgcaccccgtcctctgttttttgaacaacagactgaaactgggaagttctcttttagctcttcaatttcttattttcctgttaactctgttttcttgtcttttaaaatattttacggtgtatcagacgatgttgtttcctgccaggtcattatgttccttttcttcccagctcccttttcagtatttatttcctaattcaactgttgggtttttttttttcctctttcatcctcccaataccatttcaggacctacataat

SEQ ID NO: 94718 - DNA, 1047 bp, Homo sapiens
gccagaccctcgcccagacatgggggacctgccgggcctcgtgcgcctctccatcgcgctgcgcatccagcctaatgacggcccggtcttttacaaggtggacgggcagcgcttcggccagaaccgcaccatcaagctgctcaccggctcctcctacaaggttgaggtgaagattaaacccagcacgctgcaggtcgagtgagtgcggggcgcctggtggcagcagggtcccccatggggtacaggcagaggactgaggcccccaggacagcccgagcctctcaagggcctctggcctcgcgccgctcccagcgggcccgggggttggaggaagaggtcactccctgtccgccttcgtccccttccttccctttggcttgtattcctccattctcgcttccctccacccatcgcagtgacctcagtgggttctttaaaatcagtgacaagaagccagggtttttgcttgtctgtttcttataaatttctcctgccttctgtccagccttgggcgcggaaccgcaggcggtcggggtggagcagatgggagaggtccgcagggttcagccaccgcaatcccagccctcctgcgcgcggtccaggcggcccacagggtctgcccgcaaggctgaaggagggagaaaggaggaatgaggtggaaaggcaggggaggggtgattactggggctccctgagggatgctccccactcccttcgccattcagtggctgggaccctggggtggagcagcagacactagtaagagagcggccgccccttctctggcctagtttcacggttttccatgccgtatgctgttctttttctcctgagttttctgttcaggctggtgatggtgcctgggattagcaacatccccacagcaagaggatgttttttggtttatccatggcagggacgatttcttgccagcgaccgctggataatgcacccagtagacctctggcgggaaagtgtgtgggagcatgcagtagcctacccggaagaactgcgggtggagcccctttacctctcgtttctacctac

SEQ ID NO: 94719 - DNA, 1271 bp, Homo sapiens
cgggcgcggtggcgggcgcctgtagtcccagctactcgggaggctgaggcaggagaatggcgtgaacccgggaggcggagcttgcagtgagccgagattgcgccactgcagtccgcagtccggcctgggcgacagagcgagactccgtctcaaaaaaaaaaaaaaaaaaaagaaaacgaaaacggatcttaagtaagagaatgtggagccaccaggggaaagaacaattgcagggaaagaggcctgattatattccagaccctggtcccagccattccttatctgcttacctaaattaattcaaattgagtttcaccatcatactgggacccccacctgatgtggtttcgttgcccatttttcaaatatgtattatttgtggcttacattaacatcttagatttcactctgacttcctcaccagtcagtcttaatctgctataatatggccatcactccatatggttgaaactgttggtatccaaattacaagtgacttaatgtctaaatccactggatgcattctacttgttaatatatttgacacacataaacactcacactgacacacataagtacttcttaaaactctctcctccatgggttggaactatagtctcttggacttttctttccctactctaacccgtcttctcagtttcctccaaagactcgctttccttcacctactcattacatgttagtgttcccccaaagttccacctgttgtcatctcgtctctatactctaacatccttggtgatcccatctacaactcctatgtcagctaccattgttggtgctaatgccgtctatgtccgtgtcccaacatcagatctccatgagatgttccagaaatacatatgctattatcttttggatttttatccaaagatagtataagtatatatatatatatataaaatatttgatatatccaaagatagtttatatataagcacctgaatcaaaacttaccatctcataaaagtagttcttcctccagttcctatctcagtgaatggcatgtcctgttagaaaatcaccatattttacttttctccatcattctccaagtccagccgagtcaattcttacttgattttatcatccaaatatctaagtaattcacctcttccccatctttatctctgcctcattacttaattcttgtccttatttgacattgggatttctaaaataacctcttactggtgttcctgcctccagttccttccttttactgttagcagtgtagtctttgttaaacc

SEQ ID NO: 94720 - DNA, 1093 bp, Homo sapiens
gctaaagtttgtccaattgagattcccattaattttatataaacctggaacggctctcaggagctgaaagtaagtggaaagtttccagaacactttaccatcagaatgccacactagcctggtaaaactctctttctgacagccttatagcaccatctagtgtgctattcttagatagcaagacaaaggactttcagctcctttttgttttctccatattaaaaagaaaactgttattctaaagaatccttaacacttgtctttgttaaagtttataactttttaggaacctttattttaacttttaaaaacttttgtttctcttttttcataaaaacagattatatgctactcactataacaaattgtttattctgaatctgtggttaccaccatagtaaaaaagtgtctacaaactgctttagttagtgtggggttttcttcttaaaaactgttctctatagcattaaatataagaatccaggaaaccaatatttaacaaataggcaaatattagaaagatgccccactatatgcaaattctgtatgttgaatcaagcagtagataattaattgtctcctactatcttcttagagttggaagagtccttgaaaatcaggcagtcaagtgtccaggactattcagtaattttctcaataggaacactgtcagtcagccagcccaagctgaaatcctgtacttctactaatagcatctctgttatgtcacagaacagtccagttgtagtctaggcttgcactgaagaccacctctctgtaacgtttgccttctagccccacttccaccctctagaaccaggctgattcagtccttcctgtctatgattgccagatatttgaagactgatagcctgtctcttcctatgtcttctctccaattccactgatgatcatagagtataatttctagacccaacaacattctcttctgcccatttactcttaacaaaagaaaggggctgtgcgccatggctcacgcctgtaatcccagcactttgggagaccaaggtgggtggatcacctcaggtcagaagttcaagaccagcctggtcaacatggtgaaaccctgtct

SEQ ID NO: 94721 - DNA, 1022 bp, Homo sapiens
cataaaggagaaagggcagaagaggggtcgtttccaggcatccaggcgaacctggacgtagaagaaagattcctagtgggattttagaaactcgcaaaggtatcccctgctgtgaaattcaaaagccttcattcccgttacaggaattccacaaggggacgcattttattctcccagtaagatcctgggagaagtggataaacacactgtaacgtttaaatgcactgtaacgttttcctaatgtgagattcttttcaagaacgttgtggtttggctttggtttgtattggtggtgggaggggccaaggtgcatggcaaaaacttgctcttgactcacccgtttttacgtttgctttcttacttctcctaaccctcaagaagaagacctctgttgaacacagactgcagttccagccaccacagctaatctggatcatgaatgggagccaccgtggtcttggcaagtccgaaaacatagctgagtagctcgtctagaaaagagatttgtgttcagctgagttaaaagaagtatttacctcaaacctctcctcttgcacaaccaacccccgttataaaaggaagtgcaaaatggaataaactgattttaagtgaatacaagctgtctttatatacaaaagtaactcaaggatggtgatgtacccagtcatgctttcaactgatttgggaagcctacaccattcaccttaggtaaattagctgaaactgagctttaaatctgggcttcaaagagtcacatactgtacctagctgagttctaaacattgtttacagttgtcactcactgttgcttgatgtcttcagtgactattatccttagcttgtaattatgcatgtaggatagcttcaaggggccatttctaaaacactactcttatgactgagttgaatatttgagactttgtttcataatccagatctcatcttcttgtccatttcagatagtagttgtgtcaaatgtaagcacctacctacctataagatacaagtagataaaattctta

SEQ ID NO: 94722 - DNA, 1152 bp, Homo sapiens
ttcttttctctttaatatataaataataattatggtacttataagagttagatttattaaacttttaagtctaagtttatgcttaaatttttttgataccaaaattatgaattcatatttaattgtatttttgttgtaattttgagttacaacattattgtattatattcttttttaaatttaattatattcttttttaatttgttagatacacacaaatccatgtttttaccagtcttcagagaagagtcagctcttaccattgaagccaaatctatggtgctatttgaatcctggagacagcttttctttgttagttgacaaatacattttccgcattctctctataccctctgaagtggaaatgcaatgtaccttaaggtaagtgcctgatgaaatgagagtaagaatgttatttttaatctaattcctcagccatcacaaatccttcggtaggaaccagtagaaaccattaaactggagatagagtaggtgtgtaatgtgtgtgtacgcatgtgtgtgtgcatgcctttgcatgtgtgtgtgttttgtgcacatgcatgtgtgtatctgtttctagaaaacatttgactttggaaacttactatgcgttgatagcagttgctcccacaggtggtgtcttttaccattgtattgagaatgtattttccatctaacagtattcaatatagttaattcgaaattgactaccttttcctcatttttttagctttttgaattttattaaggtattaacttctgacttacacttgtctaactcctctttcttataaaaatagcagaaaatatagaacagagaaactgaggaaatgaggtattagaataaatatactgatgtctggcttacagttaaaattcatacactagtttttttagtcagaagattatttggcttcatttcagcttttaaattatagaatggataaactagacttatagaagtagatggacagaattatgcggagtatgttctctgatagcaatagtattaagtcagaaatcattaacaataaaatagctacacaaatatacaaatactttgaaattaaataacacatttctaaattacccttgggtcaaagagaagtcatagggaaattggaaaacattttgaacagagtgatactgaaa

SEQ ID NO: 94723 - DNA, 1129 bp, Homo sapiens
ttcacttagaagcactaatattaattcttcctccccaatagtgggtgcttaataagtgttggttttttgaatgcattaatgaaatatctgaggatattaaactgagtgataatgtgataagtataacattttgttttcatagctgaatttcattgctgatgaggaagtatgacattttcactctagggagattatttattttcagacacttatgaggaaagtaaagtaaatcctttgttatactgaattacttttttttcaaattgttgaaaatctaagtatgtagattccatataaataactactaattttaatcattgatattgaagaaacaataaaatggtgatgaaaatgtcatgatagtatgataatatgcaagtttcaaattcatttataattatttaaaatgtagttttagatccagctcattcataatagtagcatattttatattaaagatatgaaaatacataacataaacaaaatttggaatatatttgaaagacttaagaataacttaattgccaaaacaatcttagaaaaaaagaaaagagttggagggttcacacttctggatttcaaaacctactatgaagctacagtaatcaggacagtcctggtgtaaagaaagacatatagatcaaggaaatagaattgagggtccagaagtaaacccctacatttagggtcagttggtttttgacaaaggtgtcaagacaattaaatgggggaaagaatggtcttttcaacaaatgatgctgggacaattgaatatccacatgcaaaagaatgaagttagtctcctgctgcacaccatataaaaattaacttacaatggatcagaagtctaaatataagcactaaaactacaaaactcttagaaaaaaacaggtgtaaatctttgtgaccttgcattaggcaatgtttataacaccagaaacacaagcaaacaaaggaaaagtagataaatgggacttcattacacttaaaagttctgtgcttctaaggacacagttaagaaagtgaaaagatttagtgccatccccatcaagctaccaatgactttcttcacagaattggaaaaaactactttaaagttcatatggaaacaaaaaagagcccacattgc

SEQ ID NO: 94724 - DNA, 1606 bp, Homo sapiens
caatggtgcaatctcagttcactgcaacctctgcctctcaggttcaagcgattctcctgcctcagcctcccaaatagctgggattacaggcacccaccaccatgctcaactaattttttgtattttttagtaaagacggggtttcaccttgttggccaggctggtctcaaactcctgacctcaggtgatccacccgcctcagccttccaaagtgttgggattacaggcctgagccaccgtgcctggccaaatttcttttcaaaaaactaaaaatgttttaagttattaaactaagcgcatagaaaatagtggcatttaagaactttaaaatgtgaatcttgaagttttaagtttacattttgcatggatcttgtagttttgtgctgttatgctcatatctttttaaaaatgtttcatttatttctgatgtttttcatatttgttttacaggaaatgccacaatcattttctgcaatcacattaagtaacacagagatgaataatattaagactaatgcacagagaaacaaacttccaatagaggaacttggtaaagtttctaaacataaaattgccactaaaagaacaccacataaagaagatgaggcaatgagctgttctgaaaattgttcgagtgcccagggcgactcacttcaggatgagtctcaagggtctcattctgagtccagctctaatccctccaatcctgaaactttgcatgcaaaggcaactgattcagttctacaaggttctgaaggaaacaaggtcaagaggacatcctgcatgtatggggcaaactgctataggtaaaatgaaattacagtaacatttaattccattattttgatagcgtgtagctatgtagatacatgctacagtatattaaaaacttaataaaacccactggcctaaaggttaggggctttatcgtgtttctactatttgtacttcctcagtatattttctagaaaatccttttaaggcttttaagatacagtgggagaattaaatgttttatatatagacatgctgactaatgtgaggatctgaatactggggaatccagacatgaagactgaatcccccagatctaaatacctgttatttagtcttttcttaaatattagagagatggcttcctacagagttgttgtctacaatataactataattttaagttgtatttaggtgtcttttctttatatttttgtaatggtgctttgaatcatcatggtaccctgtaaaacaactgaatataataatcctggattgatgggttgctcctatacttgcttcatttatttacactgccctatatactctaatttcttattttgagaattcaaattataatctcttagttttaggctatactttcatccatagtgtttatagtaacatgtttataattacataaccctatttcagaaagatttcttgccattccaacttgccaaaccaaatatcctagcaatcctttccagtagtttgtcttctgtgtcaataagacactagtcagcatgtatacatataaaacattcagttccccccactgtatcttaaaagcctatagcaggattttctagaagatagatatctttattgc

SEQ ID NO: 94725 - DNA, 1029 bp, Homo sapiens
taagtcagtgacctgcaccagcatggtcagtaggaaagatcttcccacaaatcgtcaccatagctttgttcatttgcagctgtcttcatcacaactaagttgtacagcttattttattttcaagtttaaatttctttttcatcaaaaggtcaaatttgggttagttatgctaaacacacaatcttgtatagaatcttttttccagttttcaaagctgttgaattaggaccttaattaactgtggagttacacttttgcactgtgtttaatacttgcattgtaggaaaagttaccagaaagaagagagattagggatgagtgtcacactgacacaaggcctggcatgtaataagtattctgtaactgtttcttgagctaataatgaagggatcaaaggctaacattatttatttaacacctaccaagcccttagattaaagacttattttgcattatctcatgaatcctcacaacagcttcttgtgagtatgggttctgttgttatctcccttttacatgtgggaaaactgaagctcagacagcgtgcagggaggtggctgagtcaggattccaatggggtctttctgactatagtcactaacctcatactttcaatcatagcatttctacctatagaatgtttacttcgtttgagagtcacttcataagaaagagggtgtttggctgtggtttgagaaggattaattgtaattaatcttggctgaggagagaggatcactcttttcttggtttttgaattaaaactgttgtccaatatgatagccactagccacatgtggctgtttacatttaaatatgaattaactaaatacaatttaaaattcattttctcagctttgttacccatatttcaagtgcttaacagtcacatacagttagtggttttattggacaacacagagcaaatttccctcatgacaaaaagttctgttggatagcattacaaagattccagggttatcagttgaaactcttgaaagtaacactagttaaaacctatctcggaaa

SEQ ID NO: 94726 - DNA, 1110 bp, Homo sapiens
tagaaccagttcttctgtctggaccagtcactctcatgcctaaacttataagcaaaatgaattgccattggtatctcatgtttcgatcttgcttcagggcactactttagaatatggacagttaatgcaaattaatacagttatcagccctactgaaatccatcgaatcttagtaaactaaggtcttgtttgctagatttgctatttaaaaaagaaaaaagatacagtaagggaataaaatagatgccaacttggcattattctttcagtgataaataaaatattctgacagaggagttcctgattaaagatgcaaggaccctgtcatgctaactgcagctgatttcctgccttgaaatgtcttcctgcttgtgtcactgccagtgactgacagctggcttaataattaaattcaagcaatgtttgcttttcttgacctttactgggaaacaaattttcaagctctggacatgagtagagtgttttaatttggggagaataatgtgtttgcatcatttccagcaacctgtgtctgtgattacctgtgttattttacattccacttcacagcggacttctagagggtggctggtagttgaagtcactcggtaattaatatccagctttggctccctgcacatgtttcacccaaaagagggcatttttgtttctggtagacttaataagggctctggcagcccactgttctcaagtgtatccaaagccaatttattttgaacatctaggtttttcatagtctgttaaggtctttagtcattcttgcttataagaacaaatcgttttctccagttgtaaccttgatttacttgcctttctttacttacatgctttttgttttgttttctttttgtttttgtatatgctctccatcgccctctaccggggcagacagggtggtgtagcagcaaagagctcccagacctgggtgagcttcagatttttatctggaaaatggggataacacacccatcttgtagaagtgttgaaaggatgaggagaaaatatgtatgtaatgtgtccatcaagtgcttagcacatggtgtggtggcactagatacatgtaactgcagctgttattttctttttctc

SEQ ID NO: 94727 - DNA, 4956 bp, Homo sapiens
aatacatctgtgtctataattagcccaaatttaaaatttcattatgtttttaaatttaaaaaaataatacaagcagaatatttattcttcatacatattcttgtacttgaatcagtttcttaaccatatttgtctctaattctgtgacagtagtattttactaaagaatgtattttttaaaatatgatctaatttttaattttttcataaaattatctgaagtcttgttcacagttgtcatttatggttaatgaatttgaaattgtttatgccttcatttgtttcttctctgcagaacataatatcgttaatggagaaaatactctcagtatagatattgaagtacccagtaagcttaaagaaaattattctaaatggaggctattcccaaatctattttgttttatattgaaatgaaacaatatgtcaaccccaacattttcagaggtactgtcttttacctgtattcagaatattttttcttaagaaatgtttttacataacagacacatcaaatataagttgtctgtataagcttttggagtcttttagcagagtttcagatgttataaaaatcatagccctattcggctcaaaataaagggatggaggaagatctaccaagcgaatggaaaacaaaaaaaggcaggggttgcaatcctagtctctaataaaacagactttaaaccaacaaagatcaaaagagacaaagaaggccattacataatggtaaagggatcaattcaacaagaagagctaactatcctaaatatatatgcacccaatacaggagcacccagattcataaagcaagtccttagagacctacaaagagacttagactcccacacaataataatgggagactttaacatcccactgtcaacattagacagatcaacgagacagaaagttaacaaggatatctaggaattaaactcagctctgcaccaagcggacctaatagacatctacagaactctccaccccaaatcaacagaacatacattcttctcaagaccacacctcacttattccaaaattgaccacatagttggaagtaaagcactcctcagcaaatgtaaaagaacagaaattgtaaaaaactgtctctctgaccacagtgcaatcaaactagaactcaggattaaaaaactcactcaaaaccgctcaactacatggaaactgaacaacctgctcctgaatgactactgggtacataatgaaatgaaggcagaaataaagatgttctttgaaaccaacgagaacaaagacacaacatgccagaatctctgggacacatttaaagcagtgcttagagggaaatttatagcactaaatgtccacaagaggaagcaggaaagatctaaaattgacaccctaacatcacaattaaaagaactagagaagcaagagcaaacacattcaaaagctagcagaaggcaagaaataactaagatcagagaagaactgaaggagatagagacacaaaaaaacccttcaaaaaatcagtgaatccaggagctggttttttgaaaagatcaacaaaattgatagaccactagcaagactaataaagaagaaaagagagaagaatcaaatagacacaataaaaaatgataaaggggatatcaccactgatcccacagaaatacaaactaccatgagagaatactataaacacctctacgcaaataaactagaaaatctagaagaaatggataagttcctcgacacatacaccctcccaagactaaaccaggaagaagttgaatcctgaatagaccaataataggctctgaaattgaggcaataattaatagcttaccaaccaaaaaagtccaggaccagatggattcacagccaaattctaccagaggtataaggtggagctggtaccattccttctgaaactattccaatcaacagaaaaagagggaatcctccctaactcattttatgaggccagcatcatcctgataccaaagcctggcagagacacaacaaaaaagagaattttagaccaatatccctgatgaatatcgatggaaaaattctcaataaaatactggcaaatcgaatccagtagcacatccaaaagcttatccaccatgatcaagtgggcttcagccctgggatgcaaggctggttcaacatacacaaatcaataaacgtaatccagcatataaacagaaccagagacaaaaaccacatgattatctcaatagatgcagaaaagatgttgaattttgacaaaattcaacagcccttcatgctaaaaactctcaataaaataggtattgatgggatgtatctaaaaataataagagctatttataacaaacccacagccaatatcatactgaatgggcaaaaactggaagcattccctttgaaaactgacacaagacagggatgccctctctcaccactcctattcaacatagtgttggaagttctggccagggcaatcaggcaggagaaagaaataaagggtattcaattaggaaaagaggaagtcaaattttccctgtttgcagatgacatgattctatatctagaaaaccccattgtctcaacccaaaatctccttaagctgataagcaacttcagcaaagtctcaggatacaagatcaatgtgcaagaatcacaagcatttttatatacaaataacagaaaaacagagagccaaataatgagtgaactcccattcacaattgcttcaaagagaataaaatacctaggaatccaacttacaagggatgtgaaggacctcttcaaggagaactacaaaccactgcacaacaaaataaaaggacacaaacaaatggaagaacattccatgctcatggataggaagaatcaatatcgtgaaaatggccatactgcccaaggtaatttgtagattcaatgccatccccatcaagctaccaatgactttcttcacagaattggaaaaaacaactttaaagttcatatggaaccaacaaagagcctgcattgccaagtcaatcctaagccaaaagaacaaagctggaggcatcacactacctgacttcaaactatactacaaggctacagtaaccaaaacagcatggtactcttaccaaaacatagatatagaccaatggaacagaacagagccctcagaaataataccacacatctacaactatctgatctttgacaaatctgacaaaaacaagaaatgggaaaaggattccctgtttaacaaatggtgctgggaaaaactggatcccttccttacaccttatacaaaaataaattcaagatggattaaagacttaaatgatagacctaaaaccataaaaaccctagaagaaaacctaggcaatacctttcaggacataggcatgggcaagaacttcatgtctaaaacaccaaaagcaatggcaatgaaagccaaaattgacaaataggatctaattaaactaaagggcttctgcacagcaaaagaaacaaccatcagagtgaacaggaaacctacagaatgggggaaaatttttgcaatctactcatctgacaaagggctaatatccagaatctacaaagaactcaaacaaatttacacgaaaaagcaaccccatcaaaaagtgggcgaaggatatgaacagacacttctcaaaagaagacatttatgcagccaacagacacatgaaaaactgctcatcatcactggccatcagagaaatgcaaatcaacaccacaatgagatatcatctcacaccagttagaatggtgatcattaaaaagtcaggaaacaacagatgctggagaggatgtggagaaacaggaacacttttacactgttggtgggactgtaaactagatcaaccattgtggaagacagtgtggcgattcctcagggatctagaactagaaataccatttgacccagccatcccattactaggtatatacccgaaggaatataactcatgctgctataaacacacatgcacatgtatgtttattgcagcactactcacaataccaaagacttggaactaacccaaatgtccaacaatgatagactggattaagaaaatgtggcacatatacaccatggaatactatgcagccataaaaaaggatgagttcatgtcctttgcagggacatggatgaagctggaaaccatcattctcagcaaactaccgcaaggacaaaaaaccaaacaccacatgttctcactcataggtgggaattgaacagtgagaatacttggatgcaggaaggggaacatcacacactgggacctgttgtagggttgggggagtggggagggatagcattaggagatatacctaatgtaaatgacgagttaatgggtgcagcacaccaacatagcacatgtatacatatgtaacaaacctgcacattgtgcacatgtacactagaacttaaagtataatttaaaaatatatatatatatatataaatcataggcccattcaatttcatttcattccagcacagggtatacaattatctaattataagtaggagctccatcagaaaattcttttctcaggaaccaaaaagctataagacatacagaaaacaattaacaaaatagcagtagtaaattcttccctatccgtaattatattaaatgtaagtggttaaactctccaaccaaaatacatagattggctgaatgaataacaaaccatgattctactatatgctctctcactttagagacaaaaaagactcattttagatttaaggacatgcataggttgaaattaaacacacggaaaaaatattccttgcaaattgtaaccaaaagtgatggaatagcatactactactatcacacagaatagactttaagtcaaagactgttacaagagagaaaaagaacattgttaatgataaaaagattaatttaccaagaggatataacaattataaatatatatgcaccaaca

SEQ ID NO: 94728 - DNA, 1049 bp, Homo sapiens
tatgctacaatgccagtttattaagacgtgcaggaagtgtgtcatttattcatttatttatccaatatttatttaatgcctactatgtgccaggctagtcattgtgaatataataagtaaaaacaaacccagtccttctccttgtagagtttataatctaagaagacagtgaccaaacaataaaaaaaaaacactgtaaattataaactaggataagttatctaaaggatggcagtttacattaaaatgtgcatggatatagagatatttcattggtcaaatcaccagcacttaggtggcagaactcatattggatttggagagtgacagagagagcaaggctaacttaaacgttcaggtttttgtcttagacaactgaacagatgtaaatggtcggtagatacttaaccatccttgacaccagcatacttcaaaccccatacatctttaaaccagaatttgccctttacaacaaataagacaccaaggaacatgctctgaaagactttctgaaatatgtgtgaaagcaaaagacacctataccatcaagggataaaagagattggtccattataaacacacaaaaaagttctccaacaggaaatggccaagtaaataaagattggttgtttattaaagcaagaagcagagcaagtagaaaaaagaaatgccgtgcctatgataagggagggattccttataactctgtgcagatattcacagttctgtaaagattcttgagaaatctctgcataaactgagaacttcatgacaaaggacattagatttttagaatttgaaaaaataaactcttctatacaacccggactggtccacagtggatttcactttaaatatatcaaacagctcctgtaacttggcaaagttcttgtacatccgctgcctctcttactcgtcctcccaccaataatccaatgagatgtacaaaagtcaacttaccagaaacaacacatgacaattatttagctctttatggatttcaaacatacttttccatctattttctctttgaaatctgtccaaaagtt

SEQ ID NO: 94729 - DNA, 1068 bp, Homo sapiens
actcaattaactaacccttctgactctcagtttctcaaaatgtaaataatctctctctcagagggttgtagaagcatcaaatgagatcgtgggtatatgatgttagaaaaaatcaacatgcatgcacctgtgtgtatagatatgcatatgtgtatatgtgtgtgtatctatacacacacacaaattcactaaagcttttcatttccctattaattcctgatgtctacaaagatgttaatttggtaaagtgatatcattaagcaatcaggcattttgaacattttaatgtttaatccctctgattttaaaccatacatccatgtagtctattttaaaggtgtggaggcccatgtaataaagaagaataacatctactgaatgctcaagtgctaagtatcatgctttgtacttgaatgcgatattattgactccccacacaatgtcatcaccactgtttatagatggagaatgtgtgtccctagtcacacactagtaagaaaagggctcagatttgagtcggtgtgatctgaaatatcctctgcccctctctgtcccctcggtatgcagcttgagggatgcctagctcccaagtctggggcgtttagcactctgagataatgatactcattggcccccaaatcctgataaatccccaaatccttatcaagcttgtcagactcctatagacagatgccttgggtaaacctatgtcataggtacacacagaattctaaaatatctttggtaatggacaaaagaaatttatatttcaagatcatctaagaattacatttggctaggcccagtggctcacacctgtaatcccagcattttgggaggctgaagcaggcagatagtttgagcccaggagttccagagctgcctgggcaacataggggaccttgtctctacaaaaaaaaaaaaaaaatttaattagccaggtgtggcactgcactcctgtgatgcagtgactagggtggggtgggtgagggggacaaggtagggggatcacttaaagcacagaagattgaggctgcagtgagccgtgattgcaccactgcacggcag

SEQ ID NO: 94730 - DNA, 1143 bp, Homo sapiens
ttccagggatttcatggaccccctgaaatggtaataaaaaacgtgtgagcctgtgcataaatgtgaatgtatactttcattaggaaagggatgtatcacttccataaaattctcaaatgttaagaactctgtgggcaatgaagagctattaaaaagttcatgggcaggcaaatctatcagaatatcattttagggtttagagccataagtggctccaactgcagtgtagaagatggaattcctggcagtaatactggtggtggagaaaccaataaagagatcattgcaataatccaggaaagaaagaatgagatcctaagtctgttcaatggtattagagatgaagtagacaggggcagatttgagaagtatttagatcagaggatcaggatatactgatggcacgtgtcatattggggaaggaagagagggaggaaaaggcacctgaggttgacttccaagttttcaacttgggctgataagtagtgccatcaaatgagaggagaaaatcacgcagctttgaaaaggaaaacagtgagttcagtgtgaacggttgagtttgacatatcaataggacctactggacaattgaatggtcctgaatacaaccctgaagaatggggagagatctaggctagagatgaagacttaactcatccatatctagatgagagtttaaactatgggaggaaatgagacaacccatcgagagttttagaaagaaaactggccatggacaagaatggatccatcagtcgcacaatatcataaatgtacttaatgccactgaattgtacatttaaaaataacaaaatggtgtatatatctccacaatttttaaagaggaggaaaaagatgacctcctagggcatgctgacctttaaaggtcaggtacaagaagaagcccatgaggaaagtggaaaggaacggtcagagataagagggagattgggagagtcacagatgccagaggaatagaatttcaaaaacatgcagggcagagtgggcggatgagttagatcatccctaaggtgcctaccagaaataacagaatatataaactctgggagagagagaatttagatctctaggcttgcccatctagaactgctcagcagtaataaaatggcttaaatttcatct

SEQ ID NO: 94731 - DNA, 1046 bp, Homo sapiens
ggcacatttatttgagctaacctctgagcgtgcaggaagtcatcatttgtggaaaaaaaaaaatccattactattgactgacaatgcagcagactccacagcaaaagaaaaacaaaaattcctggaaaaaatagaatagaagttgccttaaatgcatagccaggctcatgagaaaataggagatgtttccagggcccaaataaagcaggatctggaaatcagatggtcatctgaccctaaagcagtggcttcctgcctgagattttcttatctcagtaacctagatgtttggcttaatagcctttcatgggcccataaaagtttgggagttgaaattgagtcttctgcctaaagctgcctaaagccttgagtgaaagatgggctatgggtttgatgtgggtgtgtatgtttgtgtccctaagaattcataacctctgagaggtctagagttcaaacttacactacttgaggttttgtaaattggaagctgagaaaaagtttggaaatgcttagggatctgcaagaggaaacctgaaacctctggcaggttcgtccctcaacccaggcctcatagaatttccataggtaaatgcctactacacatgagctcacaatcccaaattaccaaaaacccaaggaatattatttattacttgggcccttgggattttatgatacacatggaaagcacaaaagaccagagaaaggatgaggaagtcagtccctgtcagcactattccctttgctctgtccaaagttaacaataattgttaaatagcagatacactgaaaattctctgtgtatcaccatttctcctgtaacatgaaatgtgttcctgaagatatgactgcattatggaattttggcccatgaaaataataggactaatgggggaaatgggttcagagcagaacattcaaaactgtgcgatcttacaaaataatatattaggttggcgcaaaagtaattgcggtttttgccattgaaaggaatgacaaaactgcaattacttttgtgccaacctaacgctaaaaaataataaact

SEQ ID NO: 94732 - DNA, 1050 bp, Homo sapiens
caaattgctgaaaacctccttgaggtctggtggggatatggattgtaaggcagacggatggagagataggagggacagcctttcactgtgcgtttccatgtcttgcccaccgtgagtcagagcaggtcacacatcagctcaaacgtcctcgtgatttcttttctcactggaataaaatccaaagttcgtacctgaacctgcaaggtctttgcatgtgctgtccccgctgcctggacaattcctccctaaatatccacccatgtggctcagctctctgctcctttggtcctccccttttctctttttccacagtttccctcttccctggccctcaaaacccaaaggaatccagggttgggtagcattcacattgcaactcatgcatgtatttgtcattctcattctcgaggggcagcatattttgtcatttcatttcattgtattttgtttattttaggttcgttggggagaaaagggctccacagaagaaggtgctaagttggaaaaggcaaagaatgcaagagtcaagatgccggagcaggaatatgaattccctgagccgcgaaatctcaacaacaatatgcgtcggccttcttccccccggaagtggtactctccaatcaaggtgtgtctctttactcaaaaaatctatcatcagtcctgataaaacacttacatagtgaagaatcaaaatctttccacatgataaaatcccaacctaaaacccagcttatcacaggggaacaattatctaaaattatggacttgaaagtactagtaattactttgtcaatttccacataatctgggttgaaaactaggctttttaaaaatcaccgtggtgctcacttctgcagcacatatagtaaaactggaacaatatagagaagattagcatgacccctgggcaaggatgacatgcaaattcgtgaagtgttccatattaaaaaaaaaaaaaaaatcaccatggcaaggtactggaaaaagcatggactgtgagtcaagtaacttgggtagtaaccccagagagtgactataaatttccatagc

SEQ ID NO: 94733 - DNA, 1077 bp, Homo sapiens
tcatcatcatcattttgtagcttctttcaatttcaacttgtaggactttcaacttcagattgtctcatctcccaaacagctgcaacaacagaaggtcgagtcctggaatcaggttgcaaatagcaaacagagaagtaaatgctaaggctgaaccagacagggatgggaataaagcaaccctgttcaaattctccgacctcattttttcccttccaaacaaaatcaggattgagggaggtagggattagctctagggtcagaattttacccaagtgtgtaatattttaggaggtttgctactttgtctaagcatgatgatcatgtctagccacttggcttctgcgggcctgctcctccagctgatggcaccaaaaaagatcatctcgagggacattcagcatctccgtgatgggcctcaattaagaatcatcagaatccatgctggtgggaagttctgttctggccagaaagtattgggttagattatagatggcaaaatctgacctaggaaataggcttttgaacagtgtggggaagagccagcctgctataaaacatccacacacacccatcttcgttcagcatctccatgaccaccccaactcaacctgaccctcagtctcggagttggactggcagttcctcataatcccagacccttcattttagaggcaccaaagctgaggtctggaaaggtggtctggagagattcccgagccctcccaggtccattatcttatctgttccccatcaccttcttactttatcctctttttaatataggaaagatgaggctcagataagatctctgctcttttcaaggtcacaaagagtgttggtggaaatggcaagactggaaacccaccagctcgacactgcctggctctccttgagtcctcaccccaggccatgagaggaggataagcatccagactcagccttatctcttgaggagaaggcagagttagtccttgccgcccaatcccttcccttcctgtcctcctacctcttcccacctcccagtacctttccatttttatatcctgcccaagatgacatacccattgatatcctccc

SEQ ID NO: 94734 - DNA, 1053 bp, Homo sapiens
tttatgtcacactcatttagcttttgatagctggcttctacctctatctctaataccttgcatatggtagaattagtaaattctttattaaagaagaagaaaaacaggaaggagataaaagaggagaatcacaaagaaagaagtaggggaggggaggaggaggatgggaggagtagagaaagagaggagaaaaccagggaggtgacagtgggaaagagaatttcacaggaccttggacgtggtactttgattgagtgtaggtaagaggcaaagcccagggagcgcagccttgagtacttagtggaaaagaagatccatgaggttctgcgtatatgaccatccaaggcagctcccaggaggtgttcctggcaccatgccacacttagctgcagggcagtgcccattcataaggtgtcagctctaaccagtgagtgcaatacctaagagcaggcgcagactgtgaccccttaacctaacctatgctttatgataaaatagatacatatttatatttgtactattcagaaaacagcatatgtatccatttcttgggggttttcttgtaaacaacataatacaatatccagttagtactgaggtgtttttgagacaaggtcttgctccatcactcaggctggagtgcagtagagtgatcacagctcactctagccttgacctctgggactcaagtgatcctcctacctctgcctcccaagtagctgggatcacaggtgcatgccaccaagcctagctaactttttttaacatggggtctcactatattgcccaggccagagtgcagtggtgaacatagctcactgcagcctcaaattcctgagctcaagtgaccctctcacctcagcctcctaagtagctaagactacatgtgcacatcacctttttttttttttttttttttttttggtagagagagggtctcactatggtgtccagtctggtctcaaactcctggcctcaagcaaccctcctgcctcagcttctcagaatgctggtatgacagacatgagccaccaccacacctggctattactg

SEQ ID NO: 94735 - DNA, 1049 bp, Homo sapiens
aattaatagtcttcgatatctggccatgggtaacctcattgtaactatcatcagaatgggcagagatgatcttgaagtgtcacatacactaaagtccaaacactatgtcagatgggggtaaaatccattaaagaacaggaaaaaataattataagatgataagcaaatgtttcagcccaatgtcaacccagttaaaaaaaaaattaatgctgtgtaaaatggttgaattagtttgcaaactatataaagacatatgcagtaaaaagtctgttaatgcacatcctgtgggaatggagtgttctaaccaattgccttttcttgttatctgagctctcctatattatcatactcagataaccaaattaaaagaattagaatatgatttttaatacacttaacattaaactcttctaactttcttctttctgtgataattcagaagatagttatggatcttcaatgcctctgagtcattgttataaaaaatcagttatcactataccatgctataggagactgggcaaaacctgtacaatgacaaccctggaagttgctttttttaaaaaaataataaatttcttaaatcaactcttttttctggttgtctgtttgttataaagtgcaacgtattcaagtcctcaatatcctgatcataataccatgctataggagactgggcaaaacctgtacaatgacaaccctggaagttgcttttttaaaaaaaataataaatttcttaaatcaactcttttttctggttatttgtctgtttgttataaagtgcgacgtattcaagttctcaatatcctgatcataatacagtggttgctgtgctatacattaaattacatttctcaaatgatttcatgccttccactaatttctctactgtctggattactgtcatttcttccttagctgtcagacattcaaaatattttttatttctcataacaaatttcaaattaaaaatgtaatccatgctaagagaaaataagtaaaaagtgaaaacagaacacacaggaaaaatatactgcatcagttaggat

SEQ ID NO: 94736 - DNA, 1327 bp, Homo sapiens
ttttccccttttaaaaaaattagcatataccatagcaataaaagaactaatgttaactattgtatgctacaacttaagtgatttttctaaagaagcacaatgtcattgaaagtattattgaaaaggatcatagtcacattgaatttgtgaaggccaaagaaattgaagggagtgatattttcattttatgatattcacatatttagtaaattttgtgtacaagaataccaggcagagtgttttacccatggaaacaggtttcagattactttatttttactgttagagtctcaagtttagaaatgctaacacttaaatcagtttttttctcactatacttgaagattgttaatattttgatatcttcctagcttgatgaatttaaacatatcttcagatctgtgacagtgacagccaataggactgataatattagcttcaaaccaataatatccagggttaaaataaaaatcatagtgaaagtacgattgtaaaattatgctatattaacttttaagtctgtaataacttgacatcaaaatgttatgtaattaccataaataatggctagcgagaacatctttggaaattctcaaattacctttcttactacactgtttgcagaatgaatgtagaaatgatcctgttagctttctgaatgttctgtggttgaatgtgtttttgcttaaataaagcttttggtatttgtttaaattacacttcttgagaagtggaaattttaggatcatctttgctttgtttcagttttgtgatttttgaaatgaatgtttagtttactgagccagttggtcatttcttcctcatgtcgttaagtccagtgagtaagcctgaactgtgaataaattaccaaaaacttgcttagaatttcattttgaagcaatttgctaatatttgaagtgtatacacatttgtagttatgttagaaattgtattgtactaagaatgtaatcaatgtctactttagttgtaaacatttctgatgtcaaaactttattcattactgttgattttaagaataagaaatcactgcctaaatattaccaaaagccactgtctctacccgaacttcccagtttgggaaagaatcgttagataaaacaaaggctctgccctttctgataccaaactccacagatactttctcacatcttttaaaacattttgcaataacatattgtttataggaagtttacggggtatgcaatgattaaaacttttaagtgaattgatagttgcaaaagaaaggataatatttaaggtcagtgagtagcaagacaatctaaagtttctgtaatatctggctctc

SEQ ID NO: 94737 - DNA, 1125 bp, Homo sapiens
atgttgggtatcctactactttgtgttttcatctcctaaaagtggtttttatttccttgtatctgtagtcttttattttttaaatgactgctgaatgacatattttatcttgttctttaaaatcacaacacagagctgctattaaattaatattgatatattcagtattctcttcaactttgtcacgaggaagaatttcctgtagttaattttaactttccttcattacattgttgcataaaactagtcccttagtgccagtttggaagttacttgcaattgtttggaagatttgcaggtcgctgacctcatcatttcactctaagtatatgtggtaggctaagctcagaaaaaggtatgtatgctttacactgataggcaccaaatttagtattgtatcctaagtatttttcctcttctgtattttctgtgctctacccctgaaatatatttaggaataaagaagatataaataaagtgatattggggtatgttcagcttgtaagtgtcagaaatggaagttgacaatttggattaaaatatttaaagtagaatgttattatttgatacccccaaaattgtgagtaataatttcttaatggagcttttctggccagatcttcagggctataggagagtgtgtttgtttttggtgaagtccttctttttcaaaggtttttacttttaaattgtgaagataagctatttagcacaattatttaagtaagctgttttttcctttcttttctttcttttcttgttttaacttctgggtgaggttaagattttctaatagttattgttgttgccagagaagcatagaattctgcttgtgtcttagggttagagaaagatttgttatattttgaggtaatttggaaggactttcatacatggtgactagaaacctgatctttttaagaataaaatagggtcactatttacattatatataatatatggctattatagctatattaatctactttaattgtttctaagattattttgtgtaagtcagctagcgtgtgtatagtgtcatttcttatgttttgtatattaacgttttacaaacacaatttgtgtgggtttgtagcatttcttatagtttaaagtatgattcag

SEQ ID NO: 94738 - DNA, 1025 bp, Homo sapiens
ttgcagtgagcctacatcatgccactccactccagcctgggtgacagagcaagactccgtctcaaaaaaaaaaaagcttgtctcattcacttgttgtaactgcacatttcaagtatgaagttaattaaaagtgacttttactgttatttttttccacagagtaaaatatgttcacccaatcttttaggcagtcatgtctattgcatgaacttttgttatattttatttaccaagattatattaaaggaaacttttagttgtgtacaaattcttttatttgatttgtttttgttttaattatgtgatttctattactataggcaacttcagttcatttatgcagaaggaaatatttgagcagccagagtctgtcgtgaacacaatgagaggaagagtcaactttgatgactatactggtaattacatatgaattattttattatttcagtgtctctgacagtaggaggtgccattaacaacctgaaagttcattgcccttaatagccttgtagaacaactacagctgccagccatcagtggagcccagccatcttggaaaaagttctttagtgtgtgattctacctatataagatatctagaatagtcagattcacagaaagagaaagtagattaatggttaccaagggctgtggggaggggaaatggggagtcactgtttaaagggtacagagtttcagttgtgggatgatgaaattacagaaatggattgtagtgatggttgcacaataatgtgaatgtgcttaatgccactgaattgtacatttaaacatagttaaaatggtaaattttatgtgtaggtcacccactgtgtaccagggactgtcctaggtactgtgaattctaagaagaataagacctggtcccgttgctgggcagcttatgtgtatctgcctggcctaggtttcctttctgagtgtataaataagtaaaagtgtgaacttccccagaggtctttcagttatttgcctgatgcctttggataacctgtaccctcctgcatttt

SEQ ID NO: 94739 - DNA, 1010 bp, Homo sapiens
ccagattcaagcgattctcctgcctcagcctcccaagtagctgggtttacaggcacgtgccaccacgcctggctaatgttttgtatttttagtagagacagggtttcgccatgttgaacaggatggtctcaaactcctgacctcaggtggtctgcccatctcgacctcttaaagtgctgggattacaggcatgagccaccgtgctcagccggattggtagtttttatgtaccagcagtcgctacaaataatgatattgtcaactcttgattatctgttcttacagttttcaaaattagttaaaaaagatgaaaattatcccgagatcatgtctattttctcttggaatgatattttaacatttatgtttctgacattctatgacttatttggatctcaaacaagtaaatttaactatggaactgattggtttttcttagcaaattccttagttctagttcttaaattcatttagtgtaaatcagattattgttttagtttgaaaggacttctctttaaacttttactcaagaatgaatgaacagagaaataagaagaatatttagttcagctctctcattttgcaaatgaggcaacagacccaataaacttgctcctttcacatgggtaacatttgattactagtttagccacaactgaaattgttatctctagacttcctgtttatttccctactgtacccacctcccctgcactgtttgcttcagctatgccacataaacaatgctgctgatctacctgatgataatctggtaaatgagaagtagatgtaattatgttataaataacataaatagtatatagcatgttaaaaatttttgacttgagaaaaatccagttagagtaatagctattttagatttatcatacttctaacttttttgtcttcaacacttttacctcttttagaatttatcgttattcacaatggaatcatcaccaactacaaagacttgaaaaagtttttggtaagtaaggtgacctcaaaag

SEQ ID NO: 94740 - DNA, 1065 bp, Homo sapiens
ttcctaagtcttttttttttttttttgagatggagtctcgctctgttgcccaggctggagtgcagtggcatgatctcagctcactgcaacctctgcctcctgggttcaggcgaatatcctgcctctgcctccggagtagccaggactacaggcgcgtgccaccatgcctggccaatttttgtatttttagtagagatggggtttccccatgttggccagactggtcttgaactcctgacctcaggtgatccacctgcctcggcctcccacagtgctgggattacgggcgtgagccactgcaccctgcctcctaagtcttttaatcactattttgaatatgcctgatctttagtttcagtgattgtatattccaagagagcagcattgtaataattgtatttaaatatagcttatagcattatctctgcagcatgatttaatattgaaatttttcttttcatattcttcagagcaacaagatatggatttggatatagaatttgatgtacaccttggaatagctcatacccgttgggcaacacatggagaacccagtcctgtcaatagccacccccagcgctctgataaaaataatggtatggaaagattttttgtgctttggaatgattgtggaaacctaataatgggggcagaatgaaggcttttagattttcattattttaataatttttcatctggaaaatttcaaacattcagaagtagtagagagcatatggagctgagagtgctggctcatgcctgtaatcccagcactttgggagcctgagttgggaggattgcttgagtccaggagttcacgatcagccgtggcaacatagtgagaccctgtctctacaaaaaataaaaaaataagttaggcattgtggtgcatgcttgtagtctcagctactcgggagactgaggtgggaggatcgtttaagcccaggaggtagaggctgcagtgagccgtggtcacacctcatgccattgccctccaacctggacaacagaatgagaccctgtctgtccaccatgcctggctaatttttgtatttttagtagaga

SEQ ID NO: 94741 - DNA, 1058 bp, Homo sapiens
gaatcattcaacaagtccttcaagccattcaacaagtcctttgaggtattccacacttctcctgctttctcacttacattcagtcagttccacttttcaatatcatttatttctgtctgcattaccactgtttagttcaggtcctcttcatttttgctttgctgtagctgtagcttttgacagctggtttcttccttccgtttctctccctccagttctttccctacacttgtttctagaagggctttgctaaacatttttgccgaatcacttctctgcttaaaggacagtgttttcccagtatcttcagggtagctttttcaaattccttagcaacttaaggagactcttaagagatgtattctgtgaccttctttccttagctaccttctgaggtgggtgcccatcttttgcatttctccattgtatcccaattgtaacctgtagtatttttattataattcataatcacgctgaattattttttccttgtctgtcttctcgatagacttagaaatttgaggacaggaatggagttatttttgtttttgtgtctagcagctatcctggttcttgacacacaataggttttcagtaggtaattgaattaatacattagtgaattaattagatgagaatgtattttttaattaaaaattttgcctcacattaataattttatcagtagccagtttctaaattttgcttttttacctcatgatggtttaggtgtgggatttgatggaggcaatgataaagattgggaagccaatgcctgcaaaatccagcttattaagaagaaaggaaaagttaaggcactggatgaagaagttcacagtaacgtacttaatttgatttttgtcccctttccccttctcttccttttcccctccccattctcctctaagttactccctccccccatattttgggaccaattttaatgataatggtctgtaacattgaagggaggaaagaaaagtagttttgttactgtctggactagttttaaaatgtacctgagcctgaaaaataatcattgcaactagggaaggaaa

SEQ ID NO: 94742 - DNA, 1013 bp, Homo sapiens
ttacatctatatttagtatggctggcattttgaaaaccagtaaattgagaaactgaagatgtaacttaacttacaaagtaggtgtgcctttttgtctcaaagtttccatcaaaatcagtttcttttctctgatactttcaatccttgagaacagagaatgtctgcatatttactggcttaaaatttcataccctaacatcattagcatatcaagatgttttagtgtactcatctttatcaccagatgttgagttgattggtattccctaatttttcttcagataatcaaatgaatgtttctgtcatcaatttcccaaaatatatctccataccaagttacatgttctttctatagttttatgtttttaatgaaccatgtagttaaaatcattctgttttaatactcgtacttgcatggctataaaatttctactcttgatgtttttatatgtaattatttctaggatctgaagaagatgatgaagttgtggcaatgattaaggaattgttagatactagaatacggtacgtgctcctctctctacctgaattcaagtgctttggaggcatttttcattatagcaatatagttttagttggccatgagattatagtagattttcaaaataagtgcaagttaatgtaaaccacaacaggtagccgtgacaattgaatttaaagcctgtatcttctctacatttactcaaaattttaaaacatccaatttatttaaacatattcaatgaagaaatgtattcttcacagtctcaatttagatttgatattgttataataccaaatttcttaaaaagaaaaaaaaaagacttaatgtttggcaaggttgtgaagagagaatgagtacctattttcagtatattgcccatacagaataaatgttaagtgagtggagaacagcaggcttctacttttgcttgtagcagaccaatagtcatgctgagaactcccagaaaagctggataaagtacaataaaaagaatttgtttgaaagcatt

SEQ ID NO: 94743 - DNA, 1420 bp, Homo sapiens
ttgcaaggatattgtccaatagatctatgaaatctcagtatgttgtataacatatcccctgcaacacaagagttgctcaataaatgatttccaaaatgaaaatactgtagaagttaaaatctgactgggtgtggtggctcatgcctgtaatcccagtactttgagaggctgaggcaggttgatcgcttgagcccaggagtttgagaccagcctgggcaacacagcaaaaccctgtctctacaaaaaatacaaaaaattagctgggcatggtggcgcacacgtgtagtcccagctgcttgggaggctgaggtgggagaatccctttagcccaggagttcaagcttgcagtgagccgtgatcacaccactgtgctccagcctgggtgacaaagtgggaccctgtctcaaaaagaagtttcaaatggggattgtgtttcaaagaattctatgtatttaaagctactgctgtcctttttttggataagaatacccttaaaattagtaaatttctggctttcatccagaccttagaacacaggattttgaatgtagtaaaaaactacattcaaaaaaaagaaagaaaagcttttttgtcaaaattaattactatggttttgttaataatcttgattgttaacgagatatatactttaattttctttaatttgggaaatagatatgatttaaaataatttgaagtgtgatgactgtaatgtagagttagggaagtttaaggggagagggtatgtgtgtctgcatgtgtgtatgtatgtaaatgtatacctatatgtgttatggagctgtaagcatataaattcagcctctcctttccattgctagcttgaacacattcctgtggccatactctggctgattctggctaagggcgtgagttaaatcagggtagaccttaccccttctgtagccaggggccagaagaggaacactttcctgcaggcttgcctgactgcttggatcacagaatagcttagatataaatattgtaaatactgagtaactcagctgattaaaccactttaattggacttttaaactttgtaggactgaaatatgtggtcatataggcttttcaaataggaaacccattaattttagtcattgatattgactttaagcaccactaatctgtattttgggggagtttacatctacctccttaggtacctattagtaccaagcataataggaaaaaataggctggcatggtggctcatgcctataatcccaacactttgagaggctgaggcgggcagatcccttgagcccaagaagttcaagaccagcctcagcaacatggtcaaaccctgtctttacaaaaaaatacaaaaattatctgggcttggtggtgcatgcctgtagtcccagctactcaggaggctgaggtgggagaatcacttgag

SEQ ID NO: 94744 - DNA, 1842 bp, Homo sapiens
tgccccacttaatgatgagggagacattcagagaaatgcatccttaggtgattttgtcattgtgtgaacatcacagagtgtacttaacacaaacctagatggcacggcctactacctacctaggctatatggtccagcctgttgctcctgggctacaaacctgtacagcatgttactgtactgaatactgtaggcagttgtaacacaatggtaagtatttctgtatccaaacattttagacatagaaaaggtacagtaaaaatatggtataatcttatgggaccatcatggtatatgtggtccatcattgatggaatcgtttttatgcagcacatgactgtatataatcaacaaacaactctactttcttgttttcgtttgttgtgtttttgctttacacatttgatagggaacatagaagttgtgacctttcatttcagtggaaagcattgagccagaatatatttattcctaaaccatcgagccacacatgcattgatgaaccctgaaagaatccacagtaattgactaacaggcagtactgaatgaaagatgtcatatgtggtgaaaaatatttaatatatcagtttcttgggctcacatacagccctttagttccaagtgcttggttagattagaaaatgggatgaacacaatttgatgctgaagcagctgctgagcagcacccagggagtctaggtcatacgccctatattgttttcggcccacttattgttgagttgaaaagtctcatatttgtagactagagtgtatgtgtttagaggctcatgttgtatctgagttttctctggcaactaagatctctttctaaacgttctagaaagatactggtatcttactggcccattatttagtaagttttagaatacatgtacatcagtgttttcaactgcttggtggacatttcactgatgcataatcaaagtagcagattataatcatcagagtgatctgacaaggaaattctgtatttgcttccataaagaaaaataatcaaaacatatatcagatataatatatatgcagtatatcacataggaaattttattgtaggaaattagagaaggatgctactcaattcattctctagcaggaagaatacagcttaaaaatcacttgggtccctttaataaagaaaagtgtgattctgtgttgtgtgtttggaactgaaattggagaacacgtgccagtcgactgtgaaatggttgctggataaaaccacagatgtggttttatccgagaaatgtgggactgaaattattttgatgagaggtacataagagagctgcagaaaagactgtagcttctgaggaggcaggagtaccttgttaatatccaaaccacccctgagttctaatgttccaactccacctaaacgaggaattggaaactttaaatggaattatctaatttaaattcttagttttttctttgtctttctcagctgatacttgtagttttgttttgttttttaaccaccaagaacacttgcaagtttgttactgaaaacatcactaaaggaaaagaagagtttcaaaatgcttgaaaagtagtatgtggttgggaattgtttttgttcaagtccctggaagtcctcttggcttagctcccttgttcctgttcccacttcatttccttacttaacattcccctattttgagcatgtcaataagtgcatgatgaatggcacagttgaatgatcatgttaactttaattgcttcctttgttgctgtaaacagtttcttgttaagtttcagccaagtctgtgacaatctcaccaaataagaatgaaatgggcggggtgtggtggctcacacttg

SEQ ID NO: 94745 - DNA, 1006 bp, Homo sapiens
cgccactgcactctggcctgggcgacagagcgagtctaaaaaataaaattaaataaaataatgaaaaaaattagctgggtatggtgacatatgcctgtagctactcaggaggctgagctggaaggatcacttgagcccaggagtttgaggctgcagtgagttgtgagtccagcctgggtgacagagtgagacactgtctccaaaaatataataataaaaataaagcctgtatctcaatgggaagatttctgctaaggcagttcaactcactggaaagaactgctgcattaggtttcaactttaatgctttctgttacttctagtaaaggttaagtgatttttccattagctgtagaagtttggagagctatttaccaagccagatcaatgatttaaaaattattggaaattcatctaagaatcaagtctgaatgcccaattctattgcggttgattaggtgtgatattctttaaagttcaggaatattggcagtaaaaaatgagcagctacttttcaatactttgtccttttttggtggtctctgcctatttcaaatgtcctgatcaaaagataaataattggcactgtgccaaggtttggttttccaactaaggtttcaactgtgccagaaacctatgtccttcactttggtggatgctaaatgttattctaagaatatgctttttcccaattctcctttctgatttttatgtattagtggatgcaaaattgtctttctagttgaatgaataatttcggctaatgcacgtggaactttgcaccccagattcttcccatggtcattatcaagtgaagccctcaaaaacatgagcgaagagcctagaaatactcagggagatttctcaccccaactcagaaattttttttttttttttcaagacggcgtcttgctctgtcgctcaggcgggagtgcagtggtgtgatctcggctcactgcaacctccattttccgagttcaagcgattctgcctcagcctcccgagt

SEQ ID NO: 94746 - DNA, 1039 bp, Homo sapiens
gaaagaagctgtctcaggccccatggctggcaaaccattccgcccccagtccttatccaagtattcccgtcactatagcccagaagacgagccaagtccagaagcccagcccattgctgcctacaaaattgtttcacaaaccaacaagcagtcgatagctgggtctgtttctatcacatccctttcctccaggactacggagctgccagctgctgatccatttgctctagcacccttcccttcaaaatcaggcaagaaaccctaggagcaaaacctgagcctcaagcctcttgtctctatcccaccctcaatacccgccatggcactcccagcttagccttctgaagaagaaatattatcagttcttatatttcaattccctgcgtcagagcagaatttcttgagtcaacaaactcagttgcagtgatatttagttgaagcccctttaagttatgttcatttttgtttgtttgtttgtttgtttatattgatttctggacttggaggcattttcatctccttcacagaggtcatccacttccaccaagaactctgctttccccccgccccacccacagaaactgtttaaatcctgaaatacttcttcaccccaatcccaaaggggccctattgttgctagttttaattcctgtagctcctgttctaagtcatgcccatcgaagaatcaagattagtccctccactaaatcaagatttagtactcttgaaaaggggagatgtctggaaagaagagcaagataaaaaccctgcacatcaacaggaagtataatcctgcagttactaataattcctgtagaagcagcagctctaggagtctccagatctgattctcagtctgtgtgcaagccaggctggctctcgtgcatgactgtctatgggtgtggaatgtacgtcagagcctgtgtagagatacaggcagatgggctaactcctcatgtctagtcatgctggcagggctttccccacatccatgcttttgaaattagtgtgagtgtacaggtttgtgtgtgcatgtata

SEQ ID NO: 94747 - DNA, 1051 bp, Homo sapiens
tccctctgcatgtggcgcggatgaccacatgccagattctgaattgagtcatccccagacagtgtttctacataatccaaaactgtcatggtatatgtggagatgaatgactgggtttgttttcattccataatgagccagtgccaggtagagcaggtgtccgtgcctggccctgtgtgtaggagcattgcatagttacgctgaatgtctgtgtgcctaacatcttcatctcctttcctgtacgtcgtgcctatcatgttccaaaacgtgagacagtggttgattgtgttccagtttgtgtgcagtttccttgcctgacttttatttttatgtttttcctgttgcattttcaacatctattatttggtcccacaatgtttttgccgcgggttgaccattaaatgttccaaatagagttgaattgacctacacattaattctgcattttatgcttttctagatctccagagggagtccaatccctgtcctgtaataactgtagagcactttaaagaatcactgggtgttaaaggccttccgctgtatccagacccctccagagtacctggcacaaagactcagaacaacttagaatctgactacttggccagagatggcccttcaagcaacagctcattccacagcagcgaagaggaagggactgaccttgaaggagacatgctggactgcagtgggtctcggcctctccttatggagtctgaagaagaagatgagagctgcagaccccccccggggaagctgggaggagccgttccattcgctccaccagaagtctctcctgagcaagcaaagacagtgcaaggtggaagaaagaaccagtttcaagccttcacacagccagccactgatgggctcagtgagccagatgtttttgccatagctcccttcaggagctcaagggttccaaatgatgacatggacattttctccaaagccccatttgtctccaagagcagtatggctccttcccagccagaggagtcagacgtgtttttgagagctcctttcactaagaagaaaagcatggagg

SEQ ID NO: 94748 - DNA, 1102 bp, Homo sapiens
cattttttttccctaagagatattttgctctcctgcagaacaagcttaataacatcaactttcaaggtagttttggaagatgagaaattgtgcttttgttttggcaactgaaaactttgtccaactgatactatgtgaggaaggtggttcaaggagttttagggccctcttgtccttctttaaggctctgcaaaccttattttggaaaacttatttttctcccttttatttgaatttcctcccagaaattatcatcttggtatcactgagacaaatctaatatcaatttacttgcctgagaaattaggattatgtctgtccacataaatcgcaaggaagaaggtattctgtttatttcctgtccactgactgatgctttcgtatcaccatgtagctgcacatactaaaattataatacaaggaaaaatttattcttttcaaaatcttattcttcaaatactattctgaaagccatttggcaccagtacagaatttaacttaacgccccaatctggaattcactgaacgcattcaaactgttagaaaggaaaataaaaatggaggacaaacacatttttgttctgtttctgaaaacaatatttaaggtcagaactgtttaaaaagaagcactgctaaaaagttataggattcagagaaacatagtatttttgtacagtatcttataaaatgttcagacctctctctacattctctttacaatgtaatgtctctaagtgactggtttcccaataaactgattttaatgcctcttctgctgtggtctgtgtgcttaattcatgcagaaactttagcaggggataatttttggcagaaatttctgctagctaatggtttgcataggaggggagagggtcagtatgggaaggggatcattgagttccatctctacagaggttctgggtcatctatggctccaaatcattgtatctaatattcttatcctggtgggttgggaaactccagtagtatctctttactgagcccatgatgaaatgatacctttacccccaaccaccctttctctggattcttcttgcttagttacatatgcctttttcctgccctcttgctaacatgtgcc

SEQ ID NO: 94749 - DNA, 1055 bp, Homo sapiens
cgaagggctctctgtggttggatagcagtgaaaataggacttggtttacccctttatggacaggaaaattgctgcaggtcagaattgtattctctttcctggacatagaaagaatgtataaattaatgaaggaaatgtttatttttaaataagaataatgtttgagttctatgttttcatatttgatttttttcgtatatacatgttagaaatataatgaaatatctagtttctcaatttaattgaaactatgaagagtacagtttagaaattaggtatctctaaattgttcttttcatatattacccataattacattgaaatatattatctagtcatttggctcagtaaagcttaatggaggcagttaatgaaaatgagcagactagaagccagagacggcagtagaagcctaagggagataatgacaagaaattgtcttgggcttatttagagtaaggcctcctcaaaggggagaactatttttctgttaaggaacacatatgagtgctttggtaaacggagccttccttggtttagagcatcatccctgagctgaaagagtttatttgagttgagcatagtgtcctggtacctgtggaatcatagcctgagctacaaagggacctttgagaccatcctctagtccaccatcctcttcattttacaggtgtgggacctgagctggattgaacagggtcgggggagaagaggcctgggcaggacaggccacctgggatctcatcctggcccttgccagccactggctgagtgaccttcagcaggcacttcacctctcagagttgctgttccttagagttatacgatgggtttggactagatggtctttaagattatagaagtatagggtcctaagtatatattattatattgagaagggctatgaaggatttatataatcctgatgttcttcagttatcttctgtagttcctgctattacggtagcagtgtttacattttaaagaattataatgggcttttactaacttgctctttcttgattatctgaatagaagcctaaatcataatctta

SEQ ID NO: 94750 - DNA, 1033 bp, Homo sapiens
tgtagggacagaaagcagatctgttgttaccagggtctgtggtgagaggaaggcactgactgtaaagggttatgaaggaattttctcaggttttggaaatgttctgtatcatttcagtggtaatgatatgaatgtatacatttgtccagactaaccacattgtacacttaaaatgggcgacttttattgtatgcaaattacacctcaaataaaaacaagcagacgcacccaggacagcatcttgaatgccttacaaagtgactacttcacttgaggaagtaatcatttttaaacttccaattttgaaaacctgttgttaacaagatattaatagcattcatttttatggtgaacctgtaccaaatattgacccctaaaatgtgtttgcttaaagaatagtgaatgatccgctggctttaatatcttactacatttttgctttctttttgtctctctgcccaacgtagaaaaactaattgagggactcaaatctcctgacacttctcttctgctccctgacctcttgcctatgacagatccttttggtagcacttctgatgctgtaattggtaaagtcatcatctctgtttcttcagtcatgcatgatatgtgtgcctgtttcaagaatgacaagtacctagttaaccaatccctggggaatagccctgccaccccagaagccaaggctatttaatctcacttgtatcactccaaatgaagtgttttccttgcttttcgggggtacaacgtctattttttgcctttcttgatatctggagatttctagagtggatctcttatgaatgaggaggaatgtggaaagtttcacatttagttagaagaactttaaaaaattggtttctaactagactacctttactgaacttaatgaaatttagcagattcttcttttttttttttttgtttgagacagagtttcactcttgttgcctaggctggagtgcaatggcaagatctcagctcactgcaacctccatctcccgggttcaagcaattctcctgcctcagcctc

SEQ ID NO: 94751 - DNA, 1221 bp, Homo sapiens
caggaggatccttgagcccaggagtttgaggctgcaatgagctatgatcacactactacactctagcctgggtgtgacagagtgagaccctgtctcttaaaaagtgtgtgtgtgtgtgtgtgtgtgggtacacacacatagatatattttagaaagattgaggaattttctctgaaaactggggacaatatttttaaatcattcttttaaattgtagtaaaatgtacataatgagatttaccattttaaccatttctaagtgtacagttcagtggcattaagtatattctcattgttttgcagccatcactaccatccatccacccaccttttttcaacttgtgaaactgaaactctgtacccattaaacaacaactctctatttcccctccccccagcccctggcaaccaccactctattttctgtctctatgaattttactactctaggaaccgaatgtaagtggaatcatacagtatttgtccttttgtgactggcttatttcatttagtatcatatccttaaggttcattcatgttgtaggatatgtcagaattttcttcctttctcaggctaagtaatattccattgtatgtatataccacattttctttctcctttcatctgttaatggacacttgggttgcttccatcttttgtcttttgtgagagatgcctctgtgaacattgagtgcacaaatttctcttccagatcctgctttcaattctcttgggtatatacccagaaatggaattgctggatcatatgctaattctatttttaactttttgaggaccactgttttccatagaggctgcatcattttacattcccaccaacaatgcccaaggatttgaggaaacgatctttataacaagtctgcagtactgatctcggcgttccacagactaagcaagaagacattcgttgccccatcagtgctgcttcttagaattaaaaacttttttaaaaaagtgcctcttggtttatggcaattcatcatctcttgagaagttaagcaagagaagctgtgttttctcaaaagtttatagtcaagacgggcattcttctcataacttttggcctggcctcttcctcatttccaactgctgtctcgtgatactgagaagtccaaggttgatcataatatgtgtttttactctggaaagcttatctttctgcagatttaattctctaaaatgaacttggaatggggcat

SEQ ID NO: 94752 - DNA, 1016 bp, Homo sapiens
tagcagattcaagccccagtaagacaacagccaaaggttcagacaaccccacctcctgccgtccaggggcagaaagttggatctctcactccaccctcatcccccaaaacccaacgtgctgggcacaggcgtattctcagtgacgtaacccacagtgcagtctttggggtccctgccagcaaatcaacccagctgctccaggcagctgcagctgaggccagtctcaataagtccaagtatgtggtgcttcctctttgttgttcttacctctgtgggcaaagtctgcctgcggctgttagtgtgtgattctttgcataagtgtgtagatgtgtgtaatgcaaatacagtggtgtgtacttgtgtttgtttatttttctggtttgtttatttttctggctcatttcatcttgcatgtacttgtgtttaatgagcagctgtgaatttgtctttagtgcatgggccatactaatcttaagaaatcttttcctacttggcccactgttctcattctctcacctgttccatgctctacagtgtgttttctgaactctcgatctgaccgagtctctccacgctgaaaagtctttcactggctcctcatgatagctgagcacactgcttaacatagcagggcctgttgtgtttcacaggcagacttgccattcttcaccttcccgagccctttgttcctcctgtgccctctcctgggactgctatgctcctccttgcccacctagggaatgttcatttattcatcaagatccatgtcagaggttgacttttccttgacccttcctctgatatgatgtataatttttgtctgaacatttttttgagcttatatgacattgtgttgtcgttaattatttgtatgtctgaccgaactggtttgtgagttctccaagacaatgaccatgtcttagtcaacctttggaaatccagtgactggttctgtgcctgacaagtagattttgatgagtgttgagtaaatgcagtttcagacccttaactgtctt

SEQ ID NO: 94753 - DNA, 1082 bp, Homo sapiens
aacattgtgagactgtgtctctacaaaaaataagaaaaaaaattagccaggcatggtagtgtgcacctgtgataccaggtacttaggaggctgaggtggaatgatcacttgagcccaggaggtcaagggtgcagtgagccgagattgcttgcaccactacatcccagcctgggcaacacagcaagacactatctcaaacaaacaaacaaaaggaagcgtcatagagcacactggctattttgaatgtttaaggaagtttaataaaaatggagctcttgggaaataatttttagtaagacttgagatgagtcttaatagttgagttaacatttaggttattcttttcagtgtcatcattgcttcatcctgttcaggtagggaagcattttaatcttggctacttcaaatccctttataagaaggattacctctatgattaggagatcgtttattagctcctgctatactctagcttatggagtcacatgatgtttagtcagatagcttcccttaggcaaggcccagaaacccacttggaaggccagtctgtagtgcaggaggcagcctggtgcaatggatggagcctagcagtgtaagggactgctgctgtgttgtattttaattccctgaggtctctatcatgagattttaggcctagcctcaagacttttctacttgcccttgcctttggctttagcactggtcttcattgtttttgagacatttgtcttttgtgactattattctgggacaggcccttattcatctcctcatttcttgctcagtttcaggcagtacatccagcaacccagaaaccagcaattgctcagttccctgtggtgtcccaaggaggctctcaacagcagctaatgcagaatttctaccagcagcagcagcagcagcaacaacaacagcaacagcaacagctggccacagccctgcatcaacaacagctgatgactcagcaggctgccttgcagcaaaagcccactatggcagcaggacagcagccccagccacagccagctgcagccccacagccagcccctgcccaggagccagcggtaagaatcaaccagagc

SEQ ID NO: 94754 - DNA, 1010 bp, Homo sapiens
ccgaggtcagttcgatttcgagaccagcctggccaacatgatgaaaccctgtttttcaaaaaaaaaagtacaaaaaattagccaggcattgtggtgtgcgcctgtagtcccagctactggggaggctgaggcaggagaatcgcttgaacctgggaggcagaggttgcagtgagccaagaccgtgccattgcactccagcctgggtgacgagtgaaactccgcttcaaaaaaaaaaaaaaaaaaagaaaagaattgtatcgcaaatggctggcaaaaggagaggcctccttgaattctgagatggatctccaaaaccactaaagccctttgtcgctttttctagacttggccctgatttttgcagtttggaaccttatcctccctctttatttcatatatttccctttgcctttaaagaaataagactcttccaaagtgttgagttcagtccagggcagcttccctgttctgttaattaaactttgggacattgaaatgggctaggggagatgattgggtagaaagcattattttattcatttgcctcccagcctacaaaaatgcctgcttgggtctaatacatcaacagttaaagatgcctggaagagacaggactaaagaggctgaagagcttggactagcagacaacttactttcaattttaggaagtttggggtctgatgggctgagatacaaagaaactgagttattttcatacatgcctaaaaaaaaaatagaaacaagactcctctcttttgacattcacagaagaatattgtttctttaatgctttgtctcttgaagtatctaacaccccctcatgttttggcattctgtttctaatgaaataagtaagctttgtttcataaaaaggattgatccaaaatatcgagtaactgaaccctaccaggaagctgcttttggtgaatttggtggccatctacttatagccacgcatccagactgggataagctacatgtagaacaccagggaatgatgttgtcatgct

SEQ ID NO: 94755 - DNA, 1015 bp, Homo sapiens
tcattaaccagatggtagaataagtaatctttaaagaaaaaaaaaagaataatatttgcacaaagcccctatactaaaatgctaaagaagcagagatttttatcatctttccacattggtcaagactcttaacatctaagttttaactgttatggattgattataaatcctgagtaacccatttgggtcctgcatggggatacactggaaaaaatagaagcagcaaatgtgggtggagcatctgacatttgttgagggcctacttatacctcatttaattcttaaaatcctttatgtattaagtgtaattattcccattatgcaaatgaggaaactgaaactgagaaaatgtaggtaacttatccacttaacatagatacagcttttaaggtgctgcccattccattgtgccagttttgtcaatcagcctcttccatttattaacaaaaaaaggaggaatatttaaagggctggattatgacatttaataattgttggattgttttaagagataaagcattatgtccatgttagaattccaggtatgtaagtgagattggtaggaaatatgggaaaatggccaactttgatattagactagtattattttttgataatttttaaaacatttatgcagtaaattcatattgggaaatacaactctttatgaatgtctataccatggacatctttcccaaactgcttgcaaaccatttggcaactccactatcaccctaaacgcacagatctaaaattaagtttatcatcattagccctccttccttctttttaccctcaatacccagttcgcctgtcctcttttcagtttctctcagtggtatcaccattgaagcctggaagaatgaaatttaagatttctttggatccagctagcaagagaggaaaggttcagtcgtgtactcggccatattccttttttggagtttctactgttttcattacattctttatatgaacatcactgtcaccatagtatatacagactctgtcagct

SEQ ID NO: 94756 - DNA, 1300 bp, Homo sapiens
agtgacttaatcactctgagcctcattttctccatctgtgagagaaggataataatcatattgggattatgaggatgtagtgggataatccatgtaaaatgctgagtacagtagtactggcaataataaagctcagaaaatgatggctgttatttttataacctctaaattagattgaaaacattagcgttgttttgttggaattattttaaattcctaaagtgtgtatatgctcaggaagcttgactgtgtcactttgtgtaaatagattaaactggtgagctttataaaaaagacatagatgatggaaatatttgcgtgcctcagccttatctcaaaggaatgaatctctcctaatctttcataaccctatgcttaagaattgttcatcatagaacatacctgtgcaggttgatggctgtagttcaaactacctatgtggctggaaattccaaggtcaaaattatagattaaagtgattccagggtagtagtgcccccagctacaccagtatatcctctctggaagaacaatagactttaaacccagatcttacaagctttttacagattaagttccaaggaatgtaagttaacaaaaacaaaaagctcctcacaacaccaccataagcaaggtttagtaggagtaagaaacaataaactgcagaatcagttggcagcagagacttcaaatattggaattggcagatacagactataaaatatacttaatgtaattcttagaagaattaaaagaaagtatagaaacaagtatagaaattagagactattataattgaccagttgtttttaaaagaatcagtagtagtacagtagtacggcctggatatttggtggctcctatcttgcgcctgacacaccaggtttgcacacacatacacacacctacacagtgttttttggtttattccattcaacatacattttttataccaagcattgtgttaggcactaggtagagaagaccaagaatatgattataagaagatgcttatctttaaggagcttatctttcagagtagactattttatagtctactcttgcctttgttttccaaaggtgatcagtctttggaaggctgaaggcaaaagacaatggagactacagtcttaatggcctaacaagattttttggctgccattttactgcccacacatagccaggtctgtcctccggcatactagtcagctcagttcacctagacccaaaatcagtacaccttgagtacatagtgcccactattttggagttgtcatttcatttgtagagtcctttgata

SEQ ID NO: 94757 - DNA, 1054 bp, Homo sapiens
tgaatatgtattgacactactcctagttgcctttaacaatgagtaaaatttttgtttaaatcctgttagcatgtatttcagaacaggcagtggtaccaaaacttaaggacctgacccctggccttgctgcctgccttggagaagagtgtgagaggcatagaaataggggagaaatgtggctggtgggcaccgctcttatgatccatgtgaccttttgcctctctgtagcccccgttctgcaccccttccatgtcaaatggggttagagttcatcctgtgaactctgactctgcaccaccgtgtgactcatactgacggaattacaagtgctgtgagaggtgagcataggcagcttcctccgtattgccaaatgcagagaacattttccagtccctgtcttattccccctgtggcttctggctcctttgtgactgtctctcccttgacctctatgatggtgtcttctccccagctcctcctttccaggctccttggctttcttctcaaatcactagcctctccgagcctgagtttcatcatctgtaaagtggagctaacagtgcctgctctgttagggtggtggtgaggttgaatgagggagtgcttgtcaatctctaggcgcacatccctggcatggtaaatgcctgaaagggctcagaggtgaggacaagggaaagagcagagggacacagaggatccttttagaaagtaatattcccatgttctcagagtcttcctttatattaactttgttttttgtttttttttgagatgaagtcttgctctcttgcccaggctgtagtgcagtggcacaatctcagctcactacagctgtcacttcctgggttcaaacgattctcatgcctcagcctcccgagtagctgggattactggtgcccgccaccacgcgtggctaatttttgtatttttagtagagacggggtttcaccatgttagcaagactggtcttgaactcttgacctcaagtgatccgcctgccttggcctcccaaagtgctgggattataggcatgggccaccatgcccagccctct

SEQ ID NO: 94758 - DNA, 1687 bp, Homo sapiens
atcttatatcccagttggttggcttgaaaggcctgattatgaacaaaatgcttaggtctggatgctattgtagtcccttcaagactttgtaaatagcttttttttttttggtagatttcccaaaaggaaaaaaacagtacgaactatttaaaagtcaagttaaattcatttttgcccctacaaccaggaaaaacatcaattttatttttcttaattagaagttcacatatttaagtagttcacacggtctctctactctttaccccctgcagtgtttctggagaggggagtctttgcttctagtttacgtggagcattgatgcagtaagcaagtaggcactctgtgcatttgactctagaatttaggttctggagtgtgctctggtttagtagggttatggaattgctattgaagatctagcagtgaatctcagggaccactggaaacctgttcttgactttgctccttagtcttctctgtcaacactgtatcatctctgtatttaaattatctgtgctaatggaactgactggctaattctgtcctattggcatctgaaactaacaatatatttctcctctcttgttcacagagggatctttcagggcacaagaatattgtgggttacattgattctagtatcaacaacgtgagtagcggtgatgtatgggaagtgctcattctgatggacttttgtagaggtatgtatatgaaccattcccttaagctgtcatttctctagcattttgattgtcatggttagggtggtcatttcacttaatgtgcactgcactctatgatatgttctggtttgacagatgagaaaactaaaagatacagtctgctgtcaactcttagttattcttataacggtacaaacgtagataatatagaactccatttttgttaggtttgggaaggtttggtgtttgtatataaatgaagatgtgtaagaatgagaatgaatatgttctttgtgatgctttataacaaatgatgaaggcacataataaaggctgaactccagatggatgaaagaaacagtgcagcttccccaactccctcacttgtgtgttctctttcccactcatgccatcattcatgtgttacggggtaaaagcatcctttttgtctaatggaagtgaccctcctgtccctactctaaggctataattcctagtaaggtgaggctatattcaaatgatgcagctgttaacagtggagtaaagtcattgaaagcttcaagtttcaaaaaaacatttatcttgggaaattcagactgtagcatgaatttttttcagagttaattgcattttatataaccattgtttggaggtttggcttaggtcagtgccttactgtttggtgctgtgttttgtaatcacccttagttccattaacattttccttacgcttaagatactatccataggccgggcgcggtggctcatgcctgtaatcccagcactttgggaggccaaggcgggtggatcatgaggtcaagagatcgagactatcttggttaacatggtaaaaccctatttctactaaaaatacaaaaattagctgggcatggtggtgcgcacctgtaatcccagctactcgggaggctgaggcagcagaatcacttgaacccaggaggtggaggttgcagtgagctgagatcacgccactacactctagcct

SEQ ID NO: 94759 - DNA, 1022 bp, Homo sapiens
tggaggtgtatgagctaggttggagagagaccacatcactctgggaattgcgggccttggtcagtatttggagttttattctaagaggggtgagaagccattgcgaagtttcaaatgatattaagtttctgatgtctttcagcatatctctctacatttgccagatagctaactctgtggcagcagtacggcaaaggtgggggcgggtagcttgtggaaaggccctttcttggttagccttagctgatagcccaggcccaatgtgctgtggttctaggtgcagtaatcaaaaagtctctggtatatgtgaaccaacttgatttcttaaactcttcccttttgttccaggcaagtatttttcctggaaaattaatttttgagaggaggagggagactcttgccaaacccctaaaaagaacctcctgagctggagatcctccccaatcaatcataacagtcctggagagaaagaaccaatagccaggccagtgtgccatgttcagcctgggctgtggcctcgattgggttctgttgatgtttctgtaccacctccacaaccaccaccgtttgccagtctctgattttgtgcccacagcttgagtggggagagagggagttgaaaacctcaagtcatcccccatctgggtgttctatctgcttggggaaaggactgctttgacatgttctccagaaggagctggcacatgatgatttttaattgaggcaagtgaggagagattgacattaaaaaaacaaaccccaagcccccactgaaatcagtgttgacacatgctttgcattgaccttttctcctggaaaaagctttgctgtgctccttgccatctgttctagagttttgaaaacttttgttccttccgaagcttttggcaaagttgtcttcaatgtaagttgtggatgggtgttgatcagcctcttgggggtcattccttgtgggagctcacagatgctgtggatagagcacccaagttctcaccatggagaggacactctcccacttgaat

SEQ ID NO: 94760 - DNA, 1103 bp, Homo sapiens
cttaagaatatctcctggctgggcgcagtggctcacacctgtagtcccaatactttgggaggccgggccaggaggattgcttgaagccagggatttgaaaccagcctgggcaacaaagtgagaccccatctctacaaaaaattaatttaaaaaagaatatctcttatatgttatgccaattggagattatagatctctccttttcatagaatagtctcttcttataatcctcgattaaagcttgaatttttatgtagtttttttggataacacttatctggacctcagtttttgaatctacaaaatgataatttgggtttattgtgatgaggaaatgggaacatgtatgtagatgacttttcttcactgtagactattcatacagatatgagatgggtatgagacccaggatccctaaaaacagattggtaagaaaggcagtgtagttgttgggcaaagggaacagtgatttttagagtgtggaaagctctaggagaaggagggagaccagagtggggatgctgcactggaagtgaggtggaaggctttagatttcctggtgagtaatcgaggtctctgagtgcctggggttgaaggttgagggagttcaaagacttgatgctgacctgggatcttactgagaccagtcgctgcctgtgtgcgtgaggataccaccttgtgcaatctagttcaatggtgtgtcaccaagagcctgacctgacacctaaatgtgacgtagtgtcccttagaaatcatgtcatgtgatgtaacgtttagcttgagtcctgtattagaaccagtgcaactggggattggcttgaggcaagttcccaacttgaaacaagttgggaaaccaaggcaccaagagaaaaagttacccctacaagtctggactattcaaaactgaagctgaaagcaaccttctgactctgactttcttatactcttaccccatttcttttcttttatcaaaacatggtattaccaagttcccaagagcgaattataattaaagtaaccacagtgtaaagctcatcaacccagagtctcggaatgaggtggagagaagctagttagagaagaggtattatgtaatgacctaa

SEQ ID NO: 94761 - DNA, 1175 bp, Homo sapiens
tttctaggtcttgactctctgcctcgttgcttgaccgctacccggcttcagagtccaataattatattttcaactttgtcctgtatatgctccacttcttggctggaactctgttcagtttatttcctgactttgaactatctccacgtagtgccaccttgtttcctgatctaaggactgtgcaactcctctccagtcggccacatctctgaccaagggattcagtgaaaactctggtttctcacctgaactttgatctttaaccccagctgacactagtaatggcctttgtgatcaggctctgaaagaagactgacttcatgtgaaccatgtgagcatattgttcatatatccctcaaggtggattccttcttttctaaaaggcatctaaaaagcaacggaagttcttttgaaaatcagaggctgcctttttggtagcagttctttcatttattctgtagaggatccagattgagctctttataaaatattctcctacataatgtactgggatagtcctaacaatagtaaaccttgatccacagatcacatgtgccattggataaaaataaataatgcagaggaactcaataagaccagcctgtttaaaggagacatcataaaaacctccattaaaaaaagaaaaaaaaaatcatgtagctgtggtagcaagtataaaacaaatgtaagaactgaggagtaacaaaatgatgcaattagcttagcacccacagatggtttcagatacactcagatgtcacaggcatccaggactaggcctgctttgatcatttggagggcaggatttctggatacctgcgtcacctgtagccatctactgctgaaacaaaccgttataacagagagggagttcttagttaagggaatgggtttactcttctttcttactataagggatggggaaactgatgtccgtgacaaatactgaaagtggagcatgtcctatatcagcaaaagttcccataactagagtttttctgaaggtgcaggtgatgtcaggtacccacctgatgggccttacttaggaaagaagggggtggaggagacagggatgaacatttgttaagagcttctgtgtttagatgtgtgccgggtgctttatgatgctgtctcacataatcttcacaataacctctgtggaacaggggatggtt

SEQ ID NO: 94762 - DNA, 1006 bp, Homo sapiens
gtctccctggttgagtgcaagctccatgagggcagatatttgtgtcagttttgtttactgctgtatctccaatacctagagaggtgcttgtcatgcagtagtcactttgtaagcatttattgagtgatcaatgattggtggcttctagtgtcattcagcggcagcaggacgatgtatgtctgttctagatcactgagtcttaaaatgttttcaagtgacctacagatttttatcattcattcattcattcattcaagaagttgctgtgtgtatcctcagtgaatcagacattgaggtactagcctggaagtctcatcaggggatatttatctttgtatctccagcactaagtgcagcaagtgccaggtagtacaagagaaggatttgtgaaagtctgtgggatcaaactgctgaggtcttgtgaagacaaaagtgaataatacacatccttgtgttcaattggatcgtggtcaagtggggaagacatggacacccaataatcctgtgacttgagtgctataagagagggattacagagatgagaaaaaacagttgcttggggatggtagaaatcaggaagcagctttttgtaaatatgatatttatgctgaaccttaaagatggttcttctgagtgaacaagcagggagagaaggttagacataggaacaacatgagcaaagatacaaaggcaggaaagtgcaaagcatgttcctaggacagtgaattgtcctgtgtagctggaatagtgagttcatgggggtggaggggaggaatgggctgaacagtagctctggatcacatcctgaaggccttgaatgccacagatgaggtctgtgaaccttctgtaggcagtgggacactgttaaaagtgtccatagaagagatggaaaacacattagtggttaccaggaattaggggcagtgtgggggcagggggaaggtaggagcggaggatgactataaagaggcagcataagggatctttttggtgatggaacagttct

SEQ ID NO: 94763 - DNA, 1340 bp, Homo sapiens
gttataggtgtttttctcctagagcttacagtctagtggggaaggcagacattgaactcccaccagtaagttttcaagtccgggaagtgaatttagctgtaaaagtataggagttgaagccagtgcagtaggattgactgtcacagtttcttgctttccactttctttctgtgtgagtacagtttctttcatataagagcaaattcatagccaaaaagaaacagggaaggaagaaatgaagaaaataaatgagagaaagcaagacccaggagcgaggaggagggaggattggggaggtcctcccaggaaatcccgtgtttcaggttcttctagaaactcctcaggccagttcttaaaacatcttccactgtggtctgtctttatcttttgagtcatatagatgggaatggtatttccatttggttaaatggtactgggttaaaaagcaaaataacataccctgcctcccatcctctgtgtctctcataaggatcagagcccaagtgacatgaggtcagctgagtgcccagcaggactgaactattctggcctgcggggcttctctgcgaagtcccgagaagtggctaagctgaggtcgaagtccacatggaaaggacagcaccaatgggcatgcagtttccttggtagactatgtaagtgaaaaccctagaaggaaggtttttgatggtgcccatgaggaaagaggacagcaacatgttttgtttttttcctcgtggttggggtcatattaatttcttagggccacagtaacaaatgaccacaaactgggtggcttacaccagtagagattaattaaccttctcacagttctggaggccagaagtgagaaatcaatgtgttgacagggccgtgctccctcaaaagctccaggggagaatcatttcttgcctattctggcttctcgtggctccaggcattccttggtttgtggctccatcactccagtccctgtctcagtttttgcatgaccttctcctcttctgtgtgtctctcctctgagtgtctcttctaaggacacttatcattagatttagggtctgccagcataatccaggatgacccccatcttgagatctttcaattaattacacctacaaagactctttttctatataaggtcacatttacaggtttctgggcttaggacatggacctttcttttgggggaaccattattcaacctaccagagtggtgaaggagacagggtgttgggagcaaaggtttttgtttttgtttttgttttcctggttgggagagaaggaagcaaaatgccgtggagagtgccatgactaaatccctcacctgggaccctgcactg

SEQ ID NO: 94764 - DNA, 1117 bp, Homo sapiens
tttgctgcatcttacaataacgatttatttatcagtcttctaagctgttctcccttcatccctgacccaacttggactccttgagggtatggttaggttctcactcatctttttgtatgcttttaataagtaggtatttaggaagtaggtattaaattaatgcattaaacttagaattcaaacagcctaactcacagatcttgcaaaggagaaactatgcccagaggattaaatggcctgtccgaaactacacagctaggttcaattgggattagaatccatttctcctctcaagcttgtggggtcttctgaaagattaatgtcaaagcaactcgatgtgaattgattgtgttccttaaagttagagataattgaattccttgaaaattcacttatatcttctagggataggggctttcaacctttcatttcacctgttaccctgtttgggggtggtgtgatggtttggaattttgttgttcttgactgagattagagaatgagggcctaggcacagggaggctctgttctgcttgtcaaaccagtaggtttgctttttccttgacctataccttaaggacatccttctatcttgtaggtgctagtggagctatgttaccatacactggggataggatgagggcccctggataatctgtggcctggcaagtgacacaggcagaaagcagcatgtccaggtccctcgtgggtggcttgggggaacttggggttagaaaaagggcattataaccaggtgctagaagttcacagataggtcatttgtggctggtaggattggcaggaaacaatgagtcacactggtaggtatacaagggatagaaaaagaagaaatttttgataattgctagagagccctttttccatttagaccagtaggtctcaattgtggctgttttgccccccaggagacacttggcaatatctagagacatttttgattgtcacacctaggaaagggctattacaggcatcaaacgaatggaggtcagggatgctggtgaatatcctgtagtgcatgggatggggatggcccccataacagggaattatacagtccaaagtcatgagcgtccaggttgagaatccctgatttaca

SEQ ID NO: 94765 - DNA, 1015 bp, Homo sapiens
tctgctgtggactggacactggatgactaagcttgttagaactgtgtgtgacaataaagaggctcttagtgagagttcgaaggtcttgtctgagatcaagatacgtgggttttatatctcttgttggcacagaaaccatttttttatgtctcacattctataaaggttgagtttggaagagataacggcttaccatttgacacttactgttaatgaaatgtgtttataaccatttttctgaagagttgagtagcaatgctcagggacttaacttatttctgttttcttttttgcttgcaatcccttcccttactcttccaaccctcccttctcagtctctgccccacacattcaatgtaaggcattgttctaggcactgttataatattgtttcggttattccatttctatttatggaagccacagagagggttccaggattgtaactcactgttcagtgctggatgtgcttatatctcagtagggctctgctggagactctcagatgaggtttagtgttggggactaggaaacttgaagcaatgaaatgaatactggttccatatactgtataatctttggttgatatggaagaaagcaatcaagaagtcttaaaattattttggacatgcaaattaatctattatgatagtggaatgattagaagataaagccagacaaaaatagaaagtgttacccatagtcccatagattgtcattgttaatattttgatattatattcttcttcaagactttgcaaaaataagaatatattccacatcatcccctgtaatctgctttctcacttagcaatagattgcagctctctttctgtgttaaaggtctgcatcatcaattttagtccattgtttggagatgttgcaatttacttaaccaatttcctatttttagacatttatgttattttatagatattacaaaacagctgcaacgaattttttttaagcctttgagtacttgttctattacttctttagaattaatttctggaca

SEQ ID NO: 94766 - DNA, 1048 bp, Homo sapiens
attattttacaggtttgttagacttgtttaatctcccctgggatagcccacccctgttccacaggcctttgttctctgctgtttttagaagccttggaatcttggtattggaggggaagggggcagcactggaagaaataatttcattgggctttttggctgtagagaaaaatcttggcttgaccaggtgtaactcagtaatgattatggaaaacctgatatccaatactgtctttcctccccttcccccctggaataaagggagtgctatgatgttctccttaggagaagactttcaaggttagtactgtgtgtgatggtttaaaagcatgagaattgaaggtaaatagcccttggctggaatcctggacatgtccctgtgatgttaggaaaagttaactaagatctagtcttctcatctataaaatgtagatttgtaaaatgcaaaagcatgggttgttgtaagaattaaatgatgtatgcaaagcacttcacacagtgactggtgtatgttagttagcagtttgtaaatggtaactcttagtattgaggtgcatgaattttgtttttatcaggccatatttgtatcactatgtatataacctggtggagttagagttttggaaatacacacaggaggtctctctctctccctccccctccctctccctccccctccccccccaccccccgccccactcagagtattcacaaacccccagatgaggaatagggagaagagaaagagaaatattgtagtttgatttttgttttttaaactctcacctcttgaaagctacctgtgtgtcagggagtttttcttaacctatcaagtttttataagtatgatgggcctctctacctgccaggaatgcctggcacctgctgcctatccaatttaaatgcttgtgtgctaatgccgcaggtctgctgcttccaccaggcctgcgccctcctcaccatctttgtaccgtggatttagttctttccagttctttactcatggtgttccccgcagctgggatatttcctccttccccacccgcct

SEQ ID NO: 94767 - DNA, 1047 bp, Homo sapiens
ttgcaccctttcaaggatgcatgccttctgagcctacttatgaggtaactgtgacatccgcatctgaaagagaaaaaaatgataataatagaaacgtattgtctattaaagtagcatctagcactgtgagctagcagagacttgcctccggtctattttatggagccatattttggtgtggtggaaagaacactgcattatgaattgggagatcaaggtttgtcagttcattcactcccttattcagtaaatgttactgagcattcattatgtgccaggcatcatgcggagataaatgagacatggctgtgccttgaggacctcacagtcataggatttcagatatgtgagcaaatagctgcagatgctgcgctggagtcatgtaaaagagctggggaacagacccaaggcaacaattttgtgggttggggagtagtcagggaaagctaaagaaaggtgacatttgaggtgtgtcttcaaaaatgagaacttattgctagatggacaaggtagaagaacattctaggcagagagaataacatggccaaagacacaaaagcagaaaaataactgcttactggggagctgtatgttttgagatagcgataatctactagtggcccagggctgtgctgttcaataaagtagcccactagccacatatggctatttaaattatctaaaataggccgggtgcagtggctcatgcctgtaatcccaacactttgggaggctgaggcagatggatcacctgaggtcaggagtttgagaccagcctggccaacatggtgaaacctcgtctctagtaaacacacaaaaattagccgggcgtggtggcggctacctgtaattccagctacttgggaggctaaggcagcagaatcgcttgaatccgggaggcagaggttgcagtgagccaagatcctgccactgtactccagcctgggtgacagagtgagtctccgtctcaaaaaaaaaaaagaaaaagaaaaaataaattatctaaaatagcagttcatcagatgcactagccacattttgattgct

SEQ ID NO: 94768 - DNA, 3582 bp, Homo sapiens
acttccggcggcggttcacttcctggttgggtggatggagccgggcgggagcgcgcgcgggggaggggcggcgggtcagtctccgcccggcgctcccgggatcagctggcgggcgggcgggagccgagcgcggccccggctctcgctgcagcgccgcctcttctctgcgtcgcaggccggcccggcggccgtgacaatgtcgcggggctggtagcagggcgccggccgccgagccgtctcaagtgggtgctgccaggatgccgcctcgaggggcggcggggagacccgggaggagcgggaggcagtgcccgggagggtcggcgctgccggagcagctcggatccctcctttctccgagctcccggctcgggggtcccgggttctggggccggggtcgcgttttcagccccacggtttttctcgccgggaaaatacatgaagcgtttccccaggatgatggcttttgctccccctaggactcagcggttgaatttttaagcgtgttactgattcatcctctctttcttcctctgtcatcacaggtttaaacttacacgaatcgctttctggaggaggaggggacccgctgcgcgattgacacgcatattcctataggcatcctccctcagcccccacccccacggccggattcgggtggctcctctccgaggtgaaatctgagaagaaatccttggatctcttttcttaaaaaaaaaaaaaaaaaaaaaaaatctagaaaccatcggtattttgctttgctgctccctattcgcaagatgaagaagtttttcgactcccggcgagagcagggcggctctggcctgggctccggctccagcggaggagggggcagcacctcgggcctgggcagtggctacatcggaagagtcttcggcatcgggcgacagcaggtcacagtggacgaggtgttggcggaaggtacggtggggctcaatgcgccgtaaattaaaatcttgtgctgatgcggcaatactgtggtttctagttgttgcatgtatgaatgggctttgaccagttgaccctcccttcccccttcacttgccctgtgagtcattgtccttgagagatttaaaattgagatttgaaagtgactgggcttatgggggtgtggggaggttgccgaaattgtttacgttagtggccttttatttttatttttttaatattgagaagccaaattttgaggatcacacaagaaaacgtatgtgtgaaagtgtaaagctttatgccaaaggcagggtgatgggcttgtcatcctcctaaaacttaaaatcttgatgtgaaggctgaagggtggggggacttttaagaagagaggggtttctccttctcctacccaactttcccacttccatgagcaggcattggaaggaagagaggattttcggagaacgtgaacgtgtttttccaagggccaaggctcttggtggatttcactagtagatttgtttcctgacccaactgtaatcaggtccccaggttatagcaaagataacagaaattacataaaacaaatgtggttattttgaactcagtctagtaggcccctcttccttctcgctttaggttttgttttttgtttttttaatcaaaagaaaaattacttgagagtggctctgattttgttttttcgctatcagagaggatgttatttagatctgctgcataaattccctctgtgtttcatctgtgtgtctatactcacgtagatatacatcttgattcccccaggctttcgggaaatctttgcatgtctcttttggtaaccttaacctcgaccttcataattatgccagactcatacttttcacagcccttcgcctgcctagtgtgcttttatttttaataaaagcagcaatttccttggcatgaagcaattcagactgattggatggggccaacctgctgtaggttgtgttatagaccgagaggggttggaagaagggagaggtctctcttactgcaacatggtgatggtagggaacagttttattagcaagggaagagagaaagctaagaggcctctttaaaaaggggccttttgcaagctaaagttgaagcaagggtcctgacctgggcctgggaaatgcttaccatggtggatgttgcgggctggtgggtgggtttggaagaggaagaagctgtgtttggctctcagcttgtgtaagcactggattcagcagggcccagttttctgggaatagagttgaagtctgtactttaaaaacatgatttttaaaaaagatctctgacagttaatgtccatgtgaaattattgctcttccaatctcagtactgttctagctgcgctttatctggggccagagtcactgtccccttggatctttcccgtggactttggtgcaggctaggagatgcttctgtgcccgctgccagatccgcacccttgagtctgatctgtctctttcatccctgtgccaaagcccttaactgcagtggggtggagaaacagtgaaaaggagagtgtgtcagagagaaatcaggagaaacgaagggccacagaacactttcctcccctctgaatggcctctgctgaccttatagcccacgagcgttttgttcagctaggatgttgtctcatcacggatgatgctgccctaagcggtgcatgttctccaagtgtgagagaagtgatagggaaaagaaaaggcaaaattggtctttgttacctaggctgccttcctcttctctgggattcatctttgagaactgcgcatcacgtattgtgatatttttacacagaatttaggacttgtagctctgcatttattcattcaacagtttatggagttgcctgtgaagtgccaggtgctgtgctaggctctgggggtatactgttaaactagatgctagcttttaccaactgctttaagagatggaaaatagccagttatagtggattggtaaatgccatcatagagataaacttagggtgcagtggcccccagttttagggagcccaggatttctgaaggaagtgactgaagagtgagtaggagttagtgtggtggcaccatgggcaaagacagagtagcgagagagaatgtcacgtaaaactgggtctggctatgcgccctttttgtgttctttggcttaagttgagtttgaatttgtggctcttagaagtatgtagatatgtaggagccagtatacaaagtatttatgtagcacctaccaagtccaaagaccctatgaagttctgagatggatgagggaggtctatagtgtgattgacatctgcctttaaggatctgccaatgaatttgggaagatgaggcatacattcacacatacagtagcatggttaccagcactgtctgtagagtcagacagatctaggttcaaattctggatctgttctttactagctgtggaactgtaggcaagacattccaaaccactcttgaatctctgtttccctgtggcagtggttctcaaagtggggcatacttatcacctgcgagcttgttggaaatggagattctcaggcctcactctgtaggctgtgggtgtggggcttaataagttcctggagagatt

SEQ ID NO: 94769 - DNA, 1082 bp, Homo sapiens
aatatgccaaagaataaatagtgtaggctagttaaaaatgctcattctctccataaattttagtttcctctgttttttcttcccaataatactattttgttattgtctgcagtgtttgatgaatacaaaaggatatcacagaaggatattgaacagagtattaaatctgaaacatctggtagctttgaagatgctctgctggctataggtaagctggtagggggagtagagaaacaaatgtttatagattttccttctcattatcagtttgcaatatggggatatagaattatttttagagataaaagttgtttatcatgaatcactcatgttacattccagatttttaaacaagaaatattatatacaacctgattgctattgtgccatgtggtttatatattttatatcttctgtgcctttgtatgtcctatgtgaaaggtaataatgtgcagatatacaggctgcagcttgcaagtctgtgaatggttagaactagtaactgtctcatatggcagatacagtaatccttattttgaaatgaaataccaccctttgctttgatagactttatcaattacttctccaggaacttgatgataaattgagggtactttctatctgtgaaaatacatagagcatcgcctatgttcatgaaacattgcttggctaaaatttccctggcaaagcaaatattgataccttgtagaaacagaggaaacaactgtcacttttcttttttcatgggtcttatctgtaatcttttcatttcttctttttttttctttgacagtaaagtgcatgaggaacaaatctgcatattttgctgaaaagctctataaatcgatgaaggtaaatggccttattttcagcatctaaatgaatttgagttatcttgtgtccaccttcttaagcttacttatatcccctatccaaactttgctctgaaagatccaattcaattcatcaaatacttcagtgagtgcctgctaataataatactaggtgatatttactgagtacttaggatgtatggatcactgtttttaatagattaattatatccccacaacagctctatc

SEQ ID NO: 94770 - DNA, 1460 bp, Homo sapiens
aaaaaaaaaaaaaaaaaaaaaccacaaacaaaaatgaacaaaatagggaaataggctatattgttaagtgaaaaagcagaacacagaatactactgttctatcacattgggtatctagatacatagaaaaaagactggaaggacattcacacatcaaaacggtaagaatagtagtctctagatgatggaataatggttgatttttgtgttcttttttgtctttattttctacactgaataagtattaccttcgtaataaaaaataacaaaaaaaatttaaagctaagaaaaatccagccaagcttgaaaaagttggcttagatgactttgaactgtgtgtttcattttaaaatctatttatctaactttgcttccctatcgaacagggtgacacatctggagactacaggaaagtactgcttgttctctgtggaggagatgattaaaataaaaatcccagaaggacaggaggattctcaacactttgaatttttttaacttcatttttctacactgctattatcattatctcagaatgcttatttccaattaaaacgcctacagctgcctcctagaatatagactgtctgtattattattcacctataattagtcattatgatgctttaaagctgtacttgcatttcaaagcttataagatataaatggagattttaaagtagaaataaatatgtattccatgtttttaaaagattactttctactttgtgtttcacagacattgaatatattaaattattccatattttcttttcagtgaaaaattttttaaatggaagactgttctaaaatcacttttttccctaatccaatttttagagtggctagtagtttcttcatttgaaattgtaagcatccggtcagtaagaatgcccatccagttttctatatttcatagtcaaagccttgaaagcatctacaaatctctttttttaggttttgtccatagcatcagttgatccttactaagtttttcatgggagacttccttcatcacatcttatgttgaaatcactttctgtagtcaaagtataccaaaaccaatttatctgaactaaattctaaagtatggttatacaaaccatatacatctggttaccaaacataaatgctgaacattccatattattatagttaatgtcttaatccagcttgcaagtgaatggaaaaaaaaataagcttcaaactaggtattctgggaatgatgtaatgctctgaatttagtatgatataaagaaaacttttttgtgctaaaaatactttttaaaatcaattttgttgattgtagtaatttctatttgcactgtgcctttcaactccagaaacattctgaagatgtacttggatttaattaaaaagttcactttgtaagaacgtggaaaaataattttaatttaaaaatggtgtttttaggccgggggcgggggctcacgccagta

SEQ ID NO: 94771 - DNA, 1011 bp, Homo sapiens
gctcgccgtacgcatgcgccctccgtcccgcgctttgttgcgaaagcgagggggcgaggtgctgcggtgctagagcgcggcgcgaccggacgctgcgggcggggaagaggatggagactgtggcgtccgctgcaacggttggggctgcgcgtgagaaggtggcggtgtaggcacctgcgctcggggaaggctggcggcggcggccgagccatggcgggagacccccttctctgggctccctgaagtctcggggagccgtgacccatgggatcgttgagcagccgggtgctgcgccagccaagaccagcccttgcccagcaggcgcagggtgccagggcggggggctcggcccggaggccggacactggagacgatgcggcgggccacggattctgttactgtgcgggcagccacaagcgcaagcggagcagcgggtccttctgctactgtcaccctgactcggagacggacgaggatgaggaggagggggacgagcagcagcggctcctcaacacccctcgaaggtacgtgggggcacgcacccgcgcggacccggacccgcacctgttgggcctggggccgagccggcgcctcgtgcgcttgcggggtgcagcgctccccagcctatggagaggggacgtgcccttgacagggtgaatgtggaagccggcccgatgcggggcggactggggagcgccttgggagacgccaggtgttccgcattttcaaccacagacgcttccagggtgttgttacagccccaagatgaggatgagaaacgccaagcccgagctcgcgtctcgttaaaccttagagacgcccggctggctggccttcccagtccacctttgccctctcaagtgggtagccgcagagtaagttgttttgcatccggttgccttagtacagacactaaatgtaatctctgaaataggcactcttattgtcgcccactcagtggagggtaagtaattgcacacaggagttcttgttaattgtaaaggtgaagtt

SEQ ID NO: 94772 - DNA, 1061 bp, Homo sapiens
tgagcctaccctcaccttttcctggtgtggacttattccttttttgtactcttaatctttaatgtaatttggggagggatgggaagccaacatgtgtacattctgccgtcaggaactggaaactacattgtctcttgatttcgcatcataacgagtgaagtggatactattaatgtcctctttttacagctgtgataactgagcagctgggactcaaacccaagtctgttaccactaagacatgtgctgtttttattgtcggctaggaagaggtgttaagtacacaggtgttaaattcgccaattcaggatgtcatctgaaacaattacttcatttttaaaaagagattgaaggttttatgtgctaggaaagctttcagaattggtcaggaatttaagatattgatcagcctctgcctaaggccttttcttagttactggatcattttgagcaatgattttcaaactttatttttttagtcaagtcttcctttaaattaaatctgtgcagaaatccagtatgtttacagatagaataggtgatgctgctctggttgaagttagatgggatgctcacagttcactccttagctctccttggtggcccctaagacttctcctttgagcagttttaaaaacctttcatctaaaataaataaataaataattttaaaaaacaaataggaaaagaaaagaaaacctttgatctaaggttgcaaaccgtttgtccagtggctggaaaacattttaagtagtttaagaataggttggtaccaaaataagattaaatgtaaattattttaaaattacttgggtaggtgaaatgtttactcttgttctccatttcctacttgcagattattgcgctatttgagctccttcatagtgctggtttctaaataaggaaataagcaaaaaatcaacatgctaacttcttaatctattgaatgggtaattaaattagtccaaaattgctaaaacatgtgtagtgaaaagtctgcctcccatgctgcccccctttctccactatctctcccgtgcatagaggaccccagagataac

SEQ ID NO: 94773 - DNA, 1234 bp, Homo sapiens
ttaaaacctatataaacattttaggttaaaactttaatgttaatcatttgaaataataatatacttgttttaagtctatctcttagatattgtagttattttaaacttgatcactttctgctaatgcatactgttagtttagtcccatcacatggttaactgactatgtagacttcttaatttaaaaagaaatggcaaaacagacaaaatgctgctaaagaaatttgcaaaggtctcagacaggggaagaatagaaaagaaaaagaatagcagtattcattctctaccttactactcccccccaccttccattttcaaattccaagtatttagttgaatacttgctgaacttttttcagtatttttattggacttgttaaaaaaaaaaaaaaaaacttaggtttgctgcacttaatgagttttctttcttttctttcttctttttttttttcttttactttttaatatgtaaaagctgtcagagctaatttttcccacgtgaaatgggcctttccagtgcttatttatatttacaggacggtttaatacagcagtgtggtgagacaatgaaggaaacagttaatgtgaaaactgtatgtggctattacacatcagcagggacctatggattagattctgtaaagaaaaagtgagttgcctttcttgtttttcttcctatcccacttttaggaatttggttgctttagtttcttaagagaatgtatagctataagaaagaaagaattaaggaaaaataggatagggggatggaattttattaaataaaaagccccttttaacttttggactaattagtaaattcctcaaaagtgtcgtctttgtaagtgaccataggtgggttatatacatgcttataaaaaccatggtcaccttggtcgggtgtggtggctaacacctgtaatcccagtggtttgggaggccaaggcagaaagatcacttgggcccaggagattaagaccagcctgagcaatgtagggagaccccatctctacaaaaaattttaaaaattagccaggcatggtggcatgcacctgtggtccccactattctggaggctgaggtcagaggattctttgagcccaggaggttcaagactgcaatgagccgtgatcatgccactgcactttatagtatattttctattaaaattgtttaagaagtaggcctgatagactgacagtccttctaactcttgagagttgcagtacctgtt

SEQ ID NO: 94774 - DNA, 1060 bp, Homo sapiens
ccttcaacttgtgccttcttggaatggatctttaaaacagcttttgacagaaacagatgtctggttttctaaacagaggaaaggtaggcctgaagtttttgagaacttgtcttttaaaaggaaatttgttaaaatcaggccccatgagaacagaaaataaataaattaattaattaaatgaaatcaggccctgacttgtttatagacttaattttagagcttggagaagaccttagcaattatctacttcacccctcatttacagtgagaaaatcaaggctagataagaaaaataccttaactatcattatctgaattgttactccttgaactgtcatcatactcttgatcgccaaaaactattgtttttcccattttatcactaacagatcttgttgattgcatttgtcttgaccacactgagttttctctaacaagctataccccgtcaggcaaccattcttaacataggggccatagataggctttcatgtgtcactgactcccaaaagtgggtacagaatttgatatgtgtgtgtgctgctgcatacatttgtgagaggagagcttccataccttccgtcagattcttagtggagactgatctaaaattggttaagatcaactgctataaggtcttatctgtgcaaaggagggcatgcaatataaaaaaaatacatgtgtatactaagttaaaatgtatgtatgttattttttactttgctaaaacatatctagaaaaagtattttttacggctgtcaggtgcaaagaactggataaatccttagttcgtgattttcttagtttatggccacctttttggtttatttttaatacgttgagcctttgtgacctaatctttgagtactagaacatcagtaacttcagtcttaactcatgtgcttcttttctattgtgtccctctgacttttcctaaccactatcttgaacttcatgtttattcttttgctttataaatatatattattgcaccatgtatatacgtcttaacatatattacatagtggtgtgctaataagctgactctgaaaaaataat

SEQ ID NO: 94775 - DNA, 1031 bp, Homo sapiens
ctgataaaattttacagccattttctattaatattgattttgcatagttacactatatgaaaaatggtttgcatgtgaaacaagtaatattaagtggtaggtgatatcaagtcacatcttatttacagaaataatagattttagcttattttacttgtagttagacttttacttttttttttttttttttttttggcaaatagaatttttcaggttttttttcctctactctggtttggctgagccctaataaaagtagtccagaagtcagggcaataagtgaaacatagaagatattaaatcttttttatctagcaaaaataatggactaaatttaatcaacactttcttatttttatctgtaccacaaaaacttatttttaaatctggtagcaagattttctgttcttaactcatagttcttttttaattattagttgcatattttctatgaacgttcatattttatgtatatttttaggcctcaagaaatcaataaagaagaactagagggaaacagcatgaggtgtggtagaaagcttgccaaagatggtgaagtaagtatgggttgtgactgttaatattcttatacaaattgtattatcagcacatcctgcacctgtaagtagtaatcatgacacctgtcatacctcagaagagcttgtttgatacactttctgtagcatgatctgctgggaaagtagttacagccaccacactcagtagtgattgattacttggccttgtatgagaatgctgaacttaaattttgagttcagataagacatacaagaagagggtcccttagcaatccagaaattaagataaagaagaaattgtgagggatctgttacatagtcttaaaagtgattctgtgttacagttgtcctaaatcaaagacattcaaatccattgattgttacccacattaggaattaccttttcttggccaggtgcggtggctcacgcctataatcccagcactttggaaggctgagatgggcggatcacttgaggccaggagttcaaga

SEQ ID NO: 94776 - DNA, 1034 bp, Homo sapiens
ttttaatcctagattacgtttggcttcttttgatagtagtggaaaactaatatgtagtagaacaactggctatcaaatacttacacttgaaaaggatcaggtatgttcgattatcttctggtatgtcatcataatatttgtcttttgaatcctcttttgaaaattcttaagtagaattaacattaaagtgatggcattttgacctaaaagttggtttaaaagtcttttgaaggtaaagatgaaagtaccacattcacttatgcataattgaccccatcccaatggaagcataattaggagaaaaaaagaaaacactgtttgaggggcagggaaacactgattataaggaaataattgtttatcctgaatatcagcagcactaaaattcattcctaaaattttaggaatcttaagtgctttatccattgtgtacatagtgcatttatttatacattcacagcaggcatcttaaagacaatcctgtatgtctccatagctccgaatatcataagagcattattctctagcccattaggttcgtaagatggcaaactctgcaatgttccccagattatctccaaagccatttatttattcatacatcacacacatggagaagtttcaaagtgtcatgatgagaaagtagaccatttttaaaagtaaaactgaaagctgttaaaatattgaggaactttatttctattaaaagtaatcatcattccaaagggcataatgttttattaaaggattcaaagcctgttatagtttacataaattatgagaagttagtagttttcctcagactgaagagactatcatagaacatccttagcattgcaagtaaccccggaagtgatcattgtaacctcacatgccctatatgagaacttcttttaacagcattcttacagagggggtcatccacccattgttgaaactctaactgacccccatcttacatgaaaggtaatatgtaggaatgtccatttcaaggcaggtatataatgagaaagtccaaatctgcctccatcaga

SEQ ID NO: 94777 - DNA, 1990 bp, Homo sapiens
tgggctctgagtcttttttttggtttgttttttttttttttgagagagagggtctccctgtgttgcccaggctggtcttgaattcctaggctcaagcaatcctcctgcctctgctttccaaagtgctggaattagtagcgtgagccaccaagccccacctggctctgagtcttaataaccatcaattgctgtttaagtcagcttttttgtatatttgtgtgtggttgttagaaacttttaatttacatttttctgccttccagaaagctttctagccctagttgtactgaatgcaactgatgattaagcagtaaactacattaaaaaatttttttgttaacaatcaaggccttggcagaacctttttcctcactttgctatacggaatgactcgtggttctgtggagctcacctcatgtatatctgtgctgattgatacaaagttgatatgtctgtctgtttctaacatctttgcttataaatattagatctccaagacgacatagatccacatctccttccccttctcgactgaaagaaagaagagatgaggaaaagaaagaaacaaaagaaacaaagagcaaagaacggcagattactggtaatgttattagataaataactgtaggaaaagtacagtgatgataaaattataaaagtttaatcttgaacatttaaatgttaagccttttatagtattcattgcatatggttttgagttttttttggtttttttttttttgagatagagtttcattcttgtcactcagactggagtgcaatggcacaatcttggctcactgcaacctccgcctcctgggtttaagcaattcttgtgcctcagcgtcccagagtagttgggattacaggcacccgccactatgcccggctaatttttgtatttttagtagagacgggttctcaccatgttagccaggctggtctcaaactcctgacctcaggtgatcctcccgcctcggcctcccaaagtgctgggattatagacgtgaaccaccgtgcccagcctgagattttgttttaattgcaccctagcaagttgctggttatctatggtgctcctgatatagaacgatagttaaaaacatgagaatattctattttggaagtgtcttcagaactatatagtgtcatgcctgatattaaaggtagtccttaatatgaaacccaggtttttttttaaaaggtaatcctgtctaaaggcttcaaggagaggactttttttttgtaccataagttacattctgtccaaatgtaagaggaattttttcattagactcatcttcagctaattgttttgtgtgttctctgctagtgaggtggaatgactattaatctgttaccacctctctttttatttatgtatatatttgaaatgatagagaggtcacaaaattattcttttttgcagaggaagacttagagggcaaaacagaggaagaaatagaaatgatgaagttaatgggatttgcctcctttgactccacaaaagtaagtaaaacgtgcaacattctcatttgaattaatatgttatgactgtcctatctttccatgttcttttccatttatacaaatttatttggttataagacaataactatctgtttgaagggctttgagaatacaaaggaggaaacagtgaactgccattggaattcagggagtggttgccagggacgatgtttgaattagattttaaaggacaagtagaagtgatcagacaaagaagaggaagaagattatttcaggtagagggaagagctcatgaaaatgccatgtaggtgtaaaggagcatagtgtattgtgggaatttcagattcgaccagggataaaggggtgctgatgggctagtgacttaggctagaaatagaggtaggaggcaaatcacagagggcttttgatgcccttagtcatgctaaggaattcagagtttattcttttggtgttgaggagaggaagtagtgatttttaa

SEQ ID NO: 94778 - DNA, 1040 bp, Homo sapiens
cagagcgagattttgtctctaaattaattaattaattaaatgtgcaactagtcatattgctcctggctccagtgatttttttaaatcatttagaataaagtccagtcctcagtgtggtctacagggcctccatatgacctagaccctggctttctacagcctcactcttgctcactgcactgagctacactggccggcctccttgctgttctttcaaaacaggcttgtgtctactcccagagtcttctcacttgctctttcttccttctggaatgttcccccacctccccgatttgcacgagtagcttctttacattgttcagatctctgctcaaactaaggtcattcctgatcaccctatccaaaataggaaactttcttccctgtctctgtactctgctttactctttttttttttaacatttaaaaagttgagataaaatttatatgccataaaatttacccttctaaagcttacaattcagtggtttttaatatactcagagttatgcatccatcattcctaattccagaatgttttcataaccccagaaagaaacctcatatccattaataatcactcctcatccccctacccctagaatccactaatgtacttcctgtctctacagatgtacctattttgaacatttcatataaatggaataatacaacatgtagccttttgtgtctggcttctctcatttagcataatgttttcaaagttcctctgtgttgtagcatgtatcagtacatccatcattcttttttgtctgcaaataatattccattctatagttataccacatttttgtttataattcatcagttgatgggcatgtgagttgttttcacttattgactattaagaaataatggtgccatggctgggtgtggtggcttatgccagtaatcccagcactttgggaggccgaggtgggcagatcacttgaggtcaggagttcaagaccagcctggccaacatagtgaaaccctgtctctactaaaaatacaaaaattagccagacatggtggcgtgt

SEQ ID NO: 94779 - DNA, 1428 bp, Homo sapiens
actctggggtgctctctgaagcggcatctccggcagagaactccatagtgtgtgatgagcctgctgcttgctcagtattggcatttacctcttaatatactgtcctatgcccatctggagtataagcctcccagaggagactgggcagagattaacttggcagtaaagattatctgacaagtctaatattttatgtctttgtaattccccattttcaagtatatatctcaattagtttatcttgatatgtgctcaaagatataaactattgtcatcccatgtttatgctattacacataactttttatttaaagttctggtcataaaattctggttcaaacattctagaattcccagcttctatttctggagctgtgactctcagtcagtcaatgcttaggccatgcctttgaggcactaggtattgaaagtcaccacttcttcattatcttaggattctcagttctttcttcaaaacttatactttcaggttttcttaattaactggtcattccatacatctgtgtaaaataatttctaggaaaactccgaatctcaaaacctttgttttatacttactacttcatttccagtagatggcaccaaacaccctttgaaggtcttcattatactaatccctagttggtgttgctggctaattgataatttcatccaccaccaaggaacgaacatggtctattcttcagctgattctctaatttttatataatgtagtatttttgtttggagtctaagctagacttgttggcatttaaattatttgctgtttctggctcagatttcaaccttttttccccctttttaagacaaaaataagtgtgactttctggtcagggtgattgtagaggaagggtcatgatactgaaataggacttggttaaaataaagagttgagagtaagagactaaagacatatgccaaatgtttgtaataaaattaaagagaaaatataaatatatacaaaatccaaaatgtcaggataatgaaatcaaagcatttttagtattatcactttgggtactttagtagaattgcactcgtttatgattttgaagtttgttttacaaataacatccaatttaaaaatactcttttaaaacttagatccttttatagttcataaacatagtaattaggtgttcccattgcatgtatgagatgtgcctcccaaagagcttgttacagcgttagtacattacctgtctgatatggagaaaaaaaactgttatatttctaccttcatttccaactttgtattgtgctttgaaaacctttaccttcagtatgtgtatttcattagtattttcataaagaatcagtttttagatccagttaaccactgaaaccagaatatgcctatatgtcaggcatgatttactacatgtttattctatttattgagttgat

SEQ ID NO: 94780 - DNA, 1051 bp, Homo sapiens
gtttttgaacccaagaatttttcctggttatctcagatacgccgtaatttggcttagtttttttttattagagtgtatttttaaatggtgaaatttgacctttatcagtgattccagagttatccattgttttccataatcacatggaaaatagttttgacacaaggtatcagtgtgttcttacagtgctttaattaaaaacgtaaatgtttacccatcaatggaggtggctggcagtctcggaactgatcatttttgaaagggctgctttttattaataactcagtttcagtaaactagatgcacttcagtaatgctctagccattaagtacaagtccccctttaaaaagcaccatgtgtttaacactcgagtaatcaaataaaatctgtagttttaaaaattttgttcaaattttggaagaagttgtgcttcctatggagtttgtttaaaagtttattttggggattcagaattttgcataagtatataactctatttattagtttatatattttcaaagaatccagaaatattttggtaagaatttcctgtgtgctgttattttctactctcttctcaacctattcactttcctctcctccacctacaaggggtggtccttgtctacagttaaagagggtaatctcaaccaactgttggcatatactttcatccattttattttatttatttatttatttttagacagtctcgctctgttgcctaagctagaatgcagtggcaccatctcgacttactacaacctctacctcctgggttcaagtgattctcctgcctcagcctcccgagtagctgggattacaggcgtatgtgaccatgcctggctaatttttgtatttttagtaaagacggggtttcgccaggttagccaggctggtctcgaactcctgacctcaagtgatccacccacctcagcctcccaaagtgctgggatcccactatgcccatctactttcatccatttaaaaaaatctgtcaggctttgaacttactagtcccggttaaagttaaaatgccacgtgctttag

SEQ ID NO: 94781 - DNA, 1029 bp, Homo sapiens
agggttgatattttgggaaggagaatttattttatttatttatttttttggagacggagtctctctgtcgcccaggctggagtgcagtggcacggcctcagctcactgcaccctccgcctcctgggttcaaatgattctcctgcctcagcctcccgagtagctgggactacaggctcgtgccaccacgcctggctattttttgttgcgtcatcccatggtggaatgtagaagggcaagaaagtatacatgcgcaagggaggagggggccagacttatccttttatcaggaacccagtcttgtgactatgacatgaatctatttgtgagagcacagccctcatgacctaatcacctcttaaagatcctacctctcaacactgatgcattggggattaagtttccaacacatgaactttggtggatgcattcaaaccacagcaccagggttcctactatgtcacctccagaggcacccagagaggaaggttttgagttaatcacatcataatttatagcccttgagccatcagagagcccatgcagagagcaccctatttcctaggtctcaggtggcatggaggggtgagtacgttgaagaaggtgcttgctaatttccaaagactcagcgcaaataagttcagtggggttcatgggagagagacctgaaatgaatcaattgtgggtaatactagaaagttgtcttctcgtcattacttccatctatttccacacctaccccatcacactccgttctcagtatcttcatctgtattggggtggaaaagagtgccaacagctcagaataatgctggttctagctgcacccagcctcacccaatgtggcccaacctagtggaactgcagtgaaaggaagcgagagttctaattatgggttttaggtatcatttcactagatatgttggaggatctgaggacctttcttagggacctttaattacagtaccctggactgggaagtgcccatgatgtggcacctctttcttaccctgtagggttttcttgactac

SEQ ID NO: 94782 - DNA, 1033 bp, Homo sapiens
agaaccagactgaggaagggatagggaggagaaggcactgtgcccctagttgcagggacaagaaggagacaccaatgagtttgagataaaggccttgaagagagatgctgggtctctaaagaaatacttggtttccttcacagttttgtctgagaaaagacaagcagctgacagtgctggttatggaggcccatgaccccaaaagaggttgtgctgagtagatagcccaccagcatgttcggatggaggcacaatgttgtctggagagcagctgacagctataatgtaaccaggagtgctggacctttgggtctgtggtttactgtgatgtactgagacaaagactgtcacagatcttagaagggggaggcacagcttccaagaaatgatgcaaaatggtggcgcaaaagaggccaccagtggcaacaagggcagggcatttcctttgtggctggtggtcacggacaacttctggtctcaatttcccaatgagctatgctaagaaatttaccagaaagcaaaataagccatgcaaaaagcgatgacaaagcacttggggtatccatgcaaaggtgcagttcccccttgtccactaattttgtggagccaaaagagctgatccagaagctgcaaagatagtccctgtgattaagacatacaacttttttttttttaaatgcgagactctgtcttactctgccacccaggctggagtgcagtagagcaatcttggctcactgcaacttccacctcctgggttcaagtgattttcctgccttagcgtcccaagtagctgggattacaggcgcgcaccaccacgcccagctaatttttgtatttttagtggagatggggtttcaccatgttggccaggctggtcttgaactcctgacctcaggtgatacacccgcctcggcctcccaaagaaggcatacagcttttttggcctgagttcttccaaagagagacccttcctagttgacttggcatcatctttcattcaccagtgttctctaactgcctttatgattag

SEQ ID NO: 94783 - DNA, 1055 bp, Homo sapiens
tctttagtttggaaccagcttttggattatagaaaggatcagatagttgacatacaaggatttgagtgagagtgtatattactttctctgtattttatgggctctttactttaaaatgaaatccccagaaatcctaccttaacttttcccccacctaaatttctgctgccaagagcctatccattcttttaaatatgtcaggttcaactcccttatctttgaaacaagttgcatgtacagaagcctgcagtagtcctggagcttccttcagacagggtgaagggagtgagctctcttcaggctacctcctcccactgaaccaggcataggagctggcctcagcagccttaggagttcaggactctgttcaacatgaatctgtggaatttctctctgaattttggggagagagtattctgtagaatatagtacgggactctgtcagtgaggcatagcaaaaagtactggaagactggctggatgtgtgtgaatggtgggatccgaaggtatgtaggagtgggcatcaaggtttctgacctggctcttaaattttgacagcgttagggggcactcatgtgccaagtagagagtcttgaggggtagcgctagtccctggcccttagaggtgttctgaatgtttttgtatgtagctcagagctcttttgcaggctgatggggattcatgaagatagagtacttactgaggaacggtgtgttctgttttgaagattggatggagtggttatgtgcacagactgggcagtctatggcctggtcatctagtctctgtgaggtgaggcacctgcatttccttcctagggccatgctgggaaaaccaacctaagagagctggagatcatgactattgttagtgatttccctgagactgctaactgtctttgcttgctccttctgttctcttaagtcccatggctgtaatgtcctgccttctattttctgctttgggaccttcaaattccataattcattcagacttctctttctagagacaaggtctcgctatgttgcccaagctggagtgtggtggctgttca

SEQ ID NO: 94784 - DNA, 1409 bp, Homo sapiens
aaagaaagaaaaatttttgtagagactgggtctcgctatgttgcctgggttggtcttggactcctgacctcaatcagtcctcccgccttggcctcccaaagtgctgggattacaggcatgagccactgtgccctgctgaaaattatttcttgttttgaattgaaatctaattgagacttctcattaatttaatttttgtttttatttatttatatttgagacggagtcccactctgtcacccaggctggagtgcagtggcacgatatcggctcactgcaacctccacctcctgggttcaagtgattcttctgccttggcctcctgagtagctgggattacaggtgtgtgccactacgcctggctaatttttatatttttagtagagatggggtttcaccatgttggccaagctggtctggaactcctgacctcaggtgatcctcccacctcagcctcccaaagtgctgggattacaggcgtgaggcactgtgcccggcctaattttagaccagtaccccggaactatacagaataaatgtaatacatcttccacatgcaaactcatgaacctttgaagacagtcttcctatgtgtaagacatatttgcagtttatcctaatacctaaacttgctttcagttcagatcattctgcacagaaacaatttctacttctccctactttgtaaatgcagtctgacaaatctgtgcttcacttaggattatttagttacaaggtgagtatgctttcctttcctccttgaagaatgaattgatggtgagctaagtctttacaattgtctgtgagtttggagggtttgcagtctcctactcttgtaatcattaggaggtcaggctgctgccctgctgcatacgccatcagagctcacaaaatggctggaagtttatccgggcacttgacaaactgcatttacttcatcaggccactaggtgatgaacaactcacaaacccagactgccagggactgtggtgtacagggcagtttctgtttatacttggaaaggccattcgaagtcatctggtccaaactcattaaaaggtttttgttggggaggggaaacatgttttttatatagtttgtctttcctggctttgttacagttaaatgttaattgcctgggacatttcctttttttttttttttttttttttttgatacggagtctcactctgtcacccaggctggagtgcaatggcacaatctcggctcactgcagcctccgcctcccgggttcaagcgattctcctgcctcagcctcctacaggcgtgcgccactgtgcccagctaatttttgtattttatttttttagtagagacaggattttgcactgttaggctggtctcgacctactgacctcatgatcgcccgccttgacctcccaaagtg

SEQ ID NO: 94785 - DNA, 1731 bp, Homo sapiens
aggctgagctatgatgtttggtaggctaagtgtatcaaatatgtttttgacttacggtattcgagatgtaacctcatcataagtcaaggaacatctgtatttgtacaatgaggataatgataatacctgcctcctaagatggtggtgacggttaaatgccatcagctatgtaaagtgcttagcatagtgcttggcacatagaaagtgcttaccaaatgtcagctattatcataaaaattaaaatagttgttattctcatttaaaagatggataaacaaaggcttagagaaataaggtaaataaagtaatttgtgtaagtcacacagcatataaatgacggaattagtttgcacccaggcagtcaaactccagagcttttgctaaccattacgctgcatcaccttagtaggttgagaggaagactgggcaaaaactgcatcttgtcaaacttgagtgtaggggtaaaggtcaggcttgagttctgacttacctaaccttcattgtgatcttaagcatcttatcagtgtagcatgtgcctcgattattctctgaattgattcttccctagatccaaagacatgaatgataggttagttatattcttctcctgctgagggattgggtgttccctggaccgggaaatggagctaaacaaacacctatgtctcagtgctttttggaccataagtaagagcttgtccggcctctcttgttattatgcttgtttattttttcacatgactggtaatgatgagaagcagaacagcatacacattgagaattttcttttttttttttctttgagacggagttttgctcttgttgcccaggctggaatgcaatggcgtgatctcacctcaccgcaacctccgcctcccgggttcaggcaattctcctgcctcagcctcccaagtagtagctgggattacgggcatgtgacaccaagcccggctaattttgtatttttagtagagacagggtttctcgatgttcctcaggctggtcttgaactcccagcctcaggtgatctgcctgcctcagcctccctaagtgctgggattacaggcgtgagccactgtgcctggccacacgttgagaattttctacatgctatgtactctacatggattatctcatttaatccttaaaaataacctcatggtgactcttatccccgttttatagagttgaagagaggttagaaaacttgcttcaagttgcacagttaataagtagtagagcagggatttaaataaggcagtccatcctgagttcatgcttgctttttttttttttttttttttgagatgttgtcttgctctgaccattctggctaacacggtgaaaccgtgtctctactaaaaatacaaaaaaaatcagctgggcatagtggcaggcgcctgtagtcccagctactcgggaggctgaggcaggagaatggcgtgaacccgggaggcggagattgcagtgagccgagatcgcgccactgcactccagcctgggcgacagagcgagactctgtttcaaaaaaaaaaaaagatgttatcttgctctgtggccaggctggagtgcaggggcgcaatcttggctcactgcaaccacctccatctcctgggttcaagcgattctcctgcctcagcctcccatgtagctgggactacaggtgcatgccagcatgcccagctaatttttctattttttagtagagacagggtttcaccatgttggcca

SEQ ID NO: 94786 - DNA, 1005 bp, Homo sapiens
tattgtagatagtaacaatttgacctcatatgctggtgaccctgcactgctgttaggagatcacttcttggttctctgagaaatgtaagaaatgtgttggggttggtatagctgggtgtggtggctcacacctgtaatccctgcactttgggcgcagaggcaggaggattgtttgagcctacgaattcaagacaagcccgggcaacatagggagcccctgtgtctaccaaaacagttagcccagctgctgggcaggttgaggtaaggagtttcaaactagcagactgcaaagtggaggacagggaagggtattccaggcagaggaagcaaaggcctgaagtcaaagaaagcacagtcaattgagaagttgtagtcatttcagaaagatatgaatgaaggatgtttacattatccagtttttggtgactattgttttgctacttcactagtgtatattattgagatttgactatacttgctagagcacagaaagttaaaggctttattttatagcaataattctcttttaaggtgaagacatcagaaattatacttcctgtccagagattctaaggagaaaatgtaaattaaacctgacctttgagttagcaaatgattgataactctctgtcctataaaaaaaagaaggggtggccgggcacagtggctcacgcctgtaatcccagcactttgggcggccgaggcgggcagatcacctgaggtcaggagttcgagaccagcctggccaacgtggtgaaaccctgtctctactaaaaatacaaaaattagctgagtgtggtggcacatgcctacaatcccagctacttgggtggctgaggtaggagaattgcttgaacctgggaggcggaggttgcagtgacccaagatggtgccattgcacttcagcccaggcaacaagagtgaaactgtctcaaaaaaaaaaaaacagaaggggcagggcacagcctactcctttctctctaacttctgaatcttaccatgttt

SEQ ID NO: 94787 - DNA, 1048 bp, Homo sapiens
agatgaagtgcttaattcaaggtcacacaatgtcggggatggacctccagatttccttactggtgagcacattttccaggtttttctgtaaatcagggttttggaatttaaatactatttaaaacgtttaggtgagcttgtcatttaaatgagcccttcaggtaatcttttgttgtgcagtcagcccctttttgtatcaggcagctcccagcttttcctgataagagctacacctgtaacgggcgggcgggctgaaatgctgtcttatgcagtgtctggtgaggatagggagggggaagtgattcagcctgcccagaggctcaggtgtctgtcggtctggccctgtctgtggcacatttgagcctacctgcctctgggggagcaaatggttttttgtatgactgacttgcttccgtcagctccccatgggcttgactcttgcctcccccaccccagcaccccaaccaggtaaaaataaattcgctctggcaccaagcctccatttctctgcagagattgacagagcatgacagagtgttaggtcagtctgtggactcttcagttcaatgcaacacgtagctagtgggccaagcaacaaactggtgcctgagcagggctctgattgtgtgtggatatgagagacaaagagaagggctttttgcctttaacttatgttactatcagatatattttccaaagtggtttcatgttagtttatataactctacgaacatttaataggtacataacagcaacgatgacagttacagcactaggtgcttactgtgtgctgggcattgttctaagccttattttatgtattcagtgtctcacatttttaaaaaaaccactaagaaacaaattttacattatgatttaagacatttatgcacacatatgtaacaaaatttttgcaaaacaatatttgttactacatgcagtatatgtacttgggtaatttctattctttatatataaaaaggacacattataaagtgattaaaaacccattaataagttgtgaccgcttatacacatttaatcctca

SEQ ID NO: 94788 - DNA, 1070 bp, Homo sapiens
atgcttcctacttcctttccgtgcataagaagccgaatggtgagagtcacatttagtccactttcagtcacaccggcatccatggcgagcggcgggcggcgttcgggggagttgggctcgttacgtggtcaagtctttggcggctggcggggggaggggaggtgtaggcccaaaactgccggcgcgaggcgagcgagggccgcgggagcgagcgggagcgggcgggaggccgcagcgtagtcgcaggggcgggcggcggcggcggagggggcgagcggggccgggagcggcgggcgggcgggtgggcgagggcgcggcggtggcgactccggcggcagcctcggcggtctgggcggggcgggaagcccgctttcaaccccgcgtaccctctgaccccggaagtgcttgctgcgcaggaccccttgaaaaaaaatgaggacccgtcttttttaggtcacaagattgcgccaacccttacatggtccttaaaaaaaaaaccttctgacactgcagtagtgaaaatgaagcgcacgatgggcggaagctgtgagtccggcaaagttttaaaatgatgacgtattttattaactctaacggcactggcgggtgactgaaaatactagtgctgtgtatgcgggatagacattattttcctgccctacatgaggggctcgtgcgcggaacgacatgggcagccccggcggaaactgcaggcacaagccgggacgccgcgggtttaaaacatgcgcgtgaggtgaccagagcgcgtgcgcgagggtgtggggggatgggaggggcagcagccctcttccgggggggaggggcggcgaggcgaggcctgcggagcgggtgcgcgcgggcgggcacgtggggccctttcgtccccggcgtccgggcgccctgcatggatcccccaccccagctcctgctccccggcggcggccggtgggcagaaagaccgaaacccactcacggccgcctgccgaatcgcggctctgctgtttgtggggcgtgctagaaacgtggtcctaaaaagaatggcgtccatttacataatgctttgtttgcgt

SEQ ID NO: 94789 - DNA, 2395 bp, Homo sapiens
cagtcacccgccagtgccgttagagttaataaaatacgtcatcattttaaaactttgccggactcacagcttccgcccatcgtgcgcttcattttcactactgcagtgtcagaaggttttttttttaaggaccatgtaagggttggcgcaatcttgtgacctaaaaaagacgggtcctcattttttttcaaggggtcctgcgcagcaagcacttccggggtcagagggtacgcggggttgaaagcgggcttcccgccccgcccagaccgccgaggctgccgccggagtcgccaccgccgcgccctcgcccacccgcccgcccgccgctcccggccccgctcgccccctccgccgccgccgcccgcccctgcgactacgctgcggcctcccgcccgctcccgctcgctcccgcggccctcgctcgcctcgcgccggcagttttgggcctacacctcccctccccccgccagccgccaaagacttgaccacgtaacgagcccaactcccccgaacgccgcccgccgctcgccatggatgccggtgtgactgaaagtggactaaatgtgactctcaccattcggcttcttatgcacggaaaggaagtaggaagcatcattgggaagaaaggggagtcggttaagaggatccgcgaggagagtggcgcgcggatcaacatctcggaggggaattgtccggagagaatcatcactctgaccggccccaccaatgccatctttaaggctttcgctatgatcatcgacaagctggaggaagatatcaacagctccatgaccaacagtaccgcggccagcaggcccccggtcaccctgaggctggtggtgccggccacccagtgcggctccctgattgggaaaggcgggtgtaagatcaaagagatccgcgagagtacgggggcgcaggtccaggtggcgggggatatgctgcccaactccaccgagcgggccatcaccatcgctggcgtgccgcagtctgtcaccgagtgtgtcaagcagatttgcctggtcatgctggagacgctctcccagtctccgcaagggagagtcatgaccattccgtaccagcccatgccggccagctccccagtcatctgcgcgggcggccaagatcggtgcagcgacgctgcgggctacccccatgccacccatgacctggagggaccacctctagatgcctactcgattcaaggacaacacaccatttctccgctcgatctggccaagctgaaccaggtggcaagacaacagtctcactttgccatgatgcacggcgggaccggattcgccggaattgactccagctctccagaggtgaaaggctattgggcaagtttggatgcatctactcaaaccacccatgaactcaccattccaaataacttaattggctgcataatcgggcgccaaggcgccaacattaatgagatccgccagatgtccggggcccagatcaaaattgccaacccagtggaaggctcctctggtaggcaggttactatcactggctctgctgccagtattagtctggcccagtatctaatcaatgccaggctttcctctgagaagggcatggggtgcagctagaacagtgtaggttccctcaataacccctttctgctgttctcccatgatccaactgtgtaatttctggtcagtgattccaggttttaaataatttgtaagtgttcagtttctacacaactttatcatccgctaagaatttaaaaatcacattctctgttcagctgttaatgctgggatccatatttagttttataagcttttccctgtttttagttttgttttgggttttttggctcatgaattttatttctgtttgtcgataagaaatgtaagagtggaatgttaataaatttcagtttagttctgtaatgtcaagaatttaagaattaaaaaacggattggttaaaaaatgcttcatatttgaaaaagctgggaattgctgtcttaaactctttgttggtgccttttttttccctccccttttagcctgaggtgtttggagggaggagggagaagggtgggcccgtccttggtattctctcaagctcttctcaccttatcggtaagattccattccctctgtgccccaacaaaggaacatggcaggctgggcctgctttgggatgtttccagggacagagaggttcaagttccagagagaggcctctgcccatttctctggtagaaacaaggttttctcgaggggaaaaggtgtgcccactcagtaggacctctaaatggcagagcgtcctctccatctaaccagttcccccacccccacctcacaggataaacttaggaacaaaaaaatattctggggtgggaggagcctggggaaggggtgtgggggcagg

SEQ ID NO: 94790 - DNA, 1028 bp, Homo sapiens
ttttttttttttttttttttttgagacagggtcttgctctgtcactcaggctggagtgcagtggtgcaatcacggctcactgcagtctcaacctcctgggctcaagcaatcctccctcctcagcctcccaagtaactggtactactggcgtgtgccaccatgcccagttaatttttgtatgttttgtacagacagggtcttatgttactcaggctagtcttgaactcctaggctcaaccaatcctccagctttggccttccaaagtgttggaataacaggtactgttattccgagtaactggtactactggcgtgcgccaccatgcccagctaatttttgtattttttgtagagacaaggtcttactatgttacccaggctattctcgaactcctaggctcaaccaatcctccagctttggccttccaaagtgctggaataacaggtgtgggccactgtgcctggccactgcaaattcttgggagcctgctgtctctcttagccaggttacaatggatactatctgttaacactagtattcctactatcccatattcaatctttactcctcaatcacaaactttttttttttttttttttgagacagagtctcatgctgtcccccaggctggagagcagtggcgcagtctcggctcactgcaagctccgcctgccaggttcacaccatcctcctgcctcagcctcccgagcagctgggactatagttgcccgccaccacacccggctaatttttttgtatttttagtagagatggggtttcaccacgttagccaggatggtctcagtctcctgacctcgtgatccacccacctcggcctcccaaagtgctgggattacaggcgtgagccaccgcatcctgccctcaaccacaaacttttatttccttctgctattctatcccatgattctcataaaccatcaaaatgtcttcagaatgccaattttttgtgtgttccgatttcatctctggcatgataaactttatagctctgaaactcttggttcaa

SEQ ID NO: 94791 - DNA, 3013 bp, Homo sapiens
taaagccgttgtttacttaaagatttatcaaatcagtcagtgcaaatgtcagatacaatgtatttatttaaaagattcatttttaatcatgaaattacttatcatccacattgttttaaaaagaaacaagatgctggatgtctgccaatttttgccttcattaccttttttgataaagtttctcagatccttgtttcaaacacaaatgcagggattgctgccactttttaactattaagaggcagaaaattgcacaatattgaacttttttccactgaagtagtgtgcagttctagtttgcattcctgatatgatttaaaacatgtaatataaagatgttaaaaaaaaaaaccaaaactgtgcagagtctagaagttgtttgtcatcttcagcttgtgcacaattctgttttaggttaaaaaaaggcattgtttgagctgtcccatctccactgttatccctttggggttttttaatataaattattagtttacatcatttttgtatctacatcttttttcacaaatttgtcttgccttattaaagttctgtaaaatatacttaaatggaaaaaatgatgttcatttagattgaaaacttttctcagatggattgataattgcattcatcttgtgttttatatgagaaggtgcctcaagaatttcctgttggatttgtttaaaaggatttttatctttcgtgataaactttgctgtgtaccaggaactataaaaacaaaaacttgttactaaagaaaatatctgaaatgtgataagttcttatgccatgttaatttcatgtgtcaacttcaacatttacatgtattatttcattatgtaaaatgttttagcaatttaatattttgcacagttagcaaactttgtatgtcatttccttcaaggcatcatgcagagttgacatgagatttataaggttttaagttgtttgcatgtgaaaatcaaatacatactttggtagtctttgaatacaaagtcatctgctcttgtttttcaagaattttgagacacaaagttgtatgtaaaggaatatattaatttgccgttttctaggtagatttgctcaaaaagagtgaatcaacttaatatgtacaaatgatagctgtgaaactgtagaatatctttgtgtcaggcttggagttcattgtgacctccaaattttgcctgaaggaccagctgggcaaagcatcttttaaatgttcagaggccaaaagataaacaaaaaaaaaaccttaaaatcctacctctttaaacagccttcagataagagaatcctcagtgcaatcattattttgattcgtttggtacctgttttcctggagttcccgattttattattttggggtggctccaagcattaagaggtttaatctttgatggcattgttctagttttgaaatttctagtatatttcagagtctcttagaagacttgtgtgggaagtttcactttgttttcagtgaagatcacaaacctccttcttcctttactcaagaggaaaggtcccagtatacatatttgaatggttgatggttttcaagaccttcagggagctccctgcattttacctagaaacagaaaaggcccgcaaaatcttaagtttcctggcctgcatttcccgggtaggggcaaatgactccaagctggtctctaagccaatacccttataaaccagagcccaggaaagacagctcgagtgtataattctctggagctcaattctatgcagttgtgctgatatttcattaagtcactgtgtatttttaagtgttgatacattaaaagtcgctttatggaagatgagtaaattttttaaatacttggaaattttatttccttgttaacttctacagatcagggcatgcaaccaaaagcagcttaaatgaaatattttaaaataaaatatcaggaagctatttttagatttcttctggcttatgtttctactttaggaccctcattgttctcttattaaaaaaaattatttcctgtgcatctcatggactgcagggtaaattatttgggcataaataatttaaatagttttctttcattttgactatctccagtaataacagtttttattatccagcatattggcttattgcacaaatcttaaaatgtacattgactactttctgagaagaaagtggtatcagtactcatgatgaaaaggttactactgaacaaattcacatttcaggaacacctctatctttggtttaaatcttactcttagtttttccgtctaaaaatcatactggtattagtatcaggtaaggaaattaaagtttttaaaatggtttcattctctgcaatatgcaaaatttagattttactttctggtactgtaaagaacctgaagtgatttacacttaatgggtgattaatccagtattctttaccctgaatgtttggatattaaagttcctttatgttttctataacctgtgggatcttcttgcagtgattattgtgtgtgagattttttttctttttggtctatccatattgttatattcactcaggtattttttttttaatcttattccagaatcagtggtttatattgggttactgtttaacaccaaatggaattggcattctgcagatttaattaattatgaaaccagggtctcattttccttgctgatacttgttgaaaatgagattcacattctagtctttattttcctcctgttttgtccctgtgcttgtacatcttccttttatttgtgtgttatagttctattccatttgagaaggcagttggtaagaactagattgcatgtacaaagacaggtttactaagtgctgtacagtggtcctgaggttacagttgaattagaaaaacgaaatgtacttacaggaaataagaaagcaaacctttcaaatgagagtgatgatttctttaaaaaaaatcagtttttttctctcaaataatgttctttatttcacgaaatcgtcaatcttaagcatgagcagggataaacaac

SEQ ID NO: 94792 - DNA, 1050 bp, Homo sapiens
gaggcagagcttgcagtgagccgagatcacgccattacactccagcctgggccacagagcgagacttaaaaaagaaaaaaaaaagaagaagaagttcgagaccagcctggccaatatggcgaaaccccatctctactacaaatacaaaaattagccaggcatggtggcagatgcctgtaatccccgctactcaggaggctgaggcaggagaatcgcttgaacccagttggcggaggttgcagtgacccaagatcacaccactgcactccatcctgggtgacagagcgagactctatctgaaaaaataaataaaataaaatttaaaaatataaaaagcaccattgcattttaggaaagctatcatatgttgtgtatttcatagagcattttcacttaaacatttgtgaaaagcaccaagttttctctactgctaagagttgtttaacatcaactaatagtgacttctttattgtttctaatgttgtacggaacaggatgctgaaaacgccattcaacagatgggtggccagtggcttggtggaagacaaatcagaactaactgggcaacccgaaagcctcccgctccaaagagtacatatgagtgtaggtgtattggagaagaaaaggaaatgtggaattttggagaaaaatacgctagattttaaatgttagagctgttcccggagacttattgcagaaatagatgagaagcaaatcaagactactattcaaaaatgtacttagttttcatttttgtaattataaataatattatttctaatgtcaagtctcctattaaatagaaaatactgggtaattttttagacattcgtgggggaggtttaattctgaactgaagtataatatgtgtaatataagcattttgatcaaggttaatgttacctttacagtagtgtagtgaatgctacttttctctttctgcacattttatttaatgaattaaagacataaaccttttctctcaccagcaaataccaaacagctatcatatgatgaggttgtaaatcagtctagtccaagcaactgtac

SEQ ID NO: 94793 - DNA, 1979 bp, Homo sapiens
gcaaatatcagtgcttgatttatagatgtgtaataaacagtggtctgtaaaagcatgtagtataaaaaatatggtattttcccttatatacagcctataaactcttcctattccttgagtttagggtagactaacaaattacagcgtagaagagagtcagctaccagattaaatgcatgcgtaccatacagataatttattaagtatttttgcatattgaacattgacttacattaattttcccttttcaccaccacgtctttgtcattttgaccctgaacacttaataaatcactcagattgatctaaaatatgcttatgtatactttaatagaaaattacattgcatggctttctgacttgggtttttgttataaaagtgcctgttttgttcatgtgtcctgagagagcaagcattgtgacatacctgactaacttaaaagcagattgcctgtgaagcacaatttgagtccaattttttgaggtatggagttttagctatcatggctgggtttttactcaatctcaaataatagggctctggttattttgcagagtgtctctgaagaatggacagaattgccctggctaactacaagctacggttcacagtggataaatgttggcgtgcttttttactttctgactttttaaaattttgcttttatatcttgtagttccaatcaattttatatgaatgctattataaaattcagtgtaaaatcttttcttgtctagcttaaaacttgtgtgtgtctagtatttttcttcaatgatttaacatttctgaaaatgtcaagttctcaaaatttagacaaaaaggggggtataaattgatctgaaaaaattaaatagtttaattagtttagggaatatacaactttttcattcttttggtttccagttttctatttttttttaatgattaggtagaatatagtgtcaaataagttataaattgcatggttaaagaaagccattcatctaatgtcctgtgaactttataagtggttaagtagttcatgtgagtagctgctttcaccatgcttaatatttaaaagtttaaaaagttttttgaagagagaggcaatttctgtacaatataaatatacatatatacttaagttattgatttgcatgtctataaaattaagcctcatttcctaatacatgataaattttgtagaataaaaggtgaatttgcattaaaggttcactttaatgaaggtgaaacatgagaatgagttgtgtgtgaaattcttatttgatatccagaggatagtttgcaaacctaaacttctgattgtttctgatttcagagatgcccgagtggtaaaagacatggcaacaggaaagtctaagggatatggctttgtctcctttttcaacaaatgggtgagctcagtgagaagtgcatggataatgcttaaagagtaaagaatggaaacactccgttttaattactaatctttttttcgtctgctgtttattttactgatgattaaaataaaccctcactagaagatttcttctgttttgtctgtttaacatttattggcacctgaggcatgcagagtactgataagatgttttcagaatgtagaaagtaaagttgtttaaattatcagccaaaggtagatgttgaaaatctcatttatggatttaattcattatctccctagtttatattcccatggtagtttaaaagtagctaataaaatactgtgaggaggccggacgcagtggctcacacctgtaatcccaacactttgggaggctgaggcgggtggatcacctgaggtcaggactttgagaacagccaggtcaacctggtgaaaccctgtttctactaaaaatacaaaaattatccgggcgtggtggcaggcgcctgtagtcccagctactcgggaagctgaggcaggaggatcacttgaacccaggaggcacaggttgcagtgagccgagatcatgccacagca

SEQ ID NO: 94794 - DNA, 1068 bp, Homo sapiens
aattagcttagaaaacttcttcagggtttctgcttgctctgttatttttccacctagaagaatagtaaaaaggaagtgctagctgtggtttggtttgaacagaccaacagcagagatgagatgaggagactggaaagtaaatgccagtagtattggtgaattttaggagctttcgtttgaagagttatcgttccttgattaggggatgtgaccaaggaattaccaactttaaaggtggtcacagaattagggcttataaatggacttctttcagatgacatttttctttgtgagacctgatcaggaaaataagtacagctttcatttcttgattgtccttcttaataatatcttagagtttcaataataattagcttgctttcgaatatctggacttagacagtcttagcctttggcctctcaagggctctaaatctctatgcacaattttgtgttttcattttggtgtggaaaatctttgtaaattttatcctattgtcagagtagtcatagaaccataaaaggataaagaagcctgatctagatctttgctgctgcttcagagaatcttttcagagagaaataaatgagttgaatatttttcaagactaacattttctgaaactttaagaagaaaaaattttctaacattgtgaacagattaagtagctattttattaaatgctttgattttaattgaggtagtttttttgaaaacacgggaattttagtttggaattaggcaaagattgtttaacagttggtgagtttaagttaagtgaccttcagattttagcaatttcatgatttacaaatcgtgggttatatttttttctcttaaatatatttctgtgtcatatttttagtctgtagattttcttatggtcccatgattattggtgtatactttttttttcttggtaagacctttaagttttatgattttcaattgagataatgtataatgtttgagttttaggctatataaggaattagctttcctgcatttaaaggaatcatttggcagtcagtagcatattttcctgattttttgttgttgttaaagga

SEQ ID NO: 94795 - DNA, 1218 bp, Homo sapiens
ggttaattgaatgataacagacacataaagattaggatttgtcaacattatttgcctaaatgtaggtcagaagattaagtgttgaaacttgaccagagctggtatctccttcagtgtttcatcttaaacagatatcttcctatgtgtttatagatacaaatgtgattttgggctttatttttgtgaagtataaatgtagaaattttttttttttaggaagtcaaagtgaattgggcaacaacccctagcagtcaaaagaaagatacaagcagtaagtatattttatgctctttgaacatttgtttttattgtacccagtagttttattgtaaagcctataaacatcatacatgtttgcagtaatgttttgatcgttatcctaagatatgattgaatgtgtttgtgttaataaatttaagaacaaatctaatctttgtcatcaggtagtaccgttgtcagcacacagcgttcacaaggtaattgtatcttcttaaacataaaatgaaatctcttgaaagggtattcactaaccacctgaagtttttttgtttgatatttgggggaggggggcgggaggagatattatttctatttgtctctctagcaatacttttctcccttctcagtgttgaccaagtataacttgtccgctactttggtgctagttcaagctttctgacccgtttggtagcagctgatgccttagaactactttcaccaactaaggggcaaaataccctcctttcttgaggtcaccatttgggcttcatacccagatcttccaaatgcttgagttgctcctcaaattttgtttcccaaagagcaatccaaaatgttgtttaaggcctgtcaaatatgggtaacttttctttccaaatatgctttgtcaaattgatgtatgtgtccattttaaagtgttggtccaacaattttgcatttttaaagtgtttctttttttgataattgtcttttttaaaaacttcagatatgggttggttatttctctccaatgcttttttaatggttctgatataaagtgaagggattactgttttcattctgttgccttcagtcttagttcacttgcacatggattcacataaactgaatggtgtaatgtctgggcaaccaaaactgttggcttttgagaaaactgtcaaatactttaacatcaaactgttgcaatgcaaggtatttctttgattgttcttcacaaaa

SEQ ID NO: 94796 - DNA, 1031 bp, Homo sapiens
tcactgcacactgcaagctccgtctcctgggttcacgccattctcctgccttagcctcctgagtagctgggactacaggcgcccgccaccaggcccggctaattttttgtatttttagtagagacggggtttcaccgtgctagccaggatggtgtcgatctcctgacctcatgatccgcctgcctcggcctctcgaagtgctgggattacaggcatgagccactgcgcctggcgggaagataattttttaaaggcttctgagcaagcaaaaaattgatgtcagaaagttcacattctaaaacttattctaaaattttacttaccagagaatctcttcagttttcagagcctatttacctatattttaaaacaggtttaagaaggttggctaagattttctgctactcagcaagctagtagcagcaaggagcaatgtacatttgtagcagtaaaaagtaacttataacagggaggggatagaaaaatcataaaaagccgaagtgagacttcagaacttaggagttcagtcaaacttaatctgtgtagcttgaacaaatggttatatgatgatggggtatgtgtagctatatatccagttaggatacctagtcattaatattaaattatagtactatagtataacctgttgaagaaaatagctatgtataaaagcagtgtgattttaagtgtttgcttttttttttttactttttaattattttagagacaggatcttgctgtgttgcccaggctggattcaaactcctgggctcaagcattcctcccacctcagcctcctaaagtagctgggactacaggagctggctgtttacttttttgtttgtttgtttttgagacggagtcttgctctgtcgcccaggctggagtgcagtggcgcagtctcagcttactgcaacctccacctcccgggttcaagcaattctcctgcctcagcctcccgagtaggtgggattacaggagcctgccaccatgcctggttaatttttgtatttttttttaatagagacagg

SEQ ID NO: 94797 - DNA, 1020 bp, Homo sapiens
ccctcccgcccccctttaaagttgtgttcttcggtatcattaacctatctacattgaatctagacacaacaaagctaggcataaatggccgtcactttattaaaaatgcgtgctggaaaggtccacctctaatgtgcccgtgagttgggcatctggaagggtgtgcaggccccttggttcctccataaagacctgtgagaatctttgggcatctggaaaaaaaatcgagttaatgtcaatatgttaattaatctactgcttttgtctgggaacagtgtctgtccagattcagggagttagaccttcgctgcaggtgtcactcttcccccaccaaattgttggtaatagctttgagtaacaacctctgctattgatggtctttcaaaaacaaaacaactcacagagctggtaaaaggggaaaatataatcttctgtttttttccctcatagcgattattggagccggaattggtggcacttcagcagcctattacctgcggcagaaatttgggaaagatgtgaagatagacctgtttgaaagagaagaggtcgggggccgcctggctaccatgatggtgcaggggcaagaatacgaggcaggaggttctgtcatccatcctttaaatctgcacatgaaacgttttgtcaaagacctgggtatgtaattttggtcttggagctcaccagattactgtgtgacatccccggatatttttatcagatggagaactgaaatttctgccttgttaattgccttacagagacgttggtaaaactgttttcctcactttcttgttagttggtactgcctgagttaggagcagttctgctgtaatgggacactagttgtctgtatcttcagttatctggaattacagccatggggtgggggtgggaatggctgccattgtctttttttttcttttgaggagtttcgctcttgtcgctcaggctggagtgcaatggtgcgatcttggctcactgcaacctctgcctcccgggttcaagcgattctcctgc

SEQ ID NO: 94798 - DNA, 1023 bp, Homo sapiens
gccacgaagatgcatgtctgacatctttgtttttaaattgaattcagttggtactctggcttttttcctttgactatccagtttttttagacttttagtctaaaaatagccaggtaaaaatatatctacttttgatatattaatatttacatgatcatctgacccatcgcctagcaaatctgcttttggacagtgtagtgaaagtatagtgtttcacactgttccaaagatagagctcctttatgtgtctcctgagaactgagggaagccccaaattcactcagattacgttctttcatttgatcagcatagacaccactgacttagctgtgctttatgtttttgcaggtctctctgctgttcaggcctctggtggcctactggggatatataatggagagactctggtatttgaggagagcaactggttcataattaacgtgattaaattagtttggcgctatggatttcaatccctccgtatgcacatgtgggtagaggacgtgttagacaagttcatgaggtaattttttttccttccatttaacctaagatcttttaatttaggttaaattaaacttgatgaactttaggaattatgatttcttgtaagcattttctacctcacagcaaggcctgtttataacattgttaggcaaaatgttttgtagaaactatgcagactatttgcttggatattgaaaggttggtttatttttgcttctgaagtgtattttgcaaatgcttctttagtgttgccagatactgttagatgccttgaattcttatgacaacttactctggtaggtactgtttttagcttctttaaacagatgcagaaggtggcggtgtagagaggttttaaaaggcaagttcacccacatagtaagtggtatagctggagttgccacccaggcagtctggcctttgagtcttcactcttaatctctatgctgtgctggtgttgtgtatatgaattgagataatgtgtacaagagcttgtagaaaggatcagaaaactta

SEQ ID NO: 94799 - DNA, 1026 bp, Homo sapiens
gagctaggattacaggcatgaaaccaccgcgcctggccttacttctactttttatttttcctttttcttcttctttctttcttccttagtttcttttctttttttttttctttttttttttttaagagacactgtcactgtctggcccaggctggagtgcagcggcattatcacagttcactgcggccttgaattccggggctcaagcagtcctcctgcctcagcctcccaagtagctgggaccacaggcatacaccactatgcctggttaatttttgtatttttagtaaagctggggttttgccatgttggccaggctggtcttgaactcctgacctcaggtgacctgcccacctctgcctcccaaagtgtggggattataggcgtgagccactgcacctagatgtcagtttgattcttatgacgccacttcccttctttatacatccccttccccacatcttgtttggtatttaatggatttctcttcttttccaaaggatctaccgctaccagtctcatgactatgccttcagtagtgtcgaaaaattacttcatgctctaggaggagatgacttccttggaatgcttaatcgaacacttcttgaaaccttgcaaaaggccggcttttctgagaagttcctcaatgaaatgattgctcctgttatgagggtcaattatggccaaagcacggacatcaatgcctttgtgggtaagccagggcttgaaacagtggtggacattagttcacagaggggcttacctgatgctatggtggttcctgactttaggctgtggattggaggctacttttctctgtgaacctcagacattgttagcaaaattgtgcgtatgtagatgtgcatttttagggggagagggtctttagctttcattagttcagtaattcttaactgggggagattttgctcccaggggccatttagcaatgtctagagacatttggagtagaacatgtaattgggaagggagagtgggtagagagcctcttacaaaaagtcagaa

SEQ ID NO: 94800 - DNA, 1585 bp, Homo sapiens
aggcgcctgcctcagcgtcccgagtagctgggactataggcgcctgccaccgcgctcggctaattttttgtatttttagtagagacggggtttcaccatgttagccaggatggtctcgatctcctgacctcgtgatccacccacctcggcctcccaaagtgctgagattacaggtgtgagccaccatgcccggccgaaagataatcttaccttcaaaagtaaaaattctgtattttgtacttactgacattctgaataagaaattggcctcaatgtaataaaaatgcaagggacaactatcttaagggatataacttcttcaattctttagaattatagagaaattatgaagaaggtatacaattatttttagaaggtatgttagaaacactaaacaaatatatgcctccttatttcctctaggaaatccaacaaagatgtatgaagtggtctaccaaattggaactgagactcgttcagacttctatgacatcgtcttggtggccactccgttgaatcgaaaaatgtcgaatattacttttctcaactttgatcctccaattgaggaattccatcaatattatcaacatatagtgacaactttagttaagggggaattgaatacatctatctttagctctagacccatagataaatttggccttaatacagttttaaccactgataattcagatttgttcattaacagtattgggattgtgccctctgtgagagaaaaggaagatcctgagccatcaacagatggaacatatgtttggaagatcttttcccaagaaactcttactaaagcacaaattttaaagctctttctgtcctatgattatgctgtgaagaagccatggcttgcatatcctcactataagcccccggagaaatgcccctctatcattctccatgatcgactttattacctcaatggcatagagtgtgcagcaagtgccatggagatgagtgccattgcagcccacaacgctgcactccttgcctatcaccgctggaacgggcacacagacatgattgatcaggatggcttatatgagaaacttaaaactgaactatgaagtgacacactcctttttcccctcctagttccaaatgactatcagtggcaaaaaagaacaaaatctgagcagagatgattttgaaccagatattttgccattatcattgtttaataaaagtaatccctgctggtcataggaaaacacacggttctaattaagtgtgaaggtatagctattgcacttatgccatctccaaaatttcttaagtattctttcactatccattaggagtttttcttaaacttgtctgataataagaatcacctggagttaggaggtggtggttgcagtgagccaatctcaccattgcacttcagcctgagcaacacgagcaaaactccgtctcaaaagtaaataaaaataatcacctggagtttgttaaaccatatggattctcaagctcctctcttgaagattctgattcagtaggtctgggagtggcgcgctggattttgatcaaaattgtagagcattttaaggtgagtacctgagggagaact

SEQ ID NO: 94801 - DNA, 1816 bp, Homo sapiens
gcccatgcctaaagccttgactttcagaatgttgtcttttgattcttctgtcttgatttgattaggggtgaaatttagaagtcttagtaatgtaacttgaagatgttaaacaaaaatctcaagtaaaatgaaaagcaaatatgggctactgaattaagaaactggcattctagtattaaatcctcacttcaggagcttttaaaaatactgagacccccccataaccagagattcagattcaaagactgaggataggaccttagcattgtagctatttaaagtttctaatgtgcacccagggttgggaatcaccaatgtgggtgtgaaaatgcctacaaagggttttagtgccttagaagtcctaagaagcccaatctgtatcaaagcagatccattttgcaaggatctttcttttagaactttctcagttctcttagtaagaactttagaagtaatcttgataataagcacagacagcctaacagcagaggcaacttaaataactcctgagcagttggcactagaacagaatacttggaatgacaccaaagttaaccaagtccagcatatgtccaaagagttaagtgtttcatttactgtagcattctgggtgagaaattggttgctgaaatcttaagacagtggtctcaaccttggctgcacattggaatcacctgtagggttttaaagcatccaaatggtaattaacaggcagcaaaacttcagaactagttctgcatctactgtgcaaagatcatgattaactgtcaagacactggtagaacagaacaagcaaaagattaagagttcaaaagtaaatgcaaccaatttaacatgtagtgttattaaaaaattacaaaggcctagaccagcctgggcaacatggtgaaaccccatctctacaaaaaatttttaaaaagttggccaggcatggtaatgcgcgcctgtggtcccagctgctcgggaggctgaggtgggaggatcacttgagccttggaggtcaaggctgcagtgaatcatgatcatgccactgtactccagcctgggcaacagagaccatcttaaaaaaaaaaaatccttccattgaatagaaacttcaaagtccttcatcagatcatggcattagctactttagcaaaatagtgtaaactttggttctgagtaaaaatgacttcttccctaccacagttgtgaatgttaatatgctgataaaactgccaagatatatttgataggtaggggattaaactcatggtttgtcaaaagagtgtttttttctagttttattcttaacagatatgttgaggtattcatatttgtttccttttgtggttttaatgaagacaatttgtaaagtaatactgttatgtatatgctaaatgttggtaaatactaattaatttccatcatttgtagacttgttttgcaatgggatatatttttacttataataccaatttaggctgggcgcagtggctcacgcctgtaatcccagcactttgggaggccaaggcaaacggatcacgaggtcaggagatcaagaccatcctggccaacatggtgaaaccccatctctactgaatacacaaaaattggctggacatggtggcgcatgtctgtaatcccagctactgtaatctcagctacttgggaggctgaggcaggagaattgcctcaaccgggaggcggaggttgcagtgagccaagatcgcaccactgcactccagcctggcaacagagcgagactctgtctcagaaaaaaaaaacaaaaaccagtttaggctgggtatggtggctcaccagcactttgggaggc

SEQ ID NO: 94802 - DNA, 1026 bp, Homo sapiens
taccaaaaatataaaaattagctgggcgtggtcagggctcctgtaatcctagctacttgggaggctgaagcaggattgcttgaacctgggtggcagaggctgcagtgagccgagattgcgccactacactctagcctgggcaacagagtgagactgtctcaaaaaaaaaggtgaaattagtcattggagacttggcattagaatctcataaagcaaattgttagccttaaatccaaaagatgtctgtcgtataaagggcttagagttgtttggtgtccctgtggcttgaacaaagctttgcaaaccgacatgtaatattaaaaaaccattaatgatttggtgaaaattcttaaatcatcatagttatgtctgttacctgagttgttcttttcaaatttatttttctctttcttaggtaatacgaggaaatagtatcatcatgttagaagccttggaacgagtataaataatggctgttcagcagagaaacccatgtcctctctccatagggcctgttttactatgatgtaaaaattaggtcatgtacattttcatattagactttttgttaaataaacttttgtaatagtcaaaaatgctttctcagatgttctgaatatagaatatcagctctcattccagttttttctaacatgaattttcctggttgacattgatttcaaagggttttatgcattaaagtgaaagaatcttattaaatgtgaaacatggcaaggattccttctgtccatcatctttcaacactgaacagataaagaagttacaaacatgagtgagtttcttctaaaacactaattttcaaaacttgtaagaatagtaactttgatctagcctgactttcccaagtacatctacattccaaatatagtacaacagaagcaaaagacaagaagtaatgatgtagttgtttattttgaatataatcatgaagtggggaaaaattttaatacaagagtagaaagaggattccagagaaaaacattccagtgtatcatggttctttgt

SEQ ID NO: 94803 - DNA, 1035 bp, Homo sapiens
ttttattgcctttcctcttcccaaattactttgcttcctagaatgtctaatttaggtaaccctttacgcccccactctttttttcccctgagacagtttcgctctattgcccaagctggagtgcagtggcgcaatcatggctcactgcagcctcaacgtggcaggctccagtgattctccgacctcagcctcccaagtagctggaaccataggcatgtgccaccacccccagctaatttttgtatttttggtagagatggggtttcaccatgttgcccaggctggtctcaactcctgagctcaagcagtccacccgcctcagccccctaaagtgctgggattacaggcgtgagctacctcgccctactccctcactctttacagcaatacattatttttactattttagatttcattattcccattgtataaattttagcaaattatcttaactatacctatttacttgtttatgcttaaatttttttaattggttatataatctttacccttttcctttttcagatttatggacaagaagttatcatgtaagtttgttgttgttttggggttttttttaattatttaattgctttttacatgtgtcttagcaatgtttggagcaactttataaaaatttaaagcagccaggcgcgatggctcacggctgtaatcccagcactttgggaggccgaggcaggcggatcgtgagatcaggagatcaagaccatcctggctaacacggtgaaaccccgtctctactaaaaatacaaaaaaaaattagccgggtgcagtggcgggcgcctgtagtcccagttactcgggaggctgagtcaggagaatggcatgaacccaggaggcggagtttgcagtgagccaagatggcggtactgcactccagcctgggctatagagctagactccgtctcaaaaaaaaaaaatttaaagcacacaggacctctaattcacatccgttagttaagcagattacttaatcctaactagacaattttatttacctaatttctgataatt

SEQ ID NO: 94804 - DNA, 1610 bp, Homo sapiens
atattccctaacattaaaagagtgcctggcacatagtagatgctcaataaatatttgttgaattgaatgttttcctgtagaaagaacagactttaaagaatcagtggctcacacctataatcccagcactttgggaggctgacgcgggtggatcacctgaggttgggagtttgagaccagcctgaccaacatggagaaaccccgtctctactaaaaatacaaaaaaagttagccaggcatggtggcgcatgcctgtaatcctagctactcaggaggctgaggcaggagaatcacttgaacccgggaggtggaggttgtggtgagccgagattgtgccattgcactccagcttaggcaacaagagcgaaactccgtctcaaaaaaaaaaaaagaatcaagatgtttgtacatcttacaataacctctagggacctctcatttcctggaagaatgttctgcccaatttattctgtcattcacctgctttctagtaatagtttgagccctcctggtgccatcttctgtttgagtcaagacagtcttggaaagccaaacacagtggctcacacctctaatcccaacactttgggaagccaaggagggaggatcacttgagcccaggagttcaagaccagcctgggcaacatagggagatcccatctctacaaaaataatttttaagaaagtattagccaagagtggtggcgtgtgcctgtggtcctagctacttgagagcagaggtggaaagatagcgtgagcctgggacgttgaggctgcagtaagccataattgtgccactgcagcgcagcgctccagcctgggcaacagagtgagactctgctcaaaaaaaaaaaaaaaaaaaaaaacttggccaatcacactaccatgtccctttaattgaccaagataatacatattaaacctgtagcacagggcctaacacataatgagcacgcagtaaatggaggccttactctcagctttttctacgttcttccttcttgccacaggaccgcctggcccggtgcaccatgcattgcaacgacaaagccaaagattcaatagatgctgggagtaaggagcttcaggtgaagcagcagctggacagttgtgtgaccaagtgtgtggatgaccacatgcacctcatcccaactatgaccaagaagatgaaggaggctctcttatcaattggaaaataaaagtatttgccagtggccatcagggctgagggcaagaatatattttttataaggaattgggaattttagtcttttaagcaaagtttacgaatgaagaaatgaaggatggccacaagcgtaaggcatatgtcacttgcctctggacactggttattttatgtttcagtccctaaaaaatgaaatggaaaaaagtggtgctaaatcgagtcagagatattacaggagagttttagagcttattatttcctgtggccagtgcttgtcctggcagtaaggctttcccctgtaacaagccagagccctccaaggtaccagactcttcttactacacaggtactaacaggctggcaggttagagttggtggagtctgaggagagatattttctctttgttgccaacatcctgtttac

SEQ ID NO: 94805 - DNA, 1084 bp, Homo sapiens
gaatcgtgaaatgcccaccagataccaagagagaagcccagcaacaggcttatttcttcatctctgccacctggctcaccttaggaaatttctcctaactccaaccctagcccagggatacataaattatatacgaattagggttagaatgagtggaaacaaagttctccacgatagcccaagggaaatggctggtagcgtctgtggggaactcatctctcactcagtgctttcttttctgttcttttggggctttttttttttcatgcaaagtctgaaaactctccattcctgcccacagagggaggcaggagcctttataaccctgatgcctcaggactccgggtcacacaggtttacagagagggtagatgttccaaaactagagaattttagtcctgaaagcaggattcaaagccattgagatccataactcattcttccatttttttccatgggtcaattcagccatccaagttccttgttctgctactggcaataccagatgaataacctcttcctaaaccctcacagccctgccagctggaggtggccactttatcccagtcctttgtcccaattctgaggccattacacttgtggaattacccacctggttctttatcaagaaagccgagtggaggaccagttctctctgacagctggggaagctggagccaggtcagcttgcagaaacagagcaaatactttagggtagccaacagatgcttttgttgttggccagcatctgccccaaaaaaccactgccctacaatgccctcagccccctatggtgcctgtccctctagaagcccccatggggagctggtttggagctggtttagagctggagctgcccagcaggcccctagggcagatgctgtaccaccctggccctcctaccaggctcctgcccagactgggtcctctgtgtctttgcagctgctgccaggtccgaaaacactgtgagtggtgccgggccctcatctgccggcacgagaagcccagcgccctcctgaagggaagaaccgcttgctgccactcagaaacaggtaaggagactcttctctggtgggagacacta

SEQ ID NO: 94806 - DNA, 1037 bp, Homo sapiens
tatctcatgtggctttcttgtgcattttttttcttttatttttagaaatgagatcttgctatgttgcccaggctggtctcaaattcctggactccagcagtcctcccactttggcctcccaaagtgctgggattacaagcatgagtcaccacgcctggcctttcttgtgcattttggggaaaaaaaaagttctgtgttcttataacttgaccattgctcttggcctttcttcttgacatttcattggtttcttcctgtcttcatttctcttagatccccaaatataaagggcagatgatgccagcgtcataggaaactggcattgtcattagtaaacgcttctcagacaatttgagtgggacagcagagggatgtggtgactgaggctggaggtgagagatcatgggttttgggccatttggtctcagttttttctgagttttctgagggtttttttgagtttttttgtccagtcactgggcaagttagttttctggttcctgtttggatttgtttcctcatctattggacttgaatcagaagtggcctgtgaggtttttcacatgaccacacactgatggattggtagagatgacttggagagccagggtggggagggttataaggctgactgcaggttttaggaagtactgcactgatccattggtgatgctaattgtcataggcccaaggtagggaagtggtagtgtcactgacacgtatttgattttcttggaactagatgcttttttacattcaggttcaaagattctagttgctggaactatacaaaggagcaggctttctctgccttgtcctcaaggagcctcccatgcaggtgagaaaagacagcatgggaacccgtgggggaatgtgtcacaatgatacgggcaaacttggctgactgcttaatgcatgatttagaaaatagttgccatgggagtgaaatcaatagcatggttggggacagagtatttttatcaggttggttgtcaatttgtaaagcatgcagagaaacattagctggaggcaggacg

SEQ ID NO: 94807 - DNA, 1062 bp, Homo sapiens
gggaggcggaggcagaagaatcgcttgaattcggaaggcagaggttgcagtgagccaagatcgtgccactgcactccagcctaggagacagagcgagactcaaaaaaaaaaaaaaaaaaaaacaaacaaacaacaacaaaaaaaactatcaatagtagcagctaccatttgttgcatgtttattgtgtgtcactcaatataccacatttttctcatgtgtctctcgtttaatctctaaacaaccctgtgcaagagttggatatctttatctgcttttacagtgaaggaaactgaggctcaggcaactaaactaaagtcagcagccataagaagttgggtgaggatcctagtagcatgaacccaaggcaccaagttgggagtgccaatttttgtgcagggaaaaggggcagtgctgggcagctggggtcagaggacctgacaggagggaatgggtggagtttaggtggaaacgaggtctaggatcaggttatgcatgctaaatctctactcaggacttggggctgggttctgtctctgcgctgggttctgtgagtggtacagagcccatggagagcttagaggataggagtgatttcattcagcaaggtcagtctagtagtaggagcaaagatttttttttttaagctgttggcaagaaaaccagtctaacaactattttgatagcacagggagagatgatagggcctgaattggggcagtaacagcagggatgcagggggatggataggatggacggtgtggaggctgggtgtgtaggagggcttggcttggatactgggtgaaggagagggaagggctgacaatgactgcctagttatcagtcccgcccagaaccaaggaagaggtggaagacatgagttcaattttgaacacatgatctggggtacaggccttgtggagagtggtggaggttggagatagtgtttgggcatggaagcaggggaagcatctatgggaatatagggtcggtccggtgccttggtgggctgtagtgataacttcaacagcctacacttgtctgcctttgttgaagtagggagg

SEQ ID NO: 94808 - DNA, 1072 bp, Homo sapiens
taacccacctagcaatcttatgagatatggtatctccattttagagatttaaaaaaaaaactgaactgaggcacaaaattgttaggtgacttgcccaagttccctctgccagcaagtagcagaataaggatttgagcccaggacccttgcctgccatcctagccatgctgcttccattctgactctccatatcagcctgtggaaggctgtggatgctgaggtgcctggagttgtttgtgtgtgagagcaccatcgtgtaacagacttgggctaaatgcagccagactttcagacagccactctccgacatatttaccatgatgagagtaattcccacataggtggttgtcatgctggttaaaaagaaatactgcccttcccagtgctaggaaatataaaaaaacaagtatggtagagtggttttttccctccttcagtcaacagttcaggtattcagatgatcacaagaggcatgctatttgacatattttattatgaccaaggaacctctaataataaattcattggtgggggcttgtttgcttttctaccataaattttttttaaaggtgtttgatttgaagagtgatctgttgatgtaggcagtctgtcccccagtgagtgacacgcctggaagtcatggggcacattgagccacagcccctggggcactggcttcacctcctcctcatccccctctacacctccccaccaacatttcccccaaacaatggcagaaggctgcagagtctttaacacttttactttaacacttttagttcttcacagtccaactaaagatagaacctgcgagagcacagttgctaatagctggcttactttcagacttgtccccaccaactttagcgatgacatgaacctacaaaaagcacaggcatttccactgacttgaaggaacagcagatgagaacaaaaatagcatttgctcttttacttgtatgtaagaacttcattcagctggcagcatttttgggtggtctttgtacctccgaatagtggacacttcagtatctggttcgggtctgcatccccaagtgttagagcagggcca

SEQ ID NO: 94809 - DNA, 1043 bp, Homo sapiens
ttctaacatcatttattgaatagtttattctccactcactgatctcaaatctcactttgtcacttgatacattcttaggagtacttgggtctgtctgtcgagtttctgttctgttccattgatctaaggatcatggctataatgaaccactcttatgagttggaatgtgttattgcactagaaaattaaggcagaaaatattcaggaccaagaagataaagtgtattccagtggatacccatcacttctaaccctcataatgagaccttgacttccctcctacctaggtgatgttgaagggaaggattacttaccacgtttctctctctgttctctggccattctctcacttggccagagactggtgggcactgggtcttactgtactgaaaggcatggtgaacctgcttatcctctctcctattgtttctggaacttagtgttttataagaattgggccgggtcatgaggcaggcctgcaatcctccacattctggtgaactgagactgtctattttcatgtccccttctcaaatgggagtactagtgtagagtatgccatggcatatgtggaaccacagaccacacctggcacgggaacaactagagaatgaaaaaggaacttaagtggcaagtcataacattgttttctatattaaaacaaacttagatgtgttaatgaataggatgcaagattgaaatatcaaggttgtctggctgtggtgtctcatacctgtaatcccagcactttgggaggccgaggcgggcagatcacttgaggtcaggagttcaagaccagcctggccaacatgttgaaaccccaactctactaaaaatataaaaattagctgggcataatggcaggtgcctgtaatcccagctacttgagaagctgagacaggagaatcgcttgaacctaggaggcggaggttgcagtgtgctgagattgtgccacttcactccagcctgggcgacagagtgagactccacctcaaacaaacaaacaaaaatatcaaagttaatttttaggataaaagataagg

SEQ ID NO: 94810 - DNA, 1009 bp, Homo sapiens
tggcatatttccaaacataaagaaagccagtgaggagagtggtgagagatgggaatgtgaagataggctccagatcccaaagggttttgttagatgatcaggatatttttcttttcttttaagggtaatgagactcttttgaagcaaaggactagtgggatcaggtttatgttttactctgctgttattcatctaatttctccccacatacccaggaaatgtcctcgggtccctggagttgttacactcatggaaagggtttttgttccttgtagggaggtagctggtggccaaacatgaggcctttgtggtcctggtggttcttgctccagggaaagcaccagagctttccctatcaatcacccactcctgagaaactgaccataggccacaatcacataaaggagccatgcccacatcagggagttgtggcatgagggcagccaggcctctcgtggccagggaagaggaacagttcattttggagtctacagacagaacttaaaagccacagcaggttgttggcggaagttggtggaaatcgacagataagttctcagaacggagactcctctaaggggctggggctcattccttccattttatactggggcctttgcatcttttccctactctgggtctcctgggtagcatttaacagtgtcatactcctagtatctctgtccttccatcccaaacctataggcaaacccctctcttctcctttctggagagcaaggctgggggaaaaccacacacttggatagatcttggccatgggaggaaaacagtggtgccctggcattgtcctttacaggcttacgggagcctattgtgggcctctcttcacaaccgtgtttggtgacatcgtgccaagttgaaatcagctattgtggggatatttacacaatgataactggcaaaaattcaaatcagagttttgtgtctaaacctaagaggccaattttaaacaccaatgaacaattgcgtattccatttgtttaaaatt

SEQ ID NO: 94811 - DNA, 1787 bp, Homo sapiens
ctgagcaggcgtttagtaaggaccacaggactttagtctcaatatctgagtctgttaatagacctgacaaccgaggaccagcccccaaggcagacgtggaaaggtgtaaatggttcatgcaaggaattgcactttgagatttttgtatttgttttattttttggttttagcatttgtagagggtttcttttttgtttgtttgttttcttggagttgctttacgttattttttccttttacttgttttcggcaggaggcccacattcccatagcgtgcctattcctatgccgggccctctcatttgggtcttcttttgtttcccccccttccataacccttacccccacaaacacacactgaagcagaccagcaacccgaaaaatcatcttgtaggtgtgtcttgtgtgcccagttttcattttcagggaacggttcaggaagattagacagctccttccctcctcaggcgatttctgttccccgcctggtctggtagacccaggaacccatggaactgccaccgcatccccttgccccacacacctgcatcttcagggatggtcccccaggtagcttctggggagtccgaggggcaaggaggccaaatcctttggaagcccggacaaggagtgggtacctggggctacaggaaagggaggagatggcagtggcatgcacccgcagtcagtcaaagccaccgggctcaagtcttcctcttttgcgcagcaccggtaaggagagagggtgtctatgcatcacgttggcctgggtgccatttccccaattaccccttggctgcaggctcccttcttgttggctacatttctttgatttctattttaatggtgggaggtggagcatatgaattttgcctatttgctccttgcttaatataaaatcacaaataatgctagacctgactacccttggagagccagtagccggttacctggctgtgcatctgcagattctgtaccccagttcaagatactctgatagaagacaccaacgctgcatgggcctgcccaccaatccctgcggcgagacaggtctaggaggctagttcattcctcatacccccaacccagctcatccgggaaggcagttgggggtttcagtgtcctgggttctcccactgttggtggatgctgactggggacattcagcactgcagaaagaggtagcagccccaggcttggatgtggcctacagagccagggtgaatgcacccggaaagtcagggtgagtgccagactgaaggagtgtgctataaggccctggcggaggcttgggcttgtaaaggctcagggccctccttgaaccatctcccccgtggccttaacatcttttattctttctttttttttcttttcttttccttttttttttttttttttttttttttagatagagtggttgctctgttgcccagactagagtgcaagggtgcaatcatagttcactgtaaccttgaacctctgggctcaagcgatcctccctcatcgacctcccaaagtgctggattacaggactgagctaccgcgcgtttcttgttctttaacttattctacaaacattaatgcgtactcactgtgtgccagactgatcctggctcaagctgctggcacgcagcttcccataaatgtaagctgtttctgcccagctcccacagtcaggccagaaacagctgggtagagacttccccgctgaagtcgagggggcgggctccccgagcctgcttcccttgaagccaggcaaagaccacgtaggaggtggtcactgtgcc

SEQ ID NO: 94812 - DNA, 2477 bp, Homo sapiens
gttctatacctcaaagtgaggctggcaggtacagagatgaactgtacacatgtgatacatttaagccactggaaaaacccctgtgcttgaaaatatttcctctatatcatgcctggagttccatcatagcccttcatttccttggctttagcatttaccttctcttaagaataccagctttcccctttccctgagaggaagagcacatgttggtctcctcttagtgtgaacgagattgccaggcccttttctcctatgcacaccaggatagacaaggcaggggatactggcagcctgcatcatcctcccattgggctgacagctggccctactttcctccctctgctgcttggtccctcaccttgatgatgtggcttcgccccctccactctactgccagtgttctcccagggcttgctaaatccagcagacccctttcctgtcttactagatctgggcagcatttgacatggctgatcaccccttgcttcttggatggcacttccctggcacctctgtggctagttgtcctacctccctggctgttcctttcaggcttccgtgcaggcttctccacttgcccatgcacagtagggtctttcagggttctgctgtgggctccctagggaagcccatccatctggatggtttcaaggatggtgaggaatttagagttgacctccagccccaacatccttcctgatcacctgaaccacagttttgctgccctctaggtgcacagacaattcaggtccatggcccagatggtacttgctgtcttctgcaaacctgccccttctgggtacttcccttgaccccgagatcactcaggagccagacaggaaacttattctattcctgttttctctttctgcccaccacatccaatctctcaaaacggtcaggtctaccttaacatctcttgatttgagccactcccactgtcatcagctttcacctggattatcgtgacagcctcctactgcttctctatcatgtggccagagctatcttcctaaaatgcattgcatagttgatcaagtcactctctggcctaaaaccttccttggctccctgctgccctcaggataaagtctggacccctcagcatggcttgtgagactcatggtgtccttgtccctgctcacctctctggtctcatcacttgccttcttgcattctgggtcccagcctcctgtatccagagatgcagtggctctccattgccactctgattcctcctttcttttggtcacagagaaagggtactttctctgtcaaatctcaacttagacttgacttcctccaaggagctttggctatactctctcctcccgacccccaccctggcatactacacagatcactctgggctcacttgcctgcctaatggtcatctccccagtagactgtaagctccttgagggcaaggattgtgttggaatttttgtattaacagtgcctggcttggtgcctggcacctagaaagcactcaataaatgtttgtttaatgaatgaattgtagtgatgtgtacaaggggatacagggaagccagttaacttcctggaggaagtacaagtgctttcatagactcgaatggaaaccacacatccctcccctcccttgatgtactgcccatgcctccctgaactgcagaaacctcagtagccgctgggaataaggatggcagcccagagtagcagggaagcccatgccagggggacatattagttgccctccaccccattctgggtctcagcttagagcctgcagcaggaagggcttaatctgaacaagaaacagaatttcccagtgggtccttccatcctggaagcctgggcccttagggctgggagggcagtgggggtgccaaaatgtgacaacttttacaatgccaaggtgaagaatagtgtctgaccccccactctcaacctaacttggatttcctggcggcggtgggggggtgccaagagatttatttgcagagaaaagggaggcctggggtctgggcttttgattgggaagggtgactcctcgagcttgggagtgggaagcccataggcacccctccccctttcctcgccacccacaacgtgaattgccacacttcagccttcactgggctgcctcagggggagaggtagccataataactttatgggttggtttgtggggagggcagggtggggagtccttgatgagatcgcacagctgccaggaaggcttcatcgaatgtgtcacgcaggttcatggccagagtgtcggtccagaaggtgttgtcacccaggtgccgcttcctgggcacttccctcatgctgatggggtaaaagccctggggcaccttcattctgtatggccatacacgtgggtacagcatgcgcagcagcacctcaaaaggcagccgcggcacgggcgccacccagtggccgtccactgtgtgcagccgcgcaccgccgtgcccatcaggcctcacctc

SEQ ID NO: 94813 - DNA, 1704 bp, Homo sapiens
acgaggttcatcgtcatgatgctttggattatgtaacatagaagtctcacttttataacatgcaaagagccttcttctaattttactcagaatgccctgtgcagtgggcaggttgaggctcattctcccattttagcagatgggaaacggttctaggcagtagcctactctgagttgagtgtaaagtcaggcctaagactccatggaggctcccaacttctgagggccttttgaagttaaaagtacagctttctgttattccccttaaactgactgactcttcattccctcaacaggactagtggtggtgaatcattacctagcatttcagttttttgcagaagaatattatcccttctcagaggtaagaagtgtccagcacattcagctgttaacagggacagggtagtaaaagggaacttgcatggtttactttataaacttagctatgatttgaaactgaatctgttcaaggattacatgtttgaaaaaaacaaaacatagatggtttgagaaagctgtgtggatggggacagactgtgctcatttggccgaggtggggaggacactgctcttcctcagtgagtcctttgggtccccctcgaggggtcatcctgaggtcaggaaggggtactagggtgaccttctctgacacagtcctcacagggcagggatggactgcacccctgagccccagcttttcccagtggccgccaaggttttcttctcccacgatttctccacaccctgctgctccagtttgaacctctgggaagagcaaggtcacttctttggggggtgtgggtcagtcagtcatggcttagcactttgtctgcctccttcagtccaggggagttgcttgtcctagcgaccaagatatggggtttgtggccacattcagtcattttcagcctccacctttccccacagaaggatttccatgtctgagggtggcgttccctgcttcccaggcctgggccccctttggagatcaggtgtggccccctgtgcactcttgaccaacacgcagtcaccacacccagcccactcttggcacctccggggcaccctcttctcagtctctcttgttgccaggtcctggcctatttcactttctgcctgtggataattccgtttgcgttttttgtgtcactttcggccggggagaacgtcctgccctctaccatgcagccaggaggtgagaagggatttgtaaggggcccaggtgggggcaagccagcaaggcctgggttggcaggggtccactgagggaacctgaatctagccctgtgttggagacacctggactcggggttgggagggccgtgttcacacacatgcgcacacacacacacacactctctctctctctcatattcttgcctgtatctccacagatgatgtcgtctccaattatttcaccaaaggcaagcggggcaaacgcttagggatcctggttgtcttctccttcatcaaagaggccattctacccagtcgtcagaagatatactgacccccatgcaggcaggatgtggggggcaagatcaggagagtcaggcccctgggcctctatgccaggtggggaccagaagtcgggaaggcacctaccacctgccctggctttcttcccctcaactctggagccccatccccaccctccttggggggctcagcttggctcagatctgatgcttcaagaggctg

SEQ ID NO: 94814 - DNA, 1051 bp, Homo sapiens
ctgtgtctctgctgtttcctgagcatacactcttacctccttgccctgaacgctgtcttttgggtctgcactcctgggcccagatcttccctggccgccttccccaagtggcattgtttcactgcaggccttgtgctctagtccttaaggtgacagcgaagtgtacttctctgttgacaagaccgtagatttgactttgcttagctctctcccgctgtctttagccctttgctctgctcacagcatttaaaacttagaggagccataagacagttttgcatatatgttcattgccatctttctaatcggatcaagtgatttgtcctaagatcggcacagcttcgctgccctcgcccttccctggtctcatgggaggcttctcttactgaagacacagtccttgccactgatatcaaagccataggggtgactgctggtggacagacttccttcagctgcaggaaaggctgggggtaggggtgccattggagagaaagcgtccacagcccctcaagtcgcctggtgtcagcagccatgtgcactctgggcatggctgaggttgggagttcacagtggaggcaagactatagccctcagctctggtccagaggcccagcttgtgggtgttggcacagtaattagcccttcattcagccaactgtcatttgctaagcactgacaactgtaggtacttatcagtagtgtttttcaaactgtaggcatgattcattatttggctgtatagtaggtcacaatcagcattttttaaaaaaaggaacataaatagaattgaaatttgagctttgaatcatatatatgtatatatgtgttggggtcacagtgtaaaatgtttttctttttctttttttttttttgagatggagtttcgctcttattacccaggctggagtgcagtggcacaatctcagctcaccgcaacctctgcctcctgggttcaagcgattctcctgcctcagcctcccgagtagctgggattataggcatgtgccaccatgcctggctaattttgtatttttagtagagatggggt

SEQ ID NO: 94815 - DNA, 1034 bp, Homo sapiens
gatctcatcctgcacttttcattctagcctagaatgccatctctttcacctcccagcaggttctagctgcccaagaatgaagtctggctaatcacctgtccccaaaccatcgcttcctcatgactgacaccctcctagaatgcactgccctgtcctagaatgcacctcctagaatgcaccctgtcctcacctatgacttcaccctgcaactcagacccacaactcaccctatttcctgccggtccgcccaggccctcccctgcatccactcttacttggagtgtttcactgccctaccccaggtgcgcatgtttactgggagcaggaggagtacctggaaatagtggaacatggcctgtttgacgtagccgatatcatgaggagccgcctctaggttgtcaatggagtcaaacactattttcactgcttggtgtgcgatccagtaggctgcagggagcagagagggctaagaagatgggagcagtcatcctgagctcacgaggagggaaactcagatccagacaggttagtgatctgcttgaattttatacaaattaggtttcctgattcccagccaggggtggcagggggtgggagaggggggtgggagggtctctatcaaactgtatctgactgaccaagataagggaaagttggagggggaaaacagaataggtgaggctgtgtcacaccagctcctacccaaggataaggcaaggtcagtctgttgtcacaaataccaccggagtcactgccatgaactggacctcaagggcccctatgaaaataaacacacactacctagagagaggtgatgttggaagggcttctacaccctttcccctagcagactggtatggcatctcctggcatctatggccttaccctcagtttcaactcctccctaaggacagcaagtcaacacaggcaggcccctgtgctgagggatgaatctgagtcctgggtgcaagtcactgctggagagcagggtcagcagctcgtccagcatttgcacctctatgatctcagtcatg

SEQ ID NO: 94816 - DNA, 1824 bp, Homo sapiens
aggtattttaattattttaatgcctggtattttaaatctctcttttaaaaaatgtcttctactttttaagtctatttatggtcactgtcattagaaacttttgtaaagttctttaaggagaatgataatattcatcctcctcaaaggtggatccttacatacatttcttttccctttagaaaattctaacatataatattaatgtatttttttgaagtctggattcagtgaccactgtaagtgccaccaaagttagccacaatgtagagtctgctttagaattgatcatgtttgacctcccatgtaacaggaatacagctgttttcactgtcataaggcaattaggagaaacaaatgaaaagactttaaagctttcagtgtacatgctaagtattctttataactcttttctctctttaaaatgctaataacttcttcgttattacaaagtcaatacattttcaattactgtaatttttaagatcttctgaattgcacctgccaacaatttttaaaggaatgtgaagaaatgttagacaagaaaagtccattagagaacatttctatagatgttcatgttcagataactgccttttagaatatcagcaatgacaattatgcatcgatttaatttgctaggacaattctttttatagaaagaatgacataattgttaagccaaatttctttttcttttctttttttttttttttttgagacggagtcttactctgtcgcccaggctgaagtgcagtgtggcgtgatctcggctcactgcaacctctgcctcctgggttcaagtgattctcctgcctcagcctaccaggtagctgggattacaggcatgcgccaccatgcccggctaattgtgtatttttagtagagatgaggtttcaccatgttggtcaggctggtctcaaactcctgacctcaggtgattcacctacgtcagcctctcaaagtgctgggattataggcgtgagccaccttgcctggcctgttaggccaaatttctaatacagaggagaggtcatttgattctagagtgaattcaaggatgtattcagttcattattgcaaacatgtatgagaccctataatgtgtattctgccaagtacttgggatttagcagtgaataagacatgagtcatgtccatagtgaggagggtcagaaatttaaacacccaagtgcaatatactatgataagtagaattgatatatgtgactttgcagtagcacagatgaaggagattgattgctcctggcagattgagttgctgggaaggcctcacagagcataagttacaatgaatgtgaaggaattccctaggtgaacaaaaggagaaagttatttcaggcagagggaattgcatgtggaaaggcatagagttatcataacagctaacacttagtggctgggtgtggtggcttatgcctcgacatggcttggctgtgtccccacccaaatctcatcttgaattcccacatgttgtgggagggaccagtgggaggtaattgaatcatgggggcaggtctttccgtgctgttcttgtgatagtgaataagtttcacaagatctgacagttttataagggggattttccctgcccaatctgtctctctttgcctgctgccatccatgtaagatgtgacttgctcctccttgccttctgccatgagtgtgaggcctccccagccacgtggaactgtaaatcattaaacctgtttcttttgtaaattgcccagtctcgggtatgtctttatcaatagcgtgaaaatggactaatacacacctgtaatcttagcactttgggaggccaag

SEQ ID NO: 94817 - DNA, 1037 bp, Homo sapiens
gttccacagcagctgctgtcacttaggcagagggtgccttccagaagcgccaccgcttagtagcggggattgccttgtgcatgagtcccatttccatccgagagctgtgcgccttgggctctgcaccttccagtatgtgggcgggagagtcgagggaacttgcccggcaggtcaggcagggcagggacagaagtaaatagaagcggatcggtaagttattttaccgcgcaccaataaagagactggggagaaaccagaaaggagagcacgttccgtaaaaacaacaactactagtcggccgaactccaagcgtgaccagctttctgttgggaacactcaaaggtcagtggtgtaaagaatacaaaaggagtggtttttccacgtgcactaatatatttatcgcgtacacagataaaagcatgtggatttggaaactttcttgagttctctcccccttcattttttttaaaatatgtacatagaatcagttatgacagaaataactgtaataattgtcacgttttctgactcactttctcctctttttatcctttttttttttctcttcctccttttatgagagggcaagtatttcccttaatctgagattccctattaggaagaaggtgccaagtggtaatgccccagagttactccgggacattcgtgataaatccttctagcaccagagcccacattcttaaccgtaaggcataccttcctcttaggtgatacacaagataggaacgtaaaactataaataaatgaatatttgggaaaaggcatttttatgtctatttttagaactgcacactttaatgattgacagtttgggaaaaagtatgacttccaacaggtcatatacatactgcaagaactcaatacagataaaggtgcatgtttgttttgtacttacatacacatcttggcataaaggaaaaatgaagacagtgtattccaaagattgcctttgatttgtcctattaagatacttgaagcttaatgtctccacttgtgtgtgtgtgtgtgtggttgaa

SEQ ID NO: 94818 - DNA, 1073 bp, Homo sapiens
ccggtgcccggtattcacctacggcattcgcggctgcagccttcagcacccgcgccattttggaaagcaacccgccacgtcaagactagccacggaggttgagagacgcgcggcagagggcggggcgggaggcagagggggcggggacagaaaggtcaggggcgtggcgaaggtcgctgctttcctgctacaacgggcctactttagctaaaacagaaacgtaaggccaggacgggtcaccctttgtgggcccctgaaaaatacaaaacgaagtttggagagagttgaaaggcgtttgggctgaccatggagatttttgtttcccaccctcctgcgaaagcgctcgcgctgccattggctctggctgagggcgagtccggaacctgtgcgccgcggaactttcggctctgaaatccaagttgcgctgggcgcatctttgccgcgcggtttccgggcggctcccttcccttgcatgctgcattgtgtcgggagttgctgacagccatggcgccgcaggtctggcgtcgacggaccctggagcggtgtctgacggaagtcggcaaagccacgggtcggcccgagtgcttcctcacgtaagtgcgcagatcccgggctcggggtgcgaccggggtctcacgtggacgcgggttgcaggcctccggcaaattgtggagctgggggaaggtaaggggaaacgtaaaatcgcttttccccaaatttcagagtttatgctttcctaggctatcaaaattttaaaaactgttaaaatttgtatagatggatctctcagttgagtgttactgaaatcactctaacctcaattgttaacacctagaagcttcccttgggcttcttacgcccccatccctctacacacagactgttggtttctccttcctcctatgtgctctcaaagcacttagcgcttagcatactttattgaaagtacgaacttgtcacttgtctgtccaccccccatgactaagcttcttcagaaatagaacttccatgtctcttcccaacacaagcgttttatatgtattttgttgaagaatttaaaatgtgatctatga

SEQ ID NO: 94819 - DNA, 1643 bp, Homo sapiens
ttcctcaagctcacctctagaggatttgcatcttagaggatttcttctgcctggaatacatgtttcccaacctttataagactatctccttatctgtaggtttcctctcagatgtgacatctaagagaggttttccttgaccactgtagccaaagcaaatgttgatcattgaatgaataagtgaacaaatgaatggagtggtatataatgtagcagaattgataatttaaggttaattcactatatatctccaagcaaatagatttataatggttttcctgcctaaaatctatacagccgattcacagatacttggttgacaggttttatatatcagtgtagctcatcagcttatatgttgttgggggccagaatctatacttatacttcattcaaattttattttacaaaagagttgggttttttttatttttattaagagtgctgtgaaattattacctgtaattctaaatctcacttaattcctcccaataggattcaagagggattggcatcaaagttcacttctttaacaaaagtgctttatgactttaataaaatattagagaatggtaggatccatggaagccccttgcaaaaacttgtgatagaaaattttgatgatgagcagatttggcaacaactggaattgcaaaatgaaccaattttacaatactttcagaatgcagttagtgaaacaattaatgatgaagatatcagtcttctcccagagagtgaagaacaggaacgtgaagaggatggttcagagatagaggctgatgacaaggaggacctagaagatttagaggaggaggaagtgtccgacatgggtaatgatgatcctgaaatgggtgagagagctgaaaactcaagcaaatctgatctgaggaaaagccccgttttcagtgatgaggattctgaccttgactttgatatcagcaaattggaacagcagagcaaggtgcaaaacaaaggacagggaaaaccaagagaaaagtccatagtagatgataaattcttcaaactctctgaaatggaggcctatttagaaaacatagaaaaagaagaggaacgaaaagatgataatgatgaggaggaggaagatattgatttttttgaagatattgattctgatgaagatgaagggggactgtttggaagtaaaaaacttaaggtaaagttttgagagaagagagagcactttcctcctcaaattagcttttcttctgtttttctaggagagatttaattgtagttagaagatttagtgataagaaatattgtgctctatcttatcagttataaatgaatctgtacttccattcaatttatgttccagttggtcttataattttgtggtagtgttattagttgccattttcacctaataattatttagttattagtttggttattagttattagcttgtagtgttattaagtcagaaagtaatatatacatacaatatacatgcaaatctatatgcatgtgttaatatatttttctatccctaattaatagtttttaatatctttttattttagtcaggtaaaagttccagaaatctgaaatacaaagatttttttgatccagttgaaagtgatgaagacataacaaatgttcatgatgatgagctggattc

SEQ ID NO: 94820 - DNA, 1008 bp, Homo sapiens
aataagacaagatgtccagtattacaattaccactgttgattaacattcttttagacgcataggccagtgtaactacaaaagataaagataagagatgaggaaaactgccaggtgcggtggctcatgcctgtaatcccaacactttgggagaccaaggcaggaggattgcttgagctcaggagttcgagaccagcctgggcaacatggtaagacctcgtctctacaaaaaatacaaaaattagtcaggcgtggttgcacgcgcctgtggtcccagttatttgggagtccaaggtaagaggattgcttgagcctaggaggtggaggttgcagtgagctgagatcacgcaactgctctccagcctaggcaactgagcgagactgtctcaaaaaaaaaaaaaaaaaaaaaagattaggaatactgcagatgtatttatattccactaagagtgaaaaatgaaagtgttggtatttggagaggaaaccgaatggataaactgaattgatattaggaaaataagagaattctgtaaggtagctgaaaaggctggcattttatacactgaagtcatcattgttgtcttttaaaagttagagataatggccaggcatggtggctcacgcctgtaatcccagcacttggtgaaaccccgtctctactaaaaaatacaaaaattagccgggcgtggtggcacacgcctgtaattccagctactcgggaggctgaggcaggagaattgctcaggagacggaggttgcagtgagctgagatcacaccactgcactccagcctaggcgacagagcgagactctgcttcaaaaaaattttaaaaaaagaagttagagtaagaatttgagtttggagtcaaaagggtcagactccatcagatactaatattctaatcaaagaattacttgacttgcgaatagatagatcacttgaatagaatagagcccagaaacaaactcaaaagcttctgggggcgtttagtatattataaacatggcat

SEQ ID NO: 94821 - DNA, 1796 bp, Homo sapiens
agaattgatcctcactagagagatgtttcccttcccttcctctgttccttggtctctgccctctggcctcagtccagttgctgtcattagcagctcagagctgaggctgcctctggcatgtccctgaagcccattggaatctaaatgctgtggagggctggctcctcttgtgctgttaggttgagaacccaactctccatgttgccttcttgtgaattagtttgggaactgaaccgtcactataagagtctgtgcctgtcaaagaatgcatttcaggttttaaagagctgagttaccaacgctcattggaatgcaggtggggattgctctgcatctttgtgcatttggccacagatgcacagcctgcttgctggctaccctgcagtttcttccattccagtttcctagttgttaaacttgatgaatgaatatgttggtggttatttttttaataggagaaaaataaagctggagatataaaaacagctgctgaaaaaacagctacagacaagaaacgagagcgaaggaaaaagaaatatcaaaagcgtatgaaaataaaagagaaggagaagcggagaaaactgcttgaaaagagcagtgtagatcaagcagggaaatacagcaaaacagtagcttcggagaagttaaaacagctgaccaaaactggcaaagcttccttcataaaggtaaggacaagggaaagaaaactgctcaaggggacctttgtgggggaagtggatagcaagtgctgggtgactggaatgtctgagccagctgacagcccacctgcgggatagagatgcatgatgctgactggctggaatcgcaacctttaatgttctagaatttttcatgtagggtcctcacaataacctgggtcctggcagcagcttgtcttccactcctttctctcttagattataagaacattgtagcagtgcagaatacctctatgctaactgattcagttttctgtaattctagtcctttttcatatttatggttgcatacattgttgtaatggtgatgtactatttttggcttttttcacttataagtacattttacagcataagcatgtggtgtttttaattgcaggatgaaggtaaagacaaggccttaaagtcctctcaagcattcttttctaaattacaagatcaagtaaaaatgcaaatcaatgatgcaaagaaaacagaaaagaaaaagaagaaaagacaggatatttctgttcataaattaaagctgtaatatattttgaatataatgtaaatattaatgtgtaagcttatattgtgtcattgttctgttttataataaaattcttgagaaccttcctttgcatcgatgacagatatttgagggttccatagtgtgaaaagacaaacccctaaccatttgcaaagcccttccggttttcactggtatgaagcaggacctggctcctccccaggcccttcctgttcaggcactgcctgagctgatcctgctgtgctcttgccgtggcccaggcctgtgtgaaggccaggccagcttgtccacatgggctggtgagcaagcactggcctgcaggctgtgaagaggacagagccagccaaccccctcacaagcagctgtctacagcagaggtcctcactctttgggctcttgatttccttctcccattgccctgtcatttcataaaacagtagcattttcatgcctgtgccttccttcccctttgggaaatgatctcatgtcatctgaacaaaggtttaatgtaggctgtagagcactatccacaatcagctgcagaggac

SEQ ID NO: 94822 - DNA, 4226 bp, Homo sapiens
gaaggaaacaagagtccaaagaaggaaggagaagatgagcttgctcagggctatgtcaggtgcagttgagataacctagcaataacagcctgagttacaaggaattttctttctctccctaaagctaaggggaaggtactgataatgatggactgggtaagttttaaaatgcagcttgccttaggatttactatctcttggttcttatttcagagcaaaagtaacctgaacccagatgccaaggagtttattccaggagagaagtactgagccgagaaagctttgaggaagacttgtctgtccccacatctggggatagtaatgcacaaaatggtggagctgaagagggggatggggcgggcgaggggtgcacagcgggaaggggagtggtggtctcacaatactgtgactctgagtaactaatatgctcagtcttattctaagcctctgagtatttctattttgttctgctgacttttgtttggggagtttcctgttttgtttttttaaatagctctttcgagttaaggaaattgcattttccccccttcatcagaagtgttccgcggtgtgtatttaaacaaaataagctgactaagaaaaactggatatttaggaaatgcccctctcaccctgctgtatacttatcagggacagtgagcacctggagagctttttgtggaatctattgagttggatgggaaaagggacaagcagaaagagcaggtggtgcaaactggaatttgaggctcagctgccccacccccggggtctcctgcaatgaactcggataaccaatgtgctgtcaagcccttgcctgtttgtcctgaaccccattcaagaaaacacagacttaaagtacttagtttacagtaacttttgatgattgttgaaagttgtaaatcagaaggtagggctgtgatggtggttgtcacttgagtcatttagttactgttgtcctgttcataagcctgtgttcaccaccaccatcagactcaccatttataagtagaagagcactagggttgatctgccacctcatctttcatgaagtctattccccagcctcctttttaagaaaagatactgctaccaaaggcataggggaggcctgctgtgctggcaattagcatgagcctgcagaagtcatccttgaatctgttgtgtcttaattttatttggacagtttttttttccagcctcatcaacacttggtcttcctggtgtcttaattccctcagacaagtttatgcacttttttaaggaaatatttttcaggacactagtaagaagctcagttcacagtttggatatttcttcccacattacagaattatggaaaggaactcaaaatcagcctaggaaagtgagtcctgcttgacccatgtgactgtgtacctgaccttctgggatcttttcagctattaaaacattttactgttcccacatacccagctttgcaagttttgtagattgacctcttagggtgtgtttctttgtctttcctgcctttaacttgctggggtcttttgttgctacccctaaggaactaaactgggtgccaggagctaccttcgtgtatagagatgtagatggcagtgtggggtacaggagagccatccaggccattctcccagggatgaggaattggagagccctgaagataatagtggcttctttctgattgctactgtgctgtgtgataggcctaatagggaaaagatatgtaacttgaaacaaagttggtataaattcagtatgtggctgtgggacagaggttggaaggaaaggactagggtatggaaagctgaagaaattctccttatgagctctcgttgactttttgaacagtgataagctaatgccagatttaaaatacacattttttcctatttgagtctttaggattatatcatttgaaaaaattgccttccttgttaggtcacatgtcataggagagtagcttagagaacttgcattaccagacagacacattaattcccaaagcctctatgttgagagaatgaaactgttaactctttttcagagaggactatgaataaagaaacttctttattcaagcttcagctttcagctgggttgtttcctctaaaagggaaagggcattgcaagtgcatagaggaaatctctcccttctgggactgcttttcctccttcatcctcgtgagcctgtccaagctcagaattccgaaggctgttagaaatgcgttgggattgcagagagaaaggagcttgtctttccttctgctgtgctggtctgttttggatgtcagtcttcaggactatgaaaacttcctgccagtttagcatggacactgagggctggcatttctagtcttcttcagacactgaacatactgactccaggtataggaagcagctagcaaattgattcttttttaaatgcataggactctgcttccggcggttcctcttgtagtccaactctttttgccatctatttatgttgggaggtaggggcacaattgtcactcacaacacaggctagttagagtttgctaccttcttagcagaaaatgcatgtgtgtcttgttggaccttcactggggaaaggctgggagcctctggctgtcagtgacttttctcacagaagaagaaccagcaagccagactggacacctttaccctttaatggtaagacttgtatttataaggggtaattttgatgttgaatttaagccactactttgtttaaacttttttaaattggcaactagaagtttgagaatttgtatagaaatggaacatgtatttctaacagttgccaatctggctggtcccaatgttagtttattagtgattgatctgtaattattgggattatttattcaactctaaaattccaagatgaaaataatttatctctttcttttcaagggaaaaaacccaaatgaatgcattttcagtttctccaggcctttgaactgcagcagaaaattcaaggatacagcctaggcctgggcaaatgcagccctgggtctttgggccagtttctgacaataatagttgagttttgggaatcacataagggtgaaaccagaaacgatcctaaggaaaggcttgacctttgttaacacctttagtttccaaagtcacagcagctggggtccctcttttttttttttttttctttttttttgagacatagtctcactctgtcacccaggctggagtgcagtggtatgaccatagctcactgcagcatcaaattcctaggctcaagcaatcctcccatcttagcctcccgagtagctgggacaacaggtacgcaccaccacggccagctaattatttttattatttttattttttgtagagactggatcttgctctatttcccaagctactcttgaattgttgtgctcaagtgattctcccatctcagcctcccaaagtgctgggattataggctgggtgtggtgagccaccccagcctggggtctctttaattaaggttataatgctaaccatggcttaaaatactaagcaacattttccaaattgtttattactattgctttgattttggagaagctgggaagtaaggaggtgaggtgaatactctgataattaacacgtgttagagaggaaagttgtgtgaagaggctgccaaagtaaacagcacgaatgaatcttcttgtactagggctgctgcaaaccccaggtagacaaatgacagcccaggctcctgaaccatcaggaacccaggaatctacccaactgtgaggagggggcaggccttcgtcaataagggtcccaccatcacgggctaataatctttctcagtttaggtgatattgaggtattgaaactgttagaaatctgacagatttgaccaagatttggagacgtccacataattgggaaggactgagtgtccctagccactctcctctgggataacgcggacgtcattagtttgcgaagtgggtggggagaacaggaggattgactctaatttggtgtgtagtgggggccttgatgtccttctgcctctgtccacatttccccatgtgactcattgcaccctgcattgctcacagggatcattagttctcccggtagacagagcacctctgcagcctctgctctgctgccttgtgaatttcctacacagacttggttagttacaatttggaaacagtttttttgggtttttttcctttgttttaatcttctcacaa

SEQ ID NO: 94823 - DNA, 1018 bp, Homo sapiens
cacacccagtaggcccacaaaacaatgttgttcttgaactatgtgccttaaagtgtgggtatgaaagtgctttattaatttttaaacagtataaaaattaagttgttggaatgctgctgtttggaaacaccaaactttctaattgtgtggaaaacacaggttgaatagtacaaaatacaaatcaacactgtataatattgtaagagaatcacttgcctagtattgacaataccatatcagtgtttttaacttctgtgaagtatttgcgttaagttcattaacagtttttgtagattttatggtaattccccactccctttctcatgaataagcacatcctggaatttgctatctgtgttccaccttgctcttgaattagaagggttttttttttctttctttcttcctttgccttccctttctcttttgccttacaatcatgtacactcaggacttactttttgggcacaggaagattttttttaaaaaaactgaactctgatttctgattctctatagtgattttccatattggtggtgagaaatcagtgtgctagttgcaaacaactgccaaatctttggaaataatagtacagtatatcttgctacccagcaaggttcaggacctttaagagtctctgtgctcttacttacagggcaaatacagttgccctggcatttagaacagacttgcttctatcactgttatgctacagatggaagtggtaaaaataaagaactggtttctttccctctatagcttatgaaattattattatggatctgtatttggaatagacattgatttcttttgtttctatttaaaatatgttaagcagatatatttcatattagtagccttatttaaacctacagtgatttaaatgggttctattttaaatgaattcttttagaactatgtactactgagttgtttttccatctattctttgctcttcacaattttaccttgtctttttagaatattacatttctaatatccataacaggttaggaa

SEQ ID NO: 94824 - DNA, 1005 bp, Homo sapiens
ctgtagtcttagctacctgggaggctgaggcaggaggattgcctcagcccgggagttcagtgctgcagtaagctatgattgcaccactgagctccagcctggtctacagagtgagaccctgtctctataaaaattaaaaaataggctgggcatagtggctcatgcctgttatctcagcactttgggaggctgaggcaggagaatcacttgagtccaggagttcaagaccagtctgggcaacatggatcccatctctaaaaaaaatataagtaagtgttttttaatccctcttgagtaacttgatttgtcaaaaacagattccagagtagtgctgtcactgactgtggggaataactgttcatactcaacgaagagtgctcacttacagatcctaacccctaagggcatgggcttcctgctgaggaaatgagatttagaatacagcgttctaaaaatggcagttaacagattatttattaaggacctggtgggtgcacagaggcatgctagaagctgtaaaggacttgattcttgccctcaagaaacttccaaggttatagactagtcccaaaacaagtaatgagtgatgctctctcaaatatacatacaatcaaatgtgagatggaggtgaagatggggaagaccttaggctcggagattgtattcaggcttttatagtggcatttatttgatataattatgcatttaaaaaacaaattgtcatcacatcagtctgaaatgtatggagacacttgttggtgagaaaggttttttatatataataatttacccataggaatgtttttgattaacgttgtctgttaaagacttcacaatatttcccccattaatagtctatatctttttggagctgatctggagaagtcaaggaccatatgctaattgctatttgatgttattctgggaggacaattgattggctttggggcaaggagttggaacttgaggactcaaaggtgggtctgagtctagagatcttgccac

SEQ ID NO: 94825 - DNA, 1056 bp, Homo sapiens
aagtagctgggattataggctcacaccaccacacccaacgaatttttgtatttttagtagaaacagggtttcaccatgttggccaggctggtctcgatattctgacctcagggaatccacccatcttggcctccccgagtgctgggattacaggcgtgagcctctgcatccagcctcaaactctgctttaatctgtggtgaacaagctggagattaaggtcctgccctgtggattttatatttgcctaagaaagacagataagagctaagtcaggagctctggggaaaggcccaggttggaattatagattcacttgaccaaggtaaacctggtgtgcctgctcctacttcacatccccagacatacttccagaacatttccttttgtatttttgtgtacaaacttccttttgagcctctctccattgtcacatgtcaacctctacttgtcttttgttgattttgaggccacttgcccatgtaagtggcaggatattatagaagaatcatgctgacctgggtctttgaattctggttctgctacctaccaactgagttcctttggtcaagctcttggacttctgagcctgtttcctaattccaaaagtggtatatgatgtgttagtccctggtgggttgcaagaaagaggcacacacatatcagctttggtgatgagggctgaatgtaaacttggatggaaagtcatctaagcagccatattgtctcttggccctagtactttcaaaacttcacagaacattaatttagcagtatttagtatttgagctctgaagacctgccctcttttgctttgttcactcaacatttgtattttccaagagagaatatctgattggattagtctgtcaccttctaaaaacagaaggcccctactagagagaattttgagctgtgccatcatgtccttggtgattgatctccctgaagttcagcctatatgccgtcctcagctgaagcactgagccctggtccagtcacttgtggccacagaagtaaggttggttttatgcattaccagtcacacagatatgcta

SEQ ID NO: 94826 - DNA, 1089 bp, Homo sapiens
tcagccaatcagagccggcatctccctcaaggaggtgttccaccacaggaaaaaaaaaatgaaggaagagaaaagacagacattaaaaccaatcagaagctgaaacttctgagggagtgggcgggcactgcttcacatttagaccaataaaaaccacatatgccattctaggtgaccgaacggcatcttctttggcccaatagacgaatggggcggtgcccggcaaccaatggcttgggttcgggggcggggcgaggaggcagtgtgcagtaagagataacctggcaagtggtagtggcgcttctcgggtgctgtgcttcacgttttggtactaaaggccgagactgttgtggcgacggcgacctctacggcaacggcttaagctctcggaggagtggcagagtacgatctgaaggaggggcttctggttagcccaggtgggctcgggtgcccgggctgctggggaaaggactcgagggaaacgccgttctcccggctctgggggcgccctgcgcctccctttctgccgccgtcggggctgtgaagggcggcacgcgcctgcccgagctcctgtagggagggaaagcgcgcggggtcccacgtcgcggccatcggcgaaaaggggcgtccgctggggtcagcccctgcccctcgggagcaatagggggttttcgtccctttcccccccgcacaggtgctctgtttccccccgactcccacccaagttcctgactcccctcagcgtcctcctaacactcgaaccgaattcttggcctgagtcccatttctacccaggtgcaacaatgctaggcaaattgacccgcgcggcatcccccgcccctctccccgggctggagcgggagggattgcgcgtcgtgcccttcccctattcgcggcccctgcgcgtcctctgcctttttatacttgctccatctcccccttgactccagccctcattcttcatgcctcatttgcctgggagacgttcgccacttctcttgtgccttgcggtccgtgagtgagcccatcaccccctaccaacccctaaattccattctcatctctccagaaaactaacattttccactt

SEQ ID NO: 94827 - DNA, 1398 bp, Homo sapiens
tagtgaaggaaataataaacaaatacataatgtggtaatgtaaaattttaaaaaatactgcagttagggggaaaatgatgaggcaggggctggggaatgctttagatagagtagtcagggaaatctcagataaagtgacatctgagcagagatataaaggaagacagggaaaagacatgtagatatctggaagaagagtttccaaaccagaagaaacatcaagtgccaaagccctgaggcaaaatttatttcaggactaacaagaaggccagctcagaggaagaatgaagaggaaggatgagatgaagatgaagaactatcaaggaaccagaccacacaaagccttacaggccatttaagacaatgcataacactgaataaaaaactggattagagatcccaagagttatccttctagctccttcgctgatactaacttcactggatttcagatttcttacatgtaaaatgcaggaagaaagggtactaaattagcttttccataagatgtgagtctggaaatctataaactgaaaaatgctcaccaatttatggcattcctaagaaaatttcttttttatttttggagacagagtctcactctgtcacccaggctggattacagtggcacaatctctgctcactgcaacctccaacctcccaggttcaagcaattcttgtacctcagcctcctaagtggctggtattacaggcatgagccaccatgcctggctaatttttgtatttttagtagagacagggttttgccatgttggccaggttggtctcaaactcctgacctcaggtgatccgcccacctgggcctcccaaagtgctcggattacaggtgtgagccaccgcacctggccagaaaaatattttttatcttagagtctactatatccaagcatttatgccttgtagtcatgtggattatttcaataaatcctcattcctatctaaaaatgtcaatattcttgacaaggaaaaaaaatctatcctactgcacatcatcttcttccacaattccccaccttcttccctcacccactctgttgtctgattggccagacaacaagcattgagcagctctatccagagctcagcttctgcctgctcggcacagtcacagctcaatgcctgattagaaaacagaacagtcatcacaaactttgttaacctaaatggggctctgtctcaatgacatagagaatctcatcaccatttcagctcaagtgcaagtatcctaataaataggatctgggggcaactatggcctttttgtatttagaaactaaatctaagaattgggatagataaagggccatgatgagaagtatgagaaatcccagagtcatttcctgtcctgaaaaaggacaaaaatatcaagaaaacttg

SEQ ID NO: 94828 - DNA, 1063 bp, Homo sapiens
cagccaactgcaagccaaggagagagatgtcaagagaaaccaaacctgttgataccgtaactgtggacttgaagcctccagaatggagagaattaatttctgttgtctaagccacccaacttgtggtgatttgttacggcagccctagcacactaatccagcaagtgtttccagctcccctccacctcatctcccgtgtcctctcttaattatgctgttgtggcctctttggcctttctgctttctcaagtacagcaagctggcattcacctcagagcttttacattttactttcactcttcctggaatactcttcctcctagattctatactgcttattcacacacttgtcagatttctgttcaaatgttgccttcttagtgatgcctttcttgaccatctcatttcaaattgcagcctctgttatgtgtcctgatcttgctttgttttcctccatagcgtttgtcaccatctgacatactataaatgtacttgttaattgtctgtctccttgatcaaggctgtacgtgccatgagggcaggagtgagtgttgccttttggtttgctactcactccttgatggctagaatagttccaggcacagagtgcaccctcaagtaatattttgttctgcgttcttttatgtaagggtcagtcaggtgcggccacaagaggagttccaggagaagctcagggaaacaaagtttactatgctcccaggtcctaaaagcaggaggcacgctctgccatacagggccacatgaggaaacacccaagtctgtcaggaggcagaaggggcaggaacgagtggcaggaggaggagcccaggccaaggcctttattggagtttctcgggaaagggaagacagagcagggtaaacagctcaggactggctagtttgaaacatttccacaggctctaagttataggagtggtctgtggttgcctggtacctgaccctgggatgactaaggcagaggaatattgcctcctggggtatacctgccagatagaggaggatggctctgaattggtagtttgcatatcaaagtcaagctcct

SEQ ID NO: 94829 - DNA, 4221 bp, Homo sapiens
tagctgggactacaggcgcgcgccaccggctattttttgtgtttttagtaacggggtttcaccctgttggccgggctggtctcgaactcctgacctcagatgatccacccacctcggtctcccaaagtgctgggattacaggcgtgaaccaccgcgcctggccatataatgttattattgaaggcacaaatgatcagggaagacttcatgaaggaggtgagacaatataggtcttaaaaggatgagcggtttggagaggacaggcacagaaccagcaaaagagtgaagacggcgctggagtttttttttttttttgccgcacgccttcgccgccaccacgcgggagcgccccttccgggagcccgctccgcccggctcttctcgggcttcgggcgagcgcggtgccagcggtacgcaggcgccgggagcctacgagggctcgcaggagctgggaggcgcgcatgcgtgcagctctttggaggcggtagcgttttcggcgtcgagactggaggctgagtgctaaactgtgtggggcgcggatgggatccagctgttagtcgggtaggcataggtaggaccgctgccctgtggggagtagggggttggaaggcggaggccggtatcgtgggggtcctgagcccttcctgtgagatccgggccgactattgtatctgtgtcgcagcggctccgcacaaaatggcggcgggcagacggcgggggcgggaggaggttgggggacccccgggatgggaagggaagctgtgctgtgctgccctgctccgtcgtttattcacttcgctacccgggagggcccgtccgggtactcgtgaaggaccctgcctcgagaagagctgcctgacgccgttgcactgggccgaggatcgtgaagagccctttggcgaggccgaggcggccccttccccagcagcgcccggcctgccgaggctgcgctgggcctgacagccgaggaagcggtggtgagggaatgccgagcagggaggaagcgttcccgtcgggcccgaagaggcggtggagtttgagccgagccctctgaccagcgacattgtgcaagaagcgtggagagaagagcgtgtttgtgtttggggttggggagggggtgtcgggatgaaggagggaatgttaggatccagcggcttttccgggctggtgttctgtgctgcgtagtgcaggtatgaaaccaaagaaaatatcacctctgtgggagactgaggactcataaatggttgtgatacctaacagtatttccaaatttctcagaggaattgtgaaaacagaacgttagtgaattgtttttgtgtgattcttagcttgggccccgttctcttaaaggaagggggaatgtatatatcacagactggaatccttgagaacgtttgaaatagatcttttgttgtttgaggtaattgttaatgagggatacttcagtattacaaaatcatggattgagctatagagtgaaggctacctgaagctaatttttcttaatcttaaaatttgtccttaggcgaagtttggggccaggaccagaaattgtagtagtttaaaggagtcccgatgaaaaacttgtcaccaggatccagcgatttatgttcaagtactttttccaacgagctctggaattttgcacaaaaaattttctgctttttcccctcatttgttgtaaaggattattttttcagggatgttgtgcttgctggttcagatttacaattaaaaattgataacctggagaaaaggattgaccaaaaaaaggtgaatttaaggaagttttcggagaaaaacaaacatgtaaatgacattcaaatagctttaaattttgttaatgattagacatttgagacttagtggacttatgttgctgtcttttaaaaaagtttgacagcattttatattttattttgtactccatattctgtaatatgtacttctaaataattacagggcgtcccagcatgttatacattaaaatatgctgggccattccttccttggggatttatttgtcttggaaccaagaaagggtaaatataacagttggaagaaatcacaaaatcttattcgtttttattaactagttttcataatgtgtttatggtcacatatttattgtatattggttgtatttgttttgtaatccttttttgcattttgttttggagggtgtatacggcaggtactctaggttaaaaaggtttaggtactgtagtttaaaaaagtcatcactttgtacttgactatcttagggtttttcttgggtgctcttaagtaggtgatctccggaaattttgtttttatgtaagtggaagaaaatgagacaagtagtttagtggaaagagaataggctttgcagtcggaagatctggattcacatctcccttttcctcagtatgtgtgagactttggtaaattattttagtctttcttgagcttttgtttccttatctctaaaatggtgacattattacttcctgcttgggatttttgtgagtgactgttaagtgagacagtgtatggaaagctcgtattccttggcacatactaggtgcttaatgttagctgttacttgtatttcaaaattgaagtgcttaggcagcattgtttgatagaaaattataatctgtgggtattctcttctaattaaacggcttaaaaggatttagagtaatagaattttggagttgaaaggccctctaatctaactttcattaaaatattttgtgcttctataaactttttacatgcctttcttgtagaacttatcaatatatattgtaaccatttatatgattgttacgttagtctttgtatctttcccagtgcctggtatgtattagatgctcagatgttgagtgaatgaactcagctggtagtcaccagagcctggactctaaatcatgctctttccactgtaccttaatgtatactgattaaggtttggactaaatttgtccaaatccttaataaaatgccttatatacttagaaacagtacttccagtattggtacccagtaacatagcttgggctgttttgcaaggaaacaggcgctaatgaatgctgccatgtagtggttttagagactctccaaattgaaagtaattatgtttgtggctaaagctaataagccctcatgtgtatccagcttatctactcttaattgctttaactttgtttagtgttttgaaatttgtgatggaaaattaaaatggaaggaaaataagtatatagaagatgagaagagaataatggaaaggaaaaagagtgaggaaaaggtgagatgtagaaataaaacacacaactgtaataatgcgggtgagggccgggtgcggtggctcatgcctgtaatcccagcactttgggaggcgaggtgggcggatcaggtcaggagatctagaccatcctggctaacacggtgaatccccatctctactaaaaatagaaaaaaaattagccgggcgtggtggcgggcgcctgtagtcccagcgactcgggaggctgaggcaggagaatggcgtgaacccgggaggtggaggttgcagtgagccgagattgcgccactgcactccagcctgggcgacagagctagactccgtctccaaaaaaaaaaacaaaaaaaactccggtgagggttaagaataataagggttttggtttgaaaagaaagtccagggttttggtttgaaaagaaagtccaggaaacaggagaaatagctttaacgtacattatgtttttttgctttgtttttgagacaggatctcactctttctctaaggccaccatggttccctgcggcctctacctcctgggtgcaagcgatgttcctgcctcagtctcctgagtagttgggacaacaggcacacgtccccacacttggctaatcttttttaaaaaaattcatagagacaaggtcttgctgtattgcccaggctggtctcaaactcctggactcaaaccatcctcccaccttaacccgcctaaattgctgggattacaggtgtgagctattgcgcccagcctgttttcttcatggttaccctaaggaacatatattttggattattttttaattcttttgaaccaaaatatatttattgttcattcaagttttaaaaaaaatttcctatcttatttccacagtcggttaaacttttagctaacttgcctattgtctctgctgagttaaagttgccaacttttgtt

SEQ ID NO: 94830 - DNA, 1031 bp, Homo sapiens
gattgataactctcaagtctataaactccccacctaccttttcttagagtttacttgaagaaaaactttgctttttatacattatttagataatcttttgcttcatcagcatctgaattcatgaattttgatgtgactttaaaaatgtacttgataaggccggggcacggtggctcacgcctgtaatcccagcactttgggaggccgaggcaggcggatcatctgaggtcgggagcttaagaccagcctgaccaacatggagaaaccccgtctctactaaaaatacaaaattagctggggtggtggtgcatgtctgtaatcccagctactcgggaggctgaggtaggagaatcgcttgaagccgggaggcggaggttgcggtgagccgagatttgcgcccttgcactccaaccagggcaacaagagtgaaattccatctccaaaaaaaaaaaaaaaaaaaaaaaaaaaaccaaaaaaacacaagtgcttgttaaacaaattgctagatctcaatataggaaatactgaaagaaaggtggatgtaagcaattaactcctatgtctaatataattttcaaaaattactcgtcttactaaaagaaagaaacacctattaagcattttgtttactgttgagcattttttgagcacctgttgcatgtcaggatttacaattttagttaatcttcacagcagcattcccaatgggtactgttgtttcattttcacaggatgaaacaggcttggattaaccagcttgctccgggtaacattgttagcaagcagtgggaccagagttatttcacaggatgaaataggcttggattaaccagcttgctcagggtaacattgttagcaagcagcaggaccagagttaaaacactgaatgtagggtctaagttcttaaagactgtgctgcactacctctctaaagctgaattagtagtgctaaattttacttaaggagttaactaattttgcatgaagtcattcactggcacccctcctagcagggtgggtatcttcagatc

SEQ ID NO: 94831 - DNA, 1117 bp, Homo sapiens
caggtggtgggggagttccctgtctcctgcatatatggttttttcccgaaaagtttgacattaagttgcatatattgtggtcctttatctctaaatacttcagtgtgtatttcctaaaaatattttctttcacagtcatagttaccaacttcaatgaatttcacgtttataaaatccttttttatttttttgaggaagtgtctggctctgtcacctaggctggagtccagtgagtgatctcggctcactgcaatctctgcctcctgggctcaagcgatcctcccaagtggctgggagtactggctcaggcgcgcaccaccatgcctggctacgttttatattttttgtagagatgggattttgccatgttgcccaggctggtctcgaactcctgagctcaagcattccacctgtctcggcctcccaaagtagtaagattacgtgcatgagccaatgcgcagcctataaaattattcagtctactatttgtattctggtttttgtcaattgacccaatattgttttttatagcagtttttttttccccctccagtacaggactaaactaagatcagatgttgcatttagttgttatgtctttttaatcttccttagtctggaacatttccatagtctgcctttatcttttgtgaagttgacatttttgaagaatacaatctgctttgcttttctctttaatagagcacttctcattttggatttatctgatgtttcctcttgattagatgtagattatatgtccctgggcagaaaaatcacgtaactaatgctatgtccccaggatatcagatctggagatttaccatttccatttgcccttcatgcatgatactatgtgtgagcatatgctatggttaaagtgcttgtttccccccactccccctggaattaatctctggagagacgttttaagaccatgcaaatatcctgctcattagaatttacctctgtaacacccactcatgattcttacctgaaccatcctttactatgatggttgcaaaatgattttctactccaactgttattctacatttagtagtaggtactcagcactctataagagcttcccttcttccgcattgattaatttatt

SEQ ID NO: 94832 - DNA, 1951 bp, Homo sapiens
aaaagatggcatactgtatgctcatctgcacttgtaaagacttcaaggcttaaggcttttaatgcatttagtcggtttaggttttttttttttttttttattgagacggagtctcacttgcacccaggctggagtgcagtggcaccatctcagtgcactgcagcctccacctcccaggtgcaagtagattctcctgcctcagcctcctgagtggctgggattacaggcgcctgccagcacacccggctaatttttatatttttagtagagacagggtttcaccatgttggtcaggctggtcttgaattcctgacctggtgatccgccctcctcagcctcccaaagtgctgggattacaggcatgagccaccgcgcccggccagtttaggtatatttaattgaagattttagaacccactttaggtaaatggaaacattttttggccatgttactccatgaagaaaagcaaataaccaaatggcagagagggcaaggatgagttaggcttcagaaacaattgggactggatattgaataccttcattattgtctttacttcttggtcttgcttacctctgttccagtggcttttgttgttgttgttgttttatggtgcagtttctcagtaaagcagtaaatagggctgttaacagcatttgaattttagaaacatctaccacttttctcatttctagtttaacaaaaaatcctagggaagatttctttgttccagcttggataaggtgtttcctcttgggctaacctgttacacttactaggagtgtttagagcaaggccaccagtgcacatctgcgggggagcatcatttacaataaatacaatgttgtgctctagaggcctgtttacgtatgcaggtcacatgctcctaagaaataaaaaggtatatcttacaatagcccatttatcaaaaaatcattttcctgaaattggtaacaatattaaatcattgctatatgggattaatgcctggttctcatggagatctcttaacattgtgcattagcagttttccattttttttcaaatctgaaatcatggtgtttatcaatccttgcagttagtagtgaaatttggtgttgcccttcatgatgccaaataacgtttctaattttctgcttatttttgctttctgtttcattgactgtttctttgaaggcaccacattttggcattttaacgtgaaacatggtactctctgtcaacacttgtggcaccctcagaattgttacttgcatgccttttgtgagacaagagaggacaaagactaatagtaaagaagttggctgagtggctttatctgcgtggtaggagagatcagcagattgagtaccaggaaagcacagaatgacatgttagtttttatagctgaataaacaatcagcctcttctattaactacccattgtaataactgcattcttaagtaccaaagtgaatttatatattctgagacaaacagtgctctaacaaagcagtatcaaatgaggtatatgggtgtatgtctagaaaaataatgttagtggtagttttccctttgtgggaagattatagaatacttttttttctttcctgcatgttatagggtggtttttctttttggggggcggattttgaaactgtattgcttttttatgattagaaataaagttataaagtagatttacacttaatgtatctggtatatggaaagaacaccaatgggagatgttgtaatcttgttacttcctagctgtgttttacttaatgtgtgaactggaattcctttcctcttaaggtcattgtgaagctcagacgagataatatttaaagtgctttgtaaactttaaagtagtgtaagtccaaaagtatggtgtttgatataaatcttttccttataagtctgatggagccattatctgatggattgatttttgatgatggttttggataa

SEQ ID NO: 94833 - DNA, 1285 bp, Homo sapiens
agaatttttatggttgacattatattgaatatttcttgttttacagtggtatgttttagttcttaaaaggacataaatgagagttattagttacttgttaaaacagttcaaaggttcagcatgttttgtcactattaagtatccagtttttgaaaaatagtaaatttagaaaaataaaatgtcaactgaaaagagcaaatagtatacttctaattttgtacagtgtttaatataccccacccccccatcatgcgtgcatgaacgtacactaaagtagatgaaactataccagagtattaatttactctgggtgatggttttattggtaaggattttgtttgcagctttattgtttctgtaacaagcacacattacttacataactaggaataaaacatttattttaaagggttaatgctacttaattgcagttttttccccaacaagttaatagttaagaaccctgatctcaactcttcgtttttccaggttatttatttcataagatgactatccataaatcttccgatgaacgaacctctttatgaccagagctcctggggttaaaggagaaaggttttataatggctgtcttaatttgtttggtggttttccaggtattaatgccaaatttgcctttgtttagtttctgtttcttatcacactgttttcaggttacatcattatcttaaaaaggcagaggctttattttcttcgttgtgatataacctaattcttagaggtttcttaccaagatcactttgcttgttttgcttaattttattttctaaattttacaaattaatattttccaccaaaaggtggaacgaaacaaagacagcaaaatatcaaactgtttagtaatagttaaaaaagtcaagtgggaaggaaggttgaggctgaggcaggagaatcgcttgaacccaggaggtggaggtttcagtgagctgaggctgcgtcactgcactccagcctgggtgacagtgagactctgtctcaaaaaaaaaaaaaaaaaaagtcatactaatatttaggacttaaactttttattttggaaatcttcagaaatgtaaaaaaagcacagataaattcttagggactcagcttccacaaccagtatttttacgtgtcttgcttcatcaaattcccttcatctaccaccaccaccgccccttgccccactacacatgttcactctttccctcacctccgcccagattattttaaagaaaatctcagacacattattttactcattaagcacttgagcctgtaacttttgcct

SEQ ID NO: 94834 - DNA, 1082 bp, Homo sapiens
gcctttaaggaattttaaatggagattgttccaaatgatacttattcacaattccatttagtaattagatcactctgattgaaatttgttcttttgctgttttattttgggggagaaacattatttgaaagagcttgtgcttatgaagttataagaggagtcttcaccaaatggaataagtggttcagaaagcattgtaataactacatgataaactgcttacataagcaatgcgtatcttttaggattgggtgaagacagttgtttttggaagatattttattatgtagaaggtaggcacaatttcatatgattcatgattgtttaaaaagaccgtgagtttgttacaaatgaactttttaacagaatgtaggtatcattgtttggtaagcttgtgtctgcagcttgtatctggtgaatcaaaagcctgtgtatttgatgtgtttttgtgtttcattctaatttgaaaattaacctgtgcatgttactaatgagtactttggatgtgaccagatagtttaacaaatacttgaggatcttttgagtaggagtagggtttatatgcctgggggataagacttagccatgaacataaaccttcaactgacattaggttgttgaaaaagaccatgtgtgtgtgagtgcaaaaacataagatagtaagaatccaaaaatggtgcaagcaataaataaaggttattgaatgccgggcgacgtggctcataccccagcactttgggaggtcaaggcaagtggatcacttgagatcaggagtttgagaccagcctggccgacatgacgaaaccccatctctactaaaaatacaaaaaattagccaggtagcatggtggcacatgcctgtaatcccagctactcgggaggctgaggcaggagaatggcttgaacccaagaggtggaggttgcagtgagccgagattgcgccattggactccagcctgagtgacaaagtgcatccctgtctttaaaaaaagaaaaaaaaaagaaagattattggaagactcactcttggcattggtagtcaagggaggttgaatgggggtgaccttgaaggatgaataaag

SEQ ID NO: 94835 - DNA, 3315 bp, Homo sapiens
gagaaaagtgtatagtaaagtaacggatgaaattgtggcttgaaccagacagtgatggttagcaaataggatccatgatgttgatgtttataacaattgtagatgcctcaagacctcacattttccaccatgcatttcaatcacacataaaagtgaggtcctgatagcaccagcatagtctatatgctcatacattttttaattgtagaaaaggcaagttgtgtggctgctgaccttggtcctgaatggtagctaaagtactgttttctgagaagagtgttgaagggggtagtacagtctgatgggctggtcagcaaccagttttaactaataaagtgcctggaaactgtaagttacttttactcacatctgttaatggttaagagcacagattactggaccagataaccttgaatacaaatctcagcacagtcacttttctttgtaagttactttacctgtgtgtgccttagtgtcttcctctgtaaaactgtacatatctcaggactgttgtgagcatcaaatgacccattccatttaaagttcatagaacgctgactgacacgtggacagtgctctatatagttaatcattattgtcatccatatatattcgtccatactgcgtctatggatggaatccaagggaagggttactggttttgttatgtattatgttctatgttataacgaattccatgccattgcatactgttttcttagactctgtagtcaggttattggcaacaaatttttatcttacaagaaacaactatttaataataggaacataagtgtagtttaattgccctatgggatttattagatgtcaaggctgattccaaggaagattgtgttttacaaaaatgggtcttttaggcttacagttcttactttcattatttgtatatctgataacatgcgtattaaatgtgtgcatttataagtattttaatgccttcatcttttttttccccagtattacagcgtgaaataaattcccagtatttttcaagattatgtaaaaggagttgtaattactgctcagcacctaggacagcacccagtgcaacacaatgtacatgaactctggcttgaggtttggggcttgtgttctgcattcaggaaagaaaagaagagaaagtttttgggaaatttaaatcttcgtaagcccttactctaaaagtatatgaaatgcagaatggtttcatggctttatttcaaaatgttttacactggctgtagaacccacttcatgaagtagtttgagttaaaatgatctaatatttgtgttttaactttcagctttgtgttattcttggaaaatttcgcaccacttgtgaattccttgaacctgggcattgcaaacccacttctgttgggcccatctcctttgcactttgctcagattaagactcagttggcgcttcagcagctgaatgccgttgcctcacatggttcaacaccaccttatactttattaaatcaggctttcttgaaaatagccatgtcgagacccaggtttaatcctcgaggagactttccacttcaaaggccacgagcacctaacccttctgggatgaggcctccaggaccatttatgaggcctggatctatgggtctcccaagattttacccagcagggagagcacgtggaattccacacagatttgctggccatgaatcttatcagaacatggggccacagagaatgaatgttcaggtaactcaacacagaactgatccaagattgaccaaagaaaaactggattttcatgaagcacaacagaagaaggggaagcctcatggtagccggtgggatgatgagcctcatatatctgcatcagtggcagtgaaacagagttctgtaacacaggttacagagcagagtcccaaagtacagagccgctatacaaaagagagtgcctcaagtatcttagcaagttttggattatctaatgaagacctagaagaacttagtcgctatcctgatgaacaactaactcctgaaaatatgccattaattttgagggatataagaatgcgaaaaatggggcgccgattacctaatttaccttctcagagcagaaataaagaaacacttggtagtgaagcagtttcaagtaatgtgatcgattatgggcatgcaagcaaatatggctacacagaagatccacttgaagtacgtatttatgatcctgaaattccaactgatgaggtcgagaatgaatttcagtcacagcagaacatttctgcatctgttcccaatccaaatgtgatatgtaattctatgtttcctgttgaagacgtatttcgccaaatggacttccccggtgagtcctccaataatcggtcctttttctcagttgagagtggaaccaagatgtcaggcttacacatttcaggaggacagtcagtccttgaacccataaaatccgtcaaccaatccattaaccaaacagttagccagacaatgagtcaatctctgattcctccatctatgaaccagcaacctttttcgtcggaattaatttcatctgtaagccagcaagagcggatcccacatgaacctgtgattaattcatctaacgtacatgttggatcaagaggaagtaaaaagaattaccagtcacaggctgacattcccattcggtctccctttggtattgtgaaagcatcctggctaccaaagttttcacatgctgatgcccagaagatgaagagacttccaactccttctatgatgaatgattattatgcagcatctccaagaatatttccacatttgtgttctctgtgtaacgtagaatgtagtcatttgaaggtgagtgtttttaaaaaaagatcactgtataatgatgctcagcgccagttttctctaaattctgatatgtatgctgcttgttaactaggcgttaaggaaatggcagaaggtaattttaattgcaacctcaatacatagttgtaatcttaagtagccctggccttagtactgaattgaattttaggcttactgtattcctatgaccgggcacaccatattttagtagtgtgtccatttattttgaacttttagttatcccacttacgcaacataaaatttatgtaacataagctgcgtacttacaagacaatgtcacatggaatcacctttctctaaaaggatctgttagtataaaaatacaaagagatggtataacccatttgtaatgcacacatttaagagacagtatattatagccttgcacatatacacctgtcttgggataaagacaattaatgttgatttaaatatttcctgactttatgtagacta

SEQ ID NO: 94836 - DNA, 1785 bp, Homo sapiens
tattctgggaccagctgtggactcagaaaatagtgtaaaatgatagaaatttgtagagaaaaatctttaaaaaataaagatgatttaggtagtttgatagtatagttagaaggaagtattttgcagaggcagtgaagtgtactataatgtagaacatactgttcagtcgtaatcattggtagatttgagcaggaatttccaagtaaattttatttacttacgtatggttggcaatcactgtttcttctatttactaatgtgatttatagatttagattgtaaagggtcagaagagaatatactaacatgggaaaaagctttgattcaaggccatggcctggaattggttgtatacttaggcttaaaaatctgtgtgttaacgctcttgttcttttcttccagtgctgcctttcgattttcttttcattatttactcactaggttttcgtcaacatgaatctgataattagatctgttggtattttcttaaggttaactccagcaaaagaaagcagcattctaccccattttagccagatgtgccaaattctattaaaataatagttgccttattccatcagaagggatagcaaagtccttacaagggaaagtcttagaataattcatatcacctaattgtaatctgtaagtagccctggcctaagtagtgaattgagtgtttgtctgtattcttgtgactgggcataccacataattttttttaattgattttgaacttttaattaatcataatgaatccaagaaaatacatctttaaataaagaacttgaagttttgtattctgtagagtagaaaaggtgtacatttaatttagtatgtacttatggataccagttttgtacttgactccaattaggtactggggcagaaatgaggaactgtgtaaaattttagatgttattaagcagtttattcagtcttattggggagaaaaattatgctcccaagacatttaaaacaattagaagacaacaagtggttttgtgattgatttaacttgtttggatatgctgtaggggacagagatttctgtcttgatttcaggcatgtatcactcaggccagcatcatcaatttaccaatttaatcattaccaatttgccaatttaattattttaactattgtatttgtaacagtatgtgtttaaaaataagtataaatatgcatcctgacatcaaaagacttttatagcctagttagactaatggaatgtcagttactaaatgcactaagtctgtcttgactagaatgatgtgggagagaagacttcatggagtaggttgaagatgggtcttgaattgaggctttagatatgcctgtataaagaggaggagggggccgggcacagtggctcactgcctgtaatcccagcactttgggaggccgagacaggtggatcacctgaggtcaggagttcaagaccacccttactgacatggtgaaatcctgtctctactaaaaatacaagaattagccgggtgtggtcatgcgcacctgtaattccagctactcaggaggctgaggcagagaatcgcttgaacccaggaggcagaaggttgcagtgagccgagatcgcgccgctgcactccagcctgggtgacagagcgagactccatctcaaaaaaaataaaaaaaataaaaaaaaaaaaaaagaagaggagggttggcggcaacaacatacagagaggcagaggtccggagagaagactacatttcattgtggtaggaggcagttgggaaagagtgatgagcgtattagaaata

SEQ ID NO: 94837 - DNA, 1990 bp, Homo sapiens
acttggaagcttctttaattgttcaagtataagatggtaaaaacctgggttaataggataaaagtaaaaatttgagaggaaaggaaatcatttagtcatcattagagctcacctagatagattgccattaaaaaacagacacaccttttaacagcacaacagaatggggctcatctaagtaatgaatttttcactactaagtggccaaatgatagggatttgtgaagatggatttcgatggtacacactgcctctcgtttctgtgatatattttgcagcctcgtaagtgttcctgtgtgtgtatatatgacataaatatgaagccaataaatgtaaattaccaattgtaaactttttcctattgagtaaatctgacaatatgtatattccccaccttcgagtctttgaaactatagctgtgaagatgtactttgagaacgtgaaatgtatttgcttgttaaattggggttcagattttaaaggagaaacttcccttggtttaggagctgtgtcataatgactgaaataattcagtttgagaaagtaccgacaataaaaaattgttgagaatagtgagtgagccctgatacgagtagttatatattttcagtttcattctgagcctgcctaattctgtgcagtccttgcagcatctcctgctagtaggtaattatcactttttctctggggaggcagtgctgcttttggactataatgtggaaactattactagagagtctagaagttggggtgggatgggtgtgtttactgagcttaaagcaagtaatgtcaatttgtgaagcaagcctaagaatgtgtgtatgtgtgttgaactgagaagagtatatcttaaatagggcagccatcatcttcaggtgatagttgctgtaagaatgatatcctgtattactgtatcttcctattttttcaagaaaagctggaaatctggacttgcgggtaaaaatctctggattattaaatgttggcaacgtattcagataaaacactttatggttcaaataaatcatgcccaacccactgcctgcaccagtgtgtctgtttgatgtaaacagtgtccaattaatattaaaaatatgggttttagtactactagagactcttcttctagctttctatttgtattattaaacaggatgtacaaacatttcttttttgtagtccacaatcagttccatggcttaatgaaatagtttaggatttgtcataccttgttgctgagtttaaattgatgctgagcattgcaaatcagtgtaccttctttcagatagttcttgccaaggcagaatccaaaattattgtcaaccgtggttttaactgtggaaacttctaatgacctaaactaaaatgtatttcaaatggaaacaaataataacattttccttaagcaaagtgttgaaatacgaagttatttagtaagttttctgcctttccaaatgctggaggaacagtaaaacattgagtaacatacatattgcttttaactaattgtttcaccttggaaactgtatctttgtaaactgtattggcttttttttttttttaaccagatgtatcttccagagttatttatgggtacacattgtaattttaggacagatttatttgtaaatgaagtaatgtataagaaagcattttgggctgggcatggtggctcacgcctgtaatcctaacacttttgggaggccgaggcaggtggatcacctgaggtcaggagttcgagaccagcctgacaaacatggtgaaaccctgtctctattaaaaatacaaaaattcaccaggcttggtggcacatgcctgttaattccagctactagggaggctgaggcaggagaatcacttgaacctaggaggtggagagtgcagtgatccgagatcgcctcattgcactccagcctaggcagcaagagtgaaactgtctcaaaaaaaaaagaaaagaaaaaaaaaaaagaagcatttcgttaattgtaaa

SEQ ID NO: 94838 - DNA, 1050 bp, Homo sapiens
gaataatgttggtacaggaaaaaccagagaaattcattatcgtattcttctgtaaactagaaaacagacatccaagcaattggagggctgataaactgttctgattgtttcttatttacgtataaggctgaattacatcataacaaacagatttttgttttaagtacatatcttttatgagagtttggtattgttaacagtctgtttttaacaaggtacttctgtcatttattatcatttaaatttacattaaattgctgatcactttcttttccgcccccctgcttgtagaaatgagggcaatagaaaagaaaatgaaactccacgaagacgttctcattcccccagtcctaggcgttctagaagatcaagctcaagtcacagattccgtcggtctcgaagcccaatgcattacatgtataggccgagaagtcgaagtccaagaatttgccatcgtttcatttctagatacagatccagatccagatcccgttcaccatatcgaattagaaatccatttagaggtagtccaaaatgctttcgatcagttagccctgagaggatgtcaaggagatcagtgagatcatcaggtacactgatggccatgaaatagtgaatgtacttattttgactaaatttttaaatgtctttctttttggattttgagaaatgttctactttattaaattttagagttgataaatgaaatctgacccacatgccacagagttattccctctggtaacttggcaaagaaatgtgtgtgaatgtatgtgtccatcaacatcatatttaaaaaccaaggatggtaaaaatgtcttagtttgctttaataattgattatagaattccatggattaatttaaaatgtttttgagattattttttttaacctgtgacttaatgttgattttatgaccctttcagaactagctcacacatgcatgcccacatacacaaacacacaccttcttctacaatgaaagaaaccatagttaatatctgagaagtactttgacactcccactgtttcacttgactagcctgaaa

SEQ ID NO: 94839 - DNA, 1006 bp, Homo sapiens
ttcttcttttaagctcaacattaaaatgtgtggaagaaggtactatagtgctacacatttcactaattttgttttgggaattacagttggtttttataaaaatatttatgttaatatgggaatttactttttttgccattactttcagtggcaaaaactgcagttacttttgcaccaacctaacatatgaattgataaatatttttacaatttaatttctaatatggtaaatatcagtaaatataacacaaatctttgtagtcttcaataagtgtaaagcaatctcaaaaccaaaagtttgaggatcactggtataagggaataaaggaacttcatgtaaaagccttctgagtgcataaaatctagatttttgtattgtctgtgtgctccctgtttagcttgagaatagcactatgtgattatgtcatgagatggctcctaccttaatttttttccaattgaaattatatttatatctttttactagatagaaaaaaagcattagaagatgtagtacaacgatctgggcatgggacagaatttaataaacagaagcatcttgaagctgctgataagggacattcaccagcacaaaagcctaaaactagcagtggaacaaaaccatcagttaaacctacaagcgctacaaagagtgattcaaatctaggaggacattctattcgttgtaaatcaaagaatcttgaagatgacactttgtcagaatgtaaacaggtgtctgataaagctgtttctctccagcgaaaggtaattctttaattaataattatttttagagataaggtttcactctgtcatcctcgctggactgcagtggtgcaacaagcatggctcactgcagcctcgatctcctgggctcaagtgatcctcctgcctcatcttcccaagtagctggcaccacaggcgtgtgccaccatgcctggctaattttttaatttttgtagagatggggtcttgccatgttgctcaggctggtctcgaactacta

SEQ ID NO: 94840 - DNA, 1169 bp, Homo sapiens
tttttaaaaatattatacctgtctagagatcatttccaattattagaacagagggggtaagcaaagctgtaatttcagctttacttgttggtgggccatgtagtttcatagaaaaattctctctaatggccttggaacattccatagatcttatttgctataagatgctatcaacagaaaagagcacctgtaaaccatttctgggttaaaaaatataaataacatttcttaccacttttgcatttaaaatcttattaaagtgttaaaatcgtgatttaaaaatgcgtaaaggaggtggtgaaggaaaaagaaaaatgggtaaaaaatatggaaaagaccctttagtgtactaatattagtggtagaagaaattatataggaaattattactgtacattgtagcttaatttggtttattttaaattttctttcactccaaaaatagcttcggaaagaacagtcattgcattatggttcggttcttcttataactgaattaccagaggatggttgtactgaagaagatgtgagaaaattatttcaaccatttgggaaagtgaatgatgtcctaattgttccatatagaaaagaggtgagtcatttagtctgtggcaaaaattcatacaaagtgattgctttaatgattctataaattgctgttgtgttccttagctgcttgtactgcatatataattgttctttgagagttatataaatgtctggatgtgaataagcaaggccgcaaaataatgttttatatcctttaaaataagtgtttgcccactttttctgtaaagggccagctaaatatttttggttttataagccatctgtaggatctcaactactgtgctctggcattctagtacaaaaacagctataagtaatatgtaaatgcgcaagcatggctgtgtccaaaaaactatttacaaaaataggtagtatgccatagtttgccagtcattactttagaacaccagttagataatactaaaacaaattatttcctttgtatggttaagtattttctgtgggttatattcctataactcacatgataaagttaagaactgtgaacagttcttcacataagcacaacataaaatagttagttaaggctgggcgtgttggcttgtgcctgtaatcgcagcactttgggaggctgaggc

SEQ ID NO: 94841 - DNA, 1059 bp, Homo sapiens
aaatgtcagacctaccacaagctggaccatatcttcccttccctcctgttgttcagtgagccctgccttctcatttcctcttcttccatgagcctgcctggatttttttttatcttggtagtggtatagaaattatgtaaggttaaatgtccatttaatgtgtgaaacatccttaatcaaattatacttgaccaaaataaaaacaggcaaaagcaaccatgacttgaggtagtttcatagtttgatgttacaaaagaaaggattaagcccattttaaaatgcaggaacttttaaagatagatttgtgactaaagatggaataaatttcattttaggcttacctagaaatggaatttaaagaggcaattactgcaattatgaagtacattgaaacaacacctcttacgataaaaggaaaaagtgtgaaaatatgtgttccaggaaagaaaaaagcacaggtaatctggatttaggtcttaaatgttttatcactgttgttttagtttaacttttttgtttaagtatggcacacatatagaaataggcatagaaacataaatgttagctcaacacattatatgtgcattaattcaagtatgttgaaattaaaacttcctcatacatgtatggtgctatatacagtattaaataacgacgactaggagaaaatacttgccatatataacacaaaaatagcaaacatctgtgaatctggtacctaggtcacaaaagagaacatttgacagtatctggaagtcccttgcttgcttcttcccaattcttacaccctcccttcttctcacaagtaaacactaacttgatttctaatgccatagttgagttttgcctgttttcaactttacataaacaaaatcgtatagtgtacattctttgggcctttacttccttagaagtatcaagttttgtaactttaatttttctagatcatttctgtgcttcagttcatatgatcgtagataatatctatagaattactttaaattaccctttaaggatgagctttctgttaagtaaaaagctatatgtatatctcacctg

SEQ ID NO: 94842 - DNA, 1196 bp, Homo sapiens
ccttcctaaagtgcacagactctgtccatgttgtggggccagattagggaggtgtgctgtcagggatttaaggctgtctctgctaccctcgtcaatgcctctttcagtgatacaaagtcaaaaccaggtagtatgaatgctcacttgatatttggttcttgtgatgatgcttttctgtgtgcagatagtcgttaaaatttggtgttcctgctggggatgggatgaacagtgtagggttctattctaccattttgctccacccagctatgtgttctagtaatttaatttttctactagctgtggaatggctactttatagaggttctataacacacatttctcaataatttgatttggtagtctaaccatgttagtgcattcctcattctttgtaacttctctatagtgtttctctgtatgaatataccacagatgtattaccaattccttactgattgatatttaggttgtttctagaaacagaactttagttaacaccttgtgtaccttcacaggccatcttttgacatttatgatagtggttttttaggtgatacctacccaatggaatggttggtttataggatgcacagtaatggataatataagattgctcactaaataactgttataatttactccctggtaatttatgagagtattaccaacaacatcttaatttcttcagctttaaaaattcgttatatagaaaatgatatctagttttaatttgcatctttttgattattcattaacttcatctttttatataattgttagctatatctattaactgtttaagtgagttgtctgtatcttttcctattttattattgttgtctttttaaaaatattcatttgaaggtgcatgaatattgtgcattctagacactaattttgcattgtatgtaagaagtcttttcttacagtctgttgcttgtgttatgcatacatatatcaagtttgaatttttttttttttttttttttttttttggcggagcctctctctgtcgcccaggctggagtgcagtggcaccatctcgcctcactgcaagctccacctcccgggttcacgtcattctcctgcctcagcctcctgagtacctgggactacaggtgctcgccactaacagagatggggtttcaccatgttagccaggatggtcttgatctcctgacctcgtgatccgtccg

SEQ ID NO: 94843 - DNA, 1981 bp, Homo sapiens
caaggactgaagcagagaccattacgaggcgattgtagtaatcaaagcaaaaggtagtagtagattagaccagggtgatagcagttgaactttagacatttgagatgtcacagtgctatgagaaaccatgtttttgaaagttacagtagttcccgtttatctgaggcttggctttgcagtttcagtggtcagttgtggtttgaaaatattgaatagaaaattccagaaataaacaacatgttttaaactgtgccctgttctgagttagcatgatgaaatttcatgcagtccaactccagcccactggggctgtgagtcattgctttgtctagagtatccacattttatatgctacctgcccactagtcacttaatagctgtcttggttatcagattgaccgtcactgtattgcagtgcttgtgtttaaccctcattttacttaataatggccctaaagtgcaagtatggtgatgctggcaatttggatatgccaaagagaaggggaaaaatgtttcctttaagtgaaaagttgaaagttctggacttaataaggagagaaaaaaattgtatgctgaagtcgctaagatctacagtacagtaagatattttgacagaccgtattcacgtaagttttattacactatattcttacaacttatttttttaatttaaaatatggaatgcctaacgaatatgcgtgtcatccttgcgcaggggccatgctaattaccgtatcattccaattttagtatatgtgctgctgaagggagcgtttttctattttattattgttgatcttttactatgtctaatttataaattaaactttcatgtatatacaggaaaaaaaacatagtatatatagggttcagcacgagcacggtttcaaggcatccaccaggggtcttggataaggagaaactgctgtagttaatgataagaaaatgcagatgagttgtgaaagatgagatgtaaaattaggctgtgtaatcacaaattgaaaaaaatgtctttataaataggaaaaggtaataatcatgtgtcctttagaataggaagattttagatttttgttctatattttctaaattgctttatactaaatttcttttgttcaaaatatttttcctacgtagaacaaagaggtgaagaaaaagactttagagtcaaagaaagtatctgcatctaccttaaagtaagtgactttatgatttcatatgtgagaatgaaatgtgcatatgacttaagaaattttaatttttaaaaccgcattttaaatatattttatcactataactatagtttaagagggatatcactccagttgaattattttaaacgtttttaggtttaaatattacatttttaggattttgtagaacttagaattcctaagttgctgctaaattttttctccttttaaatagaagagatgcagatgcttcaaaagctgttgaaattgttacttcaacttctgctggtaagttgttacttttaatattctttcaaatgagtgtatcttgtcagtttagtagaaacttagatgatgatgctatgaagacactattgtgctttaatgaaggagacccaaattacattctttaattggcccctgtattaagcaggcggttaatatttaatgctgtgtaattacagaatcacttctggagtaaatacaacaaatctgtgagataatgtatgtgaaatagctatcgtagttccacagttaatagctgttttttacatgtttaggttagttatgcaatatctccctccatcccttcccgataaacccacaagacacaaaacataagaaaggtatgttaagaatgcttatctggtcctctttgattttggaggttaattgagagccaaaaagcaagcaaaaaagactatccagaaatggatgctatcatactcatgtactaaaagctatttctttatactcaggaaaatacttgaagccatcattatgaatcc

SEQ ID NO: 94844 - DNA, 1178 bp, Homo sapiens
taagggcaagaagtaggtaacaaaggagtgtaaaggaatttatctagacgagttttatttacttttgcagacctttgatcatcctattgcgcgcaggactgctcccaaggcggtgggggtgacaattacctacagattgtgttggctccaggcctttgtcattaaatctgtactgaataaatacaagcggctccagcttatcagggctgcattctctctttggtgtctctaaggccgaacagtcccctagccgcactcatgcaaaatacctgtgtctgtgtacttttttcatccgtcgctcagcctgagtctgcaggtcagacttggcaggattttgacttgatatattgtgtgtgtttggaaatggggaataattcctatgcttatgtactgttgatgggaatattaattggttcagcctttctgaaggtcagtctaatgttacttgttaaaatttaaatctgtatgccttttgatacatcaagtccatatctaagaatttgcccccatagtaattccatggacatacaaagatgagtatagggctgtttcttgcagggttctttcgaaattattgctaggttgacttttaactaaatccaagtgatgttatttgtaatgtagtacttaaatgtttttcttgttgttttagccaaaactggacaagccaaggcatctgtagccaaagtaaacaaatctacaggtatgtttttttaattaggattctagactattagttaaaactttaatgtattttaaaatcgtatggcagtagtagtcttggatttcacatgacatagtctgtattgaatgcatgctaatctttgagatttataatcatctagcaattttgagaaatgatatgtactagataatgcttctatagtaattattgaaataattaactggagaaatttcttatgatgagtatcacatattttcctctttctcttttattgaggtctctcttcttccttacttttatataatagttcaataaatatgatcctttgtagtttttgtgagctatagtgggattttaggtaattattaagttttttctcttttccctggcataatcctttccagtttttctcccagttctgctaaatcctgattaattcagggtcatctctttaagtggatagaaatcaatgtattaaattatctttcaagcc

SEQ ID NO: 94845 - DNA, 1075 bp, Homo sapiens
agttgatttttttagatgtcaatgaatgctttttgtatgatttttaaaagtatgattgtattctcataacgttcctgttaggtaattttggcaatcaccacccttatgtatagggaaatgtgtacacaaatctgttcgtgccccaaagcttctcaataaaaattggaattcaatttagatctattgattttttatcttgggctttttcctcatccattctcgctagttgttatgaatcctaatttcgaagttaaatcttctgttgctctctgaatggtggaaagggtttgggctctctgatgatcttctgcaacactttcatgatcacatctttataaacagtatcatcttggaaaataggccatagtaatagataatgtaggtacaaataatggtcagagcaatttaaatagtactgtacagctaggaaactgtaggaatgagtcaaaacaatctttatatgacctgactatgatataagtattcttgaatgctttctaatcaattaggagccgtggaagtgtgggttgggaggatctaggtttaactgcttttggaactgctcaaagtatgggattgtttttgtgtccttggaattagtaattttgcttctagttgatccacacattcagaaatttatttaacttgcatgaatgctattttaagtacaggttgagtatcccttatccaaaatggttgggagcagaagtgttttagattttggattttttttcagattttggaatatttgcatatatataatgaaatatctgggggatgggagccaagtctaaacgtgaaattcatttatgtttcatatacaccttatatacatagcctgaaggcaattttatacagtgttttaaataattttgtgcatgaaacagttttttttaagtacttacatgggaatttccctcttgtggtgtcatgtcagcagcactcggggtttcaggttttggaacatttcagattttggattttcagtttagggatgtttgacctataccccagtagggaggtaaatatcttatttcagtgatttcttttttctgaagaaattatcatcattgct

SEQ ID NO: 94846 - DNA, 2229 bp, Homo sapiens
gaggagagattttattgtttattctttatttatgttttaaattcgtataataatttttagcatctaatacttgaagagtttagtagatatttccttgatatttaaaacctgacccattttgttggaattttatctttggcagataggcagatatatttttgtgcatgtaaacaatcacatatatataaagctatataactgtacatttttgacagctttgtaatcacaggttgctctgtcgtttccctccataaatggtttaatctttgtttccttcgctttttttagagttgtcaattcatattgccctctccagtttgtacagtttcttagatgcttgttacttttaaaaaggatgttaggagaattcattttttttcataaagaaatggaacactatttaaaataaatttagcaccttgcaactagagcaatctttttagtagtacctttcctaacagactaattctaaagaatctttgcagaaattacacagtattatttttgcgtgtgtgtgattacaatgttggtctgccacatgaaggttaaacatgtggctcatttgacggcatcaccaaaaagttgtatcttgatttaaatttgcttttaatcttactgggaaagaggtactgaaaataaatagaaataatgactatgtggaaaagagctgcttttgtaataaagtcaaactaatttactaatacattagtgtgaaacatgctaaatgatttaacaagacctttagaataatggctgactgtacttttacaagcaaaatctggtggaaagaagtctctagaagccaaaaagactgggaatgtcaaaaacaaagactctaacaaacctgtgactataccaggtaagcttgaaatgtggtcattcagtgctttgttttcttttcttttttttaactttttaagttcaggggtacatgtgcaggtttcttacataggtaaacgtgtcatgggggtttgttgtacaggttatttcatcacccagatattaagcctaggacccattagttatttttcctgatcctctccttcgtcccatcctccaccttccaataggccccagtgtgttgtttccctctatgggtccatttattttctttagatcatctttaaggtatattttgaaattttgcctaaaaattatcaaagtggggattgctgtcttttgtttttcaaagagagatgtttggcttatgtcaggtcagcctaaggagacttgaaatgtcaaactagcttaagttcctgtttagattcattagtttaattatattagtgttttactagactattaaagcagactatttcatgcagaaaactctgaaataaagaccagtattgaagtcaaagccactgaaaactgtgctaaagaagctatttctggtaggtcaatagaaattttattttgttctttacttattttaattaccaatgccatacctaagtgaaattaagagtattacgattcatgtctttatctcttaatctgaaattttgatctcagaatgaaatttaaatgtattttttaaaagccaatgtcacttttgtagtcattttgtactaattctctagacttgttgtattacacgttttcatgtagctactgtttaacctattgtggaataaagtaggatcttgataagtatgtctgcattgtttttaattttattttgtattaagatgctgctttggaggccacagagaatgaaccacttaacaaggtcagttttcatgttttatttatttctttaaagctcaagacattttaacaaaagatatttttcttataaacccaggtaaaaaattcatggtatttggcatgtgagaaattccagtcatttgtgacttttaaaacatgatttttagaaaggaaaagagaaaaaaatgtgattttagctcaaaaaccctgaggtgcagagtaagtcacaaaaagtaggaacagatcatcaacaaatgtacatgttttttgaagattacttttcatttgccaaaatgggttttgggtagacagtagttggttaaattagaatcagtagaattttgtgaagtctatttttttcttagaggtaaatgggagatatgttaatggttagaataccagttgtttgcatttatggggaagcaagtggagtttgcagtttaaaggacatgaagttcacttaatatattgttttcttatgtttatatctattattattaatacattacaatcattaat

SEQ ID NO: 94847 - DNA, 1028 bp, Homo sapiens
ggatacacactgatttggagcttggggatattatcacaaggcacagggatggcgacagtatatgaaaggaagcagttgtagccaaaaacaaatgaacttgtgttttaaaacagtgggtgacagctgcttgggtggctgagacacaagaatcacttgaacctgggagacagagcttgcagtgagccgaggttgtaccactgcactccagcctgggcaacagagcaagactaaaaaaaaaaaacagtgggtgaaaaagagtccagcagacctcgactagatgacagatggtataactacaattagtctgtactcttgaagagtgtaaatttgcaagcttttttgcttttctttttaatttgaggttcagaccagcctcttgagtttatcagactttcctcagtattaaatgcaacaatatactaatataacatgatacacagtataaacttaagtaaatatgaaacaaagaaattttaataacaggttttaaaaatttgttttgaaggaaacagaagaaatgtgtgtgatgcttgtctctaatttgcctaataaaggatattctgtagaagaagtttatgacttagcaaaaccatttggtggtttaaaggatatcttgattttatcatctcataaaaaggtaagagttgattaatagctgttcatatcctctgcaagcatgcatgctttgaaaaacattaaatttacaaaactaaaaagaaaaggtttaaaagcagtatctcaaagtaaactttcaagctaagggattttaaaatataaaacacagatatcctgtattttagtattgttgtaacgagacatagttttaatgatggggacaaatggctttctaatatgtcaaagttctactcaaaattttagtttaataggaaacgttttatatcttcaatatgtttaataaatatatcttttactatgttatgttaatatgtttaatagtaggaaatgttttatatctttaatatgtttaatacataagtatatatatgagaaagaacttacaccagcag

SEQ ID NO: 94848 - DNA, 1083 bp, Homo sapiens
aatattcttagtctttgggcctcaattttctgaggactgcatttttttatctttaaaatatttactaagttgttcaatccacttgacgtttgaagtagtttgtttatacttgcaagtctgtttttgagaaaaagtaacataagatttttcttgttaccttaatttctgttttaaaaggcatatatagaaataaatagaaaagctgctgagtctatggtaaaattttatacctgcttcccagtattgatggatggaaatcaactctcaataagtatggctcctgaaaacatgaatataaaagatgaggtaaatcagaccaccatttttactagctcttactaagtttttaaatcagatttgttacagtctgttatgttttctagttttccactttggttcacatttttctcacagacactgagaaagcttcttcctgtccctccaacaatcacccagtcacccatcccactgtttgagagttactttcatagtgagggaatcctattcttcatgtatgttgggatggaaaaaaggttgcattttgtctaaagacaggtttctctcttatctttctgccattatctgtcatctaaactagaattctggaagttatctttaattttttttctctcatttcttaaatttagttccttgtaaatcttgtttaactcagtgagcttgttccctcttcctcatcccatataccattgctttatctcttaaaaactcttactggtccaggtatggtggctcacgctggtgatcccagcactttgagaggctgaggtgggaggactgtgtgagcccaggacttcaggacccaagaccagcctgggcaacaaagtgagaccccatgcctacaaaacttaaaataattagctgggcctgaaggcgcacacccgtggtcccagctcctcaggatgctgaggtaggaggatcccttgagcctaggagtttgaggctgcactgagctgtgattttaccactgaacttcagcctgggtgacagagggagacctagtctctaaaacaaacagacctcctcctggaccttttgtatatacaaaagtaattgtcttttgta

SEQ ID NO: 94849 - DNA, 1069 bp, Homo sapiens
agttcctttgccgcacacaaagccttccattagttgtcctctgcctgctttgatatccttgttccctgatgttcttggcctcttcataattcagtagcatcaaatctgcatttatgctctgtgctgttttatttgcctgcatttctgttctttctcatctcctactttgcttagttaacttttcttttgtaatttgaattctcttcctgttgtctaaattaaatctctattccttctgtgaatttgaatgtcttttctaaatggtactatcttattagtcttttatattcttaggggaataagaagaattaaattgtatgggttagaatgaggcttgtttaggagagaaagatttttggaaagaatgtaaatcttgctgcttcttaattttataaaatactttgtaatgcatatttgtatagattgtcatgttataaatcttaactaagtaagtatttgtatgagaaagagcttataccatcaacctttatctatttttgctttttaggaagctatatttataaccttggtaaaagaaaatgacccagaggtaagttttgcatttaaatgcttttgtatacttatttaattgatggaaacattgttttacttgtttgccttttaggaattaaaaccttagaactaattttaagatattgaggtgatggagatgtcagatgggtcttcttggtaacaataaaaaaataaaggtttcttgtagtacttgatgcgaaaaaatttttcaggtactggagtgcatattaagtggtctaataggtcaatatcttgtctgaggatgttttgggtaaacgttatgttgatagtagaaatattatacttcccattttagtacgtcattttactgattactcgtacgtaaaattaagacctcactgtcttcccccatgtagtcattttcttactcttgggagagaacatcatctgacctctgtaatagtaagttaatgttaatctgttttaccgtttgttgcttcagctgtggttttttctgtgctgtctcttaaaaaactacaggcaaacatagatacaatttatgatcgatttgtac

SEQ ID NO: 94850 - DNA, 1841 bp, Homo sapiens
gttttctcttgtttcctttaaataaggattaaccttacctttgtagtcatatatctgaaacctgaaagaagaatatattccaaacttttaaaacaattaaaaacatttttattgtagtaaaatacacaaattttaccgtttgtaagacataaatttaacattttaatcatgtttaagtgtttgttcactgatattcagcaccttcacattgtgcaaccatcaccaccatccatttgtgaacttttgtctcctcaaactgaagttttctatccttttgacaataactcgccattaattcagcccttatcaaccattatttctgtttttataaatttagttacctcatgtatgtggaattatatttgcttttttgtgactggctcatgtcacttagtataatgtctctaaggttcatccatgttgcagcatgtgtcagatttttcttcatttttaaagctgagtaataattctgttttacgcatgtaacacatttttatatccactcatccattgatggacagttgggttgcttctccctttgtctgttgtgaataatgcttctgtgaacatgggtgtacaaatacatgtttaagtatcggctttcattccttttaggtgtatactaaaaagtggaattgttggattatgtggttattctaattccaatttttttaaagaactattcataactttttaatcttctccaaaggcaattcttcagttagatagtcctgaatctgctcagtcaatgtatagctttctgaaacaaaatccacaaaatattggtgaccatatgttgacctgctcattatctccaaagatagacttaccagaggtaagatttatctttcttcagcttttgtgattttagaaaatacagagaacataaaggtcattctcaggtagtagtcaaactgtttctgtgtttagagatgatttttataatttgtgttgcaatcagtgttccaattttcatagtttataaagcagtataaatttgtctaaatgagaataaagaaattttcaacaatgtaacatatatgcatttttgaatacttactgttgacatgtaggtatctacatttttgtgtatagtgactctttgtatgtaacatgattgtctccagaatgcagctactttgaatccattttggcttcctctgggtagaaagaagtttgttttattcttctttttgtttcagttacatttattataaactgtttttgtgttaagaaataagatttcacaggttcttggcctacacagtagtacatgtaggaaagctatggatagtccacctttgaaagcattaaattcaaactcaatctattttctccttctattccattgtatgctgatatcagaggtaagtaataggaccttatatgtggtgtccttgtgttgtcaatctgttaaaaatcttgcactatctaaagaaaaaggcaatttcatcatctaaatctaaattagagtatctttaagtaaatgtattatgataggtaccagtttaagcacaaatgagtggctcatttcacttgataatttcagaaaaaaatatataaaagtttttagctattcctcagcagaacatgcatttttaaaaagttgtcatttatatttttcaagctgttattcagttgtgttcaactaaattcaaaattaaacactgactgtacagaaatccttatcccagaaatatagtcccaaattcttagagttaaaagaaaattaaagaagtgaaaatttacataaacttctgcctgaattggtacttcacttcctaagtgcttacccagaaccttattcgtatagtttaagttggataacacatatggcttat

SEQ ID NO: 94851 - DNA, 1016 bp, Homo sapiens
cccacatatcagataaatatttaaaatatttatcagatatcagacaaatatttaaaaggattattgttcaattttatttagcatttctaggtattttgaataggaaacttttttagtcagctgatctctcttagaagtcttttaaaataattcctcaaggaagatgttgatatttcacatttattgtttagggaaaagatagaatttccaggcttctaaagttaataaagtttcttatttatatcattattaaggaaacttattttttcattaatataagttattgtgtgtgacctaatttggaggtctttaattagaaaaaaattctagaacctgatagtaatgtagacactgaaaactagctgctttgatacatttttaaggtttttttttttgagcttaaatttttactaaaaacattgcttttatagttaaatatttcaaatccagtggaatagcctctaataaaatgctgattatattacaggtgcaaattgagcatgacccagaattagaaaaagaaaggtatgttgctttatgtttactaacacttttgtatagtatttagtttctgaattttattgctgtattttatagtaatggctcacatgtagtgaaaagttcttttctgcatatttattttgtgtacatatgggcttgttacagttttctttttggactcagcctgacctaggagtttcgtttgttgctttttatttactctcatttaagtatttactgaatatttagagtaactgcgtatataaacagtttgaattaaataaaccactttataaaatgttttaagactctcgaataactcaacatcacgaacagtaattacattgtttttgttagattttcctattccaaaataaacacggtagtaaaattttaaccttttaacgttacttaatttcattgtgtgttttgatactttttaaaaacaactgggttggggcgagtaagtatttgtccaaaaaaattatgtatatagttttgcattatcagaggaa

SEQ ID NO: 94852 - DNA, 1879 bp, Homo sapiens
caaaaacttcttaattcccacccccccccgcctttttttttttttttttttttttttttttaacattagagaaaaagatgtgggatatgtccagaatactaaacatttgttttggagtgaactgatgctgagaaaatactatttgttgtttttgttgtgtttttttttagagacagggtcttgctatgttgctcaggctggccttgaactcctgggcacaagctgttttcccacctcagcttcctgtgtagctggtactacatgcacttgttttgttttgttttaaagcacttgtggttgccaattcattatgaatatgatacttttgtttataactaaactatttaaatactgtttagaggaaactcgtggatacattcataatttaataattcacactgtactcattctgttgatatgtaaacagattttatttatcatctgattaaagccacaaataagaatgctaagtgaaatttttctaattcattaacattaggaagtaaacagttggcctctgaaataaacactaatctttagtattgtgaagtcccagtttaaggtttctcagaatgtttgtctttcagtgttaacgtttgttctaatgcccagcttttattgtatgctttttctgaaggctgtgaaattctggtattactgggatattggggctggagggaggagtggcaaatgagatatctgtatctcaaatgcctttctggaatccttttctgttccatttcccagaatgtggctgttttcatttgatcgttacaaagagtggttgtttaactttggtgttaatgtcatttatttgacatttcaaactgtcttttcaaactaacttgatcaatattgaggcttttttcccatattagccagaaagcagatactagttttggtaaatgacttctctaaagaaaacactatgatttgaaaagactagcacacaaggacaaatatggaattaaataattcttctgagtagacctgtgttctctgtttcaagtatggaactgcataatggttcagtttgtatataagataataacttttttattgaaaaacttgtgaaggggaaagtcttgctatatccttgagccaggaatcaaggtctccattgttatcctagccccatagatgtttttacttagccctaagtttctaaagttttatgtagggttaatatgcagtacagtaatgaggcaggaatttgaatattttcttcattattggaaatgagtcttgtaatttaaagacaaaagcttgttttgagaagtaatattcatatacctgctgtaactgtgaatgtcactgctcttttctggttgtgctttgccacaaattttattgtgaattgtaaagatttgaaactcttaaaattagccatttatattttgaaaaaaaggggtgtgattattttaaaaaaaaaacattttagcatgcaaagaataacttgcacaatggatagaatatatattgattaaggtttagggtcaagaggtatttctctaatctggtagaaaagttttctcctcaggatgtaatctttggggcatgagggaagaccagtttggttcaaatgatttaagaccctgatgtggtagcacaactttcttaaatatggttaacatctcagcacacagatatacaccatcttgtgttgttaactgaagggtacatggccaccctctaagaagcaggtcaaaagggatggctcatcctctccttccttaaaaaataggagaagaaagtcagtactttttaataatcaggtattgatatgataggatcactctctggtgtctttctccaatctgctgcttctcattatatgaatatatttggtaaattttaatttgcattgatagcatgttgg

SEQ ID NO: 94853 - DNA, 2605 bp, Homo sapiens
ttcttcaagaaaacctctgatttgtggaatattgatataaaaataacttattctgtgtctacctcggtgaaagtactggaattataggactactcacttttcatatactttagatttgggaagaccatgatgaaataagatgaattacatatacttagccatgtatttcctccatttcttctgaatattacttacacatttaagttaaatattagaattatacattattctcttgaattgggaaggtttattttttaatgcatttcttcttatagccaaaggcaaatatttataagactgtatgttcacataaggtgattatatcaggttttgtcactagctttaaatcctcaatagagtatataaagaatactttccaaataatgttctaagtattatcattaataaatatggttcttgggtaattaaaaaaatattttacatccaaaaaaaaaataaaaaggtgatatgatttagagtatggtcttttccccccaccagtttctgtttatgttctttttaggtaaggttcacttataaaattttaaatcataatgcatggatcattagttttattgtagaactgtacacatattttattatttcagttaccactgttgggaataggacctgataatatttgaagtgtctcagattcacatttgacctttcaatgtcaggggttaacttgacagaggagggaaaatattggctgtaatcacatgagcgcaaaaggaacatatcaacagtcataatttatattatttacgtatttccagcaatacatcttacccattttatgctgattggttggatttcccagtgcttattacgaatgcatcaggaagtcttaacaattggcatcagcaggattctttataatggttgaattctcatcatagtttgatttttgtttgtgtttttgtttgtgttctttttgtttgtttttaaatacttttagccctggcttgaaaaacagtccaattgatgaaagtgaggtgcaaacagcaactgatagtccctctgttaaacctaatgagcttgaagaagaaagtactcccagcattcaaacagaaactttggtacagcaggaagagccttgtgaggaagaagctgaaaaagcaacatgtgattctgactttgctgttgaaactttggagcttgaaactcaaggagaggaggtcaaagaagaaattcctcttgtagcatccgcttcagtcagtattgaacaattcactgaaaatgccgaggagtgtgctttaaatcagcagatgtttaacagtgacttggagaagaaaggggcagaaattattaaccctaaaacagcattgttaccatctgacagtgtgtttgcagaagaaaggaacctcaaaggaattctagaagaatctccatctgaagcagaagatttcatttctggaattacacagactatggtagaagctgtagctgaagtagaaaaaaatgaaactgtttcggaaatattgccatcaacttgtattgtgacgttagtaccaggaattcccactggggatgagaagacagtggacaaaaagaatatttctgaaaaaaaaggtaacatggatgaaaaggaggagaaggaatttaatactaaggaaaccagaatggatcttcaaataggaacagagaaggctgaaaagaatgaaggtaggatggatgcagaaaaggtggaaaagatggcagcaatgaaagaaaagcctgcagaaaacactttattcaaggcatacccaaataaaggagtgggtcaggctaataagcctgatgaaactagtaaaactagtattctggctgtatcagatgtatctagcagtaaaccaagcatcaaggctgttatagtctcttctcctaaggcaaaagctacagtttcaaaaactgaaaatcagaaaagttttccaaaatctgtgcccagagatcaaataaatgctgaaaagaaactttcagccaaggaatttggtctgcttaaacccacaagtgccaggtcaggcttggcagaaagcagcagtaaattcaaacctactcagagcagtcttaccagaggaggcagtggaaggatctcagccctgcaaggcaagctttctaaactggattacagagatataacaaaacaatctcaggaaacagaggctagaccttccatcatgaaacgggatgacagcaacaataaggtgaggagggtaggaagaatggcacagtgtgtctttgaagtgattagctccgctgctgtagctatgtagtaggagatgtaattttgtttcatactttcatctcctcactctaccccggaagctcccatttccttttcttaaatgattccattgtttaagccagtagacattcagagtattaaactcaagttcataatttattgacatgtttgaaaagcattatttggatacaatttggaaataactgtggtttaaaaaaaaaaaaaaaaagtctgcagtgaatctcctaaggtgatttaccactctgcttctgaatgggaaactgtttcctctcttaaattgaagcttcctttatcaggtcactgattgcctaactagacattgtgggacgaaaagatcagtaaaactgaatttaacta

SEQ ID NO: 94854 - DNA, 1920 bp, Homo sapiens
attagttaatgtgtaatcaatatatactgataaatggaacagcctaattagctgtttactttctaactatatttgaggtgcttttagaagtccagtaagtcttctagagcacttattagatgtttgacatatggaacagtaaatcctttgtactgtctgacaaatactttaaatgtatttttatgtgtcatacttcgaaactcttcatttaggaaatgtaatcttattgaatttaagtaaaagtggaattaggttgatactgttagaattttacttttggattatactttgtgaattatagctaagtcatttgtggggctttaaaaaaaacaactcttaattttagcctttaggaaaactaatttgcactgaaattctcccaaatgatctgcatgcacatttattgtgactatttggaatctagccagtggtcaaaatttgtttacaatactatgatttttaactttccaacaggagccattatttccatttaatttggatgaatttgttactgtggatgaggttatagaagaagtgaatccttctcaggccaagcagaatccactaaagggaaaaaggaaagaaactctcaaaaatgttcctttctctgaacttaacttaaagaagaaaaaggggaaaacttccactcctcgtggtgttgagggagaactatcttttgtgacattggatgagattggggaagaggaagatgcagctgcacatctagcacaagctctagtcactgtggatgaagtaattgatgaagaagaactaaatatggaagaaatggtaaaaaattcaaattcactttttacattagatgaattaattgaccaagatgattgcatttcccacagtgaacctaaagatgttactgttctgtcagtggctgaagaacaagatctcctcaaacaggaacgcttggtaactgtggatgaaattggagaagtggaagagctacctttgaatgagtcagcagacataacttttgccactttaaatactaaaggaaatgaaggagatactgtaagggattccattggcttcatttcttctcaggtgcccgaagacccttctactttagttactgtagatgaaatacaagatgacagcagtgatttgcatttagtgactttggatgaagtaactgaagaggatgaagactctctggcggattttaacaaccttaaagaagagcttaattttgttactgttgatgaagttggagaggaggaagatggagataatgatttaaaagttgagttagcacaaagcaaaaatgaccatcccacagataaaaaagggaatagaaagaagagagctgtggacacaaaaaagacaaaacttgaatccttgtcccaagtgggtccagtaaatgagaatgttatggaagaagatctaaaaaccatgattgaaagacacttaacaggtagatacttggaaggggtagtctttctgttttatgaggggattacatttaaaattaattttaaaatacatgttgtggcattaccaataatgtcacccagtattgatattagaggccaacagacagttaaagtcaacaataaattttccaaagaaatgtgtacaagtttcacagttttttaaagttttacagcagaacttgctccaggttatgcttcaagaaaggatgacaaaaaacagaaaacaaactgaagtagccaaattagaattggaatgaaaatgatatatttgtattgtgggaaaaagacaacttttgataaatagaagaacatttacatcagattacctcccagtttttgcttagacttagaattaagaactatttataaaggaactatttgattttaaagtaatattgtaatgatacagaatagtacggcagctcactttccgaacttgagggagataaacataatttccattaagaaaatc

SEQ ID NO: 94855 - DNA, 3542 bp, Homo sapiens
agtgagccactttgtctccaaaaagaagaaaaaaaacctgaaagatttaactcaactaagaataaaatactaggaaggtcccacaggcttatggaacaaattagaaaaacatttatggacatcctgggaaaagaagttagaaaagcatagttacttggaaaatgataactgggaacaaaaggaaatgcttagattaaactgattattttaaaatagaattcttctattttatattagcagtaggcttccctcccaaatttgggtattttttgcaaaaatgtataatgttgattcagacagtataatatgtttaatttaaagcaatttaaatactgttactagagcaataaattaggactttctttttaaagctaaaactccaaccaagagagttagaattgggaaaactctgccatcagaaaaagctgttgtgacagaaccagcaaaaggtgaagaggccttccagatgagtgaaggtaaagcaggattgttggaatgggaaggaaagttacacaacacaggagagtagttgaagtttaaagatctatctaagaagaaaagtagaaaatcagtggaatagagcaggggtgggaaaagtcaactatagttattagatgtgggtaacattttgatctttgtaatgtagagagaatggattattgatattagaatgtgacagattagaggaaatgatcctcgaaaggttttctgaccatgttgcagcatcagatagaaattatttattaactagctattatttgtggaccttgctttgttgatgcttgtcagcagccagccaatgaattaaacaagaagccttaatagcgtttataaaatttaacttgaaacaaataaggaagggtctagtgagagagaatactttagtcactcagcagatacttgtcatattgtattgggtatccttcataacaatgttaaaaagggtagacaaaagaaagtacatagctcttgctctcaaggggtttattgattcagagaggttaagcaaaaaatcaccttgccagtatgatttaaatagagcactgtaagggtatcgcttttaccattctctttgtagcaccctcattgccctctttctttcctatcctatcttctttaaggaaaacttaccaagtatgatttggtccaaggatttcaggtgggctctcagtgctgctcccaatatattagaggtctccttcctttactatttcctaaccagatgtaaaattagctttcccccccttctacatcacctaacccgtttctcattggatgtccttgctttcgtttttatttgccagagtaaatctaggatctcccttgtctgccaacttatattttgttttatacacataaaatataaaatttggccaagtttttcccattgaaagaaatatccctttgaccttgaaatctctctagctcctatcttttctacttgcttttagagcaaaacgtctagaaagaaccacctacttttacgtcttaatttcccatggaactgaatgtattttggtttctttctcctaccactttcctgaaaatgatgttgatgaaacccccattaggttgttgtcaaacgtgattttttaaagtgttttcttcttaagttagtcttacttgacttttccacatgattggttacttttgattatgccctctcttgaaactctttgccaagtcatggtcaagtgggtattccttcttccttgtctattcttttccataaacaatctttgataaccaagctataggtggtggttcagtaattaggttctcgcatgatttcatgaggtcaccccccgacttcagaatttctgtatggtagggcaaccttggcaatcagcttgcttagaactgcctcattgcaactgagtaatataaaaggatgatttagttactgcttacgtaacaatatatttctactaatgaacaatatgttttgacaaaaggacctagcttaagaaaaagtcatttttccacacaattgtaaacttaaatcatttattttaatctattttaaatatataattttaatatatgttatatactattaagataaatgtgcctttggagtggcaggaacagatatgtttgggaaagtttattaccctgatgaagaaataaacaattatagaaagagattggaggcaaggaaaccagattgttttaaccatcaagttaagaaaaggaagatacctttttcttattgattgtaggacttgatgatcagtaaagtgtgaggaataagagtaagtaatgatttcagagttccttgccatcccctcaggaatactaaagagtagcccagatgtatggagggaacactgaacttgaagtcacaaagtcttggttctagcctgtgtcactcactagctatgcaaccttgggcatatctgtttattacctcttttgattgtgctttctccatctctgaagaaatagggatgggttaataatgatttcacgtgcctatcttacatgaggtaaaagctaaatgaatgattatatatgtaaaagggttttgtcaagtattaggcaacagtaaggcatttcagctactgagggtaatcagaattgcttggaatcagtcttcatttttgtctgtccccaagatcatagtatgcagagtctgctaacattgagtgcttcttacgtgttactcactttggtgggctttaacatttatattaataattttacttgtgtttctaacaggggtcttaggctatcagtttaggctccattttctagattggaagggcctcagtattgggccatagaatcaatttctgctggtatccttttcccttaatctccactctcggctcagcttagcactttgcatatataagttctcttgccagtaatgataggacttgtattacttcgttaaattctgcctggaacatatataaataaaatttgctgttagctttagacctatattcctaaatccatttgaatggatttacccatttattccttacattaaagaatcttggagaatattgtgcaaagaatggccagatgggattaacaaagggaggttttccctgagaaagaaaaaggtaagaattatccaatgttaactttacaaagtctgtaaatctattctgaatagctttttttcctcgaaaaattttagttgatgaggaatctggattaaaggattcagaaccagagcgaaaacgcaagaagactgaagactcttcttcaggcaaatcagtggcgtctgatgtccctgagggtaaagttaaaatgacatttttttcttacccatatgaaatttaaaagtcggccgggcgcggtggctcaagcctgtaatcccagcacttcgggaggccgaggcgggtggatcactaggtcaggagattgagaccatcctggctaacacggtgaaaccccgtcagtactaaaaggtacaaaaaattagccggacgtggtggcgggcgcctgtagtccaagctactcgggaggctgaggcaggagaatggcgtgaacccgggaggcggagcttgcagtgagccgagatagcg

SEQ ID NO: 94856 - DNA, 3766 bp, Homo sapiens
gtgttaacgaaataaagacttacgttttctgattaaaattactactattgatccctaaatttatagcagtgtgtactgttcttatatttaagtatatactgtgcttaatatttttgtcgtgtttaaattgatgaaggccagttgtggctcacacgtgtaatcccagcactttgggagaccaaggcaggcacatcctataggggaggtcaggagttcgagaccagcctgggcaacatgataaaacccatctctactaaaagtacaaaagtagccaggcgcggtggcgcacacctgtaatcctagctattcgggagcctgaggcaggagaatcacatgaacccaggaggcagaggttgcagtgagctgacatcgcgccactgccctccaacctggatgacagagtgagactccgtctcaaataaatgaataaatcgatgaacacaactggagattaattattgttaattttcttcttgtctcttcttatcctctagaattagactttcttgtacctaaggctggattcttctgtccaatttgttccctcttctactcaggtgaaaaagcaatgacaaatcactgcaagagtacacgtcataagcaaaatactgaggtaattttaaaaattcttacaaaatcttgaggtgttgttattgtcttagaatcaaattatttatctccccaaacgtacatttccccccgctttaggagaatgtttatgccagtttattcctcttaagtcctgttttctccttcagtgtaccttgcctgtaatttctagtccttattccttttccttgaacagcaacatttgccagagtagattctgcagatcactagtctcatatgacactccattattaaagtaagaaactgcatgttttgatgccctcttgtcatgtagacattagcatattaaagtttctgaattgtctagccagaatgaatcctggttaacttcatgcaaaccatttattaaactgatttaatcacaaaaccttttctaaattgtacacatctttaagaagtgttactctggagaatcatcattaaccataattgaagtggtgactctagttcctgctgaatatttgagagtttcgtacatcctctctgttgaatttgtggcacagacactcatctaacatttactgagctgttctatgctggaagcttatttaatctcctcatgaacttcatgaggtagatgctattattccaatcttaaagatgagaaaatagacttaaggaggttacgtatctaaacccaaggtcacatagctagttagtagcagacctaggatttgaactccgctctatttcattctaggcccaagctcttatacattgtgctttgctacctgtgtgcttaacttagttcatcatgtcacttttccatttaaaaccttctagtagcttcatattgcacttggtctaatatccaaacttcttattttgggtcttcaaagccctgcatgatctgatttcttttctacttctctgaatgctttctgtgtttcagcttttctggctctctctgttctgtttttcatacatgagagacccattgctgcctttgcacctttatactgctgttcttttgccccttcccagtcctactcgcatggccagttcttcatgtttttcgtctcaaatatcagttccccagaaaggtctgcttaagaaagacctagctaagtagaacccccaaaaaagttcagcctcaattacgttgttgcactgtctttaaagtgcttaccaccgcccccaaagtattttatttttttcttttattgtttctcttctcccattagaatgtaagctttattgtataaaagattctatctgtcttgttgcccaccgaatcctcaggcaccaagtgtaatacctggtgtgtcataaacatcaaatgactgatgaatgaaaggaagaaatggttatataaggcactgtgtttataatattttgtaggatcagtttcttttaaattataaatatacagtagataagtttgcacacatagcaaaataacgtctaataagtattttatattgcaaattgcttttaacagaaattcatggccaagcaaagaaaggaaaaggagcagaatgaggctgaagaaagaagctctaggtgattgggggaaaggaaagaattcactagaaatttgtttagggtccagttgatttgtgtatttttgttatcatttaatttgtaattttcgtttcagaagcaaatattcgtgttgtacaaatttctgattgccctaaatgtagagagactgatggggaaagtatgatgggtttgatttttatatcaaatcatcaggcatggagaaatatcttttagaagtgttaaaataaatgttcctactgtatatttaaaataccatctgtgtttgtggctgattttttaaagacttgcttgcctctgattgcagacaaggtttttcactacaactcctgtgatttgggatgtttggggattcttcatgtatcactggaagtcatagcatgacagtgttttactttgcttcaaccattcatgtgtatacaggtcatagatttcttaaaattcaaattttttctggataaaattagattacagcatattttccccaaataggtttgaatgaaactttgcttgatttttatatgtgttggaaaggtattttttctgcttctggtaacacttgctgtttctgccagaacccatttaaggtaacaccaagctagtcatttattattagcttgaatctacagagcagccattacttctgtggaccaccagagtagctttttaaaccatttgaattatagttgaatatgtttataagaagttttaagggcacaaaaaataattgaatggctagcaggtgatggaaatagccctatacttttaagtttttagattgagccattcttcagacatagtctgaatacttataattgttttagtatttgatgcctcaagatagagtgcaccaattaataatacaaagaggatgaatggaggggaacaacaacaacaacaacaaaaaccctactttttttagatgtcttatttccatcacagcacaagagacatcacagtcagtaagaagggcttggagaaaaaaaaaggcagcacctctttgtcacctcctatgaaactcactgcatacttagtcgagacttacccacagcctgagtaaaattacagaatgctacacgtcacagacaaggggtggggtagagagaggagcggcttgctgtcaagagtttgttggaattaaaaccttacagatgaatccggataataagagggagaagagctgttaaaagattggggaataaggtgcctgtaaattacagaagcacagtgatagtgaataagaatcttagttttaaagaatcttcctttctcctcagcttgcttttggaacttttgcaactagggaagttataagcttctttaatcttgtctggatcagtcttttgaaattgggattctaaattagaatgagaggaggagctgctaaagcataaaaatggtaggggtgatttttgtgttttatcctagtgaccaatgttgaccattaattgtacattataaataatgtttttctctgggactttttgcacttaatgctggtaatttttatcatagggcttcaaatacaaaagatttgtatgaggttttcagaaaataaacatgctctttgcatataattttagtattgttcttggcattttcagaaaatcttcctcctttagtcacaccacac

SEQ ID NO: 94857 - DNA, 1100 bp, Homo sapiens
tggccatcagccaagggggaaacaaagtgagacatttgttgccctcttaactcctaaagatgttctttaggccttttctggtgatatcttcccatgaatcaacaggagtcctttggtgtatgagcttcagaaagctttctggcccctctctgccctgagacatgcaatagggacacccaaacctgctccttttgcctgcatcagctctgcctgtgccttcattttgcaccctactcgggaaccagccatcagcagcacctgactcttctcactgctggggcctataacaggtttcctcacatttgctaggattgctgcatcctgggatgttgtggcctcttccagaagatgagataaccccactttggaaagaagtcgaactcctgttctgttcctcactcttatcaccctggtttggatctccctcacttctcagaggccttctatgtgtgtattactcagggttctccagagaaacaaccaataggaggtgtgtgtgtagagagagagtaaaatggagtagaaacagtaaataaatatctgttacgagatttgactcatgctattatggaagccaagaagtcctacaatatgccatcttcatattggagaatcagaaaagaccacacgttgggaatggaggtggggggggcccaccaggagctcagctgtgatgtccgagagcaggagatgaatgtccagctcaagaagaaagagtggctcttctaacaatcgctgtgtgtggaggctttccttcgtgctgtctagagactcctcaccctctggactaaatccaaaaggaggactgtgcacacagactgacctgttcacattagtcccagagctgcgctcttgcagctcagcagataggccgctcttcactccctgctcaagaggagtgagggctttcagaagcccctgcaccttcatgctgagctcactcctttccattgtatcagcagccatgcctgaacaaaaaatagtttctatttattgagtgtttactgtttattatggtagattcttgggaaattgaaactctctgacactaccattagtttttcttcttaggggaagcagatgaaatgaccaggctgtta

SEQ ID NO: 94858 - DNA, 1045 bp, Homo sapiens
aaaagaattgcatttcaagttaacctaagtaaaatgtgcagcgactcactataaagacactgggcatgttggtctggatccctggctgctagctacagcagccaagcctggatatctgaagcaagagaggatttcagaagagctttgggggctaacagaatggagggaggttggagaacttggctttggttatggacaggactcgcacagcaggcgccctacctggtcatttgctgtcacacggcagctgccatgtctgacttcctgaagctcaagaacttgtttcaagtcttgggagagagcatccaactgtctgagcctaggccacactgcccagtgacacagagtgggaggccctatctctaaagcttccagaaaaaaggcaggcacttctgcccaccaagaggggtgggaaaaggatgttttaggaagagggagattaaaagctggaagccaaaaatggcaaatatccaccacaaggactatctcagcactcacaggcagggagactcaaggaatgagagccaggaacaacaaccagaagggtctctttctggatcttgttttccccacctcaccccctacacgtgatctctttttctctgactgcgaaactttctccacttcatgtgcggggccccttctgagcctcccattttattcatctcagctccagccacacagaagctagcttctctcagtcccaattccacgtttttgggagagagaatgtgattgattcaggttgggtagtctcagagaaagtgattcttttaaatagagaagataccccaaacatgtcctacaatttgggggcagacatgctcactagaggtttatttctgcacagactgggctgtgcagaaaaagtttgaagacagccttctgtatgaataaagtagtgaagttgtgaggaaggtgtttaacctatacagaaaactggctcttttcttttttttttttttttttcctgagatggagtcttgctctgtcgcccaggctggagtgcagtggcatgatcttggctcactgcaagctccacctc

SEQ ID NO: 94859 - DNA, 1043 bp, Homo sapiens
taacttgttcacctctttaaaggtgctatctctaagtagaatcacattccaaggtactggaagttgcctttcacatagaaatttcgagaggacctaattcagcccataacacagactgtgtcacttgtgcccaccactgtgtccccacccaggacagtgcctgacttattttaggacttgacacactcccattaaatgaatgattgcatttcagctccccccttcctcttcctcttcctctccccaccccccaccatacgttgtgctaaaggcaaagaaaagaaggcatagaccactacagaaggaccctaagtgaccacaggaaatgtttgctaccctaatcttgaaattacagacctttttttggggagtgttgctctcttctagtatctccctatggggaaaaaaatcagccacctgtcagcggccagcccatcctgccctgggtgtgtctactgcccccaggggctgctgtgggagttttgctgacagctgcacacccatccaactggccctctttagagggtgagtcaacaggctgccgggagtgtggatctatctgcaggaaggcagtttagcaataggtactagaacctaaaaaaaagtcatatcctgtgaccttacaatctaatctgaagaactgggtggggggagggggagggctaagatgagtttatatcttttttattaaaaagaaactccctttctcactattatagtagaatctggggagagcctaaatgtgaaacaagagaaagtttgtgaatctagtacattcatatgacagacaattatatagctattgaaaatagtgtttatgaataattgtttaatgatgtaagatgttacatgaaaacgtgggacacagactgcattctacactcagatatataataaatactgcaatttacatgtgtgtatacattcagaggagaaagcctgggctgccaaatacccaaatgttaatatactattttttcagaaccagagatttctttctttatgctttttgttttaaaatggcatgtgttgcttttaaagcc

SEQ ID NO: 94860 - DNA, 1052 bp, Homo sapiens
tgtcgcaagcctgactttccgaggtgagagccccgtggctgccgcgcccatgctcgggtgctacccgactctcggcgctcactggcgggtctgaagcccctgctccggagctaaccctagtccaggccacagtttctccctttgtcagcagggacggaaatcccagccccgacttctgcaggggggcgatgaggaataagcagagcacaataaatgccacagggctttgaaaaattggaaaagcgaaagtgccgtaggtcagcggttatcacttttctaagactgacacccagaggaaataaagtccgagcttttactgggtagtggggataagggtaagttggaagatgggtgcagaaggtagagaggaatcagggcctctgaaaaacggggcgtgtagatgatgtgctttgaaagttgtgtcttttttcattcattcattcattcattcacccatctttatccaacattggctgtattgaatctgccccgtcttaatcagtaggaaaaggaacagaataggatggaaatggccttgacacaaggagttttgaggaatgtcaaggatattttctctaaattcaagaagctaagtccctacatgtagtgcttagaatacatacaggtatttctgtgtggggcagcagagaaatcacacacacactcctcttctcaccaggcgtcctgaaccccctcccccaacccctccaaggcagattcccactggagcgggtgtctcaggaggggaaagggaagaggaaggatctgtcaaaattaagagaaggaacaatagctgtgagtcaggaccccagttctgcagagaaagataaatcaggagaggaaagagggtttccacttagccaggagccataccctgtagctttgtggaatcgataataataataataaaaatctacgtatcagaaaagatagtcaaatgaagaaggaagagtagctggtgttttcataagcctccttcagtgcaggcaccaagggaactcttttcagtctgacccatgatctgaatcatatctccaagcacccccaagata

SEQ ID NO: 94861 - DNA, 1020 bp, Homo sapiens
tagattggcatctgggctcatgcaagaagctgcgcctcccatttttcctctagaaggaggtggagggagttgaagaatgaccttatggtgaaggaggcagctggaatgctccgtcttgaaagtttcaacctggccagcctcctcggtggaccccaggcctttgcgtcctctctgccctaagccacctccttgtggcgtccccgcttctgctgctcttatggcgtgtctcattctgcctgtccctctcttttagcctgcttgcatgtcccttttctctctttacaccctaagctgaagagccctgaggttacattctgtgtacccacccaccccagctggccttctttgcatttccccttatggacacctggtggcagtattatccaagatgtgaaccatacttgatttggccaagttcctaagaagataggagtgtgggagagtgtgtgcgactgtgcacttcatggtatggaagaaagaaaaggtcctgccctacttgtagggcaggacaggaagatttaaaacaacttttttttttctgaattcaagaataaaacccattaattgcaaaaaattgaaaaaaatcagagacaaggaaaacaacaaaaactcccactgcaccatattctgtaccctgcaccaccctggagagaattactgataacattggtttgtattacctaccctgttacctcccctcttcccacttgctgggaaaaaatcatgaaaatattgattttccttattcaaggattctgtatttgccaatttgcctactcactaaaatgtatttgcaagcccaaaatcaacactcatggcactttagtgatgatttgtggacactttcagggctttgaaaaatttgagtctcccagcgtgtatgttggttgctgaggttgaacaaggtgactctctgcctccccgctccaactctcatggagtaaacatgacatgtccatgatcaaaggacatgtatttactccacgagagttgaaacagggaggcagagagtctcaaaac

SEQ ID NO: 94862 - DNA, 1023 bp, Homo sapiens
acaccactctgcgccttgcttttttcacttaatcatataacttggagatggtttcacgtcactacctagaggcatcctcattctgtttgacagctgcctagtactccattgtacggacggaccatacttcatttaacctgctttccattggtggacacatgggttgttccaaatccttgctagttcaagccatgctgcagtgaatagcctcacacatatgtcattcctcacatgtgcaagtatttctgtaggatgggtgtctagaggtaggattcatagggcagtgggaacatgcatttgaaactacaatacatagtggccaattgtcctctgaaggggtcaaactattttgttttcccaccagcaaaacatgagcatgcagttttcccatagccttgccaacagtggtctatcagactttagagatttttatgaatctgatgggtgaggaatggtattttgttggttttctttgtgtttctttctgagtgggatgaagcatctttttatatgtctcaaggccttgcgtcttcattctgtgaactgtctcttccactctttgctctttcttccactggattggatcgttggtctctcttctttccttactcctctctttgctaactaacacaagggccaaatcctggcactcagccccacacccagccctgtgtggcctttgtctggggctctttttacagggaggagggggaaggtgggggcaggggccagcactgggtggaccaggaatggagacatcatcctcacccctggggacctgaagtctctgatttaagtcagatgctcattaaatgagataatgcacatgaaatgcctagcacaatgcagggcttatcatagtaaatgctctgaaaaggctgctcattattttcatgtgtagaacatggaaatctaccaggatctgtgtatctgaaactgagtctttacctgctgcccccgtgtgtgggtataggatccctggggctggctaaggggcctggtgttccttatggactccaaggc

SEQ ID NO: 94863 - DNA, 1037 bp, Homo sapiens
ggtaaaataataatattaaaaaagaactttgttaattttataggtcaaaatagtatttcattgttgccttaattttcattttattgatagctggtgaagttgaccgatttcaatttgaatatatttaaataattattttatatttatatataacatgtttatataatttatattcattctattataaatgtcttatttatgttctcagtccatatgaggaaatgtttatctttttctcatacctttgtaggagttctgtatatatatggatattaacttttcccctgtcatttatgtagtaaataattcttgttggctttattttaccaattaatagtttttgacctatagaaatttaaaatttttatgtagccaaatctgttagtcttttccttagggaataaggcagggatctagcattacttttttcaaaattgttctttggtgatacaaacactgtattttgagtaatcttttccctatatttcgaaatgctgcctttatcacctactaaattcctaaatgtgttcttgggcctgttcctctattatcttcaattggtatgtctgcttattatttctttggttttgatatctgggttatgctggctttgtaaaattaattgtaaagatttaaagtcttctctaacatctggaacagtttctataacacaagaatacagtcctttgagggtttgaaataattcacccataaaaccatatgggctgggtgccctttttgagtgggtatagtaatagctctttaaaaacttttcaatttctcctgtgatgattgttatttttagtttgtcacttttactctagtcaattttgataatttatattttcctagaaaagcatccattacgttgaggtataatttatttacatagtgttgtacagagcaaatttttataatttgaataattctctctacctgtggtgttttactttttcttatttctaatgctatgtatttgagtttttttttcttgattagctggttagaagtttattttaaaactttattggactttt

SEQ ID NO: 94864 - DNA, 1012 bp, Homo sapiens
ggtgttaatgaaagtctgtctgtcttggcaagtgggtagatgggtgcatgggttgatggatggatggacgaattttctggctactgtctgtatggatctgaggaggaatctctctcttggctggggaaacccaaatggaaatttcagatgtccctatgtgaaatttagctaaactcagtgctagtgcctctgggctgcttgggtgtttatagctgaattaggcagataatttgccccaaactctggctgcctgctcctggctcctgtttcccggctgctccatgggcctgtctgagattgtgcagggaagtgcagggcctgcccagcaggatttccgttctgtgtgtgctgccctcaaaatgtctacacactcagatggggagggactattttaggtcctgctggccacaagcacagccagaggcagacgatgaggaggcccagcctggccatcctcccggcgttgacatgagggaactggggctgggatctgagccagagctgggcctgtgctgtttgtgggagcacacggccactctggctagagctgctggccagaccagcagcactggtgggagctgggatggggctcctggaggtgtacccacctggggaggggctgggcctcccctggcctgggacaggggaggaggaggaaatgacactgatttgctctgatgggggaggcttggaccttgccctcatggagctccctgtctgatgaaagagacaaaactctgttctcaaaagcctcaaacccagcagggagaccagttctgttctgcagggagccctggccctctggggaagccccttttctggtatctgactttgttccatgtttttctctgagatctattgctctgatttggctgatccaggaaatctttcactcactcgcctctcctccctgtccctggcactctgaaggacaggcgctccaaggccaacccaggaggcagctgaccccgggtgcagttccagtggtttgctagataactatggctgggct

SEQ ID NO: 94865 - DNA, 1050 bp, Homo sapiens
tctgacaatctttactaatatatttgaatttgtttctgccatcttattttgtatctctatcagccttttttcaattaaaatattcccctccttttttccatcccttctcttctttttagtttcaaaactatatatgtttctatttctttagtgattagtatagaaattttaacatggcatatttaacttagcaaagtctaaatttaattggtatttatatcttcctccagaatattacaaggaacttagactgctttaactccaatcacctatcaatttgcaaacttttgtacaatattttagttttatcttttttacctacctttttaaagcattattttattttaagtaatcatttttttcttttagctatattcacatttactttttttttttaatatccgtcatctttttcctgaagtagggcctattgaaattcctataattgaggtcagttcattataaactttctcactttttaactgtttgaaaatatttttttcacccttatcttggaaataatagtttcactaacagttattttctgtcagcactcttttctggcttccattgtgctattgttttcacaaatctgaggacttaaaaaaattttattttaaagttaagtttagttttggctgggtgcagtggctcatgcctgtaatcccagcactttgggaggctggggcaggcagatcattgagctcaggagttcgagaccaacctgggcaatggtagcaaaaccccgtctctacaaaaaatacaaaaaattagctaggtgtggtggtgcatacctgtagtcccagctactcaagaaactgaggtgggaggatcgcttgagcccaggaggttaagggtgcagtgagccatgattgtgccactgcactctagcctggcccacagagtgagaccctgttgcaaaaaaaaaaaaatttaaaaagtaaaattagtttaatttaatttttaaaagatgttatttttattcattctgagcaattctcaaccattatctcttcaaatgttacagattccattctctcatcatttctg

SEQ ID NO: 94866 - DNA, 1263 bp, Homo sapiens
aacgctgggaaggtgcagggagtgtctgcagtcatttctccctcccttcatgttcatcccctggttccaggccaaatagaaatgcctgaacatctaccagggacagtccttttctgtcgtcgtcatcatcatcatcatcatcatcatcatcatcatcatcatcactactctagatgatgtagggtgatcatatgatccatttccctccaacacttggaggtgatacctgttctctgggtatacttaatactacccccctttcactctcaagagtgctccaatttggatttcaaatgatttcatccctgtatataagaaaacaaaagagcctgccaaaggtcacgaagctaacaagcagttcagctggcaccagacccaaaccacatactcctcccaagatgcttcatggcctgcacaagatgctgcacagtcttcccaggatgtgtcacaaccctcccaggataccccacggccctcccaggatgtatcatggcccttccaggatgccctacagccctcccaggatgcctcacaacccttccaggatgcctcaaaaccctcccaggatgccacacagccttcccaggatgcatcacaatcctcccaggatgcctcacagccttcccaggatgcgtcacaaccctcccagtatgcctcactgccctcccagcatgcctcacaattctcccacgatgctccacaaccgtccaaggatgcttcacagttctcccaggatgcctcacaaccctcccaggatgcctcacggcactcccaagatgtctcactttctgcttctccctccacctggcaggaaggatagtgtagatcagtgtgtgagcctgtgtgctgagatcctagactccttccagaacttgaaagctagctagagggagtcagttcaccttctaaaaatctctcctagccttcagggtggggtaggaccctaaatagtttctgaagcctctgattttccttcacgggtgggcagggctgagagggagggatgcaggatctgttcactggtgctctttggttttacccctcaggcttgctcagaatcccaactgtgggaagccttaacttcctgggggtaaaagacacacaggctgtttctttctgttctctgcaagggtgtgtgtggagggtggagtggggcaggtggaccttggagttagtgatgatgttggggcggagtaggggccggagctagtactttgcatactggcggtcttggggcctgggggcaggattttagctgcaggt

SEQ ID NO: 94867 - DNA, 1023 bp, Homo sapiens
acccatcagactcctcagatatggcctcaaatacctagagatgtagaagtaccgtggagggcctcaataagagggcaagcacacagatggctagaagcctgtatggcttctggtcaggatgaacccttggccaagttcttgaggaaaccaggtctatattcctgaagggacagttcagtttgggactctattaggtttcagtagtaatataggctgcttgcatcattttaacattcatagggaaaatctctttgagcaggctataaatgaagctgttgcaggtagggaagaacaggacctgaaaatgggaaccaggaagtgagatcctgttggcaaagggaatgtagagcttccagggtgcattgcccactgttctcattgcataccagtcctccaagtcagtctagccttactgtacacttgacaagtgcttactcagcaagtcccagacccacggccttttatctcccaagactggctttggccatgaccttcctcatcaggcctctgagcacactctctaggaactgctgcagaaattcccctaccttagcctcccttctcccaggactcctctcttgactgcaattgcctcttcttcttcttcttcttcttcctttttgttttttttttttttgcctgcattcacaattacttttcacaaaggtgttggaaatggcatttttattttacacagatagttgcacatatatagagaaaattaggaaagtccatttttaactctaaagggaacttttttctctaaaacttacttgtaaagctactgatacagatgggccgcatggttaggggaaagctcctctgtgaaaagagcatgtttattcctcttgtacattttcctcttttaactgctattaaacaagaaagcctacatacctgtttcaaaagccacggtgttgtctcatgggtattttgttcttccatcctttttgcacagtgcagctgtggttggtgaactggatggctgacattgcatccccactcagctggactgaggactag

SEQ ID NO: 94868 - DNA, 1045 bp, Homo sapiens
gaacaagcatggcatatggcaagatgacagcttcattccaatcccccaagaatggcggtttctttagcctgatctaaccccaggcttttattgcaattttttctagggcaggatacagctaagtagacagcagtaataattggatcccatgtttaactgcatattgccccagctctaggagtgttgagtctcaactcgaagagtttttctggatcttgaaagccagttttcatggaatcagagacccaatcccttccctgttcatctcatttccttcacttacagtcagagcacttggttcaggacataaatcaacagttacttccataggccttcacagggcgtttcagacttagcctcctccagtaatgccattgaaatagttcagatttcggaagcctaaaaatggcctttaccttacccttaggtgtaacctgaggattagttgggattgttcctttatgttttaaaaccagctttttggttatcatctttaaggaaatgtcaccagctctgcactgtgggggcagccatgcctggactggatgcctctagggatggagacattgttaccataaagtcgacagagccaaccatggcttgtggcttgttgcctctggcccaactgtccttcactaaataatatcctagatattattttgttgctcaagcccaaggttcccaccctcttttgagatccccaaagccatctttggccttgtctaagaaagattgcctataatcctgtcctccaaactctaaagcctggagcagcttagcgtggaggctgcactcattgacccagatggactcctgagacttaacgcaagggctttgctatgaggtcagtcgggggaaactgtactttaagacacttcagaaagatgctactggctagtagcagaaagatggctagtggcaagagtataattgtgcatcaccaaacaatgacaaataagccacacaggcatttccagcttggattgatgggaggagagactcatcaaacagaattcttcactacctttgtcagctactgagttgc

SEQ ID NO: 94869 - DNA, 1227 bp, Homo sapiens
cactcctgagagatctagccatgtcagattccttgcttgacacccccaccccatcctaccagtcaccacctacctggctcaggcttagatgcccttcttttgaactttctttgtaacctgttagagtacctgttagggtattcacatcattctgtatcaatttatttaccagactgatttcctcaagactagagataacgtcttaacatcatttcatatgcagtacctagaagagtgactgagacattgttggtactcaatttatgtttgtcgaaataagccctgctttgcattttctacatttgcccagatttctgtgtcaggaagtgctcctgaggagacacaggaggcagactcaggatgcccttctttgaatcacagaggcccagcaccagagacagggagttggaggaaatcttgggcaataaacacaaatgggtcattggtcaattctatgctttttagtagactttacaattgttctcttaatctgctctcagctgctgatagaagctattatgattccacatctgaaccagaaaaacagatttggtgtcatgcctggggtcacactatcagtcagaggaccctcagccttggaactctttttgctgtgctctactgcctccaaaaaaaggcagatgtggatcagtgattatgaaaatactttataatgatgtaattagtttcatcctgtcaaaggcagggagtggacaaatgaagctgctctggggttagtgttctgtatgttagtgaaagtggactgcactttatacagtggccatgctctgaagaggtagaatttttagaatttttcttggattatatgttaagtgtcccagaaaagcatgttatttgaaatcattttgtagtctatcctgtttaacatgaagaattcttctggaatgtatataaagtgcaaattcaggttttcctacatcaaatttacttcaaggatgcacctgctttgggagcgcagttctctacaggactcagtgttcctgttcaagcgaaaacatgcatgtaaagaaaatcacccctggggaagaggggtatggtcactgtcagtgtgtcttagcatctgtgtctgtctgcatgcctaccttagctcatactaccctttgcttcccatggaatctttgcaggttttctggaaagaggaggctttctctaacatgaggtaggccccatgctgcctactaagacccagcccacatgtcaccaaac

SEQ ID NO: 94870 - DNA, 1048 bp, Homo sapiens
cagtgagccgagatcgtgccgttgcactccagtctgggtgagaagaatgaaactccgtctcaaaataaaaataaaaataaaaacctcccaaaagccgaaagaatatgtctgcagctaccaaaggaaagcaggatgactaatggtatgtttgttaaccaaaagacagataatatggaacaaactaaaaggtctagggtttcaggatgttttgaaaatgccaggcagaattcgggcaaaaattgtttcatgtaggatgcttgatcccttagatgagaattctgagaagtaatattgtgacagtttctggcatgaggacagaaaggagattctgatagaaaaggaagggtattcatggtgatggggaatggcggtggagaggaagctatttgtcctactagggtttaggtaatttaaaacctcactgtttctttgagcattaactgcccttggtcattgaaacctgccagaggcccgtagccagccttaccctctgcctataaaaattcatagtgagcaaagacaaagagaaaaattaagacatatctcttcactttccccatcctcccaaatacaaacacgtatttctgaatagtcttcagcaagttttgcttcttagacttggccaagatttttagcaagcacttacctactgggcctgcttgtatgcattgcctttgaggatcctggaattgagtgtggtgctgaactgtaaggtagccttaccctttaagtcagctgtctaataaaatcaccttgaaaatctaaatagaatttccaatcttccgtggtgtgtggctcaatattacagcctagtggttgtcagaaatcacagtgactcactagccagctctgggtgggactctgttctttcgtctgatattcacacttactgcaccactctctcttcatgtggttcccttagtgaattctgttgcttcctggaatctcattgagtttctgctctgctcttcttggaggttctttccagctttaaacatgaataaaggctaggaaagccaggcaatgattcaaccagcccttgtcacac

SEQ ID NO: 94871 - DNA, 1016 bp, Homo sapiens
tcacagaactcacactgagaggcaggaatccattctgtttcttctccaagtccaggccagagttttgaacacaggttgcccctggggaccagagattgacttcagaactcccacgcaaaacttcaatatccccaatattgccctgacactggccatttcacttcctggctcatctctgtgtgtcagaggcaatgcctgagaatttccacaggcctgttttttgactcctggctgattcttaaaagcagcaagagatcttgctgagagtcagagctaagctaagccatcaaccgccttcctcatgtggatggaccctggactttgctgcttttatgggcaaggccttgccaactatagaaacaatgagcctctttagcacccctgtcactgccatagggtaaccagagacagagcgactcctttccaaaggtggctttgctggccagcgcctatcacctcagtctgggcttcctgaccactttttacaattgttttggattaaatagagcattccctggccttttctggttatagaggtctcattgtttcatggtcagcacaggccttttgcaggcgtatcttggctttggaatcctagagggtttaacaaattttacttcagtggaatatccttttttttttttctactttaagcataaaatagtgaatcatagaaataaatgttcttaggtcatctggtcagtctcctgggtacagctacagggtgtttcctttagaacacggtctagtctttatccagtctctgtttaaatgtcccagatgttggggcttcctcatctctcatagcagctcaaagaacaaaatgaactgtgttgtcttgcagccttctttcccctgcctgctgctctgtcagttgcctcatgccctctctcttccattctctctctctctggcaaaagtattatttcagggatacccttcatgagaagccaggagcaaggaccagagcaggtttgtgtttcatctgtagacttgcagactgtctggaaatggga

SEQ ID NO: 94872 - DNA, 1032 bp, Homo sapiens
cacaccttgaaggctccctatcaggaagtcccatcctgaagttctaacaagagtcactgtagagattctaaggcaattcattcctccattttctccatgtccagtggattgttaaatccagaaaggtgaagttgataccacagattgcctctgcctaagtttacaaaacagatggctgtctctccttttcctagaatttctctaggaggaatatttccacctgtttattttttattacattaacaagataaccccaaacttagtgactttaagtaacaaccattttatttgttcattattctgtgggtcaggaatttggccagggctcagctaggcagttttacgtggtattagctagcatctctcatgaggttgcaatcggatggttgctggggcttaaataccaggatggcttcactcacaagtctggtgccttggcagggttggctgggaggctgagacctctctttacctctccagatggctagcttaaccttctttatttggcaactggatttcaggagtcagcattccaaatggtgaagcagaagctagtagtatctgttaaggcccagcctcagaaggtctatagcatcacttttgtcatattctcttgaggaaatcaagtcctaaagctagcccagattcagagggatggtaataggctctacctcttgatgggaaagtgacagtgttattttgcaaaacagcacatgggatgggagttactgttgcagccatctttggaaacacactctactacaccacttaaggttctccttcaagtgcctcttatcctgctatagtaagaactgttttgtatttaacctaagcatcatgtactacaattggtattcaagtttttttgttcactttatagtggagatagagaacataagagttgtcactctccatacattcctgaaaggctgattatccttggcttgagctctgcttctcttacataagatagaagttgtgaggaaaaacctggaaggatacaagttgcaaattcttggtccatttcctcca

SEQ ID NO: 94873 - DNA, 1040 bp, Homo sapiens
tagttttccatggtgtatatgtaccacattttctttatccagtctatcactgatgggcatttgggttggttccatgtctttgctattggaatagtgctgcaataaacatatgtgtgcatgtgtctttataaaagaatgatttatattgctttgggtatatactcagtaatgggattactgggtcaaatggtatttctggttctagatccttaacgaatggtcacactgtcttccacaatggttgaactaatttacattcccaccaacagtgtaaaagcattcctatttctccacatcctctccagcatctgttgttttgactttttaataattgccatgctgactggtgtgagatggtatatcattgtggttttaatttgcatttctctaatgatcagtgatgttgaactttttttcatatgtttgtcagatgcataaatgtcttcttttgagaagtgtctattcatgtcctttgcccaaaaagtagacattcttgttttaagtcttccctttgtgcttcatcttacagtgtctctaccccagaagtttagtgttggcattgattattcattgcttgctagcttggttttgaggggtagaagtgttcatattttccattctcggtgatcgttttcctacctaagcagtaagggacctctaaggatctggacccagttcctttttctgtctttctcccatagatacaagggttttttgttttggtttgttttttattccattcaccacagctgcactgggtcttcccttgtgccctgaaggcaatagggtttgctgccctttctttcctcagcagcctacagcttttgcaatggagaaaggacagaagcacctaaggctaagcttttttcctttcctgcagtgactactatacatctcctcaaggcctccagaaggaggccttttctggtctcctcccctgtttccaatctcttatgaacaatgaagtctataaagaagtctcctaacaggtgcaaatttctcatgtatattgatcccaaaggttctgtactcatggtacg

SEQ ID NO: 94874 - DNA, 1048 bp, Homo sapiens
tcaccttttccttcatctcccttgcccttacccagtttcacctcctcatcttgatgctgttaattggctggctaattcataagagtttccccaaaccaaagagaagacagataaaagaatttagtcacagagtatttatgattttcagatataacgtcaatcaaatagaacatgattttaaatatcttctgggcccaaaccctgagctgagtatagtgacaattcagaagaaattagttctacccctgggtaatttaaaagttaattattcttagaggattattcattcattcacttattcaccatatgtttgctaaacatctgctatgtcccaggcacttgagatacatcaatgaacaaaacaggctgagattcctgacctcatggagtttacagtttagggtagacgagtaaggaaatagataaataataagcataaataatagattctgtagttgtagttgtaaataagtgctgtagaaggaattagaaagcagaaaaagggaaagggattggagagtatggggatttgggaggacaggttgcagtgttaaatactgtagtcagagtaggcctgattgaggtgagagatgacagtgccttgagggagatgaaataggcggatatctgtgagaatagctttgcaggcagtgggagagccatggtttatcatttaaaatttactggcatttttaaatttagtaactaacgtagagtcctttagtcttatttttcacaagtagaaactcgttgtaccaactgaatgtcaatcctggcttaaagtgactttcatttgaggcagatttttgacagaagccattgtgtttgttttacagattggaaaagtaagtctcagaaaagaaatgggaactaactagggtgtgggagaaggatgaagagaagttgactaatggctacaaatacatggtttgatagaagaaataagacctagcgttcaacagatcagtagagtgactatggtttacagtaatctattgtgcgtttcaaaatagctagagagaataacttgaatgtttctagcacacag

SEQ ID NO: 94875 - DNA, 1133 bp, Homo sapiens
gcagaaccctttttttttcccacagagactcttgtgaatgtactttgggaaatagtgctgttccattcctccccctccttactcacctcatttttcctgctttgtctgttccttctttggttttctaactaggtaacattgtacagtgaagtgatcttgcctttttaagatgctttgagatgggaatacctgtcagaaagagtcccctgttgtgatataattatatccagtaccacaaaaatggccaaagcttccctaacagtgtaaattttaaggcaacttattaggtagcacgtggtatccatttgcacataggcaacttttctaaaaaatattttgagttaatatgctatcatttaccgatttgaatcttcattgggaattcaggttatttcttatttttgctcttgcaggtgactctataataaacattttcatacagtattaactatgaatataactataatagaatgaaaattgaatagatatttgcatttgtggattgtctctctcttcatccttttatgggatgctctagagccttcactggggagctccctgcctgtctccctctgataatacctggcttctttcaggtctggaaagaggtgtcttgcttattgttagaaccataaattgttgcactaaacttgtcctgttgtcataaagagtgtagctttaaagcaaatggtaacatgaccctgctttgctcaatttcaggcaacttgaattttctaactcctaatctccgcctgcttctctttgcttcgtaatcttcgtaaatgctcccatcactgttggagttagatcttaacgacgtctccctatttcaaatgtagtatatcctgaactccatgtgttactttttctcctcttctacctgctttaccatttttctcttttcctcctccccattaaaggcatcactactcaatcagtcactcatactaagaaacctgagatttatttgaaacaaatttacaagaaaaaaacaaacaaccccatcaaaaagtgggtgaaggatatgaacagacacttctcaaaagaagacatttatgcagccaaaagacacatgaaaaaatgctcactatcactggccatcagagaaatgcaaatcaaaaccacaatgagat

SEQ ID NO: 94876 - DNA, 1132 bp, Homo sapiens
gattttagggagaaaagggataattgcaggaataatgcccttgagtatacacaaaggagtggaattaagtgcagaaatgatgggacaaggattgttcattcattgtaagagaagaagggggggaaatatgggttcagttgcaagagtgctgatagatttgttggtaataaaattgtgtaaactaaactagttatctaatgttgatgttgatcagatgtgaggttttacacatgctaaacattaaatgaaaaggcttaaattttatttcagttatagttacgctattcatgattatacataatggataaagttccaaaagggcagaaccaaggaaatactaaatcattgtcattgcatgctataatcaatacattctctgtaggaaaaattacaatatggggaaatgtatatttgcctgggactcagttgtctcaagagctattgaaattatgtcttgaaactttatccatcttatttgtcctacttaaaaaataaaaattaaaatgctgtcttcaaactctcacatgtatcccactaactaacctcttagtggttctacccatcttgcaaatgaatacctttagtttcacgtgaataacagtggaatggatgtggttcatatctattcctacccctggagacctaacccagttgacatgcatatgacagcatgtgtgtcattgtcatatccactccttccagataaggcatttaagttaaatattcttttagatcattataatgtggtggaaaacaaattgtgttacctaaacataaattcctgtatacactttgcacacacagtgcctagaaaacctaagagattagtttataatgaaaagcttggaatccaagtaggaaaagttcctcaaagaacaagatcaggaacaaacatgctaagaaataaagtagacagcaaaaggaaaaaaaggcaactatggagacattgccaatattaaatacaaagtaagcaagtaaaggccaaggggggcagattacgtgagctcccgagttcaagaccagcctgggcaacatagtgagaccccgtctccataaaaaatacacaaaattagccaactactcaactaacccagctactccagaggctgaggtaagagggtcaggaggcaga

SEQ ID NO: 94877 - DNA, 1647 bp, Homo sapiens
acttacttttgcgttgctaactaggacctgtgattggaagttaaaggaaagcagcctcaatataagagaaaaaacttgacaatagctggagttctcaaaaattggaacaggctatatttcctttaactagaggcatgccagcagaaaacagattcacatttacaaggggtgttttatattgggtagcaaattatactaagtgattcccaaggtctcttccaaagctaaaagtctgtgattttgtaaataggcaaacccaaactccttccagccttcaactctatgattctaaaagatctgtactttttaaacaaacttttctttaaaattataagtatgagaatagataaggcatgttgttttagaactttccaatctggctggacttctcagtctctgatatgatcacgagttccctggagggggtgctccaaccatgttcttctacttgttccgcctccctccaagcacatctgccacttttttttccttcttcttagtgatttttgtatttctttgaatctttacaggtggtagcaattttgcttcatctgacttgatggtatgaaattctaaatagttgggggtcatttggagtgattacttttttctttgtattctgggagcctgcaagagtatgtttggaactgcttagtttatagaccttgtcaacataaactctttattcatctttccatgtctctgaagaacagacagagggaggtcatgatatcacagatgtcatgcaacagacacatgcagagtaaccagaattatagttgttctaaactgggtaaatttagtaactttcatatttctaaatcaatggtttagagaaaagaaattctgtagattatcaccagatagaaaataagacctcggttttggtggatagtctctttaataggaattctgttggaatcccctcttgcatgtgggaatatcttccccataccatcccttcaaggattaagttaccaagaattgcggctattacaaggaaattgccaaaatcttctctgttctcttatcaaattatctggatggctcatttttactcccccactccccttgccggagtcttctggagcctgtgttttatatgatattcttttccgttacactttcagggtgtttgaaatcctgtctagattattggccatggggcaggaaaagggaatctttgaacttgatctgtgtggtgacatattttaaatcagttgcttacaacttcacagaggttttgctaatgacactctgctcataattgttgcctcgcacaatcaaaactggatacgacttctgttatcctacaggctggatacaaagaatggatttttagaagtaggttacgtattttcttaatgccctcatcaacctcacctcaccctgtgatatcgctggaagttcaacagtctccatggaccatagcatcccccttggatatacacatagttcaatttcccttcatatagctacatttctataatatataattaaattgactagtgactgcttattatcatatataaaccttattatatataaacatgaagagggagctcaatcactgctacattttctttctttctctcttcctttttctctctctctctctgtctctttctctcttttctttctttcaac

SEQ ID NO: 94878 - DNA, 2352 bp, Homo sapiens
cattatcatgagaacagcgtggggaaaactgcccccatgattcaattacctccacctggccccacccttgacacgtggggatcattacaattcaaagtgagatcttggtggggacatagagccaaaccatatcaaggtatatgttgttggtgtttttgtttttgtttgaggcagaatttcgctcgtcacctaggctggagtgcaatggcatgatcttggctcactgcagcctctgcctcccaggttcaaacaattctcctgcctcagtctcccgagtagctgggattataggcacctgccatcacgcctggctaattttttgtatttttgtagagacggggtttcaccatgctggccaggctagtctcaaattcctgacctgaggtgatctgcccgcctcggtctcccaaagtgctgagattacaggcatgagccactgcgcctggcctcaaggtatatgtttatagtaagagaagaaagttgggaatagtgtcaatgttgagtatagaaagaagagactctgggtcccatgaatgtctttaacattgttctcattcagtggatggaatgacagtcttcagctctataggcaggaaagatcaacatggtttagttgagcatacagtatatgacatctgctctgtattggttcattatccttttttatacacttaggtgtagtcccattccttaattcagaaaaaggaagtaaaatgtcctatgccattgaaacatccaccaactctgtggtattctaagcaaactcctttcagaatcttcatagcattctgcctgcctgtctggctggctggctggctggctggctgtcagaatgctttactatagtgcctgtagcagaagctgaaagagacaatttccctttgcaggagtggctgagaacagtgagactgtgcattgtctggatattctgctgtgtggataaagtatttatttactttatttagtggctgtggctgtgactttatcatcttctagctcattttccagcataacaggataagaccactcctgccattatgatttaccatgcagtaaacaatgagggcttttggattgcattttatagaattgctttattcaacctctccttccaacccctttgggaaagaatagacaattgatatttctcttttggatttctcagtggattcagcattcatagatttagtttctatttgttatttggcttgtaaaatttattgctttggggataagactggcttgtgtccagcataatagttttctgcttactagtctacacagtggcaggaggggaaggacaatgtggcttgccccaacgctttctcagttgttcttttcatattctactccaaacatagcagtgccccactctcaaacaaacaaggattaaatatcacttttggccatggagcgtagtctcatcccagcaacctgtcttcagtcatggaaagttcaggtacgtcatagtcaaagtactgcacagctgaccatacagaaacatgcagaccaggtctgacactggctactatcctattgttaacctcctctggcaggctgttatccagagcagctcactctgggagccggttaatttcatagggcaagtttagtccattgacaagaaaggaattcctggatctcttgtattgtgagactttcatggcatttccaatctgatatcaaaaattagttctaattctaaattgtcccccccaactttggatcttgctttcagaggaaaatcttcagtgttaggtatggctatattctgtttatccattttctctaatatcagtgtggcttgtttattgtctacatgtttgtcttattgttagttgctgaatttctttaaggcagaccttattctctttttttgtgaatttgaattctcaatgccttttgtcttattgatttgcagtaagtatatattgaattaattccatatgtattttgaaggatgaatgcaaaacttgtgggaggtgggaaagatagacaatgaaagctcctaagccaaatctcaaccagtatgaaaccagaatgctgttttgctcagtgctcttgaacttctattgccccagacgtaatatacgttgcttcattctgcatctttgctctatacattttatattcaaaattgattaaaaggtgagtatagcttataagccaaggcttccccaccccaccacaactcagaccaatatttaatgctttgaatttcttcagagattagatgagattgggtgcattcagggtggtatggctgtagactgaatgtctttattatttgtaagctgtctttaatatcagggatactattgcctcaataagtttgagacttcagctgggagg

SEQ ID NO: 94879 - DNA, 1003 bp, Homo sapiens
ataaactttatcatagttattttacatatttttctcagtgttcccactgctttcgcatagtagacccgtccccacccccattactgctaaagtggcctttctgaaagacaaattaaattgatcattcctctgcttaaaactcttcaaggtctatcacctccaaggaaggtcctaagcccttgcatataagtaccttctcaggccagcccctgcctgcctttccagtttaattttctaccattctcttggtatatccacatcaaatgtgttgctgttccccaagcatgacatagcaaagtttcttccctttaggcacttatttctctggcaaacatttactcaacttttaagattcaggtcagatgcttcctcccctgtgaacctttccctgactctcccagggagggactggcccaccctctatacttcttgaacaccttacacaaagatttgttgcagcatatcatactatactgtgtttatttgcctgtatgtctcctctactaggctgtgaactatttaagatagagattgttgtcttactcgtttttatatccttatctcagttcctggcacacaacaactgttcaattaatgtttgctaaatgaatgaatgaatgaacaaacaaataagtaaacatctttttaaaaaatagaattaaaaggaagtcaaataatttccaacgagatagatgcttagaaattaaagtattttacattgatatatgtcctgctttttgaactaattgttaaggggcctttgtgtatttcagcagggagttcaataccttgaaatgtatcttgaccatggataccttgatttgagaaagtcctctagtttgagtggaagtgattattgccattatagtttatcacacctagatttcaaagtaggtcaggtgaaaagatgtaagggcagtgtgactgtaactgggagagcagagtctaaaatctcaccttttactttctccttaatgcagtgtctcagaaaatgaacactttt

SEQ ID NO: 94880 - DNA, 1057 bp, Homo sapiens
aagcaagttgaggtaaggtcccatactactcataattgtttcaagaggaatagatggccaagaataaaatatgttattggattctatacttatttttggtctctttaagtcaacttacaaaatgaacaagttaatactatgagcagttgagtcatttatatcatttgaaaaaaataattaaaacaaaaatcagcttagctctgtgaaatgggaaatgagatttccatttcacttcacacagtgtgagtgatgagttaagcagaaagcattcctgagaaaaagctttcaggccactagtttgagattttaagtaggaaaatgggtcagttggtcctagagagcatttttacaaaacttgtcattctggcacacgatacatgtaaaaaaatcacatctgaaatgactcctctcattgatgttaactgggctctttcagcctaaatgataagagaaagagcccttgtctggagaaaacacctacctctctgagaacttccttttctatacctactcactgagagagtagcaggaattcagcttttgtcccaggtcccttccatgcagaatcaaacttccactattgtgatcacttaagaatttaatacaaggctgcttttgagccagttttgtttctggcagtgatgcagtcatcgggtatctagaaactcctgtaagagtctacccccaaagtggaggcccttctcccatgagccagaatcacctcactaaaatggccattgacactgaacccctcaaaacactccagaggtcaggtgttgtgtctctccttcccttttccaccctcctctatctccatctctcttccttctccatcccccactccctacttccttcatagctactaagtgctctctcaggaatgtttgaaggtgaggatttaggtctgggcaacctgttacaaatatgaattgttaccatgaactccgagtggcctctcagctttgctgacagaaatttactccatgtagaccaccaccccccaaaaaaaattaagcaggtaaggtcatttggagttgaaacaagcatgtagtcggtg

SEQ ID NO: 94881 - DNA, 1019 bp, Homo sapiens
tagtagtgtcctgaatctagttgaatttaatatatcctgaggcttaccctggaacaaacccagagccatgagttttttccacactcatcccacagctttaatcccctagaggtgagcttgtatccttgagccttgtggatattaaatacaaattgcctcagtattcaaaattgtggcaatttacttgcaaagtcgatacatttcttttgtatgtctcctttaaccctttatgtacctagggtctcacatgaggccctaaatcaaatatgcactaggaacagtactagatattttcataaatcctattttttatctgaagaataatcttgtgaggtagcaattattatgccacctacagagatgagaaacagatgccaaagtgttctcaatcaatatcatacagccattaagtagcaaattctaaatttgagtcccagtgttttgacttcaagttcaatgttctttttaggaccccagaggatatcaatatatatttggctgattgttgattgagaaggaacaattctcttaaaatgaaaagcagacattaaatgacttctttgccttggtttgacactcaccacctcctttgaatgtcagacaagggaaaagatcagtttaattgttgccatttataagtgggaaagttgagaccaaatatgctgtattgaaggcctcagctttcaattgtccctctacatttctcattaaggaaagttgagatgcatggaggttgtcaccttgttgaaggtcaaatggagtgtttctgcaatgaatagagtctgatgtgatgactagtctcatatgatccctgtgatgactcaggatttctgggtgaatgcagagtgaggaagagaaggagatttcattcctgctcactcaaaatgacaaattctgcactgaaagtaaatttttcctatctgaagcagatagtgtattttttgagtttaatgtagcaaacattttttgaatgcttagtatgggctgtgacttatgagaagaacgtataaacaggccaa

SEQ ID NO: 94882 - DNA, 1076 bp, Homo sapiens
ctgaattcctagcactgtaccaaccatcagttaactggtttttggcaatgtcctgtgattatatgaggtattatcatcaggggaacctccctgaaggatatacagacactctgtactacttctgcaactacttgtgagcctatttcagaacagaaattatattttaaaaaagcaggaactatgcaacagagggacagctactcaattttatggattgatatagaccagtagttatcaaacctggtagatcttcagattcacttaatgggatttataaggtacacacacacacacacacacacacacacacacacacacacttacttctggatcctcctgccaccactatcaccaccatcagatacctatggaatcaggatctctagaaattaagccaaggaatctgtgttttcagaaaattgctcaaggttagaaaacactattacagagcctggttactgagtcaggggtaagaatggagaaaactggtgagtctgttctgtattaacctttgattgtgattctcaaatctgttccattcttgttagtgtgaaaatccttttcaatcctggcaatagattaaccatccgttttagacttttgcactgttaagcgttttaactttttctttaaatttttatgaatatttcaatgggaagttcttgagcctgtgtcattagctactaatcatttaaaccagaagcaggacaatagtattcttgtagatgtaccttgtctttacctcattcacatgtgaattgtgacttgattccagcttttctcagtgagagactgcagacttctactttatttgatcagtttttcacactgatgtggcatcaacataaatatggtttccctcacaattagctaatgagtggaaaacaaccaaggcacaccacagtgaaaacatcagttaggaaaattacatccaaaacctaaaagaggctgtcactgaagttttgtttatgaaagctggaaaagctctcccttctcagccgctgagattcctgatgtattgtttttctactgaaagttatccaaagatgttttcagacattaactgatgaaagcca

SEQ ID NO: 94883 - DNA, 1110 bp, Homo sapiens
cttgatcccaaagctgggtaagctttaggctgcctctgcctatcacagagtactctctctgtagagtgacaaatgcattctcttccttcacagcttggctcaaatgtcatcttctttataaatccttcacaacctcctcaggcagatttaattgtcccccctttgggtccctgacattttgtatgccccttcattacaaatgctcttgtaattacttgtttaatcatctgctttcaccattagcttctgagttcactaagggcaggaaccctgttttatttatccatgaattccccatccctcagtgggtaacatagttcctatttcataattgcttgctgaatgtattgacttaatattgttttgtggcattttagaagtaaatggacctagattgaatttctgaataatatttgtactcaaactcccacaaatagattcatcattttcctcctactccttgctcttcattatcagtttactttaatcttattaaatgaattgcagaggtcacagccctggaaaaggcaaaaccaaatatgggtaaagtgggtaaagggaacttaggtggcagttcctggaacctagtacatgaggactttctctagtgagagctactgaaggagggctatcaaggaagtgctccatgcagctagatggttcatgccagagaggaacataactcctcatctgataaatcactcttactgcttcaacaggagatgactttttagactaaatacttgctcatattcttccagttctggtgagcacctgggttcaagtgtcaggtattgcctttttattcctatggcagccatttttcttaatgtaaatacatgcttggagttcatccagaatttcatccttgttatgtctctataagacatatatagcctacttaactgagctccaaaattatgccagaataacaatccaaactctacaaccaattcaagatgctaaaatctttctaggagtgacttctaaagtagtctacaaataatccttgctgaagtagtgaggagttttgagtaagactgattaatgtgttgaaaatataacatagccttattctgtatgctagaaatataattatcttcatcagtt

SEQ ID NO: 94884 - DNA, 2738 bp, Homo sapiens
tcatatagtaagtgtatgtttaactttataagaaactatcaaactgctttccaaagtggctttgccattttgtagtcctaccagcaatatatgaaaattgcagttgctctgcacattgctagtattgtcagtatttttttcaatttgggctattctgatatatgtatagacatatgtcgcggaggttttcatctgtattaacctaatgactaattatgctgagaatctgtttttgtgcttatttggtgtttaatatatttgttcaaatattttattcagtttcttttcttctgtgtttaatgtatttgtatctcttcttttgtgtttaatgtatttgttcaaatattttattcagttttaaaaataattcttattattgagtagtgaaagttttttatatgttctggtcaacaggccatttccttaacagtatctttcaaaaagcttaagttttttcttctgattttagtgacatacagttataatgtcacttttttcatgtctcacgctctgtgtgtcctatcttaagaaatctttgcctaatccaaggtcacaaaggtctgtttcctatgttttcatctaggagttcatactgttaggttttacacttaggtctatgatgatatgttttgggttaatttttcaatatgatatgaagtatggccaaggttcatatttttatatggcatgtacagttgttccagcaccatttgttaaaaagactatgctttctccattgatgcaccttgatacctttcttagaaatcaattcaccacatatgtgttggtctccttctgcattctctatattatgttcaattgacctgtgtgtctgtccttttgctatgtcttgatcttacttttatattgtcttgaaatcaagcagttcaagtcctccaactttttcttctttttcaaagttgttttgtttattctaagccatatatgtgtaaatatatatgaacaaatatgtaaaactgtatatgtaaatatataaaaatatatatgtaaatatatataaatatatatatcttacaatcaatttgtcaatttcttaagaaaaaaaagcttggctgggagtggtggctcacgcctgtaatcccaacactttgggaggctgaggtggatggatcacgaggtcaggagatcgagaccatcctggccaacatggtgaaaccctatctctactaaaagtacaaaaattagccggttgtggtggcatgtgcctgttgtcccagctactcaggaggctgaggcaggggaaatcgctggaaccagggagtcggaggttgtagtgggctgagatcgcaccactgcacttcagcctgggcgacagagcgagacttcgtctcaaaaaaaaaaaagcttgctgatattttcattaggattatgttgaattcagagatcaatttggggaaaattgacattttgacaattttagtcttctaatccacgaacacagttctgtgttcatttatttgaattctctctttagtgctttgtagttttcagcaaatcttgtgcatattttgtgagatttattccaaagtgttccatattcattataagtggcattgttattttaatgttgatgtttaattgttcattccaaatatatagaaatatacaattggtttttgtacgttgatgttgaatctcaaatttgctaaactcacttatcagatgtagtggttttttatacatttttggggagtttataggtggacaattacagcatctgtgaataaaaacagttttagattctttctttccagtctagataccttttgttttttggtcttattgcactaggaactccagtacaaggttaaataggtgctgagagcaggtatcattgccttgtttgtgatcttagtgggtgggggagtattcagtcttttaccattaaatatgatgatgggtataagtttttttatgccctttgtccgttaagcaagtttcttttatttcttaatttgattaaagtttttattataaatggtccatcagttttacagaccatcatttaattagccattatttctaaacttatatgttatttctaatgttttgtttttatatttaaattattatatattcatatctaaagccttttaatctgaattactccttaatgtaaattatttatataagagttgtaagcattcttatgggttttaaatctattgctgattcttaatgaagggttataccaatttaaattatttcgggaagtataatcatgcatcagttttatagaagcccaaccaacataggttcttatgattttaaggtttttttttttttattaacttcataggtattagagtgtacctttatttcatattccactttttattgctacacataaagtagtattaaatggcccatgaatctcagtaaggatatgaatttactagtgtccatattttcaattcttagtgccctattctctgatggaaggtattttgcaatctgatttgatgcatatctaatttaaccttactgtattacaatcaaataagagaagcagaactaacacttctaaaaagttacctactagaggtgggtggattacttgaggtcaggagtttgagaactgcctggacaacatggtgaaacccagtttctactaatagtacaaaattggccgggcatgtggtatgcacctgtagtcccagctactcgagagcctgaggcaggagaattgcttgaacccaggaggcggagattgcagt

SEQ ID NO: 94885 - DNA, 2266 bp, Homo sapiens
aatttgaaagtttttgagacaatcacatctttatgagaagggacaggagagtcattaccagtgaatttccctgggagtagcagtggtatcagaggctgttgtagtggtactggttgaatgaaaactgctaggttttgaacacgaatctcatcttcgttaactgcactgtgtagctttctactagaggacccttacaggccaaggaaaagccttggaacccatttctaactactgcattctactggtagccggtggagggcagcagagagtgacaccaaaggtccagattgaggcaactaggacatagttcagtttaccaagaaagaagcacccttagctataaaagaattaactacctgggagccacagttacaagcatggatccctggggagcaaggaccaaaaggagaatccagaaccctaatctgagtgttaaaacacttccttctagggcaagtccaggaaccaggaatgggtaaaggtatgaggtaggaccgattatgaaaggggaactggacagcatcagtgaaggtagaaaaccgaaaggacagtctaaagtgtcaagtcccaagaggacaagtgaagatagaacaggaatcaggttgcttctggacctctttgagggttcttccctcgagagtttgtgtctggaaatgctagctcatgaatgagaggcaccgtgggccatgtcagattaaactattataaatggcaggtatgtgaagacaagcagaagatgaaagcccttcggtttgtagcagttctgacaaccttttgggtagcaggagataaaacaccaggcttgaatgaaagaaagaagtacagtgggaggcaagccagaatgaatgagttaaagaggcaaaagtacagttagggagatcgatcctctgaggcaatggtacccaaggaaggagccttgtgtagggtacatatctgcaaagggaacaatttcagacacaaccagctatatctatgggattctcatctcttaaatattaatagctgcttcttgattcgccaggatcatttctttcttggtctgttgattttaagggtaaaataacttgttgagaatgtggagagagtgagagagatgatgcgacattctcagatgcggttaagggattgttgtacatgaaatgaaattcaacgtgggcatgaagcctttctggataacatttgtgtgaaaggacagcctgttttcctagaatagcttttgatattcccttttcatgttttatactgtaacactggctaagaatatacagtagaaaagaaaaatgggctctgatgactagttatataggcaagatcccagtcagtccagagacttaagatctgttcccagtaggttagcagagagttgtgtttggagtctctttatgctgaatgctcagcatttttccaaatccccttaggtatgaagaaagaaaattctgcctcggtctattaagttctagtgtctccctcttttcttcaacccctcaagcatcagaaaaatagggcttctgtaaccacaaatttcaggaaccctctactgggtggcagggcagcatggtgattaggtttggaactgagcagaccttacgttactagctgtgacatttggcaaattatttgacctctctgaggtgtcatttcctagactattaaatgaaaattttaaatagcttataaggcttataatgttggagtaagcattaaataagacaatataattatgttgcttatgattcggtaagcatttaattaatgaagtagctattattgttacttctactattgctgtcactgtactgtagtggcctacttaagaagtctgcctgcatggaaatggtatccagatgaaagtcaggcaacctggagtgatcacttaactcttgctgattcattacatgacaggatacttgtgtctttggctaatggctcatactggggctcctgccatttctcagaaagtaaggaattgagaatgctaactattaaatgttctgagctcttctgagcatagaggtaactgaaaagaaattaagccttgagttaatttttcatgtttaatcaaattacaagtcatttgctttatttttctctattaagaagtactgtttatgaaaatattactatagtagattaaaaatagttatcaaagatgaaaaataagccctaactaaatgttctatcttaacacaattgtttattttgtggggctctttctggtctttttttttatatgcttatttgtaatgcctatgtccttttatattta

SEQ ID NO: 94886 - DNA, 1093 bp, Homo sapiens
aagtgcgtttggaaattctacctcagggcattttttgatttaacaaatagttcatatttggcagaccaggacctcatgaaataatatccaaacagagcagaaatctttggtatagaaaatcatgtaagatgtcatttaagtaccaggaaaagaccaaaatttaatgggccaagtggcatcatagcatgtttggaaggccattttctattcattatcctcttactatgaaaatcattttagcacctcaggggtctaacttcctaaaagtccccatggaattgtttcaggagattaggaatcaggggagagggagtattcgtagtagatgataaccacactaagaccatggtagtcttatgagaggtagactcctttttatttttattttaatggggaaggggtccttgaagggaaggtggaagggctgatgaactccactgtggttttcctcagagagcaagcacacccacttagtagcaatgtaagccccaaacagttggttctttgcacaattgtatgtggtagaaaggtaacttctggacctctttgagggttgttccctggagagtttgtgtgtctggaaatgctagctcatgaatgacaggcactatcataaatggcagatatgtgaagacaagcagcagttgaaggtccttcagtttggagcagttctgacaaccttttgggtagcaggagataaaataccaggcttttgacatatttccccatgaaaaattaatgaggtttggccttctgactcatgggcctcccaggctaagagtttccattgttgctttcaacccatattgccacagtctaaccaaacgctggcttgcccagcactttccgcttcatccttggaggcagagccctactacttagaggttccaccagagtatattatgttggtgcaaaagtaattgcggttttgccattgaaactaatggcaaaaaccacaattacttttgcaccatcctaatagaacaccctttccattaggtgttagaatgaccttttacagaactgtcagtctaatctttgacaactctcctacccctctgcttcagtagaacaatgactgtaacttttgatg

SEQ ID NO: 94887 - DNA, 1109 bp, Homo sapiens
ataaccattaaactgttaacaggaagccatttcccacatgtacttaatactggtcctgaacttgctggaatataacttgggttttgggagatgaactgtagttttcccaagtgtttactgaacagctactgagcagttgatgaagagaagtgtgggggtaggtagcaggggaaagtttttatgaaaagatattcttggtagagaaaatacagttgtttgcaaaccttccagttgggaagtgtacggaccagtaatgttgtcagtagagatactctccaagcgctcagttgaaatattctgttgaccttcagattgtatgtgatgtcaaataatggcctataaaactgggagccatctataccatagtcagaagtcaaataacttgataactcatggaattagaagatgtcattactatgactgttgtggataataggattagaaggaatgagttaagccataaagtacattatcttggaagagattatctgtaccactgatagagtagcatgtatatatgaggagggcagatgagaaatgaaatccagggtcatcatatcccaaaggcatttggtggttagaagaagatatagtattatcagaccacctgcacagatctctttgcagatgcagagccactgcatgtcctgcagaccatatttcagatcttgacatagccacagcaagcacttggatatagatatagacctccctaatcaggaaatgttcattcatttattcaacactgtgcctagcccaggtagtagatacaatgcagtgaataaaacaggcccttacctttatggagcttgcattcttgtataacattctcttctccccatagtctctcttcaggtggcctgatgctccaagggatgtcactttatctagatttttttttttttgtattggtgccatagttccgttttaggaaacagctatagagttttctggcaagatctctagggcaaggccaactctgctgtacgcagatacacagactttcagagaagacattttagctgtggtttagcagcccaacataaataagatggtcaacttcaaaagatggtcctttggtttttggaagcagagttttctggtcgttt

SEQ ID NO: 94888 - DNA, 1862 bp, Homo sapiens
agtaggattgcagtatgacttctcatgcaaaaatcaaatatatgtgtatatttccatcaaaatccaaatttgggctaatgctgaattttgagaagggtagcttaaaggctcatttaattagctatcttgaagtggcatgtaaacaccaagtgctgacctttaatggttcataattgagaattataataaaggaccaatagtagattctcagtacttactttattctttaaacagtggcatggcttatatttttcttccatggttaaacattaagtagataatgctgatcaacactagaatttgattttcatttcagtttattttatcaaagtctaagtgcctactgtgtacaaatcacaacctaagtgttgtgggaatacacaaatgaatatagtataatctgtgccctctgggagcaaaggaatgaccagcaaattcctgattctaatataaggcacactgtgataagtactacattgaaggatgaagccattatgtatgtttcagttagttcggtgacttttgctacaaaataaattaccccatgttggcttaaaacaagaactacttatgaagctcaaatttctacagattctcaatttagggtaggttcagctgggcttactcatactttgaggtctgctgctagattggctagggactggttggtctagcatgctttagctaggactactcttttctactctctgtgatctctcatctacaaacaacctaacctagatttatttacatggcatcttggcagagttccaagaaagcaataggaaatgcgcaaactccttgaagcctacacttggagctagcaaaccatcagttctaccacattcttgtggctgaagctagtcacaagtccagtccaaattcaagaaacagggacataaactccaatttacactctagttgagctataagacatatataaacaatgcaaatgaagagcaagtttgtacctataagtgcaaaaagaggccgtgaagtagagaggcctatgtgtgcctgagtagctataaaatatttcatggaaaaggtgaagagtcacactgaaagtcaagcattgttaagggaagaaaatatttaaagcatagaaaatagcagatttaagttttgtttaaaaacatgggtgttttgtatgttagtttaattaggatctagactgtcttttctcttttaagtattaggctgatctctttaaatccccatttcttaatttctcatattattttttgttgtttgtcttcctcatatacctcttcttttatgtcctatctattctcctcattaaatgctactatttacaggctaccctgaaacatttcacatttctgttattcacattcattgtaagtgcttcttaacttccttggataatagtttgcattatttatttaatctatgatagtttaccttccatgtttggtcaaaggcttgagggtgttccttttcttagtaacatcccattattttctgttccttggccccaacagttatttacttctgatatatacttaagtttttataaagctgaatgaactaggttgtgacattgcatcagatctcgcgaatggagcttgctggcaacgactctcatacagcaagccatcccaagatatctagggcttttttttagattgagctgttgatattccctctaggccagttattccccaatttctaacctacaatctaaagtaaacacagtgcatttccattgcagacacttaacctgccttgaaaacaactataggacctaagagaaatagttgcatgtttcttttgagatgttgaacaaatactgctgctattccttttagaggtatagaggtaaaacccgtacctttggt

SEQ ID NO: 94889 - DNA, 3060 bp, Homo sapiens
gggaagggagggggattggcgttggcgattcacattggagacctaagggttttccctgtatttgaggccacctcttttatttagctatctgggatccttagctatggtggagttaaaggttttgtgggtagaagggaaggcgggggtgggaggagggacccagagtagagggactcaagtgaccctcaagtgatgcgacccattgtgctgttgttggcttttgcagacatagcaaaaagataactcagcaaaccaatgctaagcaggtgcactgatgcagagactgcctgcttggagaagttttgtttgtagataatgtggccagcagcatttaagaaaaatgaaatattttacattctggattgttggttggtttgttgactttttcctgctgccttaagtcttcccgcctcctcctttgtagaatgttgtcagccatgggtaactaagtggtcgtttttgaagatgattagaaaaggcctggaccagtgatgctaaccctattaaagtaatgtgatgaaagctgatacttgggcatacctgagctttgggaagcccattagatagaaccagtcattctataggactgtttcttgcagattgaactgggtgggttggtaggccttggtggtttggatatagggaacagggtgagcgggggcctagtgagggagagagttaactgggctctgtcatctcttcactcttaagatggatggggttggatagaaagtgtgaatgaagtaagaatcaatgactgatgcttctttcctattaaaacaatcttttttttttttgtctgtttaaaaaagggggctggctttgtttctcctgccataatgatgcagtgcctcttgttttcagagctgacatagtttgcattctgaaaacttttagatgcccagggtatttcttaaagctgcaggaccccttgtatcggtagttccttaccactgtgattcgattcatgctggaacagcttttaacccataatggatggcctgagctacccctgaatccttgtagatgggtggtgtaatctgtcatctgatgacaattctggaaagcactgttaagcagaaaacagaaaattgtgtgtctatagacctgccaaagtttgaggattcaggctgtgtcccagaaacgtgtgtcaacttaatatttgggggccaaggtgggggttctcttgcacattaaggattcaccagcatgatcacaaatggaacaatctcttcccacacttaagaccttccacctgtagatgtagcaactcaactgagacattcaggttttaatcccttgactgatgtaagattgaaagattgggattttggtttagggtttgtggagtgatatctgttggattccctcccaccctcctgtttcttctcagaaacttctaacccaattggcttttcttggaaagtagaaattgaatttcactggagaaacacaaccaaggaaaaatgtttccattctcactattcatgagaaggaagcatggttattctctctagtttgtggttttggtccctatggaaaggaactagtgttcacagaaaatgttaactaagggagtaagttagaaagcacagccaaaataaggtggatcagagtcgggaatgaatgtgcaagtacttgtaagctctcagtgagcactgtcatttatgcttaagttcctattttctattacatttctcttcccagagttgcttttataatgttttaatagtagaaacccaaaatccaaaattttactggtaatgaaagagtatgcctctttctattcaatctgtcacctaatttctacttatacctgtctctactgaagcagcttaaagggataatttttctaacctagattgtttgaaaaacttctttagttcttggtctgtagctcattattagtagacctcaggtaggttgagtgattgtgaaaaaaatgatctctccacatcctgtgctgaaaatatttctctctttgcagttcatcttagtcattctcagaacttatttaaagtgagcatcattttaaaaggaggcttctgaactacagagatgttcaaactctaaacagaaaacctgggactatgttttcttaaatatttaggcttctaaaatagaatttttgaattttgggattggaggctaatctcaaaaattatgtagtataacatttggctttatacttcaatccctgtacagcaccccagactttgattgaatatcttccttgaggaggttccactaccctaaagcagcaagttccaccttaggacaatatgattactagaaagatatttcttaagttggctaaaatctgtctcacttaaccttaaccctttaaatctttatatttttatttgggcatccccaattagaggaatgggcttcctactcatcatttattgagcttcctatttgctagtatttgagtctttttcacatgtcacattgttacctatttctcatctagtccttacagggttgattttatggaccaaaactgaatactactctcactggtcggtgtttttctttcagacatattattaagaacacagatttttttcattacataatgacctatctaaacctataactgacctcctgagtcagttatctagcttaactgaattaatcattatgtccttaataagccaaagataaaaatattaaataggaagcccaagttaaggtaaattatagggtacacactcatgtaagaagaggatctgcccccagtgcagtgcagcaaggatattcttttaccgtcattgagtgtatttgccttgctgtcttatatgtgtattctgagcatgcttccacagtgtcttgctttagagagtttcagacagtatcaatttaatgaataattttaaagtattcaaaatgtggaatatttgatgaaatcatctttgtatagactataataacggtcatttaaaagttatagaatttcattaggaagcaaattagatgcggatagcaaaactattcatccttttttacttgtcctattctcacttttctacttcttaagagaaagagagaaatgac

SEQ ID NO: 94890 - DNA, 1055 bp, Homo sapiens
catgaatctgccattgtaattttatagagaatagtttccttgtcctaaaaaatcatctgttttgcacctattcatccctccctttcttctgtcccctagcaagctctgatcctttactgtctccataattttcccttatctagaatgtcatatagttggaatcatacaatatgtagcttttttgattggcttctgtcatttagtaatatgcattttaggttcttttgtgttttttcatagcttgatagcccatttctttttagtactaaataatattcccttgtctggaaataacaccatttatttatccattcacctactaaaggacatcttggttgcttccagatttgggaattataaatacagctgctctaaacatccattcccagattcctatgtggacataagttttcaactcatttgagtaataccaagcaatgcagttactgggctgatgataagagtatgtctaggagaaataggaagtaccaggaatcagttttcccacctaggcaataattacactggcagaatttgtctgatataactgttttggaactgcagagtctataaaaagcttgcaacttccaggggaaggcttggacattaaagtgtggttaacttttatcaattttatttcttagtacactaatagctacccatcctcaaccccagtcccatggcaggcaattgtgcgtgtgttcccaaagcagcttacccacagcttatgggagccagagtgggcaaaaatgaccttgtcctccaaatattgggtaattgtcttctgattgttgaatgctgcttctaatcacagaggttcagatggagatgggcgaccattcttttttgttttcccaggattgttgtttgctcctgctcctctggctaaaatgatgtcaggagatttaaagggcttgtgcttttttttccccctacttctcttcatttttttttctttttccccatttgggagccaaacattaaagactaggacattcaaaagcaactgcataattggagaaaattagaaactaaccgtagaggtccagagaaag

SEQ ID NO: 94891 - DNA, 1051 bp, Homo sapiens
tttataaagaaaagaggtttatttggctcatggttctgcaagctgtacaagaagcatggtgccagcatctcattttggtgagggcctcagtaagcttctactcatggtagatagagaagggggagccagcatgtcacatggcaagagaaccagcaagagaagtgggggaggagccacagtcttttaaacaaccagctctcacatgaactcattactgtggggagggcaccaagccatttataagggctctgctcccatgacccaaacacctcccactaggcctcaccttcagcattgagaatcatgtttcaacgtgagatttggaggggacaaataaacaaacagaaatatacaaataagtatacatatcaggagggaagtctcaatcctcttttccctatcattacctgctaactaattccaaacattctactttctcttttgtttggcaactcattccctaataataatctgtcttaattagagtatgtttatttgcaactgtcttagtccgtttgtcctgctataacaaaatgcttgggactaggtaatttataaataatagaaatttatttcctatagttctggaggctggaagtttaagatcaaggcattgtcgggtttagtgtctggtgagggcctgaaaactgcttccaagatggcaacttattgctgcatcctctggagggttcaaatgctgtgatctcacaaggtagaaggggtagaagggcaaaaagggcctagctagtttcctccattccttttataagattaccaatcccattcatgatggctgagcccttatgccctaatcacctcctaaaaactttacctcttaatcctgttgcactgaagattaaatttcaccatgaattttagagtggacactaacattcaaacaatacagcaaggagcaaaaatctattcaaaccagttcaagaataaagaagggcttattttaaatatacgcatttcatagagtctaagaaaaaggtaaacagcagattagttaggacaaggatcttgtctgccccacccagtcctatctcct

SEQ ID NO: 94892 - DNA, 1052 bp, Homo sapiens
atgaaggccagaggacaacagaatgaaatgtataaaattccaaaagagaacaaaactgccaatgcacacttcagtactcagcaaaaatatatttcaaaaaatgttgaggtagccactaccggccacagtatagtagctagtaccagacttgatctcaaccataaacatctagaatactgtacaaaataaatgaaacaactgtttttaaataccatacagcagggagtgcaggaaagtgatccatgagagaagaccaacaaatgaagtgtaaacccagcaatctcctagaagtactttgtaacactgcagtgcaagaaagggtgaacccaggcaaagcatagcaatactggtaagaagacaacgactggagtttggggacgaaataactgaaatttgctaggaagcagtttggaaatgaaaaagagttttgggaagaataaccttgcattgagattcttttgaggctttggctgaatactaagctattaatgtatagggcgaaaagtccatgaggtcagacaaacaatcaaacaaacaaaccatcaaattgtgagggcacagaagctaagcacaattgccagaactcagatgaagagatgggggtggggatgttcaaattacaacctgtaagaaggtgaaggccccactgaactgaagcatacagcagagacagcaatgagaggctagtcatgggtctaaagcagcattagtcctggacctaatagtatagttttgggcctctacataaaagataattctgatctctgcataaaagtgcataccagtaaactttaaaatttcacactgatccgggagtaacttaattgtttgcaataacaaagcccaaccctccttaaggaaatttaacaaagtactgatattcaacagtaacattcacaatatccagtattcaataaaaaatttgctagatatgccaagaaacaggaaaatgtgatccataacatggaagaaaatcagtccatataaacatccaaacatgacagaagtgacagaattagaaggcaaatgctttaaaaatgcttatatgctca

SEQ ID NO: 94893 - DNA, 1050 bp, Homo sapiens
gatataaattatttaagagtatcctctcaaactgagtgaaatatttacatttcatgttctcttctctacaacgtgattaactcagtggatttctaggtgtatgaaagttgattgttagtctagttcatattaaaattttatgttaaattttactataatcagttttcaagaaatgtggaatatttaattctatctgggacacccatataaaatttccttttaaatttcccttaacctatggacaatacttctcaacatgatgggaatattttataataaggtatctattattcattgagccccaattatgtgccatacactgtacagggctgtatattatattatctcatttgttgcaaacagtctctattaggttggtgacgttatctgcatttcactactgaggaagatcagtctaaccaagattaaataactgtcccaaaggtcacataactaaaagtgtgaagatttgaccctaagttaatatgaacccaaatctttgctatttctctccatatcacttcctttttagtcctatcttgtttttactaccatttcccataatatggatgtgttggttcatgcaccattctcccatattgaggttaattaaagagcttattaagttcttgtaaagcatatcttaaatgatttccctcagagaagcctaaggttttaaatattctgaaatgaagcatttgttattggcagaaaataatgaccaaagcacctacaggatactttagctcaaaaaagcaaaaaagaaactagggctaatgaggtgtttgggaggagaaatgctcttatttagggtattgaccagttagggactgagtaataagttgtatgtggaagttaaaagagactggctggcagacagtcaggcgtctaccattgtattttgtaaactttctcctatggctgtggtgtgttttttccaagcccacttaattttttatgaggtttgtaaaggtcttgaataaacaattgagattatagaggttttcctggaagctttagttaatattttaatactcttgctttgtcaca

SEQ ID NO: 94894 - DNA, 1028 bp, Homo sapiens
aaaatccaatatgtagctgttatgtaattctggccttatgtcctcctgagatctcagcaaaatcagcctaagagctcctctggcttgtttcctgttcctttctagcaccaagagatttccttttttttgaagctcagatgtgttactaaaagtattattatatttaattgatagtgtctatttttgtttgtttatttgttttttgaggcagggtctcactctgtcacccaggctggagtgcagtggcacaatcacagctcactgcagccttgacctcttcgagctcaagagaccctcccacacctccacctcctaagtatctgggaccacaggcgtgcaccaccatacccagctaatttttgtatttttagtagagacagggtttcactatgttgctcaggctggtcttgaactcttgagctcaggctatccaccggccttggcctcccaaagtactggggctataggaatgagtcactgtgcctcacctgtaatttctatgttttatctcagctcagtcggccatgtaccagagctaaaattccttgactactagaattctctcccaatggttatttttttttcttagtagtgttacctatatgtgtataaagtaggtataaatgttatacatatagttcttatatatctataaatcaaaaacaaatttataacttaaatataaatatttacaaccaatataagtaaaattaaaattagcttcataagatcagtgttgttttaccaaagctaaattgctgtactcaacatgaatatagtaatatcttttaacatgtggtgtgtgatttttcagtatttctaccatattcatctatttaaccattgtaagactgttttcatactgtttggtaagctgatttgactttcacctgataaaattgcataaaggcctgtgtatagccttttgcttgtggcagcaatgttgcttacttgatactaacctaagtgttaacacagacacaaattgagatactgaaatcacatagtagttttcagttataactaca

SEQ ID NO: 94895 - DNA, 1160 bp, Homo sapiens
attacattaggaggtgaggccttgggaggtgatagattatgatggtagagcctcgcaaatgggattagtatacttataaaagagacttcagagagctgccttgttccttgtggccatgtgaggatacggggatacaggaagaagactccttttttatttcgcactaggaaataggccttcatcagacaccgaatctgctgataccttgatgttggacttccaagcctccagaactgtgagaattcttttgtttataagctaccagtctatgggattttgttacattattctgaatggactaagatagctcctgtcatttttaggcattcttctactagtgagtctttttctctgaaacactgtgaaactgtgagaaatctccttgcttttcaaagattttggcttaaacccttattttcctcagccgtttagctttagaattcagtaaatatcttgagggtaaaactagtcctcaaacctctaactgtggcactctagtctgttggaagcagcaaagattccaagtttttttcgccccctagtagttagtctctgcctggttttaagattctcagtctgttgcccttgtctacgttcctcaaatgcccacaaggaaagctgcagattttcacctcacctttaaaaggttttgtcctctctgcagttttattccctttagtcttcattgcttcacagcacctgatgccttttaatatgttttttctacatgttttacttcctctcctagttgttcctagtgggagcatttatctgcagaaaattatgtcattttgtctagctttatcctgataccaaagccagacaaaaagagcacacacaaaaaaactatgagttaatctcacaattatggataaaagtaaaataaataaaattttagcaagtcaattcccagtgttttaagaaagtaattttgtactagtgtgtaggatttattccagaaatgcaaggatggtttgatattttaaaaaaatatgttaatataatttatcatattactaggtgagggagatacagtttcttgatgtattctagaaagacattttattacatccaggctacattcttgatttaaaaacaaagtttactaaattccaagcagtataatattttaataacaaaataaagaacatctatttgaa

SEQ ID NO: 94896 - DNA, 1224 bp, Homo sapiens
ataagattttcctcactctcttacaaaagagaatgaaagtgtttattaatttactccataataaatattgcttgtgtatctactgtgtaatcatctggtagattcttggggagagacagaaaaagtactttgtccctggacttaaagtttatgatttacagagaagacacccactatactggaataatacattagatgtattcaatctctcatttattgaacaagttttaatacagtgtctactacaaattaggaaaagtttcaggcatgaacaaaaaagtgagtctcctcactttacagagcttatattttaatgaattagtggatgataaacaaacaaaaaaatctaatgtaatggcaagtagtgataagaactagggaaaaaaaaataaatgaccaaaaagaagtgagaaattaaatcatttggatttctgatggatatgcattcctgtcaaaggggacagcacagtggtaggtatggatgtgttcaagaaatagtaagggggtcagtctggcaatgatgtatctatcactaatggtatggacgataagagatgaagtattcaggagttaaattatttctggccttgtaggccatcataaatactgtacattgtattctgaaatgagatgtgatgtcattagaagattgagttgtggggggtaatgatctgagttatcatttaatgtgatactggtttttatgtggaaataaatatattgtaatttaataaaaggggaagaagaaagtctaattgggaggtagttgcaatactccaggcaagagatagtggtcacttggactagagtggtagaggtagaagtggtaagaaatatttttgaaggtacagatagcaggtcttagtactagattgggtgtgtgtattaagagaaagacaggagtcaaagatagttccaaaacttttgaacagaacactggatgaatactgtttactgagatggggaacacttagagaaaaatgcatttggaaagcagaaatacgatcaagacttccatttttgatacattaagcttggtatgtttaattcatagctatatagaggtattaaattggcaggacaaaatcatagctagagataaaaatttagagttcaccagtgtaaagatgatatttgatggcacaggatggactttcttctgggatttgagtatacatagaggaaagatgtgaggattgagcaccaggggacttcaacattgac

SEQ ID NO: 94897 - DNA, 1086 bp, Homo sapiens
gggtccagttgattgcaggcccagaatcttatattttagtctaatgtacacaatcatgcagcacttcagagctgccatattatgcttatgctaaaaggcactggcagagttatttagatgagtccataattggaaggtacaggacgtagtattagtttcatttaggctgtgtgatctaaagaaaatcacttcattttcatttctgttataataaaatggaagttataattatgtccctttaactacttttccaagtttttgggaaaacagtgtaggaaaatgaatcatgaaggtctttagaatccttaattctatacagacaataatagttattcttctttatcttcctcttctagtaatttatagaagacaactttttttttaaccagtactgtctttttaatgatctgttctatgtaagaaaagggaaatagtgttgacaacagaatatttaatcctcacaataactctgtgaagtagacattattattgacattttacagataaagaaatagggttataaaagataagaaaatttcacaagatcagtaagtaataataataaagtaagtcattaattccctggttactttcactttgatgcccatgttctttcttccacaaactgatgtagtttattaacatattgtaatctctcctaacatctctgttcatcatgcctaattttgaaacgtcttgttgccattttaatgattcctgttcttttggtgatcatttatttgtttagttcatttggcaatgttttagttggaaggcatcatgctaaaccgtagcaatttctgttcttagtctaatcttttttaaacagaagaaaacatacctttagaatacagtgataagtgttcccataatatgggggaatacaaaatgttttggaatgctaggacgtattagtccattttcatactgctataaagaactgcccgaggctgggtaatttataaaggaaagaggtttaatttactcacagttcagcatggcttgggaggcctcaggaaacttataatcatggtggaaggcaaaggggaagcaaagaacttcttcacagggcagcaagaaggagaa

SEQ ID NO: 94898 - DNA, 1101 bp, Homo sapiens
atcaaacaagaaattcaagattttgagaaccctaattcagataaataatagcaacaacaagaaacaaacaaaaatatttaaagacatcatattcaaactggtgaaaatgaaaggtaaagagaatgtttagaaggcattcccaaaaataaaaattacatgatagtataatgataagaattataatagacttcttttctgaaactatgcaagccagagaaaatggagtgacatccttaaagtactcaaagaaataaagaaaaaaaaacagccagaattctatagacagaaaaacaattttcaaaaatgaaggcaaactatttttttttcagccaacaaaagctaggagagtttattatagtactttttctgacttacaataagtattatttgctgctgctattattattttattattattaccacgaataccactggcaccgtttgtttgccgaaataattctgctacctgctatgactgactcttaatgcttctttttcagctcaactgaagttgatgacatgattcggaaatcaacaaacctgttgctaaccaggactctgagcaactctctgcagaatgtaattaaaaggaagaatattgggcttactgaggtaaacctgctcctaatgaaggcagccgagccagtatgtgaacagatgtcctaagctctgggccttatgtctgaattcgttaaaactttctacatgctcttcctgataggcttctaatggtgaaagtgcaaaatgaaatctcttgttcttttctttggtcacctttgaaaaatttatttatttttttctaaaaaagtcgtttttctctttgttttcactagcttaactggttttcctttctgaagttgttagaatacatttctgttacctggcattgattatacacaaatatttttgtttgtagaatatattgagcatcaggttccaatcaagtgaatggcagttcatgtacaacgtagaatatgaaatcacattttgcttgcatcagttattgatacctaggataatgcaatcatagttcttggttagtgtcagactcagcctttatttttaagatatctcatatgtatgaaaggtaaattactcttt

SEQ ID NO: 94899 - DNA, 1037 bp, Homo sapiens
aatataatagggactgggaaatgttcattttgggttgtggcatatatattaagattggagttcatcagaaaaatatttgtgattaacccaccttccctctgttcccctcccctacccccccactttgtctatccttcccttccctttgtctatccttccatttatagaaacatacttgattctgacaactacagtcctataccagtaacaagtgaagagatgtacaaaaaggtggtaggacaattcccatttcaagatatagaactggaaaaggtaaggaatactttaaaataaatttctctggttgttttggcatcctcttaaaagctttcattggatcagtttgattgaaagcattacctttaactcaatgggttagaactctaaaacaatttcaaaggattcttttttctttttctttttttcactttaatcacctttctgacgatgaaggattctttttggggaagaccagaatttcctgatttgggaatcagcagatggctttggatcctattacctctgaagtgtttggaggattgctgcggatgttctaattcagtttacactttgaaatacttgtttttattaaaatttaaagacattttttccccacaacataaaatttacactttgtggtgtacaattctgctgattttgacaatgtattgagttatgtatccattaccacaatgttgataccaaatagctctattataaaaaaaaaattatttaatgatgcccctttgtaatacccctcccttaacccagccccaggacagcagaaacctgggctctgtgcatctacttttgcctttttcagaatgccatataaatggaattgtgtagtatataacttcttgagacttacttctttgatataacataatgcttttgagattcgtccaaattgttgcatgtatcattgttcattcatttttattgctgagtatgtaacacaatttgtttatctctttccatgatgaaggacatttgaattattgttttatttaaatttatgtctttttaatatcaga

SEQ ID NO: 94900 - DNA, 1502 bp, Homo sapiens
ttagagccctttctctaagggcctttattactatctctctgctaatgattatgattctcttaagctatagacgcaaatatgtcagttcccaaacacttggcacttggaagtcatcaattaaatatgcccagtacagaagtcatcattattaatcttcccaaatatagtcaattctcattattcgtgatagttatgttctataaagtcactggaaacactgagtgagcgaatactgagccattgcttttaggagaaatacaggtttagtttcctgtgagcttctggtcacattttcatcaaccaatgaatgcataaccttgatttatgagtgtttctgcttaaggacatgttatttaatatatcttgttgattcattaacattgaactcatagcgaacagcactatactcatgcctgagaggagttttatctaccatgttggttttcactgtaaggcacatcacagttttcttgtgccttctttcaaaggcacatattgtttcttgagcttaggaacactagacagcacgttggtactatggttgggggccattttaaacagcaaaatcatcaacaaaaagtgcaaaaatgtaaaaaatgtggcactggatagactatgaaaatgacacccgtttacaatatgaaaactaaaataagaaggcagagcattgccttgtttaaaccttagctaggaacatgtgcattaggcaactcaaatttttcacccctctgcacatgtctgttgaatgactatgaaagaactatgagtattgcttttgggtttacaaataaattttagcaagtaggcaaattcacaaatacagaatctgtgaataatgatgtactgtttattccatctacttatgttccctctctcacagatgaaaccactgtcaaaccagttacccaggttagaaactttgtatcagccttctttccttcctattctttatcacccatatccaattaatttccagcttaaacctcctaaatacgtctcagattctgactgatcttttcaattttaatttttccctttctttactctctgcagtacaacttccaaaatatctaaaactcttatggtcgctacagtacaaataccttaacataatttatgaagctttcctgcctcatctcttgtcagccctgtactttacacctcaagttccagccatggagaacttctttcagattcttaggatatgtgatgcctttttttccattcagcctctttgtctcctccaggaacacttttttccctttctctctttctggcttattcttctgactcattcgtcaattagaagtataaacatcatttttcgaagaagctttcgttgacacttcccccacccaccacacacacacacacacacacacacacacacacacaccctactttaatccataggattctgtagttcattttaatataattgcttgtttgtcagtcttccatagtctataaattcagtaagtacaggtactgttctcagtgtg

SEQ ID NO: 94901 - DNA, 1047 bp, Homo sapiens
cttttactctacagaagactctgctgagggtaaaagatacagtggagtgggagaaaatatttgcaaatcatatatccaggaaatgagtccttatgtatctagaatatataaatactttgaagaactcatcagtaaaacaaataaacaaaaaacaaaagaaacaatgcaagtaggaaaatgagcaaaagacatgaagaaacaattcaccgaggcagatatactgatagcatataagcacatgagaagatactcaacatccttagttgttagaggaattaaaattaaagtcactacactgctataagaatagtgacatcaaatgctcgtgaggttgctggtaagaatataaaatagtataatgtaaaatggcatagtcactctggaaaacaatttggcaatttcttgaaaaattaagcaacaacttccatatgaccttgcagttgcactcctaggcatttgtcccagagaaataaaaataaatgatatgaaaataagtagatttcaggcagtaaactacacaggagtgtttataatagcttcatttataatagccccaaactggaaaacaacctagatgttctttaacaggtgaattgttaaatacctgtggtacattgatataatagaatactacacagcaatataaaggaaagaactattgatatatgtaacaaactggatgaatctctagagatttatgctgagtgaaataagctaatcaaaagaggttacatactcctttccgtactcctaaaaacttaactgtatgttttaaaataacttaaaaagtgtaactggattttttgcaactcaatgaataaatgcttgaaaggatggataccccattaatttcatttttgtaacattcttaaaatgacaaaattatatgttacatagaaatgaatatggaaatgatatagaaattgagaagaggttagtggttcttagcagtgaattaggaagtagagatggagagcagtcgatatggctataaaaagacaacttgaggatccttgtagtctggaaatgtgcgtcttgattttatca

SEQ ID NO: 94902 - DNA, 1034 bp, Homo sapiens
tatttattaagataaatacttttttgtctgatacgtatgttttgaaattcatgcatgttgttgcatttatcagtattttcccttttgatcctggggtgatatttcattttataaatattgaagaacattgggctgtttccgctttggagcttatagcaaatcaagctgctatggcattcttttttatttttatttttattttttttgagaaggagtctcgctcttgtcacccaggctggagtgcaatggcacaatcttggctcactgcaacctccacctcctgggttcaagcgattctcctgcctcagccctcccgagtagctgggattacaggagtctgccaccacacctggctaatttttgtatttttagtagagacagggtttcaccatgttggccaggcttgtcttgaactcctgacctcgtgatctaaccaccttggcctcccaaagtgctgggattacaggtgtgagtcaccgtgcctggcctgctatggcattcttacacaagtcttttaaatggacctagatactcttctgtcttgggaaattacctactcgctatcattttgttgaggatttctagatttccactgaagtcagataaaataccctgcatattttaacactttgaaacttaaggagattttcttaatggtctagcatacagtataatttggtaaatgttcagtatgcgcttgaaaagaatgtatattttacagttgttaagagtgttctataaatgacattttgatttgccggtactttctgatttggtgctgacagtatgtagagaaaatatttcagacaattgtattataaatggaggaggatagagatgtaaagggaagtaaggtttctactcttccctggaactggtaaaatggaaacaccagtatcctatggtaaattatgtctatataatgtaatatctacattaaccacaaacaaatgtataaatagatacacttgaaaacactacaaataaataaaaatggaattctaaaaaatggttatttagggaacccataggaa

SEQ ID NO: 94903 - DNA, 1049 bp, Homo sapiens
ttcacttgatggtttagggaattgaggttcagtgagattaatttatctgctcagtggatcacagagatagtgactggcaaaacttggatcaaagcctgttcttatgagtcatattcgaaacctccttttactttatagtatcattgatgtttctgttacaggggcaaatactgtgcagttaagacaaagactttttctaaaatgatacattctgaaggtactattaaaaaataaatacattggcattatttttcattaattttggtatttgaagtgtgaggagaaagagctgtttatacaatatttaatgaaataatgttcttggtagtttctggaaaaactacactaaaaattatagtcatgccctaccttctaatattggcaagaacttggaaatcagatacaaggacctggagaaagacagtcatataaaccacattggttttggcttagaaaaatgactgggtagtgagagatgatgggcaaatatgtttaacagtttgcttcaaagattgggagtgttgccttatgagaaactctaataatgtgttagtgtcatcatacaaggtctctttgggcctgtcagaattctgcaactgtgatgtaaaatttcagccttgctgagacagttctctaaagttcatcctaaggatttatttttaatgagaaattatcctgtgctctctgctcttcaatgtagacctgacttgcttgggaaaatcaggaggggaggggcaggtgctaatactgctgttttgaaaggatcactgccagatttaagttaggcacagccaagctcattctggactagtcttagagtagatcatccttcactgaattgccaaatagccctcataatgccaggttattgtgcagtttgttccaggatcaggctgcatttgggtcctcccattcagaaaagagcaaaaatttcccctctttccaggcattgctttagtaccctcttaagggagaccttcagatatttgactatttcaaaataacttttgttgaaatttaggaataattttagggaaagttattatagg

SEQ ID NO: 94904 - DNA, 1046 bp, Homo sapiens
ggttgtaactgccagatttgtttgttcatttttaaattttcaaaatttcagaggtttttgtggcttgctcaagatgccctttattacctggtttaatatttgtcccaatagttttgaatgtcatgatggggatacataaataactacagccagagcctcatgatctaaacagtgaaagatcatataagggagaaaaggagtttctttttcttttatagatgattttggtcattcagcagcatataccaaaatgatcttcttaccagaaacaaataccatagctggagctcatatttatttacagttggttatagcaggtgtaatgaaggatttgctttttaaccaatgaatagaattgatttattttaaattgtgaaagtttgaaaaagctgagtttggaactgtaatagattctttactttttcagattcttataactcaaaccaacaatctagaggtgaaatgctagaaactccagaggtgaaactgaaaccagcaatctggaggtgaaatagtttaggggcttaatactggactagaagctcagtctcttcgcctgtccctattcaagactttctcagggaatgtaagcaagatccatctcattttttttttacttcagaatctttaactagagtttctgaaaatctagaattctgggttattctcaccacatagaaggagctgaataaataattgtgaaatgaatgaatgaatgcagtacttcagaaaagtactatgtgaaaaattaagagacctgtaaaaggctatgaagtatgctaagaagatgtagttattttgactgaggttagtatagtttgttgttctattaaatggagtgttaataactaaggttagagatttctcattgccctgaaattataagaaatgttgatatactttttacagtgtgaaaatgaggtcagctgggtgtggtggctcacacctgtaatctcagcactttaggaggccaaggcaggcagactgcttgagcccaggaatttgagaccagcctgggcaacatgacgaaacactgtaaataatag

SEQ ID NO: 94905 - DNA, 1058 bp, Homo sapiens
tgtgtctgatgaagacaaactattctgtcttgtagatatttatgaactttattgattcagtcggccctaatcctcaaacccagctcaatttggacaaagatctgcatgtactttaagctcctttatacaatgaaacatctttctgaatctgctttcagttcactcctcacccttctatcactggaagggtgtatgtacatcccataacaagtagcttaggtgtcattaggagagactagaggggcaaacctataaatgtatccataagcttagtttgtgagtcttgtatgtgatcttcttgtggtttcttgatctcagctatgtacatcatcttctcatgagcagtttaaattcctagatttaaaaaatgttgacaaaatgttcacctttgattaatgttcttttctgcgtatgtgttatactataataaaaagtttaaagatttctgacatcttgggtccagcgatagcaattaaaatacatggacatttttagcaatcccccagtattatatgaatcataagaacttcatttttattgaattctgctccattcactacaggagactataaaataccctaagatataagggaattgagaatatcattgtgcagtgaattcattattacaaaggctctatcaagtacagtatttctcttaaattttcttaatcaaggggcctctgagattttacaaaagctctgaatgctttcaccaggcaaaatgcacatatgtgcatgcatgtgacatttggcttaaaatttcagaggcttcgccaattccctgaatctcatccatagacccagaaagaatccctcctctaaagggaagtacagagttaggtttcaggtatctattgactacagacctttgccccagaatggctttccccaattccatttgagtatctccttgtataagcctcataagaactctctaccaccttgtctttttcttaaatttggaagccttgccaaaatctaaatctaaaagcatatttcaaagtgaccttatttctgtgtcataaatctttattccctgagcagccattatgcatg

SEQ ID NO: 94906 - DNA, 1056 bp, Homo sapiens
cccatccttgtgggctttgtgccagccttggtgtatatcttcacggtttattaattctatggctaaaacataagaactaggtctttggaaacctatttttttgtttgttttgtatttctcacttacaagctagaactggcctttataaaaagaaccaaacacttgagtagtaacaattaatgtagttgcttttaatagctttgtttgaatttttttgttataatcttgtgtttgcaggtacctggggcccaagatttggtggatttctctccagtttatcgatgtctacatatatattctgtcctggtgagtctttatctggctctgcctaataaagatgtccattgagttcaaaactttgctctctcaacttttggtagtttttctgtttattattaagagtgaaaaatgagaaaactcttgttgtttaaggactgttaattataaaaaacaattttgaatctcatgtttttatgtaatatgctatggctagtgacatttcttagtcatcaataaatcagtagcttatgactagaaatagtcatacatccagatttctgtttttagtttaataatgtagttatttaaataacaatattctgtctttacacattaaaatagtatttgtgaaaatgtttacttttttattcctaatgacaattactccttttgtcatataaagcatatggaaaagggaacctctctgtgtgggggatattatagatgttaataatattctaagaaatgatccctttctccattttggtagtacactcacatgcagacacatagatacacagaaagtaagtcaaaaattaaactctagcaaccaagacaaattggtgagagaagcctattatcgattttttttacagaaactttcagtgatgcttatatcaggttgtttttaatatgttcaagtatgtcttattgcccagtctcttatcaatttttatttgtgtatatatatatcttttttttttctttttgagacagagttttgctcttgttgcctaggctggagtgcaatggcatgatcttggctcaccacaacct

SEQ ID NO: 94907 - DNA, 1078 bp, Homo sapiens
tgtcagatttatctctctagattttggtgtctcttttgaagtatagaatcaacaggagggaattgttaatttaaatacaaatgccatgtaatagaaagccttctgggatgtcttgattattgttgtgctgtagtaattttgaagtaatgagatgtattaatttgctagggctaccataacaaaatgctggagaatgggtgatttaaacaaaaatctgttttctcacatttctggaggctggctgtccaagatcaaggttccaccagggttagtttctcctaaggcctctctccttggcttgcagatagttgccttctagccgtatcctcatacagtttttttctttgcttacatcctctttttataatgtgtgtcttcctctttttataaggataccagtcctattgaattagaaccccattcttatgatttcatttaattttaattacctctttaaaggcccagtctccaaatacagtcacattgggactaaggacttcaacataggaatttgcgggggagcacaattatagtcataacacaatttagtcataacacagggtgtttggaaagtatacaaaaaagatttattttagaatgtacaagcttttttctttgtggtattgggacaaattatgtaatttctctcagcatcccttttcttacctatgaaatagtgacaataattatgtcaaattgcttgtaaaaaaatagtggttgtgatatttgacccaaatttcaaaatattgattgtaaaactttctattgacagtaaggtaacagaaaatgaagatgattccttgataagttaaaggctactttagaagtttagagtttaaacttaaacttaaataaaggctgcctttagaagtttagagtttaaaccagaggttgcagattggcaaccgatgggccagaaacagcttgcatactggttgttggcctacacaatgcttaaaaatttttaaattagttgccaacttctgcaggtcaattagattcacataaaaatctagatttctaatttagttttttctaagcatggtagtaatagactggccttgagtagcagtgttgc

SEQ ID NO: 94908 - DNA, 1055 bp, Homo sapiens
agaaaactatttgtctatttatttgttttaaaatatcacatgaaacacacatgcatgtgttcacataaacacattcctacggacaataacatacaaataacttttttgagattatctgaagatggtctttttccttcattttaaatcacttttttgttttgttttcattttgtttgttcgaatctgatactggagtgggttgccaaagaaagatgtagtccagagccagtcctgataagtgtgaaaaaaccctggtttgaaactacagcttttttacagttaattttgtttggtgagacttgaagtggcatctttggattcttcctatcttgattttgacatttattttcatggttatcctttgggcttcagacactaaacaagggatcacaattccactttactgtattgttgatgggatgttattgtagctttggtttctcttagcctgcggagttgatatgtgactggtttattcaattgtatgatctcatggaacagaagtaagagttaggaggaatgaaaagagaaggtgggagagtcagtacaatggtataatgctagggcagtctggttgcttaatccatgggactctctgagaggacttttggaactgactatggaaggaacaaagcaaagaaacatttctgtcagctccttttcaagggttgttttacttccagattgtgctgcaggagtgctgagtacttcttgtggggttccacattctggtattagaaaagtcctagggcaggcagcaagaagtgtactgtaagtatccaagtatccaagtaacctgatgtcaggttatattatgtgatgcttccaggcctgttcagaactggttgctgatggtagctggaataagaggtgaaacagaggatttaagtggagcaccaatggtgtccattacagaaacataacacttgaaatgtatgtaaatgcaaaatttgttatacagtgatattagatgtcattaattattatgtatagaaatattgctgggtttcagatgtttccatagtagatagtgaaacaagattcctggccgggtg

SEQ ID NO: 94909 - DNA, 1988 bp, Homo sapiens
gcccacagcataagactgaatatatattaggtggctaacaaatatattaaaaaacaatataaaaacaaaaaaggggttttctcccatttaagtagattctggcatagtggggagggaaaacgctcttccttctcatacttggcagtgtttaatggtatgtagaaattatgccagttagataccaaaaagtgttaaaaggtcataattttgtctttgtcgttattatctacttgagaagacaaaactattacacatagaaactaacatgatggtatataaatagcaaataaacacaaacatcctaggcagttcctagtgaaggtgatcagaaaagggagcggctactgttgatggaatggtcaaggaaagctaaataagagaattcatagcatctcacagtttgaaaggactccaaaatcatcttgtctgataacccatttaaatctagagaagatacctctaaaaattagaacctaacatctttggatgaggctaaatcataaaatatttcttaatttagatttgagatctattatgccagctatttattattttcagatgaactccaaatacaattaggagttgctgaaatcttgttagacagtgttttttctcttcttgattaaatacagctagatgaatgctgaaagagcctttcacttctattgttgaatgtgagttcatctacaagaatgaattgaggattatctttatttcactttttcatattctttatgtgaaaaaataagttttgaaaattttttattatttttctgggtttggtgaggtttctgggagattgggaaaaacatagctttagattgcttgacttatgtatatagtcctgatgtggaaaaggaagggctgctgttaaattctgaatgagggtaaattcaaaaggaaggaatagattagtaggaacttcgaaggatagccagaacatataagtttagtctctttgaaaccatgtaaaagtaatagttttgtaaaaaaccacagtaaattcagttgaaaaccattgtttagtgtaaatgatgaccacatgtgaattggaggtgaggatattcctgaacataggtttgtaataatccgctgtggtggtcttgtagcactagaaggaaaataggaatatcctctgatatttatacaattcagtaaaagaccagcagtctcaagagaatacattacatttgggatcttggacaaaagtgtaggaatttggaggtaattggtatggcctggagcctttcttggcatatgctagcaaatttgggaggaaaaagttctctttccagatgtgttacttgtgagtttctcattatctgctggaatgaggacaataggggaaactagaaactgacgtttccttgtcctctttatggacaggaaagggggccaatccctctccagagtctggcaatcaattttgtgtgagagagaacagtaagcagtgaaagtagcagagctgttttgagggttctggacatgtgtttaactatgtaattataggcaaatatgaaaagactatttcagtttcatttagaatttgataaatgaataaatgttaaacagtactgaaagtcttttttaggtatatatatatatttttaggtatatatatacacatatacatatatattcatatatatatgtattttaaactctctaggctaggtgtggtggctcatgcctgtaatcccagcagtttgggaggctgatgtgggaggattacctgacgctaggagaccagcctgaacaatatagcgagattctgcctctgcaaacaaaaaacaaaacaaaacaacccaccccccccccaaaaaaaaacttctatatgttcttgcataaataaaggtttggaaagacaggttgctaggctgttatcattgattaggaggtagaagagtataaaatgctgtgtggactctataggcagacagtccatttcaaatctgaactttgttacttgaaatttatgtgaccttgta

SEQ ID NO: 94910 - DNA, 1063 bp, Homo sapiens
gcctggaggcattggaagtcttggcttcctacttggtttttggtggggtaatgatggggctgcagtattttagttgtacttagcgggaagaggaggaaaagtgcatctattctgtcttcttgaaatgaaagtctgttttttcattagcattttttacagctcttacaaaatgtaaaaaacatttttagcactaggattgtacaaatacaggctatagattggctttaagtcatgggctgtagtttctcaacatgaaagctgcctgtatcttactagtctcttcttgagtctttctcctacttgctcagtttgctgcaaccactgccttcttcttttcttctttctttttttaagctaccaatgttttgcctgtctttggaccttcacgcatgctctttttttttcccatctggatcgtttttattttcgttgtcctactctcctatttattttaaagattttaccttaaatatgtttccaaagggagctttcttgatcctcagcaatctaagtcagatccctgctctacttcataacactgttaacttttacttcatagtacatattgcaatatcttatgcaaaatttattagtgtgattacttgtttaaagtttatttttattctcagaaaactttaagttatttaatgggacagaccctgttttatttatcagcttatactgtcttagacacttcagcagtttgattaaggggaagtgaaccttatttgagtcagctccatggtactgttccaggtgttttacctgtatttacatatgtgcctatgtttgctaatttaatgtttagataaacctataaggcaaatattattctttctcttttacaggtgaacatgctgaagctctaggagctaaagtaatttattgaaggttggaaagttagaatggaccagagtccattttgttttaattacaccaggggttctctctgaggcatcaaaatcttgatggatatagggcatgggggaagtgatattaaaacagcagcagcagtagcaacaacaacaacaacagcatacattgtatgatcctgcctaatttc

SEQ ID NO: 94911 - DNA, 1062 bp, Homo sapiens
ctattgagaaataactaatgtcagaatctgagatgttaataatcaatatacagagagctatttttggtgtaacatgagcctagcaatgttgacttgaatgatcgatatgtatcctatataatcagcagaatgtaaggtttagctttctgtgcagctgcaggagacatatttaattaatactgaagcaattatcttgacaagtaaatcaaactcaattagatttcaattagaacactaacattttctcaaatactgcatggttgccagatggttacacatttttttggcctcctttctctttcaaaggttgacgttcctgctactgtgtttattaggtataattactcaggcttttttttttttcttatttgtggggaggagggtggaatttgaaatttaatacattatatgtcgtaattcttttacctggctctgtatggttttattttatagaaatttaggaaagtaaaaatattgactaatttgtaaaattaataaatttgaaactagagatcacagattatttagaaagagaattttagaaggcatttaattcttacccctaacagaggcaggccaaattattatactggatctgtgtatcattgtgtcatatatatatcttctctttcaatcgaatggatgtctaaatctttttaggctcagtaaaaaacgtaggtattccagccgaggtgggcggatcacaaggtcaggagatcgagaccaccctggataatgagaccaccctggataacacagtgaaaccccgtctctactaaaagtacaaaaaattagccaggcgtggtggcaggtgcctgtagtcccagctactcgggaggctgaggcaggagaatggcatgaacctgggaggcggagcttgcagtccagcctgggcgatagagggagactccatctcaaaaaacattccagtcacaaagtgttacttagtgctcactaaataagaaactattgtattaggatggtgtgaaagtaattgcagttttgctgttttaatggctgaaaactgcaattacttttgcaacaacctaataacatctttta

SEQ ID NO: 94912 - DNA, 1064 bp, Homo sapiens
ccaggcgttggatactggagtttctctatttttaggttcttattttgatttgttttgtgtttgactggagtgcatctttgaatacatgtactttttcaatacatttacattaaatggagtttatgtgaatggaattgttttggaaccaccgtaaatctgaagacttctttttctttttttccccttcttttacaggtaacaactttcttaaatatagaaatcttgtgccacatgtttttttctcttcagaatgtatcttcctccattgtcttcttgcatttatggtagaagtctgatgtctgcctgatttttctttttagtttgccctttaaaaaaatctataaatttaaagaattaaaaaaattcttgacagttttgaataagttagcatgcagttattaatagtatgtatgctttaatttttaaattgacctccatattccccatctattgaagtaagtaatcatagggagttttgcataaacttcttctagcattttaatagagtgattactaaaatctgtttacttgtttgaataattgattcagtaattctggacactgaatatgtgtctcacgtaagttggaaaaccatacttgttctcctaaggaagggtattagcagaagtatggttaatttgtgaaagacttgcacaggtaggatttagacttggttctatatgggctacaaattttcaaaagataaatatgtgtaaataatgagaatgagttaattatttattactatttatgcgtggtattacatgttttcaatcagtattcctgtctctttattggaaaatatttgacatagttcatgtagaataaagcccaagaaaacatgctcagtttttcgctttaattaacctataaaatcataaagcctactaacttcctgagagatttttgtggatggaacatttgtggcagtcttgatgtatgggtgataatagctgttgggcactgtatttttggactgaaaatttacaatagctctggcataaagttttatcatcaggaaaagaaagaaaagattcctcattctcttctctgtgctcagcatc

SEQ ID NO: 94913 - DNA, 2497 bp, Homo sapiens
tactttttcagagtctttaaatagctgctccaatacttctgtcatcattttataactatttagagaagtttcaatatacttacctcattttacctgaaattagactccattaaagaaagtttacaggaaatgagctaaatcacactctcttgtgtgtagaccaaataattacagaataaatgttctcttgatgttgccatagttataattgagaatattctctgataggataattaataatcaaatgcattggtggagacaaagttttgttaggagacattgaatgaggataatttttgtattctgcttctgagcaaaattctgatgacacaacaggtaattcttctttatctgtgccattagaaagtgttttatttctatactgttcttattaatttaggagaatagaaaagactaattttcctaaggctgagaaaggataatgctttcttaatactcttctacagatgtcactagaaatatgtacaataagtattttttgttcactccattcaagattgttaaattaccaatggctttatttttttttttccagctttttgatgaggtaaatcatggttttaaaacattaggatagtactccctatttagtagactgtattttaatagccagtcctttacactcactgtaaaaaaaaaaagaggattgatgtaaggagagagtaaggtggattagtacaacagacgatcataccagtttatgctgtgattccttattttagattttgtccatacttgtctccatgggatagaccttttgctgtttttggattgcttgacccttttgtaagctaaagattttaagagtctaacattacaaataccttaggttcattggcatatgcacaacaaatgtgaatcaaacataaaaatgattcttttaagaattgtatttattgatgtggtagtgaaatactatactgtttacaatacagagctaagtgggattttgggtatgctgagaagttgacagtttgtggttcctgaataaaatattgtctttgcaggataaaatagggaaagatgtgttcttgaaatgattatttataaattttttgaaatcttgttctggttccagcttaggagccattttccaacactgtggtcactgcaatagtgaaattttggatgcaaaaaaccccaatcaaaacaaacaacaacaacaaaaccctcatagaagcctgtctgcagttgtatagcaagatacagattccttatatagacttggggaaataaaatatagctgttaacacagttcttcaattttcttaagataaaataatgaggatttggaataaaaaattgtaggagttcagtgtaaagtgaatcatgagtagatggaaaggtttttgcctaacatagagcaagagattaggggtcttctttttttgaggtcagttgattcaaccaagagatcccatgagagttacttgcaagagatcccatgacagttatttgctagagatctcatgagagttatttgcttcttgtgtgactttatcttcttcagatgggagtataatatctcattttaggctgttttgtaaattaaaatgtagtcaaaagactgtattgttttcatattgtggatattccagtttattaattcattgtatgtttctacctacttccaaaaataatttgagatactgtctgggaaaagacagactataaatactggagttaaatgaacagtaatatggtaatgaaaatgatggtggataggaggtacgactaagcggaagaggaaataaataccaggaaactgatttaagaaatgtactatatttcgtgctttactctgaattttctgtaaaaagacatcatggtttgtataatttttatcattatctgataaaaacaagtgtgtctttttcatctggccattttaagagaatgcagaggatttttgtttatttgtttttatctaaaagtaactcctgattatggagtggggtccattataattatggtataaaataataaaactatatttgtgaaaaatgaaaatactaactctcaatagaagtatatacgcttactagaaagtgtttttgtagctctcttctctttctcagtttcttgtcaattagaatgataacattcaaatggccagttgtgtagggaaggcaagtggaagctctatgttgactctagtactatagtgtcagagtgattagttatatataatttatatttagagatgatcactgatagaggaattagttgatttgctcttccttggatccattataatatttgaaaaacttagacttcagccatgacactaagaacaattacaaattattttaacagaaagaaaaatgtttggtgcacttaacattaagaaaagtatttttggtccctgtaaattattgagctttttttggttgttacattgttaagttgattttatcctttttttttttttttttttttttttactagtttttagtttttttcccctagtttttat

SEQ ID NO: 94914 - DNA, 1136 bp, Homo sapiens
tatttataggccttgaaacacaaattggtaactgtgttacaaatgtttagcgagccacatttcatgacctgctttgcaagaaaaaattgaaagtgtgaacagctgttggtacattgcatttgcatttctgaaatttcaagtgaagataaaacattaacagctgtgatagattcctgcagttgacctagtgcctcaggatgtgcaatacattgatgttgtcaggctgtcagggtcctggtgagaactgtagagagagggagaatctgagagggaaaacatgtttgttattcttttaaatatttttttttaattaaatctagagagtcctactgcaatctagcaatcctctattgtcactaaaagagtctttgatttaggaattccagtggttgattgtccttagaccatgcatgtcttaaaaataatgaagtagttaacttcctcatggattgctcatctttttattttgtattttctgagttgtatgtcgttaagagacttcaattctgttctaaatgtgcttggattttctacatgtcttcatgttaggcactgttgagtactcttttatgaaatccaaagacttgaaggcagaattaaactttgttgatgaaattactttaagcaaacccacctttgatgatatttgtgaataaactgcattttttctctctcctaggagttaggaagtaaactgtcaaagaatgtagcactgtttgacttctaggcccactgaagctcaactcagagtgttttggacaggatccagatgaaacagaattaaaagtgtgaagagtagacttgaaggtgtttggtgtctgaagctgtagaggaaagagttggggagggggaggaaaggatcagtcttgactgttttgagcagatatttcttctaagtttgctgatacttattatacctttttcctttttttgtttttttttaaatataaaaataaagatagggtttcaccatgttgcccaggctggtcttgaactcctgggctcaagggatctgcctgccttggcctcctgaagtgctggattacagatgcgagccattgcacactgctgatacttactctttgctatcctacactcattcccccatctgtgtacaactacaggaaggaagttct

SEQ ID NO: 94915 - DNA, 1035 bp, Homo sapiens
cacacccgcttacatacaactctgataagtttatgccttcttaaaaccttcaatgttagctttaaggataaaattccaatttctttaatttaatatataaagtctatcatgatctagctgcaacatacccctttgctctcatctttcaacacacatccataaatatacccttcactcagacctcagagaattacttgtccaagccctaaaatagaatattctctttgcctggaatagaatttcacccttatttatctagccaactcatattcaccctcaaaatttatctcagtctgatgcaggtgccgctgtgagcacaccaaaactctatatgcatgcctccaatatggtatcatactataatcactagtctgttatgtttattaggttttaagtcttagatggcaagagtcttaaatgtcttttaaggctctgaatcccaacacaaaacctgatataataagggctttcaattactgttaagtgaatgaatctcttgacaaaaaagcaatagtttatagcagctcttagccacaccctgattagtcctaaaagtccagtatgtgtgtacacataggataatctattgggtaacagatgaaagcatttgtcaaatacagtggactatatacttgagccaactctatacttaagcaagtatataaaatattagctgtgtacgttttaatctttaaaaaaaaaaactagctctatgactcaagagttcagaaaaagtagatggcagtatagttggtaagaaaggggattcccctgaacacatattcatgaatttcctaatagacaatagccacaacaatagggtagtcttgatttattaaaaacaatataaatcactaaaaatgcttttgctgtcatttaaaatgacaactcttccactaaatcccttctctccactagccaagaaatagaaggaaggcctaattttagttcataaagttatttctaaccagaatctcttaaaaaaaaaaaaaaagaactaatacaatctctctctctctctctcagaaggcttta

SEQ ID NO: 94916 - DNA, 2110 bp, Homo sapiens
ttggtgccactgtcgtgagaagtcagtcaatggttgatgtattgtaagagctgctacttatatacaagttctgtcttgtaggctttgtcacatataaataaaccccttcaaaaaaatgttaagtgatttccataaaaaacatttattctgttctccttcttaagccaaattcttgttgtttatggcttcctgtacccaatagttcctgattgtctcaaaaagcaaaacatgtcctgcatggattaagctgctgaaatgccttttaggcattgtttatgagtctgcactctttattttcagagagaaagcgaatactttaatgtcttccatattccataaatctgtcccatgttacaattcaaggctgtgtgtgtttttgttagaaggtacttctggttgtacttagagtagaaaagctgcctaagaatgttagtgagtatttgggtggtagtggcagactcccctaaaggggatctagtactggttgaaagtactgttgttttttttggatcaaaaaaacagttaccataggtgctgttacagtcagtagaagtgtagtcactctgattgctttgcatcagtgactgtccttttcggctcatcctttgggaccaatcttccctctggacaaacttgctaatttaccacttttgacccccactgctaagtagcacacagaatacgcctgcctactgctctaagtagagggaaattgactttgcttgccacaaaatgagactatatctggagactgagcaaaaagtaatttgacttggagatcaaagtttactttttttttcttaacatttcattttgaaaaatttcaaacatacagaaaagttgggaaaattgtgtagtcaacaaccatatttacttaccacctagattctatcaatatgattaatctcttacaacttgctttattatatatccatctattatccatcaacccatcacatcttatttatgcattttaaagtgagtttgagacctaggtacacttcacctctaaacacttcaggatgcataatattagttagaggtcaatatttgattttttttcttttgaggtaaattttaaatacctcaaatctacgcaaatctgaagcgagtttttgacaaatgcttaacctaaacccctatcttgcctgcttaacctaaacccctatcttaatagttatagaacattaccatcatcccagacttctctcatttccctctccactcagtcctctccccttgcctccccatgggcaaccattgttctgattttttccactatagattagttttgcctattgtagaacttcatataaatggaatcatacagtatgtactcttttatataaagcttcttttactcagcatgataattttgagatgcctctatgttgttacatgtttcagtagttcatttcattaatgagctgtattctcttatatgaatttaacaattgattcattgtcctattgatggatacctgagatgtttcagtttggggctattatgaataaagctattatgaacatccttatacaaggtttttttgtggatatatgtttcatttctcttgggtaaatatacctagcagtggaattctggatcagaattttatgagatactgccaaacctttttgtaaagtagttctaccatattttgtttcctcaattgctgtacttccttgccagcattatttgttgtcagtcttttaaattttagttattctggtgggtgtgtagtgttatctcatggtggtcaacatttattttggtttagtctgggatatgaggaataagagatgaaagggatataagaataaattgcagtctggcacggtggctcatgcctttaatcccagcgctttgagaggccgaggcgggtagatcacttgaggtcaggcgttcaagaccagccaacatggtgaaaccccgtctgtactgaaaatacaaaaattagctgggtgtgctgatgggcgcctgtaatcccagctacttgggaggctgaggcaggagaattgcttgaacccgggaagcggaggttgcagtgagccaagattgcgccattgcactccagcctgggtgacagagcaatactctgtctcaaataaa

SEQ ID NO: 94917 - DNA, 1038 bp, Homo sapiens
tcatatccctttagttcttaccttcagtgcatgctgactgaaccttcagtttgctagcacctgcatctctttgccaaagggctttctctggaagccagaaatggggaattaataccacctcttctctcctcctgccccctgcccctgcccctgcccctgccccagtagtcctcagctcataactcatggaagctggtgtataaatacttcagcttccttgcccaccaggaaggaggatggtgtggaatacctctgaggcaggtattctatgccatttctgagttccccatgaaaataagttttagttgacctaacttgcttgataacatatcctttattgacttcttttcctgtctcacttcctcatgtctctacttatcctttctggggtcctctcctaagtaaatttcttggactcaaatccttgtttcagattctccttctgggggaacttaaaataagacagtagtcaagagcattgaaaagtctggaccctatttctgtacatgctcagcaattaatgtgggtttatagtggatccaagacataggatacttaatgtcaactcccatcgaagttattctcccattccctccctttaatactagggtgatctgggtggacagttaccttggtggggctgggagtgggtcctttgtcagtatcttttggtgattttttttggaggggctggtaaaattaccccaacaatgagcttctagaatttttcttgcatgccagcattttaagatgtctgtgtgtggtgggggagggaagattggggatatcagcatgcactatgtaagctctcatacttaatcccctgttttcagaatagtgtccttctcctcaattgtgatagctgtgccagtcaggagatgctttattttactgtacatagtatataaagaataaatctccaactttttgctgtggtgagagagggacagttgtttggcaagatgaagtgagaaaggtgatctcagggtctaacctcctcttaagcagactttcagcttaacccctttaagcttcatt

SEQ ID NO: 94918 - DNA, 1046 bp, Homo sapiens
agtgagccttagagcccttttcaatgcaaagatctaggctagccttcagaaatggttagtaaatgacacctaagataatttttttttattcttgttatgagagatgagttttacttgtggaagaggtacaatattcatatattttagaataggcattttaggaaagatcttaactctgtctatgtgggtgtctgtgtttgtgtttgggggtttgtatcctggagttagggagatcctgactttcatctctgctttagctatttgtttatttttggatacttatggagacacttcatctatgctttaataatttttctttttttgaaaaaagtatcaatgacaacttttctttggtttctctgttcaaaaaaaaaccttaaagaatactttcatatatttttaacttgtatttatgatgaagaaaacaagtgtttattcctaacatatgaggtttgttttaatcctcttgtctacgcagcccagttcacagttgcagtttcctgatgtacgtgaatttgctgatctgagttctttggcttttcatacgtggttgtcctattgtactgcaggagctttgtgcttttactaagtttactactagaaaagccttgctaaaattctagtgtactctcagctacttctcttatagctgtgtcttggtgactaaagagaattcttcttccatgtagccagagagattaacagatgtccgagctgaaccccaaagcatccagccgtctttcccgctttgaccctgtaacctctcccctggttggcagtgtgcctgtgttgacagttctcctggttcagccaaaggtgaaagataattgcttgtggagtagcggctgggatggtatgtgtttttgtagcaagcatccccacccccgtctccaggcaaagccttgaatctggtgcatatttcaaagcatgtgttaaactttatgtgatactgattaaaatggagggctccagggtgaattggcagagtcccacaactgcatctgccaaatgacatacagagaaaatgtcttgctacaaatggaagg

SEQ ID NO: 94919 - DNA, 1054 bp, Homo sapiens
gatcacatggacacaggaaggggaatatcacactctggggactgttgtggggtggtgggaggggggagggttagcatcgggagatatacctaatactagatgacgagttagtgggtgcagcgcaccagcatggcacatgtatacatatgtaactaacctgcacaatgtgcacatgtaccctaaaacttaaagtataattaaaaaaaaaaaaagaaatacaagtggcttgtcatgggagataattgccttctgtaccagtgagaggttaactggaagggaagtagaacattcgaaagcccttgtttttaaaaacagtttgcagtgctgatggttaagatatgttctggctatggcacaccaccatgaagaatgtggactttaaattacataggactcacttgcagaatactaggtgacaaagtagctctggggcaggtatttggaggagggaaacctgtaggtaagatagactccgggaagtagaattccttatgataatcatttattgacaatttcttgaggacatgaatctgaattgatttcatctttttgttcccacagaacctaggtgtactgccttgcttttcttttttgacatatgcatttagggacagagactctccatggatattttaagagttttaatattttcctgcctttcttaggtgtttactttgctgatgagacctatgactattatattcaactttgatatctctagatacaatttatctttgaaatcccaggtggaattttttctcttaggtacagcttttttttttttttttttgaagatggagtcttgctttgtcaccaggctggagtgcagtggtacgatctcggctcactgcatcctttgacttcctggttcaagtgattctcctgcctcagcctccagagtagctgggattacaggcacaacaaccatgcccagctaatttttgtatttttagtagagatggggtttcactatgttggccaggatggtcttgatctccttgacctcatgatccaccttcctcagcctcccaaaatgttgggattacaggcgtga

SEQ ID NO: 94920 - DNA, 1049 bp, Homo sapiens
gggggaacttggaacatatcttctgtggataagaggttggcgggctactgtagtgaattttaagttaagcagtcatatttttattttcaacaaatcttttaggttcttacattgcgtttgttgttgtcattttgtttttaacatagaagtagattgaagcatttagtggacatacatgtaggttctgccgtgtgaaatagagccatctttagagcagtagaaaacccctccattttatcctattccattttctgtgttgatcttcttcctgtgtgtttccaaaatgctgtgtatatcttattttggaacagtgactttagtttgaagtgatttaaaaaaaaaatcctcaaaaagttctgttaattgtcgactgttttctagttttccttttgaaatttatttctggatttcacttattatggaattgatttgtacaggagagaagatctgtatttcttattttgattagtttgctttaggctttgtgggactaaataacatttgtaatgtaatcattcttgtctaggctgatttctgtgtgagccttttaacaaggggaaggatttatttacttttacaattctaacttgcctttgccagattatatgggttatgtaactgatttaaggaaatgaactaattgcctataaaagatattgaaggctcctaggcattattccttgagtaaatggttttaaaagaactgacccttgggtaagattagttgtcatcatggtcctttcaaacctttgctttctgtggttaagtcttcactacagcaaaatttactctttaatgtatggtgtagaacatcttttgacttagatctggcacagtactattgactgagttcacatagaccatgtattcaccaccacgtaaaagtattgttgaagcctcttgtatgctagatattatgcaaaacatgcacagagtgtggtctctgtagtcaaagaagttggtctggtgttcctggatttactttcttttctcttttcttcttgattttgatatttgtatatttgtaccaatttttgcttcttactctt

SEQ ID NO: 94921 - DNA, 1413 bp, Homo sapiens
ctggatttgtgttaatgcacagtgaaaaccaattcaggctagacattttgcctaaccctaaagaaaactgagtgagctaaaggtgatcaattccttttgtaggcattatcctgcactgaaaactctggaacatctagagcatacctacctgcctcaagtaagccactatcgattctgcaaggtgatggtggacaacatccccaagcttcgagaagaaataaaagatgtttctatgtccgatctcaaagactttctggagagcatccgcaaacattcagacaaaattggagagactgccatgaagcaagtaggtcttgggtttatgataggttggccagtggctttatcagtattgagttaaacacaggtttctctttgccaagtgtctagtcattatcttatccaagtttcttatcattttagggaagtccttcatatttatggaaacatatgattaaaaatgttttcatttttttaacagagcaatggacaatttgctctgtagatgttcagtaaatattgatcagttgtgatggtttacattgaggttatgaagaaatttttctactgtttgtatacttcccttgactttgcatataatttgtagcttaagatattttaaagttctccttctagttaatgacctaaattgtactgcatgtgtctttggctgattatttactacgtaagcaagatagcatgttatatatgcatatttctgatattaataggtatcagtgaaaaaaggcctattaggaaatgctttgaattatgatcaaagaaaaggatttattaacagcttatatattaaaaaatatgttagcagtatatacatttgttaaaaaaatcttcattcctaagtcaccaaagtcacaaggaacatctaaatttctttttttaaattatgaatgaaaggtcagtaatgttttataatggcatttgctcacttgaaatttgtcacattgattttattaaaaatttttagtatacctgatgatgtagcctacagcaacaaatacaagagtcagttgtttatggaaagtactttttggttctgtaaacaatagtgttcttgaatagatcatttgtagtttttatcattctgtgaggaatgagggaatagattatatttcaaatcatattttaggtctcgactagccttgataatctattcagatgtctatttgatctataatatctatttgatcctccaaaagagattctccagttaccctttcctcagggaatgcagatatttcccttttcttcctttaaattttgtcagtgttatacttcacaaagtgcagagtttaaaactagatgataaacctgatagaaataattatatgatttcattgcttatagtgatggagaaataaaattaatcagtgacaatataccttagcattgctg

SEQ ID NO: 94922 - DNA, 1022 bp, Homo sapiens
ttctgcattgctctttttttggggaactctgccacacaacttcaagctgaatcaactttcctgagctactatcactgattctttaagtcagcaaggctgctgagctctgttttgattttttctggctgtgcccatgacctagaagtcaactttaggtagataatcctggtaattattaaactcaccttgtttgtttctctttttacagagatagcagttctatgttgcctgatgtccaatgtctgaaaatggctgtttcatatatttttgccaatattctacttgtttataaagtgagagatcatgtctgttccttgttaggctttcgtagctagaagtcttttttttttttttttttaagctataaatactgatttttctactgcattttgtgctccctagggaaagacatctgaacatctttctatctctagcgcacagaagaaattacgtatttgttaatgatgctctttgattaggaatgacactaatatttttctgtgatgaaagtttttatttcatattttatcatactctgaattttaaaaaatttcttatagatagttgcaatttgctttcaaggatcacttcctagaattttagaaaccatcactgtgaaagaattccatggtatggcaagaaagtaccaaaatttaatttgcttggaatcaatattcttcttcttgctttagcattcaaccatgtctgttattctgatcatggttactcagtttgtaggattatttagaacctctttccctgccttcctcccttttattctctgcttttattttctttactttagttctgattgcatctctgttaaggagcctgcatgagaagaggggagagagtgaccacacatacaagtgaaacttaggaatttgccttttgattcagttttaataatgtttggagattgtcaaaagtacatcaaaatctaattttggatttccgtggtcactggacatattttttttcttttggtgcctgctatacaggtgttagttggctatcattct

SEQ ID NO: 94923 - DNA, 1069 bp, Homo sapiens
taataagcaaacagggaaactttgacttgagttaacaagttcagtgtatacccaacttttctaggaatacattggtgaaatgaggaatatctgtataaaatttgtactttctattttatttttctctcccctttttcctcttgtctccccaaagttaaagtgcgatctttagttattatggtagcttagtttagaactgttctaaactcaccatatttgttagcaaatttttcttttcaaaaggtcatgcaaacatccagtagaaaagttgacataatttaaacccaagagaatgccactggaccaatatgtagtggagtactgaaaatatttaactgcctattcctaatcttttcatattaaatttagatctttttcaactattgtctaaatgtttgttttttatgagtttaaattgtcttctctccacagaatcaagtgacggatactaatagaaaactacaacatgagggaaaggaagtaagaccagtttaccttttgaagaaatcttttctgtttcatgccactctcttttaatgactatgttattcatttagtggttaagactgtaagtagtatgttggaagtacttggacattattgttgcttttcctaatgtttatctgaattaaatgaacatagtcactgggaagtctaaggagacaggatacaggcttcttagttgtgcttttaaatcatcgacttgtcataatacagtaatgctcttcctctgcctgatatgttatttcctcaatattcaccttcttcaaatctttgctcaaatgttgccttcttaatgaggcctttcctaaccaccttatttgaaattgtagtctcactctcacccgtgcattcttttgatcctttcccactttttcttcattgtgcctgtcatgctctgatattatatttaacatattttttacttatatttttttttgtatgtcattctccattggaaattaaactccatgagattaggaatttttgtttgctttattcattgctgtatcccctccatctacctaaatagtgactggcacagtgtggatgctcaacaaatatttat

SEQ ID NO: 94924 - DNA, 1046 bp, Homo sapiens
atgtgagatgggggaatggttgtagtagaattatctagcgatattgactgcctaatttagatttgtagttacatggctaccctgagtctagccagcacagctgtgtgttttttctctagctgtgttcaatttcttgaatatgctcatggagcaattggatagttgaatttaactaaaattgagcttttctagactagttaaattgaaaaagaaagatacaagggagttgtaattcagtcttttaattttatgatgagaattttgtgacaaatactgtcaggcagtcaaatattttggaatgaataagaaagcaaaagtttcgattttccttaaaaatactcatttaacaataaggcatgttaatatacagttggattattttgtggcttatgtgccctaaatttgcttctggatttataattttgtttttccttcttagaagtaaccatggtataatcttcgtgccatttttttttaaaggtctgtttatgatggtgaagaacatggacgtttcatggagaagcttgaaactcgtatccgtaatcacgaccgagaaattgagaaaatgtgcaactttcattaccagggctttgtggactctataactgaactgctgaaagtgagaggagaagcccagaaactcaaagtaagaaggctctaagagatactgtttctccgtcctgtgttggggttttgattaggattaaaggattaaggattataacatagaacacatatttgtagtgaagatttttgtataattagaaaggaatttatactgaaacgtacattcttgagagtatggctttttagctaaaaacaatacccacccccccttttttttttgaggcggagtctcgctctgtcgcccaggctggagtgcagtggtgcgatctcggttcactgcaagctccgcctcctgggttcacgccattctcctgcctcagcctcccgaatagctgggactacaggcgcccaccaccacgcccggctaattttttttgtacttttagtagagacggggtttcaccgtgttagccaggatg

SEQ ID NO: 94925 - DNA, 1050 bp, Homo sapiens
ttgtcctgcccttccagatcataccaatctaaatcttacatgtattgattgatgtattatgtctttctaaaatgtataatagcaagctgtatctcaatcagcttgggcacatgtcatcaggacctcctgaggctatgtcacaggtgtgttcttaaccttggcaaaataaactctgtaagttgactgagacctgtctcagatattttgggttcatatattcatttttgatagtttttttttcttttcttggtaattcctttttatatttctttaaacatcttacacatttatttttaatgtatacatattaattttaagccattgcaagcctgattttgctatttgtgtttcttctgattcttgtttttatactttgtttccttgtatgttttatgacttttgatacttaagttccagttcaatggagtattatttgtgagaattcctagaagtataggttaaggtatatttctctggagaagatttgcctttgcttcagttggttatttgagggtattaacaaccatgctgggactactttaaaaataaattgtcagttgagatttctcagaccacagaagattgatagtatgagtgtagacctcccttctgtgagaaggctggcatgtgctttcaaattatcatgggagttttctccttccctcacccagagctaacaccagataggcaagtttacttgcagtctccctttatgaggaagtgtttttctattttatcttttactaatgatgtattctggggtatcttcgcttcattcatttgaaggcctctgatttgactccccatcttgtgtgggcaataggccatgtctctttttctctgtatggctataaaatagaagcattaggtcagaggtgattagagagattaggttagaggtggttagaggtgattaggagtttgatagtagaaatgtttttcacagtgtatccaatcttccatacggttcatggaacttcatcctattttgcctgctttgttctttattatgttttaggatggaaactactctgatgcctttccatccat

SEQ ID NO: 94926 - DNA, 1062 bp, Homo sapiens
tatttttctcatttgaccatgcttgatttaaaaatttttaatatttatagaatgctttctgtatgccaggtactgttcagaattcttacattatctcatttaatcttcacacagcaactgtatgaattggttcctaccattatctgcattttgctgatgtggaaactgaagtatacagaggtttaataaacttgcccaagatcacacaactattaagtggtagaactaaggctcaaatcctgaaagtctggctatgaagcctgtgttcttgcccactgtgctatactgcctttgttgttacacttaaagaaaagtgactgctggaacatgtccagagggtaaaactacaattgaaaggctgtttatatgtagaatagttgaataatttgagattgtttagtctggagaaggagaaaaagggatcaaggacttgttctcactggtcctttgaaggcaaaaataagataaatggtgaaaattatagaaaggtaagttttagttttctataagaactttgcaacagctgttgaaatgggattggttgctttgcagtgaacttctttttactagagatgttccagcagaacttggactagtatttatggacatagctggaaaatttgttatgtctgtgaaattgggctggatcatctctgaggttccttttttccctgtacacttcaatgttaaagagtttattaaaatgggctagtctatactgtcctcagacaaatgcttctagaaaaaacacacaaaattgtttcctaatggaaacatggcacctatgatgtgagaggagggggaccagatttatttttgtctaaaatgtttctttgtaaatagctttatgatgtttgtagggagttttttttttgcatatcttgtaagtggactaggaagcaaaagaaagtggcttactttttcagttgacaaatcaagttatttagtaatagaacagagattccatcataataaccattgaagctactctcttctttccccttcccatttgagggataataaaataacattaacttatgggttctgtagttgcagtggaag

SEQ ID NO: 94927 - DNA, 1061 bp, Homo sapiens
atcttaaaatatttgtattgttggtttagtttttcctcaacttttatggtttgagttttgttatcacttgtgttaaattttattttcattgctctaggaccattttttcaaataaattcatgtagatcaaggttgtttcaggtcttttttcttttcttcttcagtgttaaattaacttgtctacatgctcatttcaggtcagacatttgatgaacattattacatgtttcacgttttagtcgtaccattcatagtattaaaaacaaaatcaacttagtattatttatggagtttaacatatagttgatttcttgatctaagtagaaagtaaaattattgaatagaatggacactaagatgacttcatgtagagacagttgacaaaagtgaagtcttcctctaagtctgtgaccatcagtaaactaacactgtcttgaaacctaaaaggttatgtagcaaagcttactctatgatatgccagggaagtttgctgggagtatgatccagatcattggttctggatgctaacatttggaaatgattttttttggtggagcatctgtgaccttggaactatgaattatcttaaaatttcttttcaagagaaggagcatatgagaggaagggtaaacaaaatattttgtttataatttgctataacaatgatttaatacagcttaatattaaacagctctggagacctaaaatttatctcacttggttttcactggtgtttctctctgacacatggtgtgaatcaactgtccttccaacttgaaagagcagagagttcactgacgcaactcccttgttctgggaattgttactactgtgccttcaaaaggtagggacattaaaagctttggcttgtggcaaattctctccaagttggacacagttagggggctgaatattggcttaaggaagtgaggttggtggctttttctatttcctggactttttctaaagaatcaatattaactttttcaagtctctacttgatgttttgtgattaacagtcttccccgttaaaattggaaaccagcaaatctccgtttaaa

SEQ ID NO: 94928 - DNA, 1050 bp, Homo sapiens
cacagcagatcagttctacacctagacaaagggttcacggttctatatctaacaagtggccaggctgggatttgaacaaagatttttttcactgtgctgttattaatgattaaatttgacttggaagtttttagaaaatagttcttagtctgtattcagaatgctcttagaagtaattagctgagatgtatcttgagaaaggtctactgaagaacattggattctatccacttccagggaggtgctccatcattccatagctaggcaacagaacctggttgaactaatccattttattccaggcatctaggataaattctttaacagagcccagactgaaatgctgaagcttggattttgggaaattatttggaatctatgtttcagtgaattcaagattacaggcaaaaacttacagggctggctgctgaattatatttcatgttgattcattatatgttcgctgcctttgatgtttattgtggtgaggccagatttgatagtttgcagtcagattcactatttacttgaaggtttaaaaagatgacttcattaaagattgcttatccactaggtttgtagatacatatcctttgggtattgactacttcccagctttcacatcatttgttctcacatcattattatttgttaataagcatttatgtggcccttgatcttaaatttatttatttatgttatttttagttggcatgtaataattgtacctatttatatatttagttttttgagacagggtctcactctgttgctcaggctggagtgcagtggcactgtcttggtttgccacagcctcaacttccctcggcttaagccatcctcccagttcaacctcttgaatagctgggactacaggagtgtgccactatgcctggctagttttgtttatttttttgtagcaacacggcctcacgatgttgcccaggctgggcttgaactccacagctcaagtggtcctcctgcctcagcctcccaaagtgctgggattacaggcacgagccagagccaccacacctggcaaagtgtaca

SEQ ID NO: 94929 - DNA, 1002 bp, Homo sapiens
agtaaaatatacatatgtggccgggtgcaatggctcacgcctgtaatcccagcactttgggaggccaaggtgggcagatcacttgaggttgggcgcttgagaccaacctggccaacatgccaaaaccccatctctactaaaaatacaaaaattagccagccatggtggcaggcacctgtaatcccagctactcaggaggctgaggcaagggaatcacttgaacctgggaggcggaggttgtaagctgagaccgtgccactgcactccagcctggacaacaaagcgagacttcgtctcaaaattaattaattaattaattaattaataataataattatcagcatatgaagaattttgtttcatccctaccccccaatggaaaaaactaatcactcaaaaaagggatgatgcaacaaatttcacttcctatatttctaatattttgtgaactgttgttttccttgagaagaaaaatatatctgacattcagaaaaattacttaacatgattcttcaagttaagaatttgagtatactgccaaagataatcccaataaactctgctctcttaattttgtctttacttcccttgggactaacacagtaactgacaaagtagatatttaagaaatgtttataaaccaaataaataagaacacctacaaagacaaaaagtaaatctggccattttccattctgaagatttacctcttgcaaaagacaaacataaaaaatgagaattcattctgtgtaactctagagagcagagaaaaataattacatctaatttttaacaattcttaagctacatttatcacaaactcatagtcaccttaaccaaattctaattgaaaaaaaaaaggcatacaaaatttgaatactttttttaaaagttaaactctgatctgtaacatactggcctaaaatagcaccatgcgagacatttttaatactaatcaaaataactatgtggagactcaaaagtgctaagtagcacatattt

SEQ ID NO: 94930 - DNA, 1043 bp, Homo sapiens
cctgcctgtcctgtttttaaaataatgttcattcctgctttgtgttataaatactaaaattttgatgacaaatcatttatgaacaatagctccctgttttcatttttcaaatcccatccctatatctctacttttcctttatatcacttactcagtagaagtcatttcttcacttggtactctgggtaatagcaattaacattcagtctaattgttgtttaagattttgttttcaaacttaaaatttaatattgaaatacattgccattaaaaaacaactatattgagatataattcatgtatcatacaatttacccatttaaagtatacaattaaatggttttgggtatgtatattcgcagagttgtgcagcaatcaccacaacctaattttagaaaattttcattactcaaaaagaaaccttgtacccattagtggtctctccattctgttccctctctctccctaggcaatcactacttttcttcatgggtttggctgttctggacatcgggacattttgtataaatggaatcaaacaatatgggtttttttggtaactgaatgttttcaaggttcatctatgtggtagcatgtatcagtacttaatttctttttatcgatgaataatattccattgtgtggatataccacattttatttgttcatcagttgatggacatttgggttgtttccattttggggctgtggaacaatgctgccatggccatttgtatactagtttttgtagagacatatgttttcatttttgttgagtatgtacctaggagtggaatttctaggctgtaaggtaactctatgtttaacattatgaggaactgctagactgtttttccaaagtgcatgcgccattttacattcctgtagcaatgtatcagggttccaatttttccacatccttgtcaacacttgttatcatcttttttactttgccatccttgtgggtgtgaagttgcatttcattgtagttttgatttgcattcccgtaatagctgttcttttcatgtgcttattggtcattg

SEQ ID NO: 94931 - DNA, 1067 bp, Homo sapiens
gctcacagttttgaattctccagctccccgtgtctcccccactagactgtaaggcctctgtcagacattaagttagactttattattcgcgccgacggagccttggcactttgtggcaaaggtggtaaacaagaatttgtaggtttagtgccactgcctgacttgatcatcactgtttacgcactgtcgttaactgtttttgcttacagtgggcttcaactagtatttgcggattccatgtatgaatgaatggaatccaacctagcatttcccagagaactacaaatcccagcggacattacgcagaacgccgacggacgcggtgacgcaagggggcgtgtcgagcctgagggaggggtcggcctgcgggtagccagaggctggggcggctgtggagcctgtggtgggagcggcattgtggggcagggaaaaggtgagccgagccgacggaggggacgcgctgcggggcgcccccagtctatggagcggggtaagatggcggaggcggagagcctggagacagcggcagagcacgagcggatcctgcgagagatcgagagcactgacacggcctgcatcgggcccacgctcaggtaccccgggtgccgggaccacagaggggcgggaacgggcgggacggggcaggctcctctgggtcgggcctccggccggctgtccccaggtccggcgccggcccctcccttcggagagaccctgcataccgggcgaggcgggtctcccttcgcagccccgacgcggggtcccttcccggcgccctacagcccagtgactcaggaccctcccgctgcctccctcggggcaggagcagccttcgttctccctccgaggctggtccggcgctggggaacgagagggcgcccgacagatggtggtggctcccggcagatcttccccctggggacatcacccttctccctccgtctctaactacgtcctgccctagacaggagtcctgctcttcagacaacacagaatttcactccatggtctagtgctcgaaatcaaagtcttgcctcagaatcacagccacttctcagaaacgagtc

SEQ ID NO: 94932 - DNA, 1447 bp, Homo sapiens
ttttagtagaatgagtttagtagagggctacagaaggagctgaggcagggagagaagcaaggttgtaaaaagggcctgattgtcgggatgtgtagatgctgaagggtcctacctggtgcctggttggctctggggacgatgggggagggaaggaggaagtgatggacgttttgagtctgggaaaagaatacttcattaatagaaatgggaatgtcaggaggtggtgctggttggacaggagatgagaatcttggttttagacatggtagtctagagggtccatgttcagtgggcttttgaatttcagtccagaacttgatggtgacaaattggagcctttggcaaccctgaccacacatttcagccaagatgacgtgtttcctctggccagacctgactcagccccacccccgacataaaacagggacctgaaaccttctgtccctgccttggccatgttccctcatcgtctccttttcatcctctaggtcctctggacacagacatgcagcagttggcccgggagacctccgtggacccagacatgcgaaaagggctgcaggagctgaaggcaaaggggaagctggtggattgcaaggtgtcagcccagaaactgctgagcttactggaaaaggacgagttcaagtctggagcccacgtggacttctatgacaaataagcccatgtttttggcttcctgaacctttttgcccccacttttagacataccccagagccctgtggctccccacaccctgccataggggcagtcctgccttacacatagaagcattcatgcctgctgccctgccctcaggcacagccagctgtgagctcccaggtcattggccttaccagttgtcaggagtctgtgctgtgcaccctgggttataaggaggcttaggagagaggttatgggtattggtgtctctatccccaggaatagaacttaaggggtgggaagaacaggaaaagaagctggaacacagaagagaggaggttgtgtctcttgctcatagcaagcctgtgggtagaggaaagagtgatctggtgtcgaataggaggacccatgtagattcgcagatggcctggatgggaggaagggcagacggtacatgtcccagcccacatagatgccccttgctgagggtagcaggaccttctgttgaactttgtgtcctcactctgatgtctccttccttcagaatctaccacccctcccccaggctgggagaaggggctcctgggtgtctgtatacacgccaaaggcagatacaaataaaatacagattgtcctttcttcatgcttgctttctcctctgatacagggcctatgactgactgcctggttcactgggcccaaggccattcccaaggcagttaacccaaaagtgaggtgttgtccttatttcctagggagctttccgggggccatctgcctccagtc

SEQ ID NO: 94933 - DNA, 1050 bp, Homo sapiens
cccacgctgaccccagccttgatagcccttttctcaccctgggctattcagaatacccatcttttagggcccagcttacagcctgccctccacatggccctaaagcctgggtcctttccccaactctgtggattgccaattccaccccctgtccacgtggcaatgctgtgaatggatgccagctgctattggcccttttggcattgtccatctggcccatggtccaggtcgtcagtggggtgggcttaggaccagcatgcctttgggggagatgggcaagattccaagaaagggaagctctgagaaatcagggctgcaaccaagccaatccttgtgcaggttggtagacataggctgggctgcgagctccacggcagtggtggtctgcagccagcaccctggcccctggccatatttgggagaaggaagcgtggtcccctgcccgctgactccaggactcagcctgcctctgagtgtgcagaagggaactcctccttgtgctcagcagagggcgcatggaggccgcgccttttgctgaagggcaggccctaggctgaagctggcagtgccctgcctgctcccctaggagggaatgggcgaacttttacctggtccagcagatgccttgccctcatgcccccatcgaagtagaaatcactgggctcaggttcctgctctgccacagctggtaacccagggcaagtttcttctctgtgcctcagtttccttatctgaaaaatgtggattataatggcacctaccctgaagggttattttgaacattaagtgacctaatgtttgtaaatgttcagcacagtgctagcattgtggtaaatgccctgtagatgctaatattatttattgcctttaaatatcaagatccagctcatcctggaactctgctggaagcctcctctcctctagacagttcagacatcctcccctgcctgacttgaggcaaaaactctcactgtactgcccctattcagcctcctggaggtgagggtggggtctggtctggataccttgtcttggatttacaggaaaatg

SEQ ID NO: 94934 - DNA, 1050 bp, Homo sapiens
gctcagcttctggtgaggcttcagggagctttcactaatggtggatgtcaaagtgggagcaggcgtgtcacatggtgagagggggagtaaggggtgaggggaggtcctagagtcttttaaacaactagaactcagagtaagaactcacccattaccaagaggggggaacatagccattcatgagggatccacccctatgattcaatacctccatgaagccccacgtccaacattggggatcacatttcaacagagatttggaaggcacacacattcaaaccatatcacatgggtatagatagtatcactgggaggctctcacacccaattattttggaagctgattttaataaagtgtatggctgtgtctacactggagctgctgacacaagtggaagatttaatgtgttgccacaacgtttatggaagatgagccaagagctttatacacacattgtcatgtacatcttggggatttattggtgttgagatgtgtcgggatatgaaagaactctgaagtgatctcagtactgtcaattatttgtatgacactattgatgcatctctgaaaagctggcaaattttcaaaacatttgtaagtggagtgaagggatactggaaactccagaattgttgaaaatgtgttggattattggtcatgattgaggggcttctgcaggttattcaaacatggaaagatgtgtcaagctattttttgaaatatacaggtggctggtgcagtgaggtcttggctgattttggtttccaaatttgaattcaccttttgtttataaattttaacaaaatgtaaacaatgggctaagtattacaggcactggttttctaaggagcttctaattgaaactatagacattcttctctttcccatcaaaggttaaataagcatttcatgctttgtcatctgaaagaagtgataaatatttttaaaccattcgagagagaatggagaaattatgccaataagtaacccccaaaggtttcaaagtggaaaaaaattcttttaagaaaaaaaaaagttcatggtaacta

SEQ ID NO: 94935 - DNA, 1077 bp, Homo sapiens
ctccccccttttggattatctgtattttttataactctgtccaatagacatataatgtgagacacataattttaaatgttctagtggccacatttaaaaagtagaaagaaatagataaaataatcttcttaagatatttcattttactcaatatatccattactatgtgtaatcgatataaaaatattaatattttaaatgttttagcactaagcctgtttaacactaaatgcagtggatattcacatttacagaacatctctgtttgggccatccacttctcaagcaccacattaccgcatttggctcctagcacggctctatgaaataatagcagttaatatttatcaaaagcctactatgttccaggcactgctccaagttcatcaggtggagattataactcattaggtctcaataactccatgaggttgaacttattgtgctctccacaagcacgtgttgcttgcccttgtcctcataccataatgaaatgtttggagcttttgcaaaagccattttcctaatatgatgggcatccaagtctggttgcaaaggcttggatagagggcaagtgagagaattggagagagactaaaaatcattcaagaaattttgtggtgaaaaagacaagtcaaaagactgagagaaacatgaggacagaaaactctttgtaaggcaaggagacataaagatgaagtcaggctgaataggaaagaaggaggtgaaaggtgaaagagagatggctgggggtgtggctggtccaaattctcacaagatctctgttggagaaacattgcctggcttgtgctggtggcgagatgtacatagcagcttcccagctagagggagcagggagtcatggccttgtgagggagacagatggagacacacacaacccccatcgcaggtgaatgctatgaaagaatggggtggagggcttcccagggagatgaactgagttttaagaacgaagttagccagcaaagaagcaaaaggaagaggatatagacttgaggattacatcactggatgactgagccactgattggatgtggaggatgagagagtgatgct

SEQ ID NO: 94936 - DNA, 1286 bp, Homo sapiens
ggctgggtctctgacatctttccagtgagttccacattgatcaagcacccgacattccaggtgggaagaacagcatgagcgaaggcacagcacagggaaaacctgtggctcactcagggacagggatggggatgctgaagcaaagggtaccgggagcaaggcaagaagatggggcaaaggggctcagaagggggtgagtctgccctgtttgggtgcaaggaagagaaacctagctgcaacatggagggcctcctttgaagtggacctcatccttgacattcacagaaacctccctagaggagcagggcccaggccaggccggtggcagagggagctgggcaggggggtagggggtgctgcattagggaggtgtggttgggaagccagtctagactcaacccactagatgggaatggatggggctggggaagaggagaggaagcttgaggaagattcccagatttcctgtagcttgggaaactgtgtacatgtctaatgctgtttgtcgaggtgggtgatcctggagaagcacagatgggtaggtgcgtccggctgtggatgtatgggctttgaggtgctgaggggcagggggtggagcaggcagctggcttgacgggtctgcagctcagcagaggtcagctaaagacacaggccagggagccaaagagaagtcctggaagtggatgtgatccccacaaggcaaaggacataatgaggagtcagggagagcaaggactgacctgggggtggccagaggtgacaaggcatggatcacactgaatgaactcaggctgaaggaggagtcagagctaccgaaatgaaggcagagcggggtgggagaatccaggagggcatagccaacagatcagggagcaggtgaacccaacaggaagtggttgagtttggccacaagggggtggccagtgactgtggttggtgactgtcattagcaccggcagaatggtggcatggaggccaaagagcagaggtttcatgagcacatgggaggtgaagaagaaagagaggggtctggatgtcgtaagggaaagacttaggaatgcagatttgcttgtcaggaaaccttcatcctgacaagtgggacaaacagaagggcaggtgaacacaagagctcagcgggccctggcacgttgctctttcttgggctgaggaggccctgagtcactggggactggttgcaggctcagccttaagccctgtctctgcagtctcaacctgcccagcggttctccaaggacaggtgagcatcctggtgggcccacgacttc

SEQ ID NO: 94937 - DNA, 1042 bp, Homo sapiens
tccaggggaaccccgtcttccagtgcctattctattccagtgctcttttctttctgcccatgtattccacactgagggagcacctactgtggaccagcattgtgctaggctttgaggacacaggggcgagacagatccgcacgtccgctgcctcagggagcttgtgatctaatgtggagaggtggggtatgagaagttcagggagctatgggggccacagaggtggccacgcccagcgtaggggagggaaggtgtctaaagctgagacacgaaagatgatgagctgaagacgggagagcagagtaggggcaggaatggaagtaggacggggtgtctctgaacaactcaggcaaagactggagtggggacagagcccagggtgtgcgaggaaccaaaatcagtccatgtgccctgtgtctccagtccaaggagcagggtggcgcgggagtctgacttgatccctgaggatcagggtgccatggagccatttcacagtgaagagaggcatgggaagacttgcagtttagaaggccggcactggctgtggttggggacggactgggctggatgagaccttgtggggagggacggggagaggacgcaaagaggctccagagtctttgggcagagcaccactggatggcggcgtcattcccgagatggagagctgagtggggccaggggagagggcaggttcagttccatttcaggtgggttgagttcaggcgcctgtgagacatccacagcaaagtttggcaggcaggcggctgtgaacctgaggctccagggagaaacaaggctgcagaaatcttgtgtgggggtaacccagggcatgtgcagagaagagggcccagccagaccaagccccaaggaccccgaggagcatgcagtgggtgtcgtgaagtggggggtggcagtgaccttggagagaaagatttttctggagtgtggtgagaacagaagccagatttactgtgggttgaaaagtcagtgggagggaaggaggtggacacagccagtgtagaccaagttttttaaagaa

SEQ ID NO: 94938 - DNA, 1031 bp, Homo sapiens
attggttttcctctggagtcgggctgcttggtggcccaggctctcctccgactgccccagccaaactccgcatcattctgcccgtgggtggcctgccggcgtctgtcaatgtgcccttccgccagcgtgctcccctcaacgtcctcttgctgtccagccgcttgtgtgttcctccactgatgtgctcctctggatgtccagctgcctgtgtgtttgcctgctagggtctcagggatttttaggtacaggatcagggggtgtggcaggccagggtggtcttgggaaatgcaacatttgggcaggaaaacaaaaatgcctgtcctcacttaggtccgtgggcacaggcctgggggtggagccctagccagagaccgtgcccttcccttccccccttccgtatccatggcaagtgggttgattattctgggactgaacccgtccagcctgggacctgcctagtgtctgggtgccacatactctcacatctcaggctccaaaggagcccctctgataaggtgatgagaggtcagagtttggtgctcctggcagcctcatgtttcactggtccttccctgaagttctttggagggtccctggggagaagaaaagttcagcccgggttcccccaggaagatgaagatgaataagacccagtttgtgccttgaaggcttgctaatctcacatgtactctggaagtgcaggactgtgtggtagggaggcagggcagtgtagcagagtgagctgaggctctggtaggaaaacaaaatctaggttcctgctccacctctttctgccagtctgatgtggctgtggagcctccctcagcctcagtttcccacctggaaaatgaggacactgccccttcatcaccttgtttgttggggctttgcattttgcaccatccagcagctcttttgctctttgcagggtccgtgccacgcaccctatagcctttgggtgcaggggcactagtgcagggcttccgctgaggaggctgacaaggaaggcagcccccacccttggggagccc

SEQ ID NO: 94939 - DNA, 1006 bp, Homo sapiens
tggtgggcaagacccgtacccaggtcagctgcaggtgagagcaggcagtgtgtgaacttggccaaggtgaccttgagaagaggaagcactgtgggcctggcagcaagaagggctggtacccagagaggggctgcggccgacccagagagcaggatagaatttttgtggaaaggcgggctttctgggcagggtgcaggcctgtggtatagacactgaggtgtccagcctggtcaaagtgaagtgcgctcatgggtccagctgatgaggggtcctgtgtgcccagctgaggtgagccctctctcaccctagaagagggcggaggctctgggggtacctgagcatgggcatggcatggtgagcactgggattaagaaaatgcgtatggtatggaagtttgcaacagacaaaaataaacagggcaggctcttttgtgcccctgactctcgtatacgtagccccttcgtgaactgaggttgtccctgaataccagtgactgcaagtacacacagggagcaagcggggcaggtgaggaaggtggttcttctgtccttgagattgctgagtcttgaaccttggaattctgaagctggttcagtgagcagtgcttactctgttacttgtaccacaagtccagtgaggtagaacactcgcacaagtcaagcgaagcaactttattactcacagataggcctcggggacaatggacgcctaccactcaaggcaagctggtgccccatggctcgagaaagctgcccagggaggatggagtctcgtccacccacgtaccacatcacactgcaactgagggagcctgggagcgctccaccctggggtttccaccctgggggacatcagcttactgtgctaaagtgttgcaggacatcctgttccagaagaggtaggaacatgagcccaggctgtctcagacaggccctccttatctcaagatgttgcattcccaacacatcctacagctatcctgagaactacaagaaggcggggggcg

SEQ ID NO: 94940 - DNA, 1055 bp, Homo sapiens
aggtaatataataaagatggtgtgacaaaggcagtggggtctgcaggggcagtgaatgccatcattccaagagaggtgactgtctcaggatcaggtggactactggggtgcgcaggaccccattcaggaaccgagagacttcccgagaggcagggcttccagtgctaacaccagcacagccctgggcaaaccaggacggtcagtcatgctgaccggcagcatgggcggcaccatgtgagctggagaccgcatgctgtgcctttctggggatgtgtggcctcctggggtccaggcctggcttccagggaggtgaccactccttccctgacttctctcatcattgcctttcagtggctgaaccagagccacaatgcctgtgtcaactatgcaaaccgcaatgcgaccaaggtgagcatcactgccctctccccagtggtggggttcaggctagggaggcccagtcatcctccctacagcgtgacatgccaccatcagtggctgcctcttggttaagcatggccctcctctagatatcttatttaaaatgccagcccttcaggtgggtggccgactcagacatgactcagctgaggtcagctgcagtttctgggccaggagccctctggggaggggctgtttacatgaagtgaagaaggcccattaaatgggagcagtgcaagggatgagttcggctggctttcagattcttcttgggtagctcttacatttgggttttggatcatgatggtatcagctacttgggggcaaaattcccataaagcttcctccaaaatttctggaagctgccttagcgctcccaggtcccgactgctggccacaagctgaagggctgctcctgagtggggagggtccagggctggtaactcccccccagagcccctgcactccttggagagcttgtggtggaggcccagtcacccttctgttgtccaggaagggctgctgggcccctgctttgctggcaaggccacctctccccaacttcaattcaaaggcaaagaaggcaggatgcatctaagtcccctttgggggcc

SEQ ID NO: 94941 - DNA, 1062 bp, Homo sapiens
ccagaaaaaacccgccagcgtggttgcttcttatacacggcctctcccttcccaggtttcccctaagcacagcactgccgcttccatgcacgtggcctgggagaggcagggcccggcttggccctggtggtccggccctcgtcctgcctgccctctccatttctcctctgctcctgcgccctcttcccttggctgctgcggaatgcctcggatgccagggcctgggtttccctcatgggcctggggctctcccagagagcatttgtgcctctctcagccctgagctccccacagcactgcttccctcccctctccttctccccgctccatgtcatgtcgaactctcaaaacttagggaccaaatgcctcatttccagcccagggtgctaaggagggcagaccatgaacacctagttattgggtctggtggccttaggttaagtctaaatccgatttctgtcttgagacattaagaacttggactctgtactttgcactccttcattttaacacacaggtgatcacatgggcttagagactctaagtatcagaagatgctggtgtcggccacttcatctccaggggtgtttcccagggccctcctgacatctcccaagccgcctcatccctcctctgcttttttgcacatttaaatcccaatcccaatgttctccctggccttcctccagcattaccagaccccagccatgttgacctagctcaccacacaggaggtgtcgctccagtgaagctagaattgaccggtctggggtaaacattcatttgacagagattttctttaactggctgacatcctttaagtagcaacaccccttatacactgaagtgtaactttcagatcattagccacataaatcagaagatggagacacagtagaaggaaaaaacaggacaattgttgtgtgttggggtactgcggcccatggtggatgacaaagaggaacattttggagttgagcgagtcagtgtggcggaaggggatgagatgtaaagacacttgctctacctgggaggctcccgggtatgtggggaggcagcgtg

SEQ ID NO: 94942 - DNA, 1076 bp, Homo sapiens
aactggccacaaggcaacatacagccactggtatctgaatcttcccagagaagttgtcttcttcccttcttcctcccctaatgcctctgcttttctccctcctccctcccccttcccccttccccctccctacacccccgtccccaccccattctctgttcctgcttttgccaggctattctacatccggacaccaatgagaagatcttcatgccatttagaatgtcaggtaagctcctggggcccttctggttctggtcagcctggggtgcttactccagtcacagttccaggagcatccagatgtgctggcctaaggaggggacagagcctgttacaatcatggccatatttgcacctctacattcacctcagctcaactgtacaaggcgctggccaggcctcagaatactctatggagcttacctgccttttctgcctgagcagttggggtggaaccagggcttccacaggtgaatctggtagcccccaccaccacccactccacatcactcagcgcacactaggacagcctcagtgatgcctgctgtaagcaagccctggcttctgcaagtcattccccctctcaccggtgtgtgacctgctgtttccttccaagtcctgctccctgccctgccccttttaggcagtcagtctccagcctaattctctgttctctgatcctgccattagccctcccttcagaatggatgcactgttgttgcactgctgtgcacatacagaaggtgggattcctgttctgtggagaccaggaggcagagggtgatacaagatccctgccccaggaaatcccactggtcactgaaggggcagctgtgcctatgtgggctttagggcttagaaagcactggcatgtacacgagctaggctggcatgcttatccccccagcagttgtgagagactctgcagagtcacactcatgggtgtgctgacgcctccttcttgccatttctcagtgcaatggggcacagccaccttgaattatgagggtggaatgggagggcactgctgctgctgccttgggaaggcctcgggtggctggagaaaggcggtc

SEQ ID NO: 94943 - DNA, 1048 bp, Homo sapiens
tgtctgtaatctccatctctgccacctgctcacacttgctatcctcttgtcctggtctattttccctagtttcctgaagcacttttccttctaacatatcagaaaatgtgcttatttattgtttgtgttgcttatcgtttgtctgtctgtgcaaccctctaaactcaacaaaagcagagattttggcctgtttttgtcactgatgtgtccttagcacctagagcagtgttcagcacatagtagatgctcaataaatatttgttaaataagtaaatttgttaaattaattattaattttcacaataaccttgaaaatattcacatcctcatattacaaatgaggaagaggaggctcagaaagattaagcgtattgccctaaatcacatagccagcaagcgggagatctagaatttaaacccaggtctggatagaaacaaactgcgtgtatagggaagttgcaactgctgctgtgtgctatgctgcagaactaggcgaagagtccctcttctttcgtgagtctgtagaattgggggtaccctcacctgacatagacttgcaataggtacatattacctgggagtaaccatggcaacaaaattaatggtgaggtataatgcgattggcccaactgataaattaggaagttttttttgtttgttttatggaggcattctttgccttacagaaggatccccttcaggctctgtttaattaccttctggaggttgttttaaataggctctgtctttgctgccttgggaggtttggagaagcagcttggaaggaggcagaggggaaggggagcgagccagattgggggtggggctgggctgttcctcctccctctgggtgttgggggtgtgccccgctctgcccgagaaggccagttggtgagtgtcctctgcccctcccttggactctacaccgaacttcaggtaggttcagatggcacttcagctgagatgctggctgtttttgaaattagccaacttctgggatcttccagccacctctcacccggattgcttctccacacctgctccatgt

SEQ ID NO: 94944 - DNA, 1056 bp, Homo sapiens
gccctcttccagtccttcctctttctgcaagtcagagtcccaacagtgcagatctgatcaagggactccctacgcccttgtagatttaaataccctccaatggcttcccctgcttctgagataaagacctcacttctgaaggggcccccaaagtatgcatggcccaccccactgactacttcttccttgaatcccaccacccacccacccacacttcgcaccctccttcacatcacactggctgcttttcagcctctgaacccaccacgttccctcccaccactgggccatctgcttggaacatcacctcttcctctacccccaactcttgttcccattcttcctcatccctggtgtatccatgaagcatcactttcttggagaagcctcctgcactcccaggttggatttttgagtgttcgcttactgcaaagtacctttctcggtgtatacattgatttgtgatgagtatttctttgccatctgtgtctctctgttgactatggactttgcagaagtgggggctgtgcctgtctttactccctgttgactctccaaggctcagcacagtgcctggcagttaagaggtgcttaatgaagatttgttatatacatgaatatcctggagacaattcagtagggctttgcggacttgaattaaattgacttgtaaggttgtgactggggaggtggaccaacttttctccaaattgtcccttagggatcttacaaaattgcaagtggtgtcatgtttgacagtgtaaggttcatcagtgctgagacatcccagagttggggtgtctctaaggaggtgagtctaaagacacaaaggttggctacatatgtactgggttgatgagctcctttagggcccagcccacatctctgtgtcctgccctggcatgtaatagttgtgtaatatatatgctcatagtaccttgtgctggcctgacagaagcctgcttcaaggtggttgataatccagggttcattcccagcacccatgccagggacatgacccttattccccaattaatctcaccgctttctgcagga

SEQ ID NO: 94945 - DNA, 1026 bp, Homo sapiens
tgtgcctttggtgggcggggtcaagagcccctggatgtcgacctctcccgctgtgtggcgtccccctcccacctgttgaatacatagggatggctctctcagggccctgggaatgggaatggacagcactgctgtgggctgttcccctcccctaaagttaatctcttggtctggccaagttgctgctccctcaaccttcctgctgtcttcccctccctcaaccccaataggaggatcccaggataaacactgctgggcaggcgggcaggcaggcctggggctgccctgctcactctcattgtctggcctcaggacttagccatactagaccagtcagcttgcctggaagagggaggtcccactatgcctttgggagacacctatacttaggaaaaagcctttgttgtcctcccatccatccattaagctgctatctcagcctgtcccttctgccccaggggcttgcctggcttggctgcagtgcactttgaaatgaagtatctgtcctttggcccagcccctggtttgcttgtagaaaacatggtaggcttccccaaggcatctgcagggaactttggcagcttggggcaccctgaattagcaaaaatggggggtgatgaggtgctgaagaaggatacttaacagcttagtgaggaggcaagagctcctctgggaccaccacttcttcaggagagggcctgtgggcttgcttttggaaggcctcaggcagacacgtgccctctgggtgatgtctgtctgctgccaggatggagcagaggagcgccacacatggaggaaagcccctgtaacgttacctaccttaaactccactcatcaaatctgagaaaagtatccactggtccccagggtttcagtcatgcttttgggggtcattgggtattagagaagtaagtatcttttctgagagagggggagtcaccccccctactggggattcctctgggctttattcactcccagccctggccctgacctttgtgggcctccctaatgcccagggcatgg

SEQ ID NO: 94946 - DNA, 1590 bp, Homo sapiens
gaagttgcagtgagccaagatcgcgccactgcactccagcctgggcaagagactctatctcaaaaaaaaaaaaaaaaaaagggatgtaaggcgctttcagattagttttcccagatgtaaattccttgttgagtagaaccttagaagcttcagcatgggatagaggaaagaacacttggttaggtttggatcggatcctgcctatcagatgagatgatttctctctggggttggagtgagcattaaaatagctttgcctggcatatttctccttgggaggcacttgataatgttacatgttggggtcttccctctgtaccctggcccaagtaggtaaatccagcctatgtgtgtgttatggcccctggtcccgaagcagggggtggggcgtgggactcaggggcctttccagtcttggcattaaccaggaggctcacggttttgtctccctccacagcctggacgtgtctcctcaggtagaatctgacccagctgctcttcctcaccacctcccctgctccccctgggctccggcccctcccactcctgctcccactgctgctcccatgctaagcactaacctttttgcagccgcctcccccgctgctgccactgctgccgctgccgccaccaccgccgcccctgaagccaccccacctggattattgggtcttaccaacccgttcctcacctctttgcagagcaaccccttcttcgaggagctcatagccgacatagcactaaactctccttcacctgctccctctctccccagtgcctcgagggccagccccacccccctggcctcccctgggaaagccctgcctgagtgggacaacaccttcaacgtctttgctgccagcaggctgcgtccagaggccaggagcgagatcctggcccctgcaggagtggggctggaggcggcagggctgcaagacccaggccctggggccatgactgcgaaggcagctgagccccagggagagcctgggggaggaggaggaggaggaggaggaggaggaggaagaggtgggagcagcgtgtggctggagcccagggttcctctggacttgggaccgaaccaccagagcgcgagcgcggctgacccagggctcctcgggtcggtaggggctggcctgccctcctcgtcagcccagctacagctgagagcctcaggctcagaaccagacagggaactgccagccccggaagtggaagcagggcagagtccggcagacagtgggacatctctatttagctccccagaagtgatcagtgtgtgggagaggctgccgggcccagagagcgctgctgagggccaggacgatgagtcctcccgaggcgaaaatcagctttgccctgacgtcgagacagctgatgatgcctggccttgggatgtggtcaccatttctcctgcagctgagacagcctcactagtctttcggggagagtctgatgagcctgctccccaggtgcagcctgaatcaccagaaactgtgagccccaaggggagcgaggggcttcccccaccggagcccgagcctaaacccgagtgggtgtctgacaaggggctgcagcccagcaccccac

SEQ ID NO: 94947 - DNA, 1010 bp, Homo sapiens
cagcatatattgctgcccccaccgcttgggggtggggagagtgtgccaggccggcacagtaggttctaggatgcagaggtgtttatttgttctcagagcatgacctgcaaagacaagcatacgtgggaatatgttcctgacctgggccaggtggagtgggagggagatgttttgaagtgagaaccttcagaatgtgcacttggtgtggagcaaggaagaggaaggcatgaaggagggatgtgttaccagataggaggatggacagatgccctcagaagtactgctggctctgtaaagcctgccaggcctggtgcttggagtcccttcctccagggagagccctttgctgattctatacaaacaggtttgtgtgtacctctggggagctggccgggagagggaggttgccgagcctaacctgaggctcccagtctactcccctgccgctcttgtccctgcagttctgactgccagccaggttgctgaaagactgcaagggtgagtgcaggccaggttagggctgagggggcagagttaagcgtagtgcttttaatgttgatgggactctcttccttcagaccactgtggcctattgtcataaagggggctggggagagaagcagctcagagtgctctagccctgttcctgggggcccgggtcctgtagacagggttgggctgggtgtggtatggatgcactaatggcaagtgggctgaggtcaggctcttgacctggtggtggtgtatgttgcttctcactccccttggtccccacagcaggcatgtgtgccttggcctggggcttgtctggaatgaagggagaaagggcatctgctggggttgaggctctgggcccacgattcttcctcttttggtatcttcaccatgtccatagaagcagggtagtagtggaagcccaggtggggtgggaacaggtgggaatttttacctccctctccctccatctttaggtggaggggatgagactgagaatttacctttggatgggg

SEQ ID NO: 94948 - DNA, 1063 bp, Homo sapiens
ctggattgaaaggggcacagagcacaggctcagtgtggttgtgcgtacggtgtctctgggccttttctggggcaaggtgaatgctggggccatttgtaggtgagtcctgcccaggctttgggcttggactcccacaggctgtgagtctgtggggttgtcactggcctggggcacttacagtctccatcctctttctcctgcttccccatatctcctaatggcctcttggaatctggaggatttgggtcactgatggccataaggaagctgaggtttctgtcctgctgtcacttgaattctgagccttgtctttagcaggatggagggcactcagcatccctcccaagatggggcctatttgcaggtggcggctgcagggccaggctctgtggccgtgcatgcagatggggtgggaggggctgtgctttgggtaagatggcctggcctggacagatgtgacacctggcctttgagctcaatcagcagcatcctggccttgtgtgccttgcagggaggggaaggctggcctggaagaaaggactgttggcgcttccccagagggcttgcttagggcctctgaggagagaaggagaggtgggctgcctcatggcaggaagctgtgggttagacccagaactggagtgactgaatgtagctgcaggatctccagctggggcctggggagcctgtccccaggtccagagaatgggggcctctgccttggggctaccattgcagattgtgggatgttcctcactaggaagaacagcggcgccctctagtgctcccatgtggcactgatgccccacagagaggcccggggctgaacgtgttgagtatggtatccagagaaaggctgctgccgtggggaaggaacaaatgaggctatacagggctgagaagagggtcctgctgttcctctgatgtggcctttgtctgctgggggccatggcagtcacactgggcccctaccagtgtgtgctggagcagggagtaggtagttgagaccaagcttgtcttggccacaggacttagcctcattcccctgccctgttatgagcca

SEQ ID NO: 94949 - DNA, 1028 bp, Homo sapiens
cacctggcccctatttacttttgagtagttcacctggtccaaattctaaaggtacagaagggcacataatgaaaaaaatttcccttgacccaccttaagtcacctagctcctctcttcagagacatccaacattaccagttcttgtgtaaccttccaaaggtgttttctgcatttaaaggcaaatgcgttgtgttttttcttccctccctccttgttcccaaatgcaacgttctcaccacacagttctgtacttcccatgagcctggcagggaagttattgtttgtttccccctgttgtggggtctgaactgagaccttggcagaggggaccatcgccacttggttttgtcttcctcaacctgagtctcctggtcagggtgaatatggggttaggagcacactggggagggggatgggttaagtggaatttctttatttttccacctgccagagatcccctgagagaggtcatcttgcgggttctctccttcctcctgggcagggttgttgctttttggtcctgggccacctcacttatatggggctgatgatggcctgtaaaaggcctttgatagacaataaacccacatctttctgtgtggtttggcctacttttaagggtgccttcccagtatcacctcatttcattcttccctgagggcagacagggggatcaccatttttgcgaatatggagactggggtctcaggaggtggaatgacctgtccaaggtcacacaactctttagtggcagccagatttctgatgtctaagcctgatgcttttctccctacactgtgctatcaaccctacatcttttctgttgctctctgtggtttgacttgtctccagccatttttgcagcttttccttgtgctgggtgagctgacagtgacagacctttggagcctacagcattaggatgaggattaaaagtgcttgtgcccaggagggagggaggctggacctggctggggtctgaggagggatgagtgagctgtccccacagaggcagggggaactcatg

SEQ ID NO: 94950 - DNA, 1024 bp, Homo sapiens
tcattcttggtttgcagtgatattcttcacctttttcttcattagcccccagtctctcagccccttcctttcttcatttcttccctctcgcttcttcacttcagccactctccttgcacagttttcctgtcccaggcttctatcaaggccctagctgattgccctctccttgcctacatctgatctgctgctggagaaaataacatacctgcctggacttggtaacagcatggattatcctgggctttttgcttctctattcaaatgagattggtttgtgatttttttctctgtgttattttcctcaagttgccacatgagggttatacttgtttttttttggtaaaacagaaatgctttctgtcattacattgtttaaatagcatgagcattatttattctttaaaggtttgagagaattgggtcatgaaactatatagaccaggggcctcaagtgggagtagtttttgactactgtttattgcttctgtggataggaatgacttttcaaaaatttatcaactattatgccagagacatgaccagtcagaacagaaacctcaccaggtccagtggaagccagctggattaccatactggtgcactagccggatagcagcatggcttattgtgggctttcttcttttaatcaagattttaaaatctactacatagtctgcccgggcatggtggctcattcctttaattccagcgctttcggaggccaaggtgggctgatcacttgagatcaggagttcaagaccagtctggccaacatggtgaaaccctgtctctactaaaaatacaaaaattaggcctggcgtggtggctcacacctgtaatcccagcactttgggaggccgagaggggcggatcacttgaacttgatgtcaggagttcgagaccagcctgaccaacatggtgaaaccccatctgtactaaaaatacaaaaattagtcgggcgtggtggtgcacacctgtaatcccagctacctgagggccaggcacgagaattgcttgaacc

SEQ ID NO: 94951 - DNA, 1366 bp, Homo sapiens
caagaatactcacttggcaatggggacagttctggtggaggtctttgcgcacagtgcacagctctgggtgaggcagaacctggcctggtttcccggtcagcctctgggcattctcctctgccttctctagtgccctaaggcagtggtcacaggctgacggtgagagccagacacaacaatatcttgagagcagaggccacatctatccctttcacagccctacagagcagctgctatgtgccaggcaccattctagtgtttcataaaggtttggaaagtgagtaaatgaataattacatgcatggatgaatggatgaatgaatttatttcatgtgcatcccaaggcagatgatcccctcctccctctcaaggacctcctggcccttattgtctaactttccttgcttcttaatcagactcactctgtggggctcccctaccacccccaaactgggcttttcccatactctggggccaactgaccctcctttcattgtgtctctctagcttaagaaatgtgtgggttgggcacggtggctcaagcctgtaatcccagcactttgggaggccaaggcaagtggagcacctgaggttaggagttcaagaccagcctagccaacatgttgaaaccccgtttctactaaaaatgcaaaaattagctggacatggttgtgtgtgcctgtaatcccagctactcgggaggctgaggcaggaggattgcttgaacctaggaggcagaggttgcagagagccgagattgcaccactgcactttagcctgggtgacaagagcgaaactccgtccccctcccccagaccccaaaaaaagaaaagtgtgaaaaaagcatgtggccagcaaagctaagggcatcgtacttgtgctcacccctaactcagccttctttgaacaagggccatgtagcctcctcttggtggaggactccactttggcactgggccttcagcatgatgtccctcataccatggaatcaaactcgcctaagtcctgctgtgctccctcagggagcacatctgaagagcctcccaccacaggaataagcctcaaacacctgagactggacagaggcatggttctcaggcacagtccttcaatggaagacagcatttcctcccaacacccagagttccagagacgtcagccagtagggatgtatgcagctcacttccatgcacaaagacgactgggccatgaggagtaggagagatgtactcacctcggtagcgataaagtgcattccagagaaactgtgcagccaccaggggccgttctacgaagatggtctcccccttccggatgagctgtgtggcaaacagcccctttccctgagagggcagagggataggat

SEQ ID NO: 94952 - DNA, 1045 bp, Homo sapiens
ctcctgttttccaagtgttgttgaattggctatcttggctacaactggggagatggttgtgggtgggcagcattgggaggaagcctcaggcagaggaagggcccctataagttcctgtgtagtggtatttcccaagtgggcgggagtgccagtgagaaggtgggtatctgtgacccttaagtatgtttgttcactgcaggcgaaggacaaggaccgttggatcagactcttttcccagttttgtaacaaaacagccaatgaagaggaggaaattgtccataaacttctgggagacaaattcaaggttattattctcccgtggcctgtctccttccctccccaaatatcctaggatgtctctggccagctgtggggagcaccacatttgatcacttctgagctacaggaaggagttagaacttgggtccagaaatcgattcagaggagttacattcctgccactgtttacttcatgacctcatgtggacctacagttgggaagtggggtgacaacagaggaagggcatgtcagatgccttgccctgaaagtgctccctaactggtgttagaaggcaggactcgtcataggatagcagtgggcaaatcaggtagaatggggccgcagaatcagagagcagtgtgaaactgcccatgtcctgagaacccgttcccaatcaaagagtatgggtcctcactgaggacagcagacttccctgcaggagctgcctgagggtggaggcaggtgtgtacaaggtttgcatctggggtgggccctcttgcactgaacttttataggaagggagtgggagagcccagctggtctggaggccaggtcaagggagatttgatggtggtggtgtggatagacatttcaggctgcctcagccttgctggtacaagtgctggaaaatggagagaaatttgggtttgccaccccgggttggaacaggccggcagactgccaaagctctttggaggtagactctgtggccttcctttgcccctacggaaagctcagtctacagagctggccctttttccttcc

SEQ ID NO: 94953 - DNA, 1002 bp, Homo sapiens
cgtgagcagcttgacgccttcattgaccagctatacaaggacatcgaggcaggttggtgagatagggccttggcctcacccagccatggcgacccccccagtcagatggtggacacaaagtctttccccagggtgctctgaattaatggtgggggaaggtaatccctttgtgcctgtggggagcttcagatctgtccacagggcacacaggtgagaaacagccccaagatgtatccagaggcttgatgctgggaggaggggggtgctggataaataggatgtcttgtagacagaaaagcaaggcttctgtctcggagaggcaagtttaggtaagatggtagggactgatgccttagtgtggtggggttgcaggacagtggagacagtgcctgtccgtgtaagcctcgtttccttttcctgcctttaaaaatgggtagaataatgtgtgtgtattactgtcttacagcaactggagagtttcttaactgtgaaggatctggcctctttgtgcttcagagctgctgtgagtcatggcgttgaggagggatggtcccaggcgcttctgcctttgccaggtggccttgcagccacagtttatctttctcagttggccctttctaggctggtagggttgagtctgggagccccattaggtctgagctcccacaggaattcccctgggcctttttgttctatcatttttttcatttgttcatccaactgtttgtgctataatacctgcttatatataaaaccttacaataggccaggccctgtactaaggcaggcatagagctctgattcttgcaaagggatgcatgggctttgcaccgtcactgccttgtgagatttgggagtactgggagcccaggctacagggcgagtctcatcagcacctgatgagaaggggcagattcagctcagacaactgccttttccagacctcagcttcccaccccctggtttcctcactgcaaactcctcctcccaggctccagggcc

SEQ ID NO: 94954 - DNA, 1016 bp, Homo sapiens
gggcaggctgccccgggcgtgcagcaggcacaggtgggtgcaaaggaataccaattagaccaggtaatggtaggagatgggagctccaggctcaccagcttgggctcacctctactgttatttacaccctgctatgcaaatgttctaatgcccaagagcaagggtcctctgaggtccagtttgggtggtttttaaattttgagacagggtctcaccttgtcacccaggctggcatgcagcaatgcaatcatagctcactacagccttgaacttctgggcccaagtgatcctcccacctccgcctcctgagtagctgggactataggctcacaccaccacacccagctaatttttaatttttctgtagagatgggatcttgctatgttgttgccaaggctggtcttgaattcttggcctcaactgatcctcccacctcggcctcccaaagtgctgggattacaggcatgggccaccatgcctagccctgaggtccagtttggacccccagttccaggctctaagatgagtcttctcctgaggggctgaactctggcttcccagggcttccttggctcctagcaggaagctgtgctgggatctaagactagcagtctgagcactggtcccaaatgacctaggccagtcactgtcctctgtgggtgtttcctttcctcagaacgacagtatgggacgatacgagtgagtttgaaggtcctgcccacccgtgtgctcttattctaggacacagttgcaaccctgatgagaagctttattgctaaaaagtcagtgagggtttattgagtccccaaacaccagctctttaaaccactccaacaactgctgtgaaggtcactgtgcagagaccctgggtaggggaggctggagccaggtgagtgtgacaggtcacagatggctctcaggccacctgccttcagctccttttgtttcgggttctagccagaagccctggggcctgtctcttgcctcttcttgtagcatgagacacccttggggg

SEQ ID NO: 94955 - DNA, 1087 bp, Homo sapiens
cctcttttgcttgccgcctctgtcctcgcccagatccccagcttaggggcgaccccagccagccgcggcctggctcggcccgagcacggcgctggagccgttggcgagggctgcgtggggctttagaggagtctctgggctggccggttggggactacaagtcccagggtgcttcgggcccgcgaacccacgtcggggacctcttttttagccccgcatgatcgggacttgcgtgaaacgagtgcaggtcggccgtggttacgcggtcggcagctagacttggaagctggggctgctctgagatttgcgggctgtaaagacgtgtgcttcttggaaccggcacaggcacattggggacctcatattgtgcccgcctagggactcactatgttcactcgctgaccctcaccgcagcgtgcagagaagcagacgccttccctagtacttttaattcattcactcattcgctcagtcattaaataaacgcgtctttagtgcctactgaatgtaccaggccctggtggttgctgggggttgcagcctctcagccaggagaacgggaaaggtagatggagacactgtatcggaggtgggaagacccaggctcggactctggtgacataagaaaggcttttctagttggctacctaactctgggtctcgttttcttgaaatttggggcgagggagttgctgtgagtcctggagccacctaaagtgctccttgtagccctacttcccacacttcttttctctgtctctcggagctttagatactttccgtgggtcccaagcctcgatggtatctcctgggttgttattgagtagggccagcttccgaggtggtgtttgaccctgactgagatactgctttctgtgcacttggcagttcacttattcattttggcctgtccgactctatcttctgctcttttcctgcttcctgcagcttttctctgtcctgttagggacgcagacaccttttaggtgttctaccaaatgccctatgaatcccgcttgtacccaaggtagaaggaaattagcatttaacagtacttcctctcccctttatgtctctagcattgctc

SEQ ID NO: 94956 - DNA, 1504 bp, Homo sapiens
gaaagtagtctggtttgctaagctgagaaattgctctctctgctaataatggtggtcactagagcaaagatatctgagcgggccctttaaaacaagcaagtatccctgtttctcagtttctaaagcaggtctgcaaatgaagcccttacggggatagggaatgttctggagaccaatgcaatatagaaagaggaaaacttctttggggtatctgattggaaattagtcacacagaagctttattcagccagcatgagagatggaaacattgctgtatgaattagatttgccatcatttttcaaaacagggcaaaggtgctgtttgtttctctgcctgttttcctacactgcagctgaacatcactgttacataaagctgactgcctaggcatctctaggacaacacctcaagctcttggcatcttgcattttgcatcagtgtcccatctgcttctctaagattgagctgtaacacagacaagtggatgttttgctgcggaatgaacacttagcagggtctgcctcttcctcctgtgttgtgacccaattcctcagcacagggagtaaggtcagaagttgaaaaggccatggtcattcagctgggtactggagaactcatgattttttcttttagattaggtcagtgcttctcaaaccattttcctgtctagcatacctgcagggtaggctaaatttgatagtgtctctggaggtagaggctggttggggaatggatgtggtagacagttgggggaatgtggtttaagaagacctctagataattctgttaagggagagatgggagcattttcccctttcccctgccagtctcattataatagatgattattaaaagcagttaatttctttcttttctagcccacaccagttatcctattgaaagaggggactgatagctcccaaggcatcccccagcttgtgagtaacatcagtgcctgccaggtgattgctgaggctgtaagaactaccctgggtccccgtggcatggacaagcttattgtagatggcagaggtaagtctacagagttcctcaggcctgtgtgcaggaaaggaggctcctgagggggtgtttgggactagcataggttggtatcagaaatcccactgcttttaagatcgttgaaagatgactcactctgaagcagttccaattcttatattgtcctgactgctgagcccgtgtgggactatatgagagaacctaggctcaggagcctgttgcctcatagggagacgtggcctagaaacatgaaatagaaccatctggagtttcctgtgttcacttccattgttatcaagatgagaaaattcctgtttatatcttggtatattaattgatgtgtgagggtatcaactgtggtaagaatatctaagtggttacttttatttaaaaaatcttttctgtatccagttgacctgtattaattgctcttcaaggaaaattgggagtctgtggtctgcaaaagcttgtgattttagaccc

SEQ ID NO: 94957 - DNA, 1755 bp, Homo sapiens
gtcagcctggtagactatgatgtagacatagtcttttagtaaggactaagagactcatggcatactactactacatgctatactcaagcacctcatggtgtatattgagacctagctattatttgccctctaaccttcatttgtgatctggggcaagtcatttaatctttctaggccttactttctttgctatctctaatttgagtggtgacattaaaatgaaataatatatgaggagtactttggaaaaaaataaaaagtttatatatttgtatgcatattttatatataactaatatataaagtgctagaagttgtcgtaggtgtttttagtaaaccaggaggtttggcttaatctcgtgtcacagctgtttccactcattcgttgtagcgtgttacctgcagacccagagcaaaatcttggaagcaccctgattcttcagaactgtatacccactctgcatttctgacttggaattttctgaactatagagttttacatttttctgagcagttacaagacctagaagtgttttttcagctgtagagtagaaatgcttaggatttgggagtgaacagactcaggactattgagagattgaggtccacttcagcagtttgtctttagcatgagagactcattcaacttctgttcttggcaggcagttaacaagatcaaagagattgctgtgaccgtgaagaaggcagataaagtgtaagtctgtagtgggtttttttttttttttttaaagagacggagccttgctgtattgcccaggctagtcttgaactactggctcaagtgatctcccacctgcgactcccaaagtgctgggattacaggtgtgagtcaccgtgtcaggcctttgtcagaaccttgactgacttcctgtggccaaattggatgcagaagcatgctgcaatccctctatgtgcctggggctgtttggctcctgccagacccttggctgtgtcccagcccacagagcacaaaagaagctgtcgactgtagtttaaaagctgccacatatgagatctttgactgcagtcaccatctgtcactgataatctgccctaaagatacaaaaggtgaagttggagagggctgagtttagagactggaagggaactacctccacactgtagtagaatcagataagagggatttggttttcaagacctgatgcagattctgcccttgtgtcccagggagcagaggaagctgctggaaaagtgtgccatgaccgctctgagctccaagctgatctcccagcagaaagctttctttgctaagatggtggtggatgcagtgatgatgctcgatgatttgctgcagcttaaaatgattggaatcaagaaggtacagggtggagccctcgaggtaagcctgctgtggccttcctagacagctcttgctttcatattgacccttcagacagcttcatatggcagaggggtactcattacaggaataaagagaatgcatgttaggcaggaagtcagacttacattgtactttccatactgccattagaggctgttactagatgaacttggtaacctctgtggatattatttgtcagcagagtagaaaattggactgtatgattttcagaatctcaggttctctgtgtcagtgggtggtggaggggtagtaggactagctcaaatcatcaatgacctcccaattaatacatctgagagggatttttcagttcactgcttactcctaagtgatactgttaagcttgccct

SEQ ID NO: 94958 - DNA, 1014 bp, Homo sapiens
atccattgtacttatttactatttgcagggtgaagtttcctactttattcttctgcgtaaagccttctgatatctacattccctatacaaagccaggcattaacaaagcctgtaagatccttctaaactggcccctgcctacttcccctctctcttcttcactggctggttcttaccctctaaattctagcaacttcaaatggcttttcattctctgattccacaacactgcctcccacctcttaggagaaccccttttttccttttttctctttgactaatttctgctcatctgtcattcagctcaggcatcactccctttaggaagctgtggatttgaatgatgcaggaactggggacagatactcttcacccatgggttacagtattatagattagaattgtagatgagcactggcagagaaactaaaggttattgaactgaatacccttttttatggtgtgggaaatgactcggtcatttagtaaggaaaagatctgagattggaacctaagtctcacggtagtgctgagtcagccctgggtgcagtgtgctttctattatgccctgctgttaaatccaacccacagagaagctctgttgcagaacaagtggtagaagatccctaccttgagggattgaggtctgaggagctgcagtgatagcttagaaattatgcaggggatttctgattcttaagaccttttggcatcatcttctggagggaggaagcgtcaaggctatagtatccatgctgttgggggtgtgggggtggagggtgcagtgcaaattatgggtacatggaggtgtacaggaggatacttgagatttgggagctggggcatagaagagggtagcattgcacagcttttgttttgccttctttgtaaacacctggctcctcttctggcatactttttggaagtttgtacagcattatccatcggccagtgctgcagaggccagtcttagaggacagcccagtaggcctttaccatgctttgcctctgcta

SEQ ID NO: 94959 - DNA, 3346 bp, Homo sapiens
tcaggtgatctacctgccttggcctcccaaagttctgtgattacaggcatgagccactgtgcccggccaaaggggtcttattgggaactccatgaatccagcacctcagaagagtctagacctcagccagtttaaactatttctcgcatctggacagcaccagctgtggttctcagccttggggttactttctgcttttgtgttggggagtttcaggtgattcctaagtcatctcatggggtccttatttgcttggactgaggagtagctattctgtttatctctgttaattcccagatgaatcagcatgttttatttggtgggggcagatgggtatattttaccctaccgtatatgtcaaccttcaccccaaagcattctcatccttttctgggtctctccaggattatcaggcaattgttgatgctgagtggaacattctctatgacaagttagagaagatccatcattctggagccaaagttgtcttgtccaaactccccattggggatgtggccacccagtactttgctgacagggacatgttctgtgctggccgagtacctgaggaggatctgaagaggacaatgatggtaaccagattttcacaggctgcttctcggcctttgtggccctgaagggttttcactgacccctggtataacagagtgtactgtcaggttggcgtgtgaattgagccctgttttttttttttaactcttttttttccaggacacattccatttccatgtgtgtgtgcccagtagcacaaactactttagtctaaccaaaacaagtccagaaatctggtttgtgagagaacctagcagtaatgctatgattagctggacaaactcaaatattgattcttccagccagattttttccctttcatgagcatcccacaaaagatacttttaggtttaaagtactcctgagttcagttgctggacccagtgccaccctagtttaggggagggagtataagctgaattgaatgggtccctatctccttttaacttcttctgtttgcctttgatgtgttttagttctattttgttttttttttgctctttcagagagggggaagggtcgcctggaagtcaagggaaagggcgggtaatgtagaggctctgggggcatgcgtgggaattggctttgagacgaggtggcaggaagctgcctggcctcgggaaccttcactgctagatcttgccttccttgctccctaggcctgtggaggctcaatccagaccagtgtgaatgctctgtcagcagatgtgctgggtcgatgccaggtgtttgaagagacccagattggaggcgagaggtgagccgtgggcccaggccgagctcacaaacctgcctgggtctggtcttctgccatcttttggctgtggtatacagcttttacaaagtctcacctttgtgtacaaagtggtatacagcttttacagagtctcacctttgagccataaagagctcagataatatacaggattacaggaagatctaaaagccttgactccacaatcttttatgccctagtggtacagctgcagacctttccaagaaaatgtctataaggttgggattgggtaacctgagtgaagaatgtaagagcagctgctgagtgttgggggggctggcagtgaggacaatacagtaggatggtggcagacaagagttcatgtgtgtactgtttaatcctgggcataggtacaatttttttactggctgccccaaggccaagacatgcaccttcattctccgtggcggcgccgagcagtttatggaggagacagagcggtccctgcatgatgccatcatgatcgtcaggagggccatcaaggtactgggctgatatcctcctgcttgcacagcctactctctcctatctccctagctgatcagaccttggatttgtgtggtgattccttctctatataacctgccctttcctgggtggtgtggtgagccctgatttgccccacaaatggtagagaaactgagcctcagtttctcaaaaataggtcatcctgccttgaaagctaagacttgttcttttagccgggcgtggtagctcacacctgtaatcccagcactttggaaggccgagatgggagggttgcataagaccaagagtttgacaccagcctgggcaacatagcgagatcctgtctctacaaaaataaaaaaattagccaggaatggtggcatgtgcctgtagtcagtcccagctactcgggaggctgaggtggaaagatgccttgagcccaggagttggaggttacagtgagctatgatcacaccactgcactccagcctgggcaacagagcaagcagaagaaaaagacttcgttttgttagcaaactggagctaatgtagtcagatattccagtaattgtgccagtgtccttgagctgcaggtgaccttgaaaatagtcagaaaccataaggttcaccaggttgaagttgggatgttctagataggggctgtgtctgggcgtttggggcttgggatggaggaaggaatgaagaaccactctttctgggctgaagggacctactgagtggcccagcatggaagcttggaccaggggccctcttacattgagaggtggtctgatctctgcagaatgattcagtggtggctggtggcggggccattgagatggaactctccaagtacctgcgggattactcaaggactattccaggaaaacagcagctgttgattggggcatatgccaaggccttggagattatcccacgccagctgtgtgacaatgctggctttgatgccacaaacattctcaacaagctgcgggctcggcatgcccaggtgggtcctttctctccccagggttcagggtttgggcgggtggggctagattctgaatgtgagctgtgcttactcaagctgtgcacgcctggcccaggagataggctgcaactccccccagcctgtctgcctgaccaactccctcctctgagggcagaaggaaagccatggtgctagcacaggagatccagggtttcttcattgcttctaccaagagtatgatcgtggccaggtgcggtggctcacgcctgtaatcccaacattcgggaggccgaggtgggcggatcatgaggtcaggagttcgagaccagcctggccaacatagtgaaaccctatgtctactaaaaatacaaaaaattagccaggcgtggtggtgggcacctgtaatcccagctactcaggaggctgaggcaggagaattgcttgaacccaggaggcagagcttgcagtgagcagagatcgtgccgctgcactccagcccgggtggtagtgtgagactc

SEQ ID NO: 94960 - DNA, 1361 bp, Homo sapiens
tttgttaagtgcttagcacccagtgaatgaccctgcttctggcttgtattaggacttttgcttaaagtcactttacctctgtgtctcacttgcctcatctgtaaaatcgggctatttgaagcaatgagatgaaagatgggatagtatttttgttattcctgtttatcttgagaactcattgtttgatatatatatatatatatatatatatagtcctcaggtgacctgaggatggggccgccccaaaacacaacagcttgcctgggagaagatcccagaggtcttgtgtggtatgtccagggctaaggggaggagttggcgggagtaggggtgtttccaggttcctggcatgctcataggaagatgcagtattcttcagcgaaatgccaccaagttcagagagtctgcgggttcctagcagtgtcttttggagtaccagtttacaagaggaaagttgaaagtagttccatattacctcctttcttttcctactcttttaggggggtacatggtatggagtagacatcaacaacgaggacattgctgacaactttgaagctttcgtgtgggagccagctatggtgcggatcaatgcgctgacagcagcctctgaggctgcgtgcctgatcgtgtctgtagatgaaaccatcaagaacccccgctcgactgtggatgctcccacagcagcaggccggggccgtggtcgtggccgcccccactgagaggcaccccacccatcacatggctggctggctgctgggtgcacttaccctccttggcttggttacttcattttacaaggaaggggtagtaattggcccactctcttcttactggaggctatttaaataaaatgtaagacttcagataactttgtaaattattttggcatggtactcataaatgtctggctgtagctcagaattttagctttacatgcacttgtccaacagggagacaagagcatcctggggtgagctccactagagtggcccgtctggaagtttcactgtggttgcattctttgttccagaagtggctggacaacacgcagttgctttcttctggcatcatcttatttagccctggcctagccagacactgctctcagggtttctctggtttgagtaaatgggttacattaccttgtctgccccttctatctccatattcttttggtttagtcttttgttccctcttactcaagactgtgagaagggtgttttagggagggcttatgctctctaaactctagtgatcccttggaagtctactaaggagacgactgaaagcacccacctagtcttttcagttcagcccccagtgatcttggtccttctgctttcttgtgaccaatggga

SEQ ID NO: 94961 - DNA, 1103 bp, Homo sapiens
ccatgttggacagagcagataatggaacagttccatcatcacagacagtgaaggtgtagagttttgtcactaatgagcagtagttgttgttttgtctggtgaatattccagggggtacttaattcattgaacatgtattattagaattcaccatgtgccacacattgtgctgggtgctaaggaaagcttggtgaacccaaacatttttggtctctgccttccttgtgttcatggtctagacagggaggcagacagatttcagatgatcacataaagtgaaactaatatatgtgctaatattctatgaaagcataaagtaagataatctggccttgtcagtgaagttgggaaagccttcttgaggaggttatgatagagctgatatctgaagacagtttaaggttaatcaggcaaaggggagggaaagagccgtctagctgagggaaaaacacatgaaaaggtactgttgatgagagagagcatggcattttccaggacccagaagccaacgtggtttgagcacagactgcaaggctttgtgtgctatgccaaggatttaggggctttatctctggagctttggggagttgaagaaaatatttgaaacgaggggatgtatgataagttaggtgtttcagaaaggtcaggtgtatagcagagtgtggaacagctgtgatagcaaggtgggatggggagcagtagccataggtcaagggcataaattaggagaccattgcagcattgcccggcaaaagatgatgaaagtttggaatagggaagtgttggtggatacagggaaaagtggactgatttgagagatatttaagaggcaaaatcatcatacttaataacggatgggatgtgaaaggtgaagtagccaggtgttaggttattgtttgaatggttgtgccaatattaagatatggccagatttatggtggaggtggtggctgtgagtgggtggtggaattggttgggtgagtcttaagattatgagtttggttttgaagattgaaggagaaggctgggctagagatttcaagttgtaagtcatttacatagagaccataattaaagccacacttgttgactaggtcttctaa

SEQ ID NO: 94962 - DNA, 1055 bp, Homo sapiens
aatccagtaaacagaaaataacagtaccatgggatttgtattataatggtgtagagcaggagtctgcaaactatagcttacaggccaagtcttgattttgtactgtccatctgctgagaatgatttttgcatttttaaaggattgtaaaaacaaacaacagtagtatgtatgaccaacaaaaccgaaaatatttaccatctgaccctttattaaaaaaggtttgctaactcctagagtttaaaatggatacataacttaaagggaagctatttttcaaattgatgtaaaaaagagctttctaatagagccatttaatactaaaaaaggctatataacaacaacaaaaagtgagcttcatgtcactgcaaaatgtctagcaaaattctgtattaggattttagcactggggaggagattgtacttcgtgacctaaaatgttttctaatgtaaagttttataactctggcttctcatttactatagttagggcagaacattttaaattattggagtagattcctggatctcataggcagaggaaattttatcattgctgttttgttacgcataagtactaacattgtgataaataggctctcgccaatggcaaatgtaattgatgatggctggtgccagaatggttagatacctcaaaaaagagggatgcaagccagtaacagatatccacacttgaggaaacaagaagcagttgaaagctgtaagaaaaaggcatggcaagtaaaatacaccaccttcccatcacacacacacagataatgttgtacacttgagaatcattaactcttcagctttggcctgctcctttagcaaatacatttgcctatttatgtgatttaactgtccaactccaccctgagatattcttaaatatttaaggagatgctgaaatgctgcttgtaacttacttgttacttactattccttacttatacttaaatagctattttaggtactgaggatttctgtaggttctgaaacctagttagggttaactctaattttttttgagaaaagactgtcagattctttaaat

SEQ ID NO: 94963 - DNA, 1001 bp, Homo sapiens
gaagacacgaaaagatacacagtggcctgaaaacaatttagctgataaagatcaagtttcagttgcaacttcatttgacataactgatgaaaacatagctactaaaagaagtgaccattttgatgctgctcgttcatatgggcagtattggacacaggaagattcatctaagcaggcagaaacatatttaaccagtaagtaccctgattctttttcagattcatctgacacaattgataaaaataaaattcccaagggaagtaacaattttagtgtccccttttcctatgtgccatggaacaaagagggaactttgcaccacccagaaacgtgtgtaatcagtaaggactgtttttcctttccatgtgaagttgctgctcatcatcatcatcataaaatgtcatattctttcttgtgttgtttgttggaaagaagaggaaaaggggttcccttgacttctgatagtcattattttgagaatgtttatttaagggctccagctgagattgaggtgaaacaaaagatggattctttggagggttatgaaagaaatgaagaaggtttacagaaagaatcatctcaatgttttgaactaacggagactagaaataatttagtatcttcagaagtgcaacccagattcttagaaatacagtatattaggaatgttatagctcctgataattctgtaaaagtttcagaagcacatgtactctccaggggacataatacctctaaaatggaggcttctggttggattgttatatccaacttggatgagatatcagaacaactgtattttcaagaggaaagaaaccaaaagggaacttctctttttggtgagaaaaatattgatgctgctgaaaatatagcctttgaggcagttattgcctctattgagccttctaagaaagagagtacagtaaatgaaatccaagctgacatcaataaatatttaacagatgacagccgagagagagccaaaaaatccagatctttct

SEQ ID NO: 94964 - DNA, 1079 bp, Homo sapiens
catctacattaggtatttctcctaatgctatccctcccctaaccccctaccccgcgacgggccctggtgtgtgatgttcccctccctgtgtcattcttttatagaaggcttttatttgcttggatccttggatcccttggcattaatgttcctctggtcccgttgaatgaatatcctcttttgttgtctggtactgtaagtcccaaggtgggccctacttccttgtgatatagccttatatcctgttattcattaaatacagttagataaaatagtgatgtacttaatgttacttctcttttcctatgtataagattggtatgtttttgtaaagctctattagtttgggttacaaccacatttagacctttaggttcagattgttggtagaaaatgaacaaagatattatgatgaacttttatttataatttattacatttattaaagtttttttaacacagaatcactaggtttattttcttcagtattccaaactaggcattttttaattttaatctgataactggggatgaaaatgatagttaacactttgtgctcaagtactgtgctaagaggttacatgtatatatcaattcgtttttgtcctctgtcaatcctatcaaatagaattgttagagattattatcatccctattttgcaattgacacttagaggatttaggaacttgctcataattattcagcaattgggggaaccagtatttgaaactaaccatatctgtgtacttaaccaccataccataaactgttccccctccccccaccttttaactattcttggtgaaactaaggttaagattttgcattattttggcaagagtagaggttttgaaggagattgcctaaagttgagttcaataacaatgagaaacaaagtaacaacttttaaagtgttctaaatttttaatactacttttgtgacttacatcaacctttcatgtagataaaatgtattttaaaaataaagatatataggttcagttaatgtgcagagactagctttgaccactgctccaaattttaatctgtccttaaatatagcctgaagtattattct

SEQ ID NO: 94965 - DNA, 1048 bp, Homo sapiens
gacggggtttcaccatgttggacaggctagtctcgaattcctgacctcaggtgatccacctgcctcagcctcccaaagtgctggggttacaggcgtgagccaccgtgcctggcctaatatgctattttagtacctcttgttttggccatttagctctaaaaattatttaaggtttaagccttagatttcttttctctccccttcatatccccccacctttggagacctagttgcctgtctctgtgtggatgattatcacctctgtttttataccctaatatttgtctaatttattttgcatgttttcttgtgaacattgtcatcaccccaaattcaacttgctctatagcaaaataactcatgtttttcctaaaattagactgacttgtagagttcctgagtttttatgaaaggtattagtatttttctggtttcttggtcatctttcattctttcttcattattgattaaacattgggaagataaacgaatcttgatttctgttttctcctggttctttccattttcaattagcaatgaagatctgctggtttcttaaataaatacttctcatatttttcattttacattttcttttgtattacctactttttttttttttttttgagacagagtctcccactgttgcccaggctggaatgcagtggtgcggtctcagctcactgcaagctccgcctcccgggttcacaccattctcctgcctcagcctcctgagtagcttggactacaggtgcccgcccccatgcccggctaattttttgtatttttagtagagacggggtttcaccgtgttagccaggatggtctcgatctcctgacttcgtgatccgcccgcctcggcctcccagagtgctgggattacaggcgtgaaccaacgtgcctggccggtattacctactttaatagttctatattttgaaactttaacataatgaaatttttttgacgtcaagcttgtaataaaaatttttctttctgtgtttgaaagctgtagaagaaaaactgctgtaaactataaacacacact

SEQ ID NO: 94966 - DNA, 1079 bp, Homo sapiens
cctagtgttttgtacccacaggtgttatcagacagtcatctacctgaagagagtctgaaagtttcagccttccctggaccagctgaccagatgactgacacaccagcagtaccgtctactttctactcacaaagagagaagcctggtattttctaccaacagaccttgccagagagtcatctgcctaaagaggctctgaaaatttcagtagctcctggactagcagaccagaagactggcacaccaactgtaacctcaacttcctactcacaacatagagaaaagcccagcattttccaccagcaggccttgccaggtactcatatacctgaagaggctcagaaagtttcagctgttactggaccaggtaaccagaagacttggataccaagagtactttctaccttctactcacaaagagagaaacctggtattttctatcaacagaccttgccaggtagtcacatacctgaagaggcacagaaagtttcacctgttcttggaccagctgaccagaagactgggacaccaactccaacctctgcttcttactcacacacagagaagcctggtattttctaccaacaggtcttgccagataatcatccaactgaagaggctctgaaaatttcagttgcctctgaaccagttgaccagacaactggcacaccagctgtaacctctacttcctactcacaatatagagagaagcccagcattttctaccaacagtcgttgccaagtagtcatctaactgaagaggctaagaatgtttcagcggttcctggaccagctgaccagaagactgtgataccaattttaccctctactttctactcacacacagagaagcctggtgttttctaccaacaggtcttgccacatagtcatccaactgaagaggctctgaaaatttcagttgcctctgaaccagttgaccagacaactggcacaccaactgtaacctctacttcttactcacaacatacagagaagccgagtattttctaccaacagtcgttgccaggtagtcatctaactgaagaggctaagaacgtttcagcggttcctggaccagg

SEQ ID NO: 94967 - DNA, 1031 bp, Homo sapiens
gaagcctggtagtttctaccaacaggtcttgccacatagtcatctacctgaagaggctttggaagtttcagttgctcctggaccagttgaccagacgattggcacaccaactgtaacctccccttccagctcatttggagagaagcccattgttatctacaaacaggcctttccagagggtcatctacctgaagagtctctgaaagtttcagttgctcctggaccagttggccagacaactggcgcaccaactataacctctccttcctactcacaacatagagcaaagtctggcagtttctaccaactggcattgctaggtagtcaaatacctgaagaggctctcagagtttcttctgctcctggaccagctgaccagacaactggcataccaaccataacctctacttcctactcatttggagagaagccgattgttaactacaaacaggcctttccagatggtcatctacctgaagaggctctgaaagtttccattgtttctggacctactgaaaaaaagactgacataccagcaggacctttaggttccagtgcacttggagagaagcccattactttctaccggcaggctctgctagacagtcctctaaataaagaggttgtgaaagtttcagctgctcctggaccagctgaccagaagactgagacattaccagtacattctactagctactcaaatagggggaagcctgtcattttctaccagcagaccctatcagacagtcatttacctgaagaagctctgaaagttccacctgttcctggaccagatgcccagaagactgagacaccatcagtatcctctagtttatactcatatagagagaagcccattgtcttctaccaacaggccctgccagacagtgagctaactcaagaagctctgaaagtttcagctgttcctcaaccagctgaccagaagactgggttatctactgtaacttcctctttctattcacatacagagaagcctaatatttcttaccagcaagagttgccagatagtc

SEQ ID NO: 94968 - DNA, 3784 bp, Homo sapiens
atcaacagtaacctctacttcctactcacacagagagaagcccattgtttcctaccagcgagagttgccgcattttactgaagcaggtttgaaaattttaagagttcctggaccagctgaccagaagactggaataaacatcctgccctctaattcctacccacagagagagcactctgtcatttcttatgagcaggagttgccagatcttactgaagtaactttgaaagcaataggggttcctgggcctgctgaccagaagactgggatacaaatagcatcctctagttcctactcaaatagagagaaggccagtatttttcatcagcaggagttgccagatgttactgaagaagctttaaatgtttttgttgttcctggacaaggtgaccggaagactgagataccaacagtacctttaagttactactcacgtagagagaagcccagtgttatctctcaacaggagttgccagacagtcatctcacagaagaggctctgaaagtttcacctgtttctataccagcagagcagaagactgggataccaataggactgtctagttcctactcacattcacataaagagaaactcaagatttcaactgtgcatataccagatgaccagaaaactgagtttccagcagctacccttagttcctactcacaaatagagaagcccaagatttcaactgtgattggaccaaatgaccagaagactccatcccagacagcttttcatagttcctattctcaaacagtaaagcccaatattttatttcaacagcagttgccagatagagatcaaagtaaaggtattctaaagatttcagctgtccctgaactaactgatgtgaatactggaaaaccagtatctctctctagttcttattttcacagagagaaatcgaatattttcagtccacaggaattgccaggtagtcatgtaactgaagatgtgctgaaggtttcaacaattcctggaccagctggccagaaaacagtattaccaacagctcttcctagttccttttcacatcgagagaaaccagatattttctatcaaaaggatttgccagatagacatctaactgaagatgctctaaagatctcaagtgctcttgggcaagctgatcaaattaccggattacaaacagttccctctggtacttactcacatggtgagaatcacaagcttgtttcagaacatgtccaaaggctaatagataatttgaattcttctgactccagtgttagctcaaataatgtgcttttaaattctcaggctgatgacagagttgtaataaataaaccagaatctgcaggttttagagatgttggctctgaagaaatccaggatgcagaaaatagtgctaaaactcttaaggaaattcggacacttttgatggaggcagaaaatatggcactgaaacgatgcaattttcctgctccccttgcccgtttcagagatattagtgatatttcatttatacaatctaagaaggtggtttgcttcaaagaaccctcttccacgggtgtatctaatggtgatttgcttcacagacagccattcacagaggaaagcccaagcagcaggtgcatacagaaggatattggcacacagacgaatttgaaatgccggagaggcattgaaaattgggagtttattagttcaactacagttagaagtcctctacaggaagcagagagcaaagtcagtatggcattagaagaaactcttaggcaatatcaagcagccaaatctgtaatgaggtctgaacctgaagggtgtagtggaaccattgggaataaaattattatccctatgatgactgtcataaaaagtgattcaagtagtgatgccagtgatggaaatggttcctgctcgtgggacagtaatttaccagagtctttggaatcagtttctgatgttcttctaaacttctttccatatgtttcacccaagacaagtataacagatagcagggaggaagagggtgtgtcagagagtgaggatggtggtggtagcagtgtagattcactggctgcacatgtgaaaaaccttctgcaatgtgaatcctcactgaatcatgctaaagaaatactcagaaatgcagaggaagaggaaagccgggtacgagcacatggtaagaagaaagtttcaggcttataaacgttatagtttaataatgtgtttaaagttagatatttatgttttgaggaagcttagccaatgaaaaatacaagcaagatcaagaaaaaaaatgaagttagatatttggagttctaaatgtattttccaatagaattgttagaatgactatatttcttctaacaatccataaaaagcctatttaaccaataatgtagttaagttacagtattaatagtaccagcctgagtttacgttcttgttcttaggagaagtagattctgatgtatgacagagagtaaagaggtcgcttgggctcctgagctcctaaagctatcacgtttctctaatcctcccattatagtatccttattctgaaggcagaaagagcctccaatttgctgtgctctaaattgctttttgtcctaaaactacatatattttctctttcccttttctaatagaactcttggtgttgatctcagacatttgaaaaaaaaatcaatgtattttatactaaaacttgggttagaggtttaaaagagaatatttacaaatctcattaatttctaatagaattccattaaaaacaaaaatctgtaagacaatatggggaatatattttgggaggcaatttaaaagcaatttaggcctacctagaaatcgtcccttgaggttaacttcctacgctgttccctgcacatttttattctacaaaaaaacctccaagttgtatttattacttttaaatatcagctgtcatggaattatgagtaattgtagcaggaactaaagggagaggtaaagaaactcatgattaaaaggaggattaagataaatatgattgattacccgatttaaagtggcttttttgtagaattatctatagagcatgacttaagaaaatcagactttgcagtgaaaggatctctgtcaagaatttctaataggttgtcataattgagaagaagacatactaagcattgcagtgggtattaaattgcatatattgatgatcttctgtgttgcaattgttgacaaattatcacttttgcattgtattatctcaagtgtatgctttctctccagcctggaatatgaagttcaatttagcacatgattgtggatactccatttcagaattaaatgaagatgacaggaggaaagtagaagagatcaaggcagagttatttggtcatggaagaacaactgacttgtccaaggtataaaagaaatctggaaatgaagaaagtaaatatgaaagaatgggtgatggaattaggatctcttacttgggcatcagttgagttgctgataatatttggctaaagccttttttggttttgtttttgagacagtcttgctctgttgcccaggctgaagtgcagcagtgcaatcacaggtcactgcagccctgaactcttagactcaaggaatcctcccacctcagcctctcaggtagctgggaccacatgtgtgtaccgccctgctcggctaatttttaaatttttggcagagacagggtctctacgttgcccaggctggtcttgaacgcttggattcaagcgatcctcttgccttggcctcccaaaatgctgggattacaggcatgagccactgtgcctaggcagg

SEQ ID NO: 94969 - DNA, 2717 bp, Homo sapiens
ggtggtgatattgggggaacatgcaggtcaagaacttgattttaaggacaggaagcagaagttgtacttgatgccttcattcatatcccattggtgtcagtctagtaatgtggttacaactagctgcagaagaaacaggaaatgtctcccacttggtggctatgtggccagcaaaaatttgagtaaggcatttctattattaaaagaaaggtgagaatacttactggtggacaatagtaatctttgctgtttactttagtggaaattttttagaagaactctctgagtggtcttaatcattgtgagccattttattctgtagttaactgtcttttttgcttgctgtgctctttgtcctgttatattataaaagaatgacatgaccttcatggtctaatcttagcgtgggtataaaactgatttgtataaaactgatttgtttataactacttggactacttcaaataagaacctgtttgtttgtatcttctagggtttacagagtccacggggaatgggatgcaagccagaagctgtatgtagtcacattattattgagagccatgaaaagggatgtttccggactctaacttctgaacatccacaactagatagacacccttgtgctttcagatctgctggaccctcagaaatgaccagaggacggcagaacccatcatcatgcagagccaagcatgtcaacctttctgcatccttagaccagaacaactcccatttcaaagtttggaattccttgcagttaaaaagtcattccccatttcagaactttatacctgatgaattcaaaatcagcaaaggtcttcgaatgccattcgatgaaaagatggacccttggctgtcagaattagtagaacctgcttttgtgccacctaaagaagtggattttcattcttcatcacaaatgccgtccccagaacccatgaaaaagtttactacctccatcactttttcatctcaccgacattctaaatgcatttccaattcctctgttgttaaggttggtgttactgaaggtagccagtgtactggagcatctgtgggggtatttaattctcatttcactgaagaacaaaatcctcccagagatcttaaacagaaaacctcttccccttcatcatttaaaatgcatagtaattcacaagataaagaagtgactattttagcagaaggtagaaggcaaagccaaaaattacctgttgattttgagcgttcttttcaagaagaaaaacccttagaaagatcagattttacaggcagtcattctgagcccagtaccagggcaaattgtagcaatttcaaggaaattcagatttctgataaccatacccttattagcatgggcagaccaagttccaccctaggagtaaacagatcgagttccagactaggagtaaaagagaagaatgtaactataactccagatcttccttcttgcatttttcttgaacaacgagagctctttgaacaaagcaaagccccacgtgcagatgaccatgtgaggaaacaccattctccctctcctcaacatcaggattatgtagctccagaccttccttcttgcatttttcttgaacaacgagaactctttgaacagtgcaaagccccatatgtagatcatcaaatgagagaaaaccattctccccttcctcaaggtcaggattctatagcttcagaccttccgtctcccatttctcttgaacaatgccaaagcaaagcgccaggtgtagatgaccaaatgaataaacaccattttccccttcctcaaggtcaggattgtgtagtggaaaagaataatcaacataagcctaaatcacacatttctaatataaatgttgaagccaagttcaatactgtggtctcccagtcagccccaaatcactgtacattagcagcatctgcatctactcctccttcaaatagaaaagcactttcttgtgttcatataactctttgtcccaagacttcttccaagttggatagtggaactttagatgaaagattccattcattggatgctgcttctaaagcgaggatgaatagtgagtttaactttgacttacatactgtatcttcgagatcactggaaccaacctccaaattattgaccagtaaacctgtagcacaggatcaagaatctttaggttttctaggacctaaatcttcactggatttccaagtcgtacagccttctcttccagacagtaacactattactcaggacttgaaaaccataccttctcagaatagccagatagtaacctccaggcaaatacaagtgaacatttcagatttcgaaggacattccaatccagaggggaccccagtatttgcagatcggtgagtctcattgtgataacaagcaagctggatggactttgtaataaagggtttcaaatacttaagtagatatcggttcttgggggaaaggccgtgtgatttctctgagtggaggttgtgtctggctaattactagaagtctttcaaggaataaatgtgttaagtaagagagaacatgtgacagtaatgcatttatatttcagagggcttttggcaagacttgacatcaagtgtttttaaaaattgaatgaccttgaaaagaatctttgatcatccaatgatacaattacgaatttatttactgtgttggacatatgctgaagatctcctttggaggttgcacacacatacatgggtgc

SEQ ID NO: 94970 - DNA, 1137 bp, Homo sapiens
gtgtatttagcacagtcccctaatttatggtggacatctagtaatttaaaaaaatgtattttcaattcagctgaaaaatagcatttcctcaactaaattatataatttaacattctaaattaaaagtaggttttaagataaaagtaaacatgtgtgataacattgtatcaaacaaaataaagggtactgctgaaattttaccttaataacgtttgacattgatgtgtccacaatatattcctatagctacttaaatattccttgaaaccacttttggaaagagatttcagtctctaatggccaaggatataatctgctgtattctttctcttttttggtcagattaccagagaagatgaagaccccactttctgctttctctgaaaaattgtcatctgatgcagtcactcagataacaacagaaagtccagaaaagaccctattttcatctgagatttttattaatgctgaagatcgtggacatgaaattatagagcctggtaaccagaagctacgcaaagctcctgtcaagtttgcctcatcatcttcagtccaacaggttactttttctcgcggcacagatggtaagagaatgtgattgcattttagattgttagaccagctcttttgtgtagttatcttagaaatttgtggttgtgtctttctagtcagaaaacctaattttaatttaagaattagggtccatatgattatatctgtcttttatttgcatagctgtcaacagaatatgatttattatattttatcttaatttcaagcacagttaacatgtagaactcatgctgtttgtgttaaaacttagttttgtctcatcatatttgcaataaaaatgcaagtagttcataacaacttgaaagtaattgaggtctgcttttaaaatggcggataaattatcttgtattacagtaacagtaatgttattactatatagtgcgtatatagggagagtatgtatatactaaatactataacaaatagatgcataaacatgtgatagtgcaaacacaatagcagtttatctcttacttataaagcaatcaccagagacccaggttgtcttcttgctctgttttctttaaaatatataacccaaggttatgttggatttaccttcat

SEQ ID NO: 94971 - DNA, 1887 bp, Homo sapiens
agcagtttggggggccaaggcgggtggatcacgaggtcaggagatcgagaccatcctggctaacacggtgaaaccccgtctctactaaaaatacaaaaaaaaaaaaaattagccgggcgtggtggcgggcgcctgtagtcccagctactcaggaggctgatgtaggagaatggcatgaacctgggaggcggagcttgcagtgagccaagatcacgccactgcactccagcctgtcgtatttaaaatcaggtgttaccctcagcatgggggagatggaaggaagaatgaggggagcgtgtaagtttctagccagattttatttcctaacctgggtaaggttatatacacttgctttttgtaattcactgaactctttatgtgcacgttttcccccatattttccactgtacaattaaaaagatattttaaaaagcaatatggtacttagaaatgaatctaaaagggtctgtaagataaacaatacggtacttaggaatgaatcttaaagggcatgtaaaactattttaagagaaaattataaaactacattgaaatatattaagacctaaatagttggaaaattacacaattgtaataataaagatgtcactaaattaatttctaaattaaatgcattgctactcagaattccagtaggatttttcgtggaacttgacaggctgattctaaaatatttatggaaaatcaaaaaacgtatatttaaagaataagataagggatcttgccataccagacatcaagacttattacatgtgtagcttatttaagacatcatttacaaaggaataaacagaaagaaaaatgaaacagaatggtgacccagaaacatatccatgaatgtggaaacctaacatacacagagatggcataacaatctgtggagaaaggatgaagaggaactattcaatagagtttgaaccaatgaatatatatctggaaaaaataaaatcagataaatcactgccacacactaaacagaaatgtatagtataccaggcatattaaaagtaaatgggataactaagtttttagaatttagatggtctgtccttatgaccatgtgataataaaagatttcttaatcaggacacgcaaagcacctaccctaaagggaaaatataataaatatgccattattaaactgaaaaactttttgcctaaacgatatcaaacaattaaaagacatgaaacagcctgggagaagatatttataatgcacaccacctgcaaagacatttcacaggaatgttcattgcagtgcttttcaaaataggaaatagccttaagttgatcaacagaggtgtattcgtatatattaatacagtagaataatacataacgttcagaatcaaagacatatattaattgactaactctcaaaatcataatattgagtgaaaaagtcatggtgcgtaaaggtacagacagtattgtacccttcgtataaggtttaaagaaacttgcaaaacaatgctgtacactgttggttaatatatgcaatgtggtaaagaattacaaaacatccttgatattgataaactgtaaatttggtgtaaaggctgctactgagaagtgagaatggcatcattgggaacactttacacaagaaacattatatttgtaatattttatttcttaagctctatggtaaatacttgggtgttcattttgttgcctatatttttggtatgcctgaaatattttattaacattaaaacattttttaatgatctaaaaatttcagaagacatttagagaaaagagattaggaggattgaagtaataagaagtaagaaaaatgtgtgaatttaaaagaggtagcaagagttaactggttctttgcatttttagcaatctctattgcct

SEQ ID NO: 94972 - DNA, 1700 bp, Homo sapiens
gagtgttttcatgagacattcttggaaagatttctttcagcatcatccagacaaacatagagaacacatgtgtcttcctcttccttatcaaaacatggacaagactaagacagattataccagaataaagagcctcagcatcaatgtgaatttgggaaacaaagaagtgatggatactactaaaagtcaagttagagattatccaaaacataatggacaaattagtgatccacaaagggatcagaaggtcaccccagagcaaacaactcagcacactgtgagtttgaatgaactgtggaacaagtatcgggagcgacagaggcaacagagacagcctgagttgggtgacaggaaagaactgtccttggtggaccgacttgatcgtttggctaaaattcttcagaatccaatcacacattctctccaggtctcagaaagtacacatgatgatagcagaggggaacgaagtgtgaaggaatggagtggtagacaacagcagagaaataagcttcagaaaaagaagcggtttaaaagcctagagaaaagccataaaaatacaggcgagcttaaaaaaagcaaggtgctttctcatcatcgagctgggaggtctaatcaaattaaaattgaacagattaaatttgataaatatattctgagtaaacagccaggttttaattatataagcaacacttcttcggattgtcggccctcagaggagagtgagctgctcacagatactaccaccaacatcctttccggcaccacttctactgtcgaatcagatatattgacccaaacagatagagaggtggctctgcacgaaaggagtagctctgtttccactattgacactgcccggctgattcaagcttttggccatgaaagagtatgcttgtcacccagacgaattaaattatatagcagcatcaccaaccaacagaggagataccttgagaagcggagcaaacacagcaagaaagtgctgaatacaggtcatcccctagtgacttctgagcacaccagaaggagacacatccaggtacatggctacagattccatctggcaatgtgactgccctcttcatggactttttagttaagctttgcacacaggtgaaaaaaacaagccatttgccctttcctctctataccatttcttaccaactggaaaagagtgagaaagtgtagtacagtgctattgtgagttgtcattattttcatcaacattcatttacgaattaccttttgaatgaagggctttgctgctagatccttcacagtctgcaaagtttacccctgaaatgggggagctttgaggttagaatgatctctatcctgaacaatattgctgggtttatgtttatttgggttttttttttttaattcattcctctctgtctttcaggaaatatatttgaggttcttttaaacacacacacacagacaaacacataaataatacagggtttttttttttgtaattgaagaatggagttgatttgaaaaattgaagctggggtgagctacaatatgattttttaaaaatgagtaaataaggaattgtgaataatggaaagacaagtcaaagccaggaggaagataaataagccttgtggatgtggtcgctagaaaagagctacaaatttggctttatgttttctagcacttagtgttgctagaattttgtgatcaataacatt

SEQ ID NO: 94973 - DNA, 1575 bp, Homo sapiens
ttagacacagtgttttgaatattcatccatgacataacatgtatcaatacttcgttgctttttatagctgagtattattccgttgcatgtatataccacattttgtttatccattcatttattgatttgggttgtttccactttttggttattgtgaatagaattgatatagaacgtttgtgtacacctgtctgcaattcttttgggtatatatctaggaatggaaatgctgggccatatggtaattctgtggattagcttattgaggaactgccagactattccatagtacctgcactattttgcattcccatcagcagtgtataagggttcctccaaccctcctccttttttccacagcgactgctttagtttatattcgcaccagcagttcacaagggtttcaattttattgcatccttgccaacacttattttccattttttaatatataaactaaccatcctgttgggtgtgagttagtatcattgtggttttgatttgcatttccctagtgattattcatgttgcacatctttttatgtgcttatttaaccatttgtatatcttcttttgaaaaatgtcttttcaagtcatttggccattttaaatctggctgtttgattttttggtttttgagttgttgggattttctatatattctggatattgatctcttgttagatacatgatctgcaaatattttctcccattttgtaggttgcctctttcacagtcactctgctgaccgtgtcttctgacatatagaagttttaaattttgatgtagtccaatttagctattttttttttgttttttgtgcttttggtgtcatatcttagaaatatttgccaaatccagtgtcgtgaaagttttcttcttaagagtttaataattttagcttttacttttaggtctttgatccattttgagttaatttttgtgtatggtgtaagataagggtccaccttcattcttctgcatgtgaatatcccgttttctcaacatcgtttgttgaaaagactttttttccccattgaatgttcttggcactcttgccaaaaatcgtttagccatatacgtgagggtttttatctgggctctctattctgttagtctatatatctctctttatgccactactgcactgttttgatttactgtgtatttaaaatgagttttgaaagcaggtagtgtgaaacctgtaacttagttcttttttcaaaattattttggctgtttggtttcccttgagatttcatgaattttagtaaatattttattgtttttaatactaccatatgtgcaatttctttcttaatttcatttttggattattcattgctaatgtataggtacataaataatttttacatactgatcttgtatcttgcagctttgctgaatttattaactctttttttgtgtggatttttaaggatctctaggatttcatgttgaggaagttcccttctttttctattttgatgagtgtttttgtcatcaaagcattttggtgtttgccaaattcttcagcatctattgagattactagttttttctttttctttttct

SEQ ID NO: 94974 - DNA, 1047 bp, Homo sapiens
tccatgtccccttatgcgtctgtctgaaactgtctttagcatatatacccagaagtggaattcttggcttacaggctcgtatacttaatttcctacattagtaccaaattgctttccagttcatattcctacctgcagtgcatgaaaatttccatttctacttctctgccaattatttctaatttttatcagaacactagtaaaacaagtttctataccatgggaagataggtgttttttttttttctttttaatgagatgatacttgtcttgaacatctagagtatctctttaatttccgtgggaagagagtttttcatataatttacagtgctttcaaccagaatacattcgtttgttcattcatccaaacataattatagaattgacaaaagcacagagtgacatactttaataagcttttctcagatttatatatatgagtgagaaaatatatggaaaatttttataacaatatttaaaaacttgatttaaatatctggtaaaacttcattgtcaaaacacagcatccacatttgttccaaatacccatggaatatttacaaaattaattgtacgttagacaaaatattgatgaattctcaaagcagaagttttataagtaagcccatattctgtaactgtaatgcagtaaaattgaacttaacaactataatttttaattttgctaatgctttaaattgcatttctattaggtttcagatttgccatttacatttcttactttgagaattacctttgtgtatcctttgcctgtttttctctgaaggtttttttcctattcatttttgtaaacatatttggagaccactgtagttgctgtttttttaaattctgttttattacttttttttttttttttttttttgagatgtctcgctctgtcacccaggctggagtgcagtggaaagatctcggctcactgcaacctccaccttgcgggttcaagcgattttcctgcctcagcctcctgagtagttgggattacaggtgcgcaccaccacgcctgactaatttttttgtatt

SEQ ID NO: 94975 - DNA, 1115 bp, Homo sapiens
taccattatctgggaaattttattatcccattagagttttttttaccttagttgtaatgatcattgactgtaataatttccactgcattttagccatacattctcttaactattgtttgaattttggattcactcaaaattatttgttctctgcaatctttacttcttcacataccaaaataaatttttcaagaacctgttatgcaggcacagtacattgttaattttctgaggaagattttccatagttttctgatcaaccacactggcagaaatagataactagttctaatttccaaaaggtaagtaatagatagttaccacctgagtttctgcttctgcaaccttttttcactaggaattaaatgtatgtcacagcattattttttggacagacacttggtcattgtgtcaccccttggtgatgagtaaattttattgaaaatatacttgctgtttgattgacacagttctataaacttttcacaagaaaagacagtcttttggtgccatagactatatttctcattttgactctgactgttttatcaatgtgtgtctctggtcctaagcctgagtgattataaatgaattagcgtaaacccatgcctctaaaggaaaagcatctcccagcaggcacctggctagctgaaggccagcagtaccaatcctcctgcctgaagaatagcagtgtagggtcatatcagaaaacatggcccttttcctatgttggatatgtttttctaagatcagtttccacctaacaagtaattttttaattgaaaagcttttatttctaggtctgtctcatgtctttaataaatacgggaatgagtctcatttagttcttaagctaaagagtactacaaaaaccctgaaacatctctgagatggtacatttactttccattgttactcttgtataagacagcaacaggtgagtttgctctcatagtggaaattaaaacagaagcagccagccagcatatatttccttccaagattgtgtacaagagaaagcctaacccatggtggctgataatgccatttaatatatagtcacctaaatctttatgtgtcagctccattgcagaggactcagtgggctactccac

SEQ ID NO: 94976 - DNA, 1073 bp, Homo sapiens
ctgcctctcggacccccacctcctttcctgatgtgttttttctcaggtcttcactccatgaaccgttccacatgggctgtggtatctactctcctttctgagtttggcagctttcctgggtataagtttgttggtatcttgtttttaaatatgtccctctcagctaagcttgttgtgcttcaggtagtgagagcgtattgaccaacacaacttaccaccttccattcagtgactggaccatgtctgtggcctaacgtatgttattccttttgaactccttaaatcttttctgccacacccttccccacaagtttttgtttattctcatttcttgaactggtaatacagtacaaccacatgatacaaaatatttgatcaagagtgtccttcctactcctgttccccagcacccagccctccttcgcagaggtatacaataaaatttcatccattttaagtgtacagttaacttttagtaaatttacagagttttgcaatcatcaccaaaatccagttttagaacatttctgtcgttaccaaaaggtgcccttgtacctctttgcagtcaatccttgttcccagccccaggcaacctctcatctgccttctgtctcttctggagattttatgtatatagcatcagatgtggtcttttgcatctgcctttttttgttaacatcatgatttcaaggttcatccgtgctgtagtatgcatcagtggttcctttttgttgctgaatagtgttccattttatggatataccacattttgcttatctttcagttgatggacatttggattgtttgatttttttggatgtgaatgctgctattaatacttctgtaaaagttttgtgtgggcatacattttcatttcttctgggtttttactcaggagtgaaattggtaggtcatatgataggtttatgtttaactttatcagaaattgcctaagtgttttccagagtggctgtatcattttacattctcgcctgcaatgtgtgagggtttcggtttctccacttccttgtcaacacttgctattgtccacctttttatttatagccattcta

SEQ ID NO: 94977 - DNA, 1010 bp, Homo sapiens
ttcttttttctttgccctctttttccctcctactctcccctgtccttctttctcttcctctctcttcgcatccctccatcccacacaaagggattgtatttttgaaacattaaaaagggttcacgtactcacttgaataaatctgtcaactcagcctcaaggttactcccagagacacctatgatccttcccctcaggtaacttggagattgtgaacggtgccaaaaaacacactcgagatgttgggataactttcccaactccaagttccagcgaggctaaattggaagagaacagtgatgtgacttcttggtcagaagaaaaacgtgaagagaaaatgctctttaccggttatcctgaggacagaaagttaaaaaagaacaagaagaattcccatgaaggtcagtttctcattccagatcttgtagtagagaaactagtgaatttcaagtcccctgcgatgctgactctgtgtttccaagtgactctatgtggtccccacctacccccagccacaaccttgtcaggttttcagagtccagcatggcagttacacagtcatccctgcagcaaaaccagactcaagggcaccctgtggcctctgacagctgagacccctgagaacctgtattatatgcatatcctggataagagctgggtggggctgtaaaaaagtgaaaaatctgtgttccttctaaaaactgtttcctgtaggagtttcctggtttgttcctgtggaaaatgtggagtctagatcaaagaaggaaaacgtgcctaacacttgtggccctggcatctcctggtttgaaccaataaccaagaccagaccctggagggagccactgcgggagcagaactgtcaggggcagcacctggacggtcggggctacctggcaggcccaggcagagaggctggcagagacctactgaggccatttgtgagagcaacccttcaggtgcagtgacgttgacttaactttaatgctacgtgtagggagaagaagggcaag

SEQ ID NO: 94978 - DNA, 1018 bp, Homo sapiens
gggaggctgaggcaggagaatggcttgaaccgggacgcggaggttgcagtgagccgagattgcaccacagcactccagcctgagtaacagagcaagactctgtctcaaaaaccaaagaaatctccagcagcggaaatgtatgtagaactcattttggtcagtacttttccttgtacaggaagaaactgaggtcgcccggtgcaacgcccaacacaggttaagacaaagccgagactcaaaaccagaccccagcttccggtcccagcccatagattcttccatttccttcgccggaagtgatatacagcccctgttctccttcgcgtccgttgacgggacccaggttggggaggcggaagaatgggcgggaccatgggcggaagcacccctcctaccaggacccggaaacagatggccaccccgagccggcctatccggaaactggctcgaagaagacggggattggccatcgcttccggaagttgtgagctttgtttcggagcgggagctcttccgagacgcactgggggccggatggtgagttttccttgcgctctaacgggcaggctcgggagcgggagggtccgggcagttttagtagtgtctttgggacaacggctgcggttggtatttctcaagcggcaacgaggccagcccctgggaatgcagcacgagaatgatagagtcaggctgtcccctcaagaaatagtttagtgaggagacatgcagcggataggcgcaggattcttcagagttgtgattgggcccaaaaaggagctagtcctcagactaaaaagagccgtagtgccggggttctgggcgctgtagtaaatggactccaaatggagttgaagggagggaggagtgcgtcaggcggagatgaaaggagagagggaactacctgtccgatagggcagaatcggggagaaaggttggtgacttgagcttagagaaggccattgcggcggtagcagaagaggagaggcagggaccagatcgtagagtgtggaacaccgtg

SEQ ID NO: 94979 - DNA, 1267 bp, Homo sapiens
ttgggaatggacccagtgatacaaacctgtcctggaattctacctggagaccagagctggcctgaaaattactggtgtgacttttaattagttcaggtctaatcaggtttctttattgttcccttatgtattcaagcttaaggaaaaattgcattgctgtttacctctttgctgataaatttgcagtaattacagcattgcaggaaaaacaatctgttattccagtcttaaatttttctaaaagaagacaatattttagaactgaagcattgagaacttcccttgcaaattatttttaaaattctatcttgtttttctatgtatttctttctgactagacttgtgatatgcgtgtgtttatgtacagaaatttttagtgtttttgttatgttctgttattgacccaaaggccatctttattttctataactgttcaaaatttatattaaaatctacttaggagataatttctttagaacctagttactacctgtaattaattgtggtatttttgtgattagatattactttctttggcagtcagttgtgggatttgaccaacttcctttgactgaattgtcagatatacggtctcacacaggaatggatgaacttttagggattgtcaattgagcaagagagactgactgataaaccagattgctggtttattcaattatagtgagtaagttacctggcagggtaattgccatcaactgagtagaactatccagaaaacttgaaaacttttataaaggtgataaacagagtagaatatgtccatttaaaggctgtggatgtctagcaagactactgtgttattgctccgttgttgaatataacctcctgggatctttctccagttgcctctcctcttaagtggagttgtggcttacctttttttttttttttttttttgagacagggtcttgctctgtcacccaggctggagtgcagtggtgccatctaggctcactgcagcctctgcctcctggctgaagtgatcctcccacctcagcctccctagtagctgagactacaggtgtggactacaatgcctggccaattttttgtattttttttaatagagaccaggttttgccatgttgcccaggctggtctcaaactccttagctcaagcgaatccactcacctcagcctcccaaagtgttaggattatagccatgagccactgtgcctggcctaccttcactttttccaagttgtctcttctgctgctatacctgtggaacacacagacccttca

SEQ ID NO: 94980 - DNA, 1040 bp, Homo sapiens
agatataacagcttgaatagtgaatttcagcttaatttgctttttctggaaagatctgctttttgtacagttatttctaacagtttatcctctcctcagtattcaataggtgccggggacattgcttagaaagacaaaactacattgaagaccttcagaatggtcctatcagaaagtaagtcttatgttatatatgtgagatttgtgggtcagggagatctctgtttatgtaatttaagttgcatatgttcattcttctggtagcttgtttgtttgttggggggagatgtaaacaaataggaatgggagaaggaagaaattgttattttcatatgccaaaatatagtcactaaattgactactaaatttggaaaccagtaatattgtgtggaaaatattctctttaaggaattggaattccagtgtacccaggtcaagtgattttgaagactcagcacatctcatgcaaccagtccacaataagcctgttaaacaaggacctaggtataatctacatcagatccagggtcactcagctcctcgacatttccacacccagacccaaagtttgcaacaatcagtcaggtacctctctctgttttcccttttctagaattgagatagaaattaatactatagttaatgaaaacacattatgatactgatgaggaattcttcgttttttttttttttggagacagagtctcgctctgtcatccaggctggagtacaatggcgcgatctcggctcactgcaacctccacctcccaggttcaagcaattctcctgcctcagcctcctgagtagctgggactacaggcacccgccaccatgcccagctaattttttgtatttttagtagagatggggtttcaccatgttagacaggatggtcttgatctcctgaccctgtgatctacccgcctcagcctcccaaagtgctgggattataggcgtgagccaccgcgcctggccgataaggaattcttgctgttcagtttgaaccaggagatattattctgctctgtattttgcattta

SEQ ID NO: 94981 - DNA, 1095 bp, Homo sapiens
aacgtaaggatcagcagagaccatattaacaggaaaatatatactgtgttggaggaactggctagggagactgggccatgggggtagtatggcgttaaaatggagctggaaatatgaataggagctgaaaccatgcagagctatgtttaaggttttagtcactaccttaagagcaatagaaaaccattgaattttttttgttggggatgagtgtggggaacacattcaaatttgtattttcaacctatcattttgctgctgagtggagaatacactgcagagggaaagaggtagaagcaaggagacaagttgggaggtgtttgtaggaactgaggcataatggtggattggaccagggcatggtggtcattttggtagaaagatacagatatactctatagagatatttaggtaatattgttgtcaggagttggtggtgaattgaatatgagagtttggaagaaatggctgacagtgatggtgactcccaagtttctggcccattctgttggttatacagtattttttagatataatgttaatatttttcccaatttgtcttttgttcattgttggtttctgataaatactctgtcatattaaggaagtctctatttttagtgtataaagcattttgataaaaaatgattctgcattttctttccttttgtttattaaattacattaatgtaaataaatatataaatagattttctggagttgggtcatccttgcattcttgaaaaacgtctttttgtggtcatggtatgtcattctttaataactgctggatttgatgtgctgatattttcttaggatttttatatctatgtctataagttgaaattggaccttttttgaaaaaacttgatttttttcttttcgtatataaatgacccaaattatgttgttttgttagatatttgattgatgtagaaggcgtgaggccagatgatgcaattgaatgtaagtatgagggttgacactatttttcccttttattaaagttaaaggtggaaatgtagaagaatttatcaaattttggaaaaaaagaagtttgtaattcgtttgttccaatataagatagtcttgcca

SEQ ID NO: 94982 - DNA, 2107 bp, Homo sapiens
ccaggaggtggaggctgcagtgagccatgtttgtgtcactgcactccagcctggatgacggatgacagagcaacaccctgtttcaaaaaaaaaaaaaaaaaaagaaaagaaatatttataagcactaaatatgataagcactccacctggagctggagatacagtggtgaataaaatctgggagattacagtctgattaggagaccaacatgaaacaaatacagaaatacatatatagaagtgggcttatttttttctttctgaccactctggaagaaaggattgttgtaatataccttctatgttccaggagaatggaaactttcctttgaatctcgttgtatgttagcatcacaggacttgaataaatgcctaatgtagtacaggattttaagcacatatttgctcttatttcattctctgtgacagagttttgaaaagaaacttgctccagaagaatgcttttcccctttggatctttttaacaaaatccgagaacaaaatgaagaacttggactgattattgatttaacatatactcaacgctattataaaccagaggtaagtggaacccttcaatgaaaagaactttcttccttctgatcctaaaataatttatagtaattcagtaatcatcttgtgctaatgtgaagcttggccttctttgatgggtagtaagtttaaaagagaaccaagtgatttctctaattacatgtttttaattgctgtcttaaatggaatattattcagccataaaaaagaatagatttaatacgtgctacaatatggatgaaccttaaaaacatgcttagtgaaataaaccagacacagaaggacaaatatatgattccacttgtatgaagtacctagaatagacaaattcacagagacagaaagcagactaaaggatctatgaggtggggagaaaagggaattatggtttagtggtcagagtctttttgtcggggatgatgaaaaagttttgggtatagacagtggtgatggttacacaatactgtgaatgtaatgccactgaactatacacttgtggatggttaaaatgattttgacttagcctcttctgtcttttatctgtatctacttttctcccaccccaagaatatcggttctcaatagtgcctggaattccctctatctcacaattcaaatccaagttcttctgactctattctctactcttctacttaaatcatagctgctttatgaaggcactggcccttgaattataaaatattaaatggaactgtttatataatttatagttaaatatgcattcattcacatggaatttgctttcagttttgtatacctagtgactatctattatgtagttttattgaaaatcaagtgatacttcctggttgaagcagtgttggaaaaaatggctcttttatcagaattgtgtatactgatattggcatattaagtttgttataatctcttggcttatattctgggtcccctaattactctttaattatttctctacaagtgaaataatacacatcttttatggttttgctttataggatttgccagaaactgttccttacttaaaaatttttacagttggacatcaagtgcctgatgatgagactatttttaaattcaaacacgctgttaatgggtttttgaaagaaaataaagataatggtgagtttttgttcttacctgaactgtggtgtgcattatgaatggggttggggatttttggtatttttttatagttccaacctcagacctgttgtatttaatgatgctaaggtgatgaaaatgtcagatggtgctaatagggtaagatgtttttccttttgttgatcacaaataatttaactttggaatgttaaattagttttagtgcaaaatatgaactgaactggctcatctttcttttttaatttgaatgagaaatatataaaattaaaatgttatttttgtcttctatattggttaagaagtgagaagtagaagaaaagattaaaaaactctgagtcttagagttatgtgaaagagacaagaaagggcaaagattaagaatgggacggacccctagaagcaaaacaagaaagagtgcaccagtggaatt

SEQ ID NO: 94983 - DNA, 1257 bp, Homo sapiens
atggtggttctggttagcatgaattgatctgttatcagtctgacaatggtacggctgctgagtttgaaattcagaaaactaatacttgttcccttgagtttgggcgtttgtggcagagtttagtagcagccttctccttcagccctgatttgggaagcatcccaatacatgctatttgcattgcagctgtgggaaagtccacgtttgtgaagttactcacgaaaacttacccagaatggcacgtagctacagaacctgtagcaacatggcagaatatccaggctgctggcacccaaaaagtaagtttttagttgtggtgggtagttggcaggcatgggtgaataatctaattgtcataatttaatttactctcagtgagtaaagtagcccagtttgagtatcctttttaaaatagcttcattccagaaagcagaccacatacaccagagaggatatgacttgtttgaatatgtgcagttttgatttttgtggtttttatatgtctatctaagtgactgcctctgttgtttgtggtttcccaaagcatgtccaaccatcatggatggctttgaagatgaattttgtcattcctacacttaagtatttatattattacttaagctaaccactaggattaatagctaattatagtgattttaactttttaaataaagtcttagaaattagaagggatattagagaggttccagtcacactttgagtcaatgggagaggttacagctaacatttatgagcatgtactatgtgccaggcactgtactatgccaagcacagtacatttcacttacacctcatggcttaggccctggtgtcaagactatggctttggcagaggccatagagttggtttccagccacatcagtctgagtaaggaaagacttgtttcgacatgacccttagagggagcagaagcaccatgcctcctcaggcaccatgaactgctcctgccgccacctgggatattcactgagtggcacattctggttcttaactctaattactaaacagttctgccttttaatgagccatgttgcacccctgtgactctgactcattggttcaagttctacctcttaagtcttttaacttttcgccgtaacaaccctatatatagttgaaggtaatgattttcctgttctttctccccctcaagtctctctccttttttttttttttttgacagtctcattctgtcacccaggctggggtgcaatggtgtgatctcggcccactgt

SEQ ID NO: 94984 - DNA, 1027 bp, Homo sapiens
aatcacttgaactcggctggggtggggaggagggcggaggttgcagtgagccgggaggttgcagtgagctgagatcgtgccactgcactccagcctgggtggcagagtgagactctgtctcaaaaaaaaaaaaaaaaaatccggggctgctgaacatcccacacttgtgcccacttgcacatgccgagtaagtggaacgttttaattatgtttcataaagtctctagaattaagtagggttttgttttaacaaacaaattgtactccttatatgaaagataaaattctatttggtggttgattggttggattttcaaataagcagttgctttctggtttgccttgacattttataaacataactacagatggaagctcaaaagagaggcaacatagtgttatagtggaaagatttgattcagagttaaattttagatggttgttgactgttaactcctccccagacagacttcacaaatccctcaatcagtgatcgtgttaattctatatatggttcttcctctgcttttgttatattgaagtggcatgtcatctccctttagagagtcttatttaataggtaggaaaatctcatacctgattatgaaattttgactaagctggggatctgattctacctttttggtggaaggaaacttttgtaatttcttctttcattgattattaaacctgtttggggaggtaggggtgtgtgtggaggggtgtaccccatggagtaaatatgctttctaggaaattttcttctttttttcatctccctctaggcctgcactgcccaaagtcttggaaacttgctggatatgatgtaccgggagccagcacgatggtcctacacattccagacattttcctttttgagccgcctgaaagtacagctggagcccttccctgagaaactcttacaggccaggaagccagtacagatctttgagaggtctgtgtacagtgacaggtaaaatgccaagccctccaccagtcacaagccccatgctcagtgctgcctgtt

SEQ ID NO: 94985 - DNA, 1070 bp, Homo sapiens
taggttttacttctttttcagctgttggatatcccacctgcctgttttcctctcttctctcccaagccatgcctctcggactccgaagttgaattacatataaccacatgggttgtttggaaacatagtcagtctttatttctagccgcttcatgaagtaggtgtgtgagaccctcagaggaaaatagagaagtagaaacactttgttaattagaaatgcattaagaagctgcatggatcttaacctttgcttgtaaaggaagaggtaataattgattacactgtgggcatacaacattccaggtgctatcttcagtgagggcattttcgagacagaaaggaaaactaatcacaagttctaatcccgagggtaatttagactttgttcacttgcacagatttattggatgcctcctgtgttgaagcaccaaggctggccctggggctgcagcagtgaataaggcagacccagtccctgcctaacagggactgaacacatgctcacgtgtgtgatatttgttccaaaggaggaacacaggttatctgggagagttgattatagcgaggaagaaatcttagtcttttctgtttgagttaaaggaaacattagcatatggttttagagcagaggccctgactcctagatccttatgccctgttctgtcctgcagcccctgcattcagtctgcagtacttccctcccactcagcaccacacccttctgcccctcaccccatcaccaccacaagctttgaagaaataaaggaagtgctctttctcaagaaagccaagaacccctttcatagggcttattagcaaatctttaatttctctttataagatccttttttgttttaagacagagtctcgctctgtcgcccaggctggagtgcagtggtgtaatcttggctcactgcaacctccgcctcctgggttcaagcaattcttgtgcctcagtctcctgagtagctgggattacagggacacgccatcatgcctggctaatttttgtgtttttagtagaaacggggtttcaccatgttggccaggctggtctcaaactcctggcc

SEQ ID NO: 94986 - DNA, 2044 bp, Homo sapiens
actttgggaggctggcgtgggaggatcacttgaggccaggagttcaagaccagcataggcgatatagtgcgactccatttctacaaaaaagtttaaaaattagctgagtgtggttatgtgtgcctgtggttttagctattggggaggtgagacaggaggatcacctaagtccaggagctcgaggctacagtgagctgtgatcgtgccactatactccagcccaggtgacagcgtgagaacttgtttctaaaataaaataaaactgaactaaagattcagtgaggccagagggctaataatcttccatggaaagaaccacactaaagttagatgcattgattgcaagttgacaaggtgggtcatgtttatgtgacttctttcaatagtcttcattgcctgagagccagaatagaagaaggggattatactttaggggtagagattagtgtcagcgattgtggggagaggagtcccctctcaaagaggacagtttgaagtgtcaaagtgtagggttcaagttgggagagaagtcctgagccccaggaaggcttgtggcctgggccaaagaggagtgagagtgctgtgaggttggattgagtaaagatcctggttggaatttgaagaagtgacaggtttcctatgggagtcttgggatggctggactgaaagaagcaggaggttctcaggacgagctgagcattaggagaagtgagaatgctgacttaaccttttccaagagaacagcacattcagctcagtgccatgaagccagcattggggaggagtgagagaggaagtgggctgactcattcctgggagtaaaatggggctacttgggccagctgaagaggctcttgtttctggggagtggaagttggacccagcaaggagaacaagaaagtcttaattgcttttcttctttgtgcactctgaatgaccttataacagaatgcctgaaactggttaatttataaagaggcttattttggctcacagttatggagactgggaagtccaaattgggcagccttaacttccattgaggacctcctgctgcctcatcatatgatgaggtggaagggagcaggcatgtgcaaaaggggcaagataggaggagcagccttgctttataacatcccactctcatggcaactggtccaatcccacgagagtgagaactcattccggcgagaattaacccagtcccaagagagtggcattaatctgtcttaacaacctaatcacctcttaaaggccccacctctcagcactaccacactaaggaccaaatttccaacacatgaattctggggggatacactcaaaccatagcaaatggtgatgatgatgatgatgatcatcatcatcatcgtcgtcgtcgtcgtcgtcgtcgtcacttgggggcagatctgcccttttggagaggctaattgaaatatttcagctggagtagaatgagaagagttgaaggattattacaacttaatggcagaaaagaaaaatagcttattcattttgagattagatggggattttaatgctgttttgatggcattagttccagagatgcaggaatgcccatgtttcttccctgaagtcacacttgacctcttctgtgaaattcagaggtaactgtgcccaagggaagagcagaatagaagttgtcctgtcactatgtaaaaagctgtgcaagtgcccaatcttccagttcagagccctcgtaaatactgagtttcgagcatgtcagatggacttcgtaggtccttctgctcctttctacctattcttccctaacttcttttttttttttttttttttttgagacagagttttgctctgttgcccaggctggagtggcacgatctctgctcactgcaagctccgcctcccgggttcacagcattctcctgcctcagcctcccgagtagctgggactacaggcacccgccaccacacccggctaatttttttttgtatttttagtagagacggggtttcaccatgttagccaggatggtctcgatctcctgacgtgatccgcccg

SEQ ID NO: 94987 - DNA, 1096 bp, Homo sapiens
aagtggaagagttgtacttgatggctttcaaagcctcttccagctgggctgggagctgcttgcttctgaggactcgggtccctgtggctggcgttgggctggcagcccgtgctctgggtttccctgaccgctgagtgcagagcctcacagcgagctggtggggctggtcccgtggctaggaagaaagattcaagtgttgaggacagggacatggggttgctggatatttctgccccttctcaccttgtcttgtccgtgccttgtggaagctgtatgtcctgacccagggactgcagactcggggccctgtttcccttgtttctggttaaagcagacatctggatcacatatgcagcccccagccccagcctgggagacttctctgttgctggtgttgggggtagttatcgtcctgctggcccagtgccccatgggtcgctactgaaagcagggtgttatgaagcgggggaggctttacttctggatgtaagagctggtgctttggtgtagggaggagctgctgagtctactttgcaaagcttgattcctttgcgcctttccttctagcattccttttcttccccagcccccattatcttactcggttcctcccataattaaacgggaggaatgaggatgctgagcttcctgggctagatgttcttggaagcagtggcccttgtgaactaagttgaagtgctgcttttggcaacaacagaacatacctgagtgaaaggggctgggagtgaggccaggaccttgtcatcctgtgtgtaagctgtcggcccaggctgccgggtggtcttggttaagatatcatggatctggggtggctgaggcttagagacacccctgctgagagatgtctgcatccctgttgaccttgccatggccaactgcctctctaagccccagggtcaggtaaggtgaggctggacagccttgggtgtccgaggacagagggtctacatgctgatctgtggagttctctgtttctagagaaacaaaaggggacagtggaatgagttttttcgtaaagctaactttctgtgactcaaagagcagtactttttttctaaggataggtcctttctac

SEQ ID NO: 94988 - DNA, 1347 bp, Homo sapiens
aatgggacacggagccagtggggtggagggcgggggcagtgacaaataagctgtgatgaacaggcaaagaattccaagtgccagcagggtaaagaggatgacccaacccatttcctgaccctctaagccggggagacaaggacctcttgagatttactgcatgtttctgcttgttcttctggcatttgtttccttgtagtttagtgagttatcagtaaaacctatcaataaaactgatctacaaagttatcagagaacttgtgaatttgttctgacaacagtcaggaaagggctctcagaagatgtttgctgctcagcagcctgattcaggaggttggagctccatgacccagtagtagatggtggtggttgtgcagaggaaggggtgtgtccatagaatcttaggtctcatggaacaatctggaagcttatggagcagaatcgatgtgtgcccttttcacaagatgaagtagtaggcgagtcagatctgtgggtgtggtgggtaggtgggtggcagtgatgatgcagttattacgttgcatgatagaacaaggggctaaggaggttggggcagtcaggtacagtgagtcccagtaagactcaatgggatttaatcagggcaagtacaaaggcctgtacttgttttaaaaaagaaatgtacgaactctggcttcctagcaggtaggaataactgaaactctaaaaaagaatgttgacagtctgtcttgaaatctgtcagagtggtcacatgcaggacagttgaaggaagcagggctgttcagctgctgatgagtagaggaacacaggctcaggcaaagcttgtatgaagaagaggtcagttccctcactggagggagtatgcaggagttttattagtgggtgaaagttattagacagactgaacccacattagaaaaaagaattgtctagcatttatgactattccagtactgaggaactagccctgagaggtcctgtgtgaccagtgcctgcacgagtctgggtgctgcctaacagggaagttatgaggatgtcctctgggttgcgggaaggttgggagggagattcacatttggtggtctcttgctaagattatgtgaagtatattatcaggtctattttttttctttctttctttctttctttcttttttttttttttttttgatacggagtctcgctgtgtcccccaggctggagtgcagtggtatgatctcggctcactcaccctctgcctcccaggttcgagcaattttcctgcctcattctcctaggtagctgagattacaggcacgtgtcaccgtgcctggcttattttgtatttttagtagagacagggtttcaccat

SEQ ID NO: 94989 - DNA, 1085 bp, Homo sapiens
gaatgaggccagggtgagatggggatgggagcagatggactgcctgggggactatgggctcctcctctgggctacttctctggtgtagccgagggctgctggaaggcagggtggggacctgtgtttggggtagggctgaattaccaccgggagatgagtggagccaggagttgggatgggaactttgctctgtggctccttcaggctgctgaggaagataggtgctggttgagcaagtctgggagtagatcacagttcagttctggcaggtcctgccctcccaggacagcgggtgtctctcagatccttgaggacctcagggagaaggctgaccagaagaggggcctccacttctcagtgcccagccccctgcctctccaccctccttgtgtagaaacttggctcagcacattccagctctgtgcagagcctaggaaagtagggaagacagggcccccgcccacgtgggaggactgccgtgtaaataaataactgcactttattgtgactggtgctgtggaagaggcagtacactgctctgtcaggacccgggaggagcagatgatgctcatgggagcttggtgatctgagaaactggcagggggaggcaatgtttaaactaagtcttgtaccacattagcttgccaggtcgggggaggtgcggagggatccaggcagaaggagcagcaccgggaagtctctgaggcatgaaaacattactagatccatagcttaaagggaagtgattgggttcaagtgacctcggtcttctttgtatctccctggggttggcagagacagacagaacttagagaattggaaagagaaggacctagatttgaattctagcccaccactcaccagctgtgttgacaggcaagtaagttaacatcgcgaagtccttccgttgccctgttagagatgagcttgtatggggagtaagtcaaatgagatgatcctacaacatggttggcacagggcctggcatgtagcaggggtttgataaactgtggcagccgctgcagcaaccgtactagttgttcctttccaagcattgtttgtctctcctatccagcagcagactg

SEQ ID NO: 94990 - DNA, 1930 bp, Homo sapiens
ttcctctcacacccgggcatctggcagttagctgaggactcccccttgttctcagcgtctctacagcttcagagaaggagatacattaggaagcctttaggcaaatagaaggcagggaaaacttggaggattaaaatctgtagattagtgtattctctaggactattacccccatctctatctattttctccccctttcttcttccctttgtctttcaacatccaccaagtatttatcatgttctaggtacagcattaggtcctgaaaaataagagaaatcattattatttgattctcacaaaaccattggaagtaagagacattgactaaactattacctgaaattataactcttgagtgggaaagccagcactggaagcttttgtgttttgtatattgaatgcttttgacttcagcgttgtgtttggggctgtgaacttgcacatggcagacagaatcctcaccccagatgcacccagcactttacatttgctttctctctggctcagagaacctcaagggacttcgaaggttgactcaacatgccaagtttgttttcaattaagtcattgtttcccggatctagcaatgacagaggagggcagtggggtcagaaatgggctagctgggaagggagcttagttttgaaaggcacatgttggcattagatgtttcggatttgagattctgaaagctggatggaaatactgtgcctgagcaatctaccatgaacctgaaattgccttagactcatttagagtgtgggccccgcagcccttactgcttcagggggcttcagtgagacccactgactgagaggaggagggtgagaagtgcagttgttagtttccttccactctgttttctactctactcctactcctgggttctgtcattagccatggggaggtcacttactgtctttggacttcagctttctgggtaaagtgaggggattgccttccaaagttaagtttttctcagactaaatctggggaaggaccagtttttttgtttgtttgttttttgtttttcagtgttcccaaaagattgcaaaactaaaacgtggtcccacttactttgtacagcgagtttgcagctgctgcacgtgtggctcagcaccatccaaagtggtctgtgagccattcagtgaggcgagccaagtgatcatgcccttggatgtcatggtagctttaaattgctataaaggttcctaaaggcttcctcttggttcctgtatttatgttgtggtggattggtgttaagcagtttacgggccatatcctgaatagcactgcttttgaacttttatctgggacagcatagggtctctgttttgatgcctccccaccccttctggacatgacttttccactcttctataccctccatcttggggacaaagcctccgcttgaaagagtagagatctttttgtcccataagttctctgagtgccccaaaagatttacttgcatctcagcttctgtagataaggatgcctcctgccttctctttcacttctgcaagtctgggagtctgatggaggcccgtcagagcccttggagcccctgtactgtgtgtgtgtgaattgcatgccttggaggaagagaacagttggggaggaagccaagtctcctgtagatgctggtgtggacttggaccctgcaagagactaaagctccattgccacaggcagggcaccttgaattttgagcttattccatgcagtgtttgttaataacctagaggtataccctttttcccctgggggttgattgcagattctaccctgatttctataaacaaagacatcttaatatttctgacagtatgagcttgaccatcttccccctactttctgttgctgaggatctacggccttttttgagatgctaaagattagacaaaaagtaaaaatgactaacttt

SEQ ID NO: 94991 - DNA, 1055 bp, Homo sapiens
atttaaatagtactgcttaaataataattcgattctttttattggggctgggcgcagtggctctcacgcctgtaatcccagctctttgggaggccgaggtgggtggatcacgaggtcaggagatcgagaccatcctggctaacacagtgaaaccccgtctctactgaaaatacaaaaaaaaattagccgggcgtggtggcgggtgcttgtattcccagttacttgggaggctgaggcaggagaatggtgtgaactgaggaggcggagcttgcagtgagccgagatcgcaccactgccctccagcctgggcgacagagcgagactccatctcaaaaaaaaatagtaataataattccattcttttatgaggggtgggtctttgcagctttctgatctcccctctactccccataactaatgttatcaaatatttactttgtattttccatagaaatgatccttttcaaatttattaacataatatgtctacagctactgcttttcagttccctcagtagctgtggtttttttttaactttcttcatttctaacattgtatattttttctttttcttccatagctttgctggagttttatgtaatttaaaagcacacagatctgtcagttgtgctgttttctaaagtattaatttctactgtagtcttatataaattgtcatcttttccttaggtttatttggtatgtccttttttctggattctcagttggatccttagcacattttttctatttttttcttctttgataacaaatacatttaaaaatatgactttcaccaagttccactgtggcctaattctcttggttttgatattttatgtctggagttcttggagaggtttcgatgatatacccagcatgagaattccgagccccgatttagcctgaccacccttcctcccagtaagggccctgaggagagtccctgtgcatggcttggtggcacagctaggcagtgcagcacttggtgactcccttgggctctgtctctaaacccccaaatagggaccctagtaatagcttaccagcttag

SEQ ID NO: 94992 - DNA, 2515 bp, Homo sapiens
gatcacatgctgtgtccagtggtcagtttgttgtttgtttaagtctcctttaatctggagcagattctcagtttttcctgatatttttaaagaattgtttttggccaggcgctgtggctcatgcctgtaatcccagtgctttgggaggccaaggtaggaggatcacctgaggccaggagtttgagagcagcttgggcgacagagtgagacctcatctccaaaaaaaaataataataataattgtttttaagcacatgaggaagctgactccttgtcctcatagctcccagggaacactcagctcctagttgtgtgtcatcagcaaagcctaaggcagagaggtggggcagggcccagctccccaggaagctgccttctgctctcccctttgcccctctgtaataccaggccacagcatcccaccccaccctaccccacccattccctggctggtttggtgttagcctgggatggaggccatcgctggggggagagagggactttgacactggtctgccactgcctctccctgagatcagggctgaggaacagagatcactgccttgggtagggcccagccgctgctttctgaagagtaacaccctcggtttggggatgtgggttttaacacccctgtcacccccctctcccccaccccaaaactttgaggccagtggccggggattgttaatccccagtcagaggtgtgtgtcccaactgaggtatgtcccgagggtgagccagagggagcaggttgcctgttctcggacctaaggaggttccagagtggttatttgcattacaagggcagtgcttaacagataattgactgttaggttatcttttagtagcagaactcccttgtataatagatattaaaaacatgatttgttttttaacaaatgatttgcatttagctttttaaggtcatgcttattgcatattatgcattctttgtctcacttatttttattttattgaatcgctcgcaaacttcccctccaactttttttttttttttaattctaagggcctttgaaccaagttccatttcctgttttctagttatctgtgactctacccagggaatcagctggttttaagtcagtggttctcatttccaggccccctgcccatgcatttccagagctcatctctctcttccccaacccagagctcagggctgtcccagcttgcttttctccccactcaagagttgccaccactcctactgtcccctgcagtgacgtgggaggtattcttcccatctttctttgacggaaaagggaccaccactactttccctgagataagaccctcctgttttcactttcacttgtaacccagtagggaaataaaaggagagagaaatgctgatgaacgagttgcagagaatgaattgcacgacactcttgcctttccctttcctctgtccctgtctcccaaccattgtttgagggtgagctcactggctcacccaccctccttgagcttgtgttcagtttctgcttttgcctcaaagctgcttatggagatgcagatgaaggatcaatgtgtgctttctcgttttcttagccttttagactttcggggtagaaggtgggtgatgagaagtgacttttttttttttttttgaaattacagttttattgagatataaatcatatacagttcacccattggcagtgtataattcagtggttttagtgtagtcaggattgtgcaaccaacaccactctcttagttcacaaaatttttatccatccctaaaagaaaccctgtggcaaatagcattcactcctctttgttcccctaaccccctcagcccctggcaaccacttatctttctgtctctgtggatttacccaatccatgcatttcatataaatggaatgttatagtatatatctttagtgtctggctgacttagcataacattttcaaggttcatccatgttgtagcctgtgtcaatactttattccttttcatgactgcataatattccattgtatgcacagaccacattttgtttatccattctttagtcactggacatgtaggttattttcactttgggctgttatgaataatgctgctatgaacatttatatacacgtttttgtgtgaacatgcccattttaaaattggggttttttggttaaggggttgtaagagtttgttatctcttctatatgagttccttgaatatgattatatgtatatatgtatatgatttataaatttttttcccattgtgtgggtttttttcactttttttttaagaggcagggtcttactctgtcatctgggctagagtgcagtggagtgatcatggctcactgcacctggaacccctgggctcaggggatcctcctgcctcagcctcccaagtagctaggactacagatgtgtgccaccaccatgcctgcctaattttaaaaaaaaaattatgtagagcaggggtcttgctttgttgcctgggctggtctcagactcctggcatcaagcaattct

SEQ ID NO: 94993 - DNA, 1044 bp, Homo sapiens
tacagtttatcttttttcttttggtctcatatctgagaaagttctgcctaatccaagataataaatatttatgtctgttttagagttttatagttttagttcttacacttgggtctttgatccattttgagtgagtttttgtatatggtgtgaggcaggggttcacatgctgttgcaactggataaccagttgtcccaattaaaagactgttcttttcccatttaattatcttagtgtcttctcactgttttgtagatgtttatagtagatgagagagctagattggtctttatagcttttttattggttacttgcatgtattgtttggtattaacatttacatgatgtacatcagttatcttcaaaatttctggtgaaggactaagttttaaaaatttctaattcatggactgataattttgtaaaaataagaatgaattactagaaaaatgatcatgtgcttagatgccatgacaatgtcaaattgtgatacaagtgtctaaagttaacactcttagcttttgtatttaccttgtcacagactaatggagatagcagaatagtgctagtccatagatcacacttacaggagtcctggccaagactcagctggccatgctcaatctgcttatctcttgctgggcatgtcttcaaccagtgtttgtagaaccatgggccttagggggtctcatgattgttaccttggggtactggaacagcaaatactagtgttactactgcttctcctccaatcttgaaaggggcagttgtccccaaaggcttactagacacgtaccttttatatttgtagtcacccaaataagatgaagcccttgtactaatgtgagtaaaatcctacccctacctgttgttatcaaggttgcttcctacagccttcaaggttgagtagaatccatccattcagcctttagtgccaagttgccatccctgttctcaagggaataataagcccaaatagacatggaaggaggaggaaagacactattccaacagtcaatacgtcccttgggaatatagcaaac

SEQ ID NO: 94994 - DNA, 1062 bp, Homo sapiens
ccgagatcgtgccattgcactccagcctgggcgacagagtgagactctgtttcaaaaaaagtatgtggtggctcctgcctgtaatcccaacactttgggaggccgaggtgggtggatcccttgaggccaggagtttgagactagcctgaccaacataatgaaaccccttctctactaaataaataaataagcaagcaagctgggtgtgatgttgtgcgcctgtagtcccagctacttgggagactgaggtacaagaatcattgagcccgggaggcagaggtttcaatgagccaagatcccaccactgcactccagcctgggcgacagagtgagactctgtctcaaaaaaaagttcttgctaaaccccgtcggcacttggtattaaactaaaataccctctcgcggtgcttactatgtacctggtactgttataaatgctcttcatatattgtttaattttcataataatcttgtgagataggtactgttactcatccccaatttacaggtgacaaaacagaggcgcagagagattagctaacttgcttatggtcacacagctagtaagtggtggggccacgattcaaactaaatgttcttcctcttcagtcctacgtaataggtgtaaaatggaatcttcttgtgatcttcttttgtatttttctgattactgatgatactgagtattttttcatatgtttattcccttttcatgaagaagaaatataaaatttaaaaccatctccctattgttggggcactcaggttgtttgtaattctctgctgttcatgcttgagggaaaatcattggcacatgtagcttttttatgtcttctgttggcttgtttacttttacatttccagtgaaattaagagtacttagtggttaaaaatggctgtgctcttccacattgccttgtgatcttgaggcaattacttgccctctctgtgtttagtgtccttatctctgatctccaccttggaggagcctgtggtgattaaatgagataagtgaatgtgcgacaatttgcatgatactctgcctgtcataagagggttcca

SEQ ID NO: 94995 - DNA, 2035 bp, Homo sapiens
tcgcgcggcatggtatgaaaccacccaactgcaactgcgatggcccagaatgccctgactacctcgagtggctggaggggaagatcaagtctgtggtcatggaaggaggggaggagcggcccaggctcccagggcctctgcctcctggtgaggccggcctcccagcaccaagcaccaggccactcctcagctcagaggtgccccagatctctccccaagagggcctgcccctgtcccagagtgccctgagcattgccaaggaaaaaaacatcagcttgcagaccgccattgccattgaggccctcacacagctctcctctgccctcccgcagccttctcattccaccccccaggcttcttgcccccttcctgaggccttgtcacctcctgcccctttcagatctccccagtcttacctccgggctccctcatggcctgtggttcctcctgaagagcactcatcttttgctcctgatagctctgccttccctccagcaactcctagaactgagttccctgaagcctggggcactgacacccctccagcaacgccccggagctcctggcccatgcctcgcccaagccccgatcccatggctgaactggagcagttgttgggcagcgccagtgattacatccagtcagtattcaagcggcctgaggccctgcctaccaagcccaaggtcaaggtggaggcaccctcttcctccccggccccggccccatcccctgtacttcagagggaggctcccacgccatcctcggagcccgacacccaccagaaggcccagaccgccctgcagcagcacctccaccacaagcgcagcctcttcctagaacaggtgcacgacacctccttccctgctccttcagagccttctgctcctggctggtggcccccaccaagttcacctgtcccacggcttccagacagaccacccaaggagaagaagaagaagctcccaacaccagctggaggtcccgtgggaacggagaaagctgcccctgggatcaagcccagtgtccgaaagcccattcagatcaagaagtccaggccccgggaagcacagcccctcttcccacctgtccgacagattgtcctggaagggcttaggtccccagcctcccaggaagtgcaggctcatccaccggcccctctgcctgcctcacagggctctgctgtgcccctgcccccagaaccttctcttgcgctatttgcacctagtccctccagggacagcctgctgccccctactcaggaaatgaggtcccccagccccatgacagccttgcagccaggctccactggccctcttccccctgccgatgacaagctggaagagctcatccggcagtttgaggctgaatttggagatagctttgggcttcccggccccccttctgtgcccattcaggaccccgagaaccagcaaacatgtctcccagcccctgagagcccctttgctacccgttcccccaagcaaatcaagattgagtcttcgggggctgtgactgtgctctcaaccacctgcttccattcagaggagggaggacaggaggccacacccaccaaggctgagaacccactcacacccaccctcagtggcttcttggagtcacctcttaagtacctggacacacccaccaagagtctgctggacacacctgccaagagagcccaggccgagttccccacctgcgattgcgtcggtaagtccgcctgggtatcagggaagggcagagaaagggctgtggcctggtgagctaggatttctaggccctgcctttcatttggcaaacatttatttgtgccaactgccacactgggttctgggaacacagaaatgagctcatagcctagtggaaaagacattgaaagaaattgacgtgatactgtgcgtgtatgccacgtcggctgagatgggcataggtgctttaatacacaaatggagttgaaggcataatagaggccttcttgtaggaggtagtacttgcgccgagccctacagagccatcagatagaaaggacacattc

SEQ ID NO: 94996 - DNA, 1119 bp, Homo sapiens
tgtgttttagtggccttcccagggaaacctgaccagccagttctaggttgtcttggttttagatcttcgtatcttgttttccagctattgggatggagttgctaagatttagtttgtgccttctccttgaaaatttcctttctctgtccttaaccgtgtaagttttgagtttttgtgacttagggcagaaggtggtcaccaaaagctacatgatgtttctcttcccagcataagaccctgcagtcaatttgttactttgaattttctccagacaatagcaactggaacagagcccagaagttctggcatattcttatgttctattttctgtataccgtgtggtctcctagcacctataaagagctttcagaccactgcctccatcacccacattctcatattctctttctctccctccccactcccccctgctctcccttggccttctcctctccccacctcttcacatgcatccttctgtaattctattttatggttcaaaatagtgcccatttggaatgaatcatttctaactttttagttgaaaatactcattcatgaaatgtttaagcactggtaccttgcatctcacctgatcttcaacaattctattatgtaaaaacattattttaactactttgaggctcataaaggttgtgtaatttgcccacagtcacatagtttgtttggcggagcctggacaacagctacctgttgagcttatgttatgtgccaaatactgtgctaagccctttgtgtattttacacatagaggcatgaggattagagaggttgggaagtaactcattgtagttgcccaggtttccgtctgcaagatcagtatttgttattctgtgctacattaacaattacgtaacaattatgttttatacatgcctcaataattgacattgtatacaagatgctctagaagtccagagggaaaacaccctgagaaagttcaatagggcttcgcagaaaaagtggcatttaaactaggccctttcttggagctggagctgcaaggaaagaaagggaaaaaaaatgagtttttccaaaaggagagatccagaaaggcactgttgtcagtgagaaaacatatttaaggttacatgggat

SEQ ID NO: 94997 - DNA, 1052 bp, Homo sapiens
agctttgacaacacttggttttatcagatttttaaatttttgccaatttggtccatatgtgatggtgttttattgtgattttaatttgtatttcctgatttctaatggagttgaacaccttttcacatgttcataagccatgtgggtttcctgttttctagcatgcctattaactttcctgttggtggtttgcttttctaaattaatattgactaattgatattccaaaaatgtttactctctgtgtttctgcagaacaaatagtggagaaagatgaaggtccatattatactcacttgggatctggccccacggtcgcctctatccgggaactcatggaggagcggtgagtgatacacagatgtccaaggagaaatggatgtgctgttaatggaatacggatattaagcgcctctcatttttctttgccttgtaacagacaatatacagaaaggaaaccctgataacgggcttagggaaggtttactgtgggatcctcacttccattgtttctgggtttctttcattctgtaggtctgcccaattcatgtccccctgcttctctctgtcttgaaatgtttttatggttatatggctctatgtcctgtagagttagtttcctacatctgaattttgctgatagctttcccgtggtattgtggtatcattaaaagtgtttaacatgcctctatgtcctataaattggtagttagaccaaaagccctgattgagatcaggttatttttcctttttttccaaaactacctcataggtggaattttttacctcccctaagaggaatataatgtctcactcctggccagtggaaacctactcaggttgtcccctaaatcctttggacaggatcgtaggagtgtttcatagctttcttgatttctcatatgacaagatatcctgggttcacattgtacgtttatccaagaagtcctggttccttttattggaggaaaaggtatttagaaaacagactctgtctactaggggcactcatgactacacaggggttgttcattgtttttaggctgcttatg

SEQ ID NO: 94998 - DNA, 1032 bp, Homo sapiens
gtttagcttttggaggcattgccagactgttttccacagtgccaagccccttgcatgttaactaaaaacacacaggtaggcagcattttctctgcaaatgttttaggataacataaaaatctgactgtattttggcttacaatttttatctgtgtatttttactcctaagcctatgtaagtcatcagcaacttagattttgtggtaattattttttatttcactctcaaaataacttttatgtttttgttccctaacaaaacatttgttcctaataatgttccctatttgttccctaataatggtctcttagcttgtaaggttgctgtcttcagggcatgacatccctagaaccctgccgttaagacctgcaccctgggtctgtgtgacaaagggaggggtggcaccatgcagaggagcacgggtacctggctcctgcccctcacaccctgcgtccctgcaggtgatccgcaggcacacgctggaggagaagctactctgcctggtgcggcaccgggcaggccaccactgccagaacgctgtgatcgtcatcctcatcctggcctgggagggcattccccgtagcctcggagacaccctctaccaggagctcaccgacaccctccggaagtatgggaaccccaccagccggagatgcggcctcaacgatgagtatgtagcagagggcttcagggccagggcccacctatagggtcctgggcagcaaatacaggagactgcaggcaaccctggggaaggctcctaggggccctctctgcggcactgtttgtcctgcacagttaggactgtggttgaggaaggcatatccacagatcttgcttgagctgggttctagctctggctccagagggtctactagtttgacttcaccgttaaaccccaggtcgataacactggcactaatgatattagcgagtgtgaagtacatgtgccccataaatagaaggtatcgaagatatttacaaaacctgcccttggccaggcgtggtccatgcctataatcccagcactt

SEQ ID NO: 94999 - DNA, 1034 bp, Homo sapiens
acttagcagttacgggtgccccaggctcttcccatgtaaaccatctcttttaggtaaatactccaaatatcgaagatacatattcaaatcgcttgtcagaatttggccctctcagaggtcatttctcccccccatcttcccaggacacctttctaggtgtgaggtttagcaggaaaggcggtctcccgcatgtgggccatcctctgggcctttgctgtacttcccaaggtatctcccaccctgcctggctgccggacagatgtctctgggcagtcatccgggcccttgcagtctccatgctgggggcctggcctggtccctgggctctggactggtgtccatacagtatgaccgctaggcacggcaccttctctctgtaggctccttacccagacccctgccctgcagggcctcccccagccccaagacagcaggggaaggcgccctcaggctgtgggggccggagcatctgctcaggccgcctcccctctgttgtttgtcctctgatgcctgcatggcaaaggccctcctgagaggcggtctccactcagctccaaatgcaaggaaggcacaagcctatccaggttgtctgccattttaccttccttctgcctgggctcctgagcgggtggagtgctggcttcctttgctaggatacagacaaatatccaaatacgtgaactcaagttgcaaccttccaaatctctccaagctcctagtaccagaagggcttcccacttcccgtggtgcagggacaccctctctacaccaaagcctatgtcaccttctgtgctctgactgccaagcttgggtcctcataagaaaaaggaagcattttcaaattcagaactctttgtttaccccagacctggcttttagacttaaatagtctaatagacctgtatgcaaatagtctaatttgttattagatttttatttacggtaagattcaccctcccttacaagcagcagatgtggttgcttcaatgaatggagccctggggctaccaggacctaagaactactaggaatgg

SEQ ID NO: 95000 - DNA, 1059 bp, Homo sapiens
cgctctcccgtcttttagctactatggctttccatccagcaaccccgtcttcccctctcagttcctgggtcctggtgcctgggggcacagtggcagcagtggcagttttgagaagaagccagacctccacgctctgcacaacagcctgagcccggcctacggtggtgctgagtttgccgagctgcccagccaggctgttcccacagacgcccaccaccccactcctcaccaccagcagcctgcgtacccaggccccaaggagtatctgcttcccaaggcccccctactccactcagtgtccagggacccctccccctttgcccagagctccaactgctacaacagatccatcaagcaagagccagtagacccgctgacccaggctgagcctgtgcccagagacgctggcaagatgggcaagacacctctgtccgaggtgtctcagaatggaggacccagtcacctttggggacagtactcaggaggcccaagcatgtcccccaagaggactaacggtgtgggtggcagctggggtgtgttctcgtctggggagagtcctgccatcgtccctgacaagctcagttcctttggggccagctgcctggccccttcccacttcacagatggccagtgggggctgttccccggtgaggggcagcaggcagcttcccactctggaggacggctgcgaggcaaaccgtggagcccctgcaagtttgggaacagcacctcggccttggctgggcccagcctgactgagaagccgtgggcgctgggggcaggggatttcaactcggccctgaaaggtagtcctgggttccaagacaagctgtggaaccccatgaaaggagaggagggcaggattccagccgcaggggccagccagctggacagggcctggcagtcctttggtctgcccctgggatccagcgagaagctgtttggggctctgaagtcagaggagaagctgtgggaccccttcagcctggaggaggggccggctgaggagccccccagcaagggagcggtgaaggaggagaagggcggtggtggtgcgga

SEQ ID NO: 95001 - DNA, 4450 bp, Homo sapiens
acgttgtcgagagaggttgggcctgatgggagcaacactcatcatcaccaagtcaaactttgttggagtgttggtttttcttgtgatattagcagaaatgatctcatgctagccatgtggatgtgtgtgtggtgaatggggggcttcatcaggacacacagaggggaatgtggccacacggtggatgaccaccaagccctgagatgaacaggtatttactgagcagttgtattcagatatgggtcttcatgaatcatgtttaacaatcagatgaccgctataggcaagttcctgagcttccgggtgccttgagtaagagctgagaaccggcctgctgggtgtttactgtatctgtttggaagcactggcggagggtcgttgtaagatgtcctgagcatttatgtggtctggttttaactgtaaatagtgaaagatttttttaagcacttttgcctagatttaaacagcaacttgaaaaaaaaagtatgttttaacatgtaattgtgggagaaattgtaaatagtagccgaatatttaatgtgctttgtctatcctccacttttaccatattctgtaaagttgcatttattttacaggacaaaaaaatgaaatattattgcttttgaaataaatacccaagagcttatcaggacttagaattattcagaactcagatttataggaaaacctctgaccttcagtttgacaagctaaaggaagcagagtctttaatgagcatgctaattttctagttttgaggaaaaattgggtcctttaaatgctattttgcttatcgcatcagtacttttatgcaggtctcatttgactccgtgcttaggtagatgcgggggtgccttgaaaacttcattttaaatgatcttaagcaagaaatacaatattttacgaaacatttggagaatgtgaccgtctgtatgacccgtggaagccccaggttggctgttggtttggaaggtcccgagtgtaacccaggtgattctgatacttggcatgtgtgaatcttcctgatgtatgttaaataaactcttcccctcatcaccctttggtaggaaagccattagatgaaaggagaaaccaatacaagctaaaagcatgcgacgtctgtcccccagcccaaacagccttggttcatcagtttctgcagtaggagataggctgctgagaggtgagtcaagaggcagtctccattggatgtccccactccccgcagaatggcgtttccagagttaggcggtgtggttgccgtgctcaagcccatgctgatttgtacactacatgtctaacctacctcaaatctcagtcattaaaattagcatgctttagacatatatttaaaaagtaactatgcacagctctttatcccccccttgctgctgaagctttcttaaagagaaaaatcaaatttttattttttactggcactatcattttttaagtcctaaagatgattaacagacatttttatcatgagaagaaaaataaagccattgcaactaaagaacctaacagcatgaccaagttcgaagagtcatattatagcaacggaaatcgatggcgtcttagtcatctccccagtgtgccctgtccacggacaccatccacgtgcagtgcaaacatttggttccttttctgctctgttttgttttccctgcctgttgcgtgcaagggaagtgcttgtaaagttctgtgctacgagatttttaaaataaaaatcgcttcgcagcaggttctcacaaaataactggtgctagctcaagaaatcatcatctgaccatcagaaatcttgactaaaggtgttgcatggatttgggggtctttcggtttttggttttgggtctggcttttagcagggccaatgtttcccacaccccggcttcatgggtactgctttgccttctcaccaaggtgacgatggtgtgcgtggaaagagatgataccccaccgccccctcttggtccttccaccagcctcttttgggaacagtagtttgcagagcaagggatttttaaagcgctaaagcaaggaaagaagtagcagagcttaactgctttgtaccacacagcagtagatgtgcaaggacggttgacaatgagtcgatgataacctaatttcattgagagaaacccagccagacttgcttctagaggtttaatcaccatgagatctcaaaccaaggcaaagctggtggaaaactatatgatatccctgacgtgcctcaaccagtatctctttccttttgttactgaagtgtgttttatggactaggaagcatttttatgaattgaaatagtctaaataaaatggtgctatggtgttttaatgtgactgtccctgatcctgtcttgctgaggtgctatcaacgttctgaaaccacaaccaaccaaaaacaaggtgggctccagtctcttggcttttttttttccctcccctcttttggtgctgtcttagacccgtttaccgtgctataatctgctctgagcagtgttgtgttgtgttgtattgttcttcccttggtggccaaacaaagcaagtcgagaaggcagctatctccctttctgtgatcgggagtgggcctgcctggcttggcaggtgctttttggttccacacctgtcttctcaggcttgatgtgaaagaaagggcgaagggttttttgagtttttgtttttgaggaaggggagttgggtacttctgcctctcctagcatgataggcattctcatagccagggacagattttctcctgcagcccagggtgctaagcagacatctctgggagtcccaagggcacaccaagggagaccagatggatctccttcctcccctggcactggctgggaccatggtgggcaggggcttcattctctgacccagcgttgcttctgcctctcattggtaaccccttatgttcggactaaaggaaggagctttctttgctcactcgatgccactgaggctgctttttagttggtgctaacctaaatttcttcttgggtccacagaagttgatgttttaaaaactcaccaggaagctccattttgtgtcatccactgtcacaataatttttttaaatacctcaaaaacaggacatcatgacaacttcagtaaagtagattccatgagggtctgatacctgcaggttgtccgtctgatgacatacttgaccttgaaaaatctggggtcattttgtttttcattcttcagcagttaagatagcggaacgccgaaaggaaggagcgtagttggctgtatttcatgtttaagttttgcttttgaataaaatgtgaatttcctatgcccatctcattgagctttctcagtcattgttgctgtcatttgaaatgactccctcaaaacctagttttattagccagctgcctctgctgtagtacatggccaacttcaacataccctggaccaaaacatttttgaggtgcatacccccaacataagttacacagtcccacatccaggtgcacagagtgcgagtgcactccgcgagtgcggggggaggggcggccccctctggtgctcccagcccttcctcctgcagagctgcaggcaagagcagagcaataggcttctcccctgagcagagaccgcagcacagaaatgcaaggtctaaagttgctttttgcctaagaatcagcgagcgatttggcctacttcctcattggcttctattctgatatcagggatgctttttgtagtggtattgtttgctccctcttcgcgttttgactacccgtcattcaggggtaactcatcactcttcacacggggatttaaattaagaaactaattggctcatgtgaacattccaaattttcttggtttcaatacccttttttttcttttgaggggaaaagaggggagaaaaacaggagtgatgtcatttctttttcatgtattccaattaaagaaacaagggcaggtcgtataatggcatattaatacattagacttaatctagaacccctgtagctttttgatgtgttttatttcttatctctttgaattcctgtttggttacttggcttccaatggaggtgaacttaacaaccatacttgaatattccgtcttgactttgtaaactgtggctacttgaaatgaagtttatctggggttgatggatgaatggtagatttttgcaatgtctcaaggcaataggatgtgtattaaactgtagatattcttagtacagtaaatttatgctgataattttattttgtataatttttacctttttgttaatattttttccttccactttattggtttgcctcctgagctacccctccttaccctcccttctccctcagtgtttcagtaaatttaatttagggtgcctagaaattgcaagtatgtatcctttttgatttgtattttattataatttacacaaacaactgggtttgtgaactgtattactc

SEQ ID NO: 95002 - DNA, 1079 bp, Homo sapiens
taaaggcgagggagtgtggaatttggccccaccatccagggcagtggatggcctagtggtatggatctgaggcaggctatccagcttttctggctctgtatcttaccgaattcaaccttgggcacattactgtgtgcctcagtttccttacctataaaactatcggcataatagtgtcacaacattatatggaagcaaacatctcttgaattaggtttggggcctcttgtctctggagtcaaattgagttattaacaatcatcctgtccccgccaataaaagtttattctgtgttttggggcacttacatggactcctgataccacagagcccctctgacataacccatggctgtgctggcgagggctcaggggcctgccttgcagggggaatggcaggcgggcctgcacagtggcccagctcaggggcaacagcatcttcctctgccctgaccttcctctctgttctgtggcagcttccacttcaccatcggatgtttgccactcagactgagggggagctcagagtgacccaaattctcaaagaaaagtttccacgagctacagctataaaagtcactgacatttcaggtaaggtttctctcactcttcctacggcgcttggataagattttgccctttggaaggacagagggtcaggggcttggaggagggggcttgctgctggtgagtggcttctcaagatgtgttgctgctggacaggtggagctcggctgcccccacctcatgggatggcagtcaggattcagaaatatcagagggaaactgaggacaaggcgcagctgggaggactcaaggttgccagcctggctcagctcagacaaggtccctctcagtcaccctagagctgaggtccacagtctgtcatttgactttgaataggttttgctctaattttcccccattcttctgacaccctaggatatcagagctggagtggaccccagaaagattttcttcagctgctttactttccctaagaggaaatgagcccagagaggccaaaggaattgcctagctcctcatagggaagagacagtggaactggaaccagaaccg

SEQ ID NO: 95003 - DNA, 1123 bp, Homo sapiens
caatggggggctcctcttcctttctctcattcattctttcattcattcattcactcagcgacaacggcattcgaaatttcaagctctggcgcgctctaggggagctcccgagctgggtggaggttggaggtcaggcggacagacacatgaacagtcataatactgcgggcacaggaaaaaaaaaggattggtttaccgagcagaagacaggagtcatagcccagagtcaaggcgtgggtgcgagggactgcagcggggccggggccttgggaaggtcgactgggcctctgaccttgatcctcctccaaatcccacactaccggagcagaacccaagcagggggcacttcccacgcgctctcctaatctctccccctttctgaaccatcctttgcttcagctcataccattctttctcttaactttcattttccttctcccctggttctgaacctgcctgccctgtgcatgaagagaagttcttccactgcggtgactttcagcgtggacagtgatcatctggggatgtcagttgattgttccactaaaggccgctgcccacagatccgctaagatgaaaggcttctcccaaggattctgcaacgctcacctctctcaccccttagtagctgccgattctgtctgccatctggttactctctgcctttaccctcaagattctgcccccagaagcagctccaccccaccctcactcctggcaatcctgtccagcctctcaacatcgagtttctgtccctccacacagcaggcagacaatcacactctggacctttctcctgtcttgcatttctgtccctaattgactagttcttcccctgctcattcattcatccagcaccaagtgcctctgagggcctgccctggggtcagctctgggatgctgccggactcattcctggcctataagaccagtggtgagagagccagtgcacagctcattttaaaggaggtgctctgagattctgtgacacaggaccctgctctgagctatcaggaaggactgaggggtagaggggtgggaccttcagcaccagcacccatgaacggccctagtgtcctccaacctgtcatccacgtctagtcagggaccagtgcccggtgct

SEQ ID NO: 95004 - DNA, 3852 bp, Homo sapiens
ctagaacacagttacccccttgcttcatctattgctagaactatctcattgctatctgttatagactagtgatacaaactttaagaaaacaggataaaaagatacccattgcctgtgtctactgataaaattatcccaaaggtaggttggtgtgatagtttccgagtaagaccttaaggacacagccaaatcttaagtactgtgtgaccactcttgttgttatcacatagtcatacttggttgtaatatgtgatggttaacctgtagcttataaatttacttattattcttttactcatttactcagtcatttctttacaagaaaatgattgaatctgttttaggtgacagcacaatggacattaagaatttccatcaataatttatgaataagtttccagaacaaatttcctaataacacaatcagattggttttattcttttattttacgaataaaaaatgtatttttcagtatccttgagatttagaacatctgtgtcacttcagataacattttagtttcaagtttgtatggtagtgtttttatagataagatacgtctattttttcaaaattcatgattgcagtttaaatcatcatatgacgtgtgggtgggagcaaccaaagttatttttacagggactttattttttgatctttatttgagattgttttcatatctatctaaattattaggagtgtgtgtatcagaagtaattttttaatgtcttctaaggatggtcttccaggcttttaaactgaaaagcttaattcagatagtagcttttggctgagaaaaggaatccaaaatattaataaatttagatctcaaaaccactatttttattatttcattatttttcagaggccttaaaattctggataagagaatggaggaaaatactcagagtacttgattattttatttccttttattaaaaaattacttctatgtttttattgtctcttgagccttagttaagagtagtgtagaaatgcatgaacttcatcctaataaggataaaacttaaggaaaaccacaataaaccatgaaggtgtacacatcttataacacagataaagttttggtgtgctacctattcttgagagagtgagtgagtgtatgtgtttaaaggaaacaaaatgggagaaataagttttaaaaaaatcctcattttgttaatattcaaaagatggactgagcttccacttgggttttatcttgttttaattgtttttgtatcaaaacttgaaattcctctatttctattgggatataaaagccttccccttcagtgaagaaaacatttattttttatttgattcctaggatttagtaaactctagctgtctatttaaaatgtactgaggcacaacaagtattatactggaagacttgccaaactggcaaagctttaagttcatcagcattctatgtggttcagagctgtgatttttgcaaagtattttaccaacctcctcgatggctttgataaaggttagatttgatgtttttttttagatttatttttcttactccactaaactataaagaaaataattacttagaaactccattttaaataatcatttcctagaaattcttaaatatatacagaattttaaagaaaacatttcatctgatttagttagcatccacatatcattgaggaattaaagtgtgggacagtcattattaaaaaaaagagagaaaagccctctattagacattccacaatccatgttttaagcttatccaaaggtccaaatgtcagccattctgtatgttcatgttgatcatttgcgaacaagaaagcaggtttctaggtatcacttaggatgtgaactgcctctcaactttaaaccctgttagctttacttttttaagtccacaagtgatgaaactagtttctcagctaggcttgtactttcctcattatttctagtatttcaaatattctcaaacaaaagagttaccacttttctccatttattttcagttatggaaatgttccctctcttcaccactaagctccaaagcaaatgaaagacgatcacatgtcaggacagtagtaaaggcagcttataaatgggacataaatcagagatgtgttggtattttgagactcaagactgtccttttttaaaataaaaataaaaacattaccaggttcccaagccaatctggcttaaccaacagtgcactgaaatattagtgtttacctccaaggctagggagccaaggggaggaggagaattggaggaaggggagataatgggaagaggatggcgccttcctgagttggctagagggccaacctttgataacagtttgacgaaatcaatcttttttttttttttttttgagacagagtctcactctgtcacccaggctggagtacagtggtgggatctcggctcactgcaagctctgcctcccaggttcatgccattctcctgccccagcctctcctgagtagctggaactacaggtgcccgccaccacgcccagctaattttttctatttttagtcatgcctggctaattttttgtatttttagtagagatggggtttcaccgtgttagccaggatggtctccatctccttacctcgcaatccgcccgcctcagcctcccaaagtgttgggattacaggcatgagccaccgtgcccggcctatagaaatcaatctttttgactcttctcacttttatctccccatgcccaaggtttgcctgttccataacactcactcccttcccccttgctaatcagaagccatctcctctcagtgtctgatctctgctcttcatacatgattacagtcatggggtagagagtgcttgctaaattatgcagttaatcctatggtgctttaattttcaggccttcaaaaaacacttgtacagtgatgtgcagatttttaaacagttgaacttccttgtactacagtttttgtattgacagccaaatttgtctttcattcttcagattgtgaataaagtgatttttacagggcttccagcaaagtttttcctttcatctaaggcttgtagaaccctagcttatatagctgcttacatgagaaatgcaaaatctgtattcaccatgactttagtaacaaaggtaaagttttttagtagtgccaaggcaagaggaacaatcttggtggtagtactaagttttgtcaatattgtggtttcctgattgtattgttggctttctctctgagcattgaggtatactagaagtagagcttctcaaacataatatcattacctcataagcattaacaaatcaggcccaaagagcgtaagtcctagaaatttgttttaaagcagccctagtcatggtgctggtgctaccgccttgttttaggagcctgcctcctgtcagtatgaaaccctcacctgaaaaatgccagcctggacaccaaacactgagccccttcaacaggcacattatttccccctgagatccataagggaatttagtttctactattgtagagttctgaaaagaggtaaaatagtagtcctttggtcatcctatttttgctttcaattttgatatttcagactgtaaaaggccttgggggatgatagtacatgtggtagcagtaatttttttgaagcaactgcactgacattcatttgagttttctctcattatcagattctgttccaaacaagtattctgtagatccaaatggattaccagtgtgctacagacttcttattatagaacagcattctattctacatcaaaaatagtttgtgtaagttagttttggttaccatctaaaatatttttaaatgttctttacataaaaatttatgttgtgttttaa

SEQ ID NO: 95005 - DNA, 1054 bp, Homo sapiens
gtgagttaacattgtcgaagtattctttctttttttaaaattttattttattaatataaatagagttgggggggtttgctgtgttgtccaggttggtctcaaactcctggcctcaagtgatcctcctgccttggcctcccacagtgctgggattacaggtttgagccaccgtatccagcctgtttctctttttgaatgataaatctgctctttttaacattgttatacttgtagagactgccaaattctcctccaaaaagtttgtaccaacatgtactccccccagccctgtttgtgtttgccagtgtttcttcaccaacactggttattactcattttttaatattttctaatttggttaaatttctgttttaatatgcatttaaaaaatgttgatgagattgagcattttagcctttttgtttgttttattgatcattgtgtgttttctgtttatatctttcatctatttctgtgtaaaggatattagcgctttgtcgtatgtgttgtatatctttttccccgggttaccttttgtctcattttgttcatggagtatttttgctgtacacaaccttactattttgtcctattatatcttttatgacttgattttaatataacaattagaaagcttttccctgcttcaagattataaaaatatttattcatgttttctttttttatttttttattttttgagacagagtctcactctgttgcccaggctggagtgcagcggcacaatcttggctcactgcaatctccacctcccaggttcaagcagttctcatgcctcagtccctgggtagctgggactacaggcacatgccaccatgcccagctaatttttgtatttttagtagagatggggtttcaccatgttggccaggctggtcttgaacgcctgacctcaagtgatctacctgccttggcatcccaaagtgttgggattacaggcatgagccaccacgcctggctgggaagttttttttccctgaatgctacattaatttttttccaaatggaaatactagtcagtttgtcccattac

SEQ ID NO: 95006 - DNA, 1073 bp, Homo sapiens
tttcggagggagccgctctcctgcgactcggggcgtcgccggggcccgtggccagtcggcgggcgggacgggggtggcgtgcggaacgcgaaggcatcagtttacgcggagccttccgacagcgccggccgcctctggctgggatgctgagagtcgtctgggggagaacaggcgagggttccaaaagagcagccctcggcgagttgtccttgcggggaccctagcggcggagggcgctgctgcagctgatgaaatcgcggagccgacttgctcggggtccccgcgccgccctcctccctccgccggtgggagtggcccgcgctgcctccgctctgccaggaacatgaacggactctgggcaccctagctttggctgcagcccaccagagcctgtcagtgccgggctgcgtacatagaggtggcaaacatccgggaggctcccagggccttagggaaagggggaatggagagtgacaagtacccatatttcagcggtacttgcagaatttcagttttacaagatgaagagttctgaagatggatggtggtgatggttgcacaacatatgaacgtatttaataccactgaactgcacttaaaaatggttaagatgggccgggcgtggtgacacgcgccgaggctgaggcacgagaatcgcttgagcccaggagttcgaggctgcagtgagccgtgattgcaccactgccctccagtctgggcgacagagcgagaccctgtctcaaaaaaaaaaaaaaaaaaaaaagttgataaggtttatgttatgtgaattttaccacaataacaaaattgggaaaaatatacaggggaggaggaaaggaaaagctctgtttgcatttttgggtttccttgggaaggtgatttggtcggtcattagagcgctggcattgttggcattgttagagccctgcaccttacaacatcagccccttctttttttcatctaacgttcactgtgtaccagacactatgccaagctgtgcgaattcaaagatgagaaaaactgttcttaatggagctcatgttcctgacaaggggcagaacacgcgtgtaat

SEQ ID NO: 95007 - DNA, 1440 bp, Homo sapiens
tacaggcatgagccacagttttggattttatttgaacagtcctcttgacttcttcctattctgttgattacctatcttaatgggatttttttctttcctttttttttttcttttttggcaggggaatctctccctaggtcaggttggagtgcagtgctgcaatcacggcttactgcagccttgacctcctgggctcaagtgatcctcccacctcagcttgtgagtaactgggaccacaggagcataccaccatgcctggctaattttttttttttttaacttttagtagagatggggtctcaccatgttgcccacgctagtcttgaacttggcctcccaaaatgctgggattacaaggcctgtgccaccatgcccagccctgggaattttttctaaacacatctgtgaatgcatttaattctgggataaatgttagctaatatagttacaattttggattccccgtgggacttagctgactctccatttccctgtttattttggggtagcagttaatctgccccttggcaaaagagatgatgctaaattagttaatgactcactcccaaggctgtatttcacattttgcagagttgtgggaagcagaggagggctgacagttatactatgaaagatattcattgcatgtgactttgtttttggttcttgttactctttgactgtttttctttcttttctttttttttttttaagcaaattggcataacatccagaacctgcttttggaagcaaagtttgggacttggaacactggcttttcccagaaccctgtgtccttaacttcagtatatgattttatctgaatgtgctaataccattttctctaagtttactgctttcaaaagaaactttttatgaggtgcaagctaagtcattctcactgactagatatacatatagtgtatatacttatatatatctccttatgtgtaagtgtatctattttaaggatacatgtgtatgtgtgtgtatatatacatatatatataaaaccaagagaaaagagtaagaaattagttttattgaacatatatgcctggcacattatatatgtttgttatttcattcaacataaatgactgttctaagccgttttaaagtagtctttcactctgtagtgttccaggattaggaatgtatttttggcctgcggtgggcattccaggtactaatacaaatcaggaatgaggaatgttgccaggtgtatttgtatcagcaaaacccccctattttaattttttttttttgagatggagtctgactctgttgcccaggctggagtgcagtggcacgatctccgctcacggcagtctctgctcactgcaacctctgcctcccgggttcaatcgattctcctgcctcagcctcccaagtagctgggtctacaggtgcgtgccaccatgcccggctaattttttg

SEQ ID NO: 95008 - DNA, 1173 bp, Homo sapiens
gtttcatgtgttggccaggctggtctcgaactccttaccttgtgatctgccctcctcggcctcccaaagtgctgggattacaaacgtgagccatcgtgcccggcctatattgtttgtttattcaactacagaatataatttatcgatttaaaccaccataaaaatgaagtcagttgactgggaaatgatttgaaatacatgcctggctgctaacaacagggacaaaacacgaactacaaatggcatataagcagataagaaaaactatttaacctcatggtgaggggtcaaacaattgcaaattaaaactgtaaaacacttagtaatgatcagggcgcagggtggtgtagcagttaagagcccagactgatgtgagactcagcttgaccaagcgctgtcagtcacttaaactccctgagcttcaaattaatgataataatgatttctatcaactttatccccctccatatgtagctggatatattcattcatttatttatttatttagcagagacagggttttgccatgttgcccaggccagtctcaaactcctgggctcaagccatcctcctgccccggcctcccgaagtgctgggattacaggcataagccactacacctggcagagttttagtttttataaaaattcaagttatttggttttgtgactctgttgccttctgcagaaatgaagctgttgtcatttctggaaggaaactggcccagcagatcaagcaggaagtgcggcaggaggtagaagagtgggtggcctcaggcaacaaacggccacacctgagtgtgatcctggttggcgagaatcctgcaagtcactcctatgtcctcaacaaaaccagggcagctgcagttgtgggtatgtgtccttctgagacctcgactgcggttcagttgaggtttatatgaggcaaagtccattctaatttatgatttcttttttctgattaggaaacccaagcagaggaggctaatgtgattgaactgtatcccaaaactttgtcataggaaatcagactatatctttcggggtttatacagtaggacaggagatactggttggtattctctgtggcttctggaaagaatataagctacattctgttcttagtctttatatttgataggtgaccctgaatgcattttacatttgctttcct

SEQ ID NO: 95009 - DNA, 1180 bp, Homo sapiens
aggactataggcatgtccaccatgcccagctaatttttacatttttcctagaaatgaaagtctgtctgtgttgcctgggctggtcttggactctgtgcttcccaaagtgctgggattacaggcatgaactaccatgccctacctaaaatggtttctgaggggtaaaaaggccttgttactttatacacctggttcttcatgtggatttggcttaaaggcaaaataaactcaaaagagtgaatattttattagaaatgggacagaccaactcagaataccaattacgccttgatttagtattgtggtcttgatacaaaggacagtggagggaagcagctgtgatagacgatattggctttgctattggtgtttggctttgcttatgcgagttccttccatgcagatgaagtacatctcagaggcaagctgtagaagaatagatttccttgcgaagcagataagctggagtcaggcagtgctgactatgcggtggtgatttaaggcaactgtgccaatttctttttcagagcatattgatgagagaaggatctgcaatgctgtttctccagacaaggatgttgatggctttcatgtaattaatgtaggacgaatgtgtttggatcagtattccatgttaccggctactccatggggtgtgtgggaaataatcaagcgaactggtaggtatatcccagaattgcatgtctgtgttaatattataaaagtagtactggcaaatggtaaaaactcatacagtcccaaagagtggaaaccctactgcatatcctctagtcttactccccaaagtttacctctcttaacagttttttttttgttttttgttttttttgagacagggtcttgctctgtcacccaggctggagtgcagtggcgcgatcttggctcactgcagcctctgcctcctgagttcaagcgattctcatgcctcagcctcctgagtagctgggattacaggcacgtgccaccatgcccagctaatttttttatttctagtagagacaggtttcaccatattgaccaagctggtctcgaactaggcctcaggtgatccgccccctcagcctcccagagtgctgggattataggcatgagccatcgtgcctgcccttaacagttgcctatgacagtttttgctttttaatccagaagtctcagtgaa

SEQ ID NO: 95010 - DNA, 1028 bp, Homo sapiens
ggggtttcaccgtgttagccaggatggtcttgatctcctgaccttgtgatccacctgccttggcctcccaaagtgctgggattacaggtgtgagccatcgcgcgtggcctctatttttctttttaattttttctttaagagtcagaggtttcatcatgctgcccaggctggtctcaaactcctggcctcaagcaattctcctaccttagcctccctggcctcaagcaatcctccctcctgctgggattacaggtgtgagccaccgccccagccctcagtgaaggaaatttaagatttgatagtggtgacagtgcacattcctgtaacattttgtagcctgtagtatgctttctcctgttttcttttagcccttattatgtgtagcaagttacagctccagttgactgatgaggcaaaattgggttcatgttctaggccatctgactttgttttcctttggactggcactacttttaatgtcaatacatatatttttataggcattccaaccctagggaagaatgtggttgtggctggaaggtcaaaaaacgttggaatgcccattgcaatgttactgcacacagatggggcgcatgaacgtcccggaggtaaggaaattgctttcagggaacactgtccttttttccccatgtaagaactttcagaagccatcctgtgcatgtttggaagtattaactctgttatactttgtatttgttgaaattttgttaacagacaattcagggagtaacctttgtagagaagctgcacccagtgtcacctgagtttctttattattcatttatcatgtaactagcttcagaaataaatttaagttttgagtataagcatggttgtaggcaattagaaaatttcagctatagctttgatagctggagctaaggagcaattcttattcaaagatactgtgtcatttagtggaaaaaaatctttagccgttgcaaaggattggattggtatgactgtaatgtgtcctgtcaggttctgttaattggttctaaggtaaa

SEQ ID NO: 95011 - DNA, 1004 bp, Homo sapiens
gtaaggattttcactttaacattaggttaattttttttttaacttctcacttttaaaaaattactgtgctttctgctttggacaaattatacttaaaattaaattaagaaaatgctataggcaggtattgaggtaatgcttattattgttatacttacaactcccacacagttaacctactagatatttctttaatagatttctttataggttacttagatgtataaatattccttgaacaactctgtatgtgcatgttattttactagtgtgttcacaaaaccttgaatgatgtagatgtgatttttgagttttatgcttatgtatgttactttttccttgcatgcttgtttaataatatattaaagtacacacatgtcctttgccataactaaagcagcctgcctgtcttgtttctatgtaggagtcagacaaaaagctgggtatatcactccagttcctggaggtgttggccccatgacagtggcaatgctaatgaagaataccattattgctgcaaaaaaggtgctgaggcttgaagagcgagaagtgctgaagtctaaagagcttggggtagccactaattaactactgtgtcttctgtgtcacaaacagcactccaggccagctcaagaagcaaagcaggccaatagaaatgcaatatttttaatttattctactgaaatggtttaaaatgatgccttgtatttattgaaagcttaaatgggtgggtgtttctgcacatacctctgcagtacctcaccagggagcattccagtatcatgcagggtcctgtgatctagccaggagcagccattaacctagtgattaatatgggagacattaccatatggaggatggatgcttcactttgtcaagcacctcagttacacattcgccttttctaggattgcatttcccaagtgctattgcaataacagttgatactcattttaggtaccaaaccttttgagttcaactgatcaaaccaaaggaaaagtgtt

SEQ ID NO: 95012 - DNA, 1041 bp, Homo sapiens
agctcactgcaacttctgcctcctgggttcaagcgattctcctgcctcagcctcccgaatagctgggactacaggtgcatgccaccacacccggctaattttttgtagtttagtagagacggggtttcaccgtgttgcctaggctggtctcgaactcctgagctcaggcaattcacctgcctcggcctcccaaagtgctaggattacaggcgtgtgccactgtgcccggctggttcaaacttttcatataacccttaggaaattggatgtgacagggagaaaagataggaccttttcagcatttcttaatatgcagaattgccaaatattccaaagatggtctagtgacataaaagtatattacaagtttgtttgagaacatctatatttaaatctaacctttaaacaattttaaattgatatttgttttaaatatgaattgactattgcccctttatcttagctatggtttggggaaacaagcatttttttatttccaaagaaatgttagaatttctatgctgaactgcattttaaaataaaatataatatttagctttaggtattttaattactacaaaggggagagctttgcatctaagcaatacttttcatcaatagatctccagttttctataggcagacggactccctctgtttgataaagaaggaaacaggcacagagaagttaagaccctcccagtgaagactaagccaggctctccatctcccatctgggagaagctgcttcatcctagagggtggtctcactgtcagtttctcttcggtatttatccatgtctgtgaagtcatagtctgactccatctctatcttcacctgtggcaccatgaacactgggttccgtgagtagctgaaagcaggtgaagctggacaggatattttgaagtgcaaggtgatgctgaacgagaagtaggaaagaaggattacgtagttcttggtgttttgaacccatcccctagagcagggctctaatgcaaatacttccatctttgcttctgaactctcagcacatgccagaa

SEQ ID NO: 95013 - DNA, 1034 bp, Homo sapiens
gggacaagttttgtgcaagatagtttttccacggaccagtagggagtggggaatggttttgggatgagactgttccacctcagattctcttaaggaatacgcaacctagatcctgcatatggacagttcacaatagggttctcacccttatgagaatctattgctgccactgatcccaccggagctggagcacaggggttaatgcttgctcgcccatgctcacctcctgctgtgcggcctggttctgctactgttccatggcctgggagctgaggacccctgcgctagaagacctttgtccttggcagagatcaaagagaactgggccaccaggactggtactccaaccagatggaaaccccagagcaaagcctgcagactcgactaattctcactttagttgaggcaaaatccctcattccctcctttccccaggtgtccccagatccctgtggcatctcctggccctcttctatgttgtttcagaccacatcagtccaaacatggcccaccaggcctcccatgttttccagtggctgttgaaatggttgagggctcagaaccaagcttttccctttagagaaataggtagcatagcacttgggttataagtcaggcataattggaggtcctcgtggtggttgtgctgtgcctctgtgtgaatcctcagcaccttctcagcagacagctgagagggaggctgcctaggagggactgggcattgcttatggaaatcctgggagattatattactgcctttaacccctcccagcctcagctccctataggtggccagtcctgtcatccaggcaacatagcctgtcccgaggtcttctgaaagatccctaccttagtcccgagccccgtgcttctaatacagggcttgccaccctcaaagacagattaggggtgggtagccagggcatccttcccatcagcactgtccatcataggtacctcaagatcttgagtttctcagactcctcccccactcctatttctctcttccctggccctcccatgcctcacacccc

SEQ ID NO: 95014 - DNA, 1046 bp, Homo sapiens
cgaggactgtgatgaggaggtggggaagatgtgaggccggggcacagaggagaaattgagagaccttctctccacttttgccagggacagggagagggcggcttcttgggtggcctgcagcagtgcctcggcccagtccaggatgggctggggcatctgcttgtcttggtctggggtgttgagggctcttctgtttatgtgaatatcctcagggtgggccagagtgaatgagactccctgtccagggaaaaggtgactggccatgcccactctttccatcactgtgggctttacggccgtgatcacagcaagcgggttcctgtgggaagggccaggaggcagctccagcatggaaggaggttatgaagactgacctccaaagagtggagcagacttggggagaggtgtctaatggggccttataagtagactggactccagacaggcaggaggggctgggaacaagttttgcttgcgcctttgcctagggtattgaggacaaagatggggaaagaggcaggtatcctcgccaaaaggagactggctacatttcccagatgtctgggacaacatggttgccccatctgcccctcttctcccatggtcccttcccatttcatccccaaaacactcagggagtcaacagacaaggggccagtccagaaattatagtgaatcacaaaacatgaggcagaaagattcttaattcatgtgttcattacttatgatgaaactgtccccacaaaaggaagtgacttacccaaaatggacatgtagctacatttctaagaaggaattaagaaaataattcctgactttgctggtttctgatatgctaagctgcctgtgccatctcctaatgctgtgcttggttcccaatctcccaatttgacccaaactcacgtccctgcatccaccctgtcctgttctcgtgattttgccttgtgcagatgaaacctgttcaaggcaaatcccttctgactggctggtggtgattaaaccatcttctgatcagtcagaactcccctggtccttaattactgtgc

SEQ ID NO: 95015 - DNA, 1050 bp, Homo sapiens
aggcacagtgtaagtaaaggtaaattcttatcaatagataatcccttaaattagtaaatgaaaatattaaagtatatgcatattagttaatgacatggagggaacctctggaacaagtaaaatcaagcagacatagtggatagatctggaaggcggggctggattgagaaaaggggaggtgggagactttgcttttcctcataagtattttccactatgtgggtttttaaccaattacatatgttatgttaataacaaatttaaagagaaaagggggatgcagggaatgaagtcaatgtactgtcacctgcccctgcccttcaaattgccttctttgaaaagatattaaaaaggccacagggtagacgttgggggaccatctgtcctgagacttctggacatagagttggtttggaggggaggtcggaggacattgattcagaatgggcaggaaggtcaggttcagaacttggtctaggaagggcctccaggttcagaacctggcctaggaagggcctcttgagaaacagcggaacaagagactcttggtggacaaaaggtctgagtgtagccaatgatccccagtggaattggggagcctccctcctagcccaggtggggtacaacaacctgtcacaggcttgtaggaactaaggtttgcttcagagtccagcccttgccctcatcatacctgctgggtgccccagttcagactgtcataccagaacacatcttcagcagtggctgccatggccatatggatcataacagatcccacattgaccaccatatgccaagcactctaaatgtgtcacagttcacttacacctttgagggagatactaccatcatctccattttacagagaaggaaattgagtcttggagagatgacacgcttccccaagctcacacagttagcaaggagcagagcctggatttgagcctagttctgctgccttcagagcccagactgtaatagttcacctctttgctgccggaggactggggctgcctggagctgggtgggtgctttactcacttcttttac

SEQ ID NO: 95016 - DNA, 1170 bp, Homo sapiens
ccccatatatgaaagggtgtgacagaggggatggaggggagagaataaagatgagacactccaggaaggaggcgtccacaggacctgtggttggttgatgggagccaggcatcctgcctctgcacttttcctacttgctagcacagcagtgcatcctagaacacaatgaagaaacacatgtgagctcctaatcttcctagggagcttgtcattccttgaaccagcccgtccccaggaacatcactctggggggctggggtccctcagagggtgggaaggtatgctggctgcctggggactgcagtgggaaggacacagctgactcatcaggaagatgctgacccattctctcctgtgcttggtctccaagtacaacctccttaacctcacagcgttggactggtccctgctgagcaagaaggagtgtctgagctacggcgggcgcctgcttgggaattcctgcaagtttatcccagacctggcgctcatgtccttcatccttttctttgggacatactccatgaccctgaccctgaagaagttcaaattcagccgctattttcctaccaaggtaagctcaccctgcagttaggaggggacctgcagtcagacagctgctgagtcccccagagagggttctggtccaccgacaggatggactccatgcgagcactggcccactggggtttttcaagttaagtcagagagaactgtgttcccttgttggctggtccccttgacaacacttggtattgtcaggcttttatctttagtctttgtctatagtagtatctcattgtgttttttaaatttttcatttccctgatgactaatgaagttgaaaatacagctattcctgtgtttattggccacatgcccaattgcctttctttttggaagtgtctgttgaaatctcttgcacattttgggttgtctgcctttctgatttgcaagagtttgttatatattctgggtagaaatgtttttgtgattatatgtgttgcaaaatcttctcccactctgtgactgtttttttctttttacatccttaatggcatcttttgattaacagaaattcttagttttattgtaattgaatatatcaaactttcctcaaggcaaatattggacagcagatattcttgtatgttaccttctaaaagcttcatt

SEQ ID NO: 95017 - DNA, 1080 bp, Homo sapiens
gaggtgaacagggcagggaagttcatggtgtagagctgggaagtttataggctctgggccagcctttctgggatgggatcatggctccgagtatgaactgtgtgaccttggatgaattacataacctctctgggcctcagttacctcatctgtaaagtgggcatacttggtgaagatctgggaattaaacaaatgaatatatgtaaaggcttggcatagggcatggcatagagtaagttctttgaacatttttaagtctaaaagcccagtggccggtgaagattcacaaggcacgttatcctccagtttgtcttagcactttgtcttggctccagattccttatttcagtttttaaaaccagctgttcgtggtcaggcaggtgctgtcctggcccagctggtctgtcagagctgtggcccaggctctgtcccaccagcccttccctaactggggcaaagtgaggaaggtggagagggagctgccctcacaatggaagccaggccttggctctaaggaactggaaggagatgggaaggggttgggaatgcagctcccagccccacagctgctgaccctgccccgtgtcatgtgctcatccacagtgaatacaaccgtgttcaatgcttcagccccattggcaccagacaccaacgcttctctggtaagtcctttcctcttatgttagacatttgagtgcttttgtttgtaggaggagggagaaaagattttggaaatgagaccaacttatggcctcccagacttgcagaggtcaactccagctgcacgtcagggtcacctgcagagctttgtaaatgaacacttttttcttaggtatatactgtaaacatcccacttaaaaacatgcctcattctgttaaatccatgtttttttgtgcgttttttttttttttttgagacagggtctcactgtgttgcccaggctggagagcagtggcgtgatcttggctcaccgcaacctccatctcccaggttcaagcaattctcctgccacagcctcctgagtagctgggattacaggcacgcaccatcacgcccagctaattttttgtatttttagt

SEQ ID NO: 95018 - DNA, 1095 bp, Homo sapiens
tcagcatgtccaaaactgaaatcatctcttctgtgtcctacatgtgacaagccacaaacctggatatccttgactccttctttgatctctttagctaatttagttatccagtcctgttcagtttgtccttcattactgtctctcaaatttttccactttttttacatccacgaactttgtctataaataacttcttgctctgggcacttcagcagtttttaaactggttaccctacctccattgcctttcttcaaccagttctacacatcgatatgagggacctttccaaaatgcatactgggccatgtcactccccagtttaaatcctgaaatgatttcttcaactagatttaaaatttacataagatcctgaaatggttcctctatgtgtctagattttaaaatttaaactcactagaatggcacatgagaccatcaatgatttgggtcctgtccgcctctccagcctctcccgatgtgccaggtggttcagctttagtgaacccctgcagtttgcttgccacccggtgctctcttaggcctcttcccaccacccagaatgccatctacctccttccctccactctacctccctgccctcgccccatccccattcctcagctgacatcctgtccatttattaagatagctctggcaatgccatctcaggaaatttccaatccctatggcctgttaggtgctcctcttcttgaggcagcaaaagataccgaccttttttccaggtgtgcttggatttagttgctttgtgactttggcaaggtttctaatctctgatctgttttcttacctgcagaatggaaaaatgatatcttacagggttgttatgaaggtcaaatgagatagtgcatgcaagcatcaagcactgtgctggcacacagtagccttgcttctcttctccagtatgtgctcctactacgctactttatgccagtaagcatctgtttctattttaagtgttagttaactcctctcccacttcagacaggagttcctttagggtgtcttccatctctgcatcctgccaaatacaagtaaagggcacgtatttgaggaggaggaagatgacttttatt

SEQ ID NO: 95019 - DNA, 1050 bp, Homo sapiens
cccagtttccagggactgtggggaggatgtcagggatctagaagttctgtccttgtccagggagaggagctaagtgaggccaatgtgcggctgagcctcctggagaagaagttggacagtgctgccaaggatgcagatgagcgcatcgagaaagtccagactcggctggaggagacccaggcactgctgcgaaagaaggagaagtcaggcactttccctggggccttgcttcctctaatcctcccactgctggagctctctgcctcctaacccatacccctactcaggttctcttatagtgagactccccattttctttacccactgccaaccccattgcatcaccccagcctaagcctgtgctgctctgccctggcttctcactggcagggctattccaaggacctctcaggactgaatagtcaaggagtgctttagagaagggacactgccaaagcccagattctctttcacagagagtttgaggagacaatggatgcactccaggctgacatcgaccagctggaggcagagaaggcagaactaaagcagcgtctgaacagccagtccaaacgcacgattgagggactccggggccctcctccttcaggcattgctactctggtctctggcattgctggtggtgagtactgtggaataggcagcactagcacagaggagattgtcttctctcctgtccttggcctcattttgacctctgccccaccccccttacccccgggtattcagccaggaacatgcttacacagtttcactctgtgccagttttcaccaagttttcccttccgctgaagatgtgtgctgagtttctctgggcaaaggagggcattactaaattgttaatgaggctcagaataatgatgacagttggtctctagtagatgtcctttctggctctgtaatctgacctttctgcccagccctatatcccagagggttgtcagccagcagcaggctgggctgactctcctggggcatccagccctgcccgatacctgctcttgattgcttctctgcttggacactgtg

SEQ ID NO: 95020 - DNA, 1048 bp, Homo sapiens
cgccagctgaccgcccatctacaggtacatgcccactgtttgctctctgcccaccatcaccccagggcttccttatgacccagctgtgcttcactgtctctcctcctaggatgtgaatcgggaactgacaaaccagcaggaagcatctgtggagaggcaacagcagccacctccagagacctttgacttcaaaatcaagtttgctgagactaaggcccatgccaaggtcaggaaagtgtgtgggtctgagggagccctgcctgggatgaactggtatggggtctgggcttcagattcctgggggaaggggtgctttgtgtggtggtttggaagactctggcctgggcttgccctagaagcaagggatctactggagcaaggcatgggaattttggggctctttcagctctggctaagagtcctcctccctgttcacctcacaggcaattgagatggaattgaggcagatggaggtggcccaggccaatcgacacatgtccctgctgacagccttcatgcctgacagcttccttcggccaggtggggaccatgactgcgttctggtgctgttgctcatgcctcgtctcatttgcaaggtatggccaatcaatcacatgttccacagaaatctagtgaacttgccatgaaccaggcattgaagatgctgagtgaagacaacagagtctctgcccacaaagagtttatggtatagtggaggaacacagcaaagtcaccgattaatatatattacaaatggtgtgttttcaaggagagataggttctgtgagagagcacaattagagatttgatttagaggtgagcagggtgtgactgagggaataacattgtctgagggccaggaggtgcctaggggttaaccttggggatgatgggcaggatagcattctaggtggagagatagcaggagtggcagctttaagtcaggaaagaccttgattccaccggtcccactaccctttcattttcacatcctgactcctcacaacctccagtaatcacatcactaccctttccccatgcaagattc

SEQ ID NO: 95021 - DNA, 1050 bp, Homo sapiens
ccaggctcagatggcgctgcatccagttatcagctcaagcagcttgaggagcagaatgcccgcctgaaggatgccctggtgaggtagggtcttcagtgcttgcctctgatgcttactcttgtgtctccaaatgtgttagagcacccatcgccagagactctgacacgtgctttcctccttctgccttcctcacatccctgcaggatgcgggatctttcttcctcagagaagcaggagcatgtgaagctccagaagctcatggaaaagaagaaccaagagctggaagttgtgaggcaacagcgggagcgtctgcaggaggagctaagccaggcagagagcaccattgatgagctcaaggagcaggtctggggagcccagcccctcacccagaatcccccacctgactctcctatcagttgatgcctcctctttctaggtaccttccagcagcccttctccctatcctccccgtaacacaggtggatgctgctctgggtgctgaggagatggtggagatgctgacagatcggaacctgaatctggaagagaaagtgcgcgagttgagggagactgtgggagacttggtaagagaagagcagacccctgacatctgacttggacctgctgagaaaaagattgacatgtgacccttggcctttgagcagggtgtgcggtgagggacccagcctgggcttgctaccctgaccctgccttttttttttttttttttttctgagatggaatctcgctctgttgccaggctggagcgcagtggcgcaataatctcggctcactgcaacctccgcctcccaggttcaagcgattctcctgcctcagcctcccgagtagctggtactacaggcatgcgccaccatacccagctaatttttgtatttttagtagagatggggtttcaccatgttggccagcatgatctcgatctcgacctcatgatccgcctgctttgacctcccaaagtgctgggattacaggtgtgaaccaccgccgctggccgaccctgcctttctttagcccaaactatggtgtggt

SEQ ID NO: 95022 - DNA, 1039 bp, Homo sapiens
ccgctggcagcacccatcatccccacgccggtcctcacctctcctggagcagtccccccgcttccttccccatccaaggtaaggcctggggtaggggtaaaggagaatcaagacacccagaggcttgtggctacccgctgtgtcttgaaaatttcctggggttggcaaagacctagaacttggatcagaaagggtgaggacatagcctatggatatcttgctactgactgagccatcctttcctttcttgcccttatgccatactttccccatatatactgtgctacggtttcctctcagatgttcttatgccactgactgttggccaccctggggctgggtgatgtttgcacactttcttgtgttctttgcgccagctcagtgttggtggagaggaggagtgggctgtgcacagaccgtgaggcctctcctttgcaggaggaggagggactaagggctcaggtgcgggacctggaggagaaactagagaccctgagactgaaacgggcagaagacaaagcaaagctaaaagagctggagaaacacaaaatccagctggagcaggtgcaggaatggaagagcaaaatgcaggagcagcaggccgacctgcagcggcgcctcaaggaggcgagaaaggtttgactctggatgaagggggtggctggggcagcctgagacctaaggaagcatgctggaaactagactggagctggagcctggaacatactgtgagaaaggcctggggcatctctgtgctggtaccccctcccacctccacttcttcctcaggaagccaaggaggcgctggaggcaaaggaacgctatatggaggagatggctgatactgctgatgccattgagatggccactttggacaaggagatggctgaagagcgggctgagtccctgcagcaggaggtggaggcactgaaggagcgggtggacgagctcactactgacttagagatcctcaaggctgagattgaagagaagggtaaggggcccacagctgctgggggccaaacggtcaggtgagaac

SEQ ID NO: 95023 - DNA, 1092 bp, Homo sapiens
gcttttcttcttgacttttagaggtctgggcccttggaggtgggcctggaagtcactggatatttctggggaaaggggacattttgagatggagtagagctgcattcagagtgggagtgggtttgtagacgtttttttagggtaatgaggagctggagaagggaaggaagtccgttgagtgtgtaggccttatctatgaaatccgcaaggcagatactgagtaggacctaggaacaaaaagctctgtgtacgttgtcttctggggtcctgtgaatatctggaatccagctttccaagcttccagtctcccagcctccatttaccactcagtaagcagaccttttcctttctgactcctgaaggacttaggtccacgtttatctcttccttactagtgctttcagagatgtatagttttgccttgctgtcagactgcctgggtttcagacaagctcctctaggagtgggaaagcagggaaagcagacagttgggttagcccaggatcaaggtttgataaggtgagacaagaggagatcaaggtatcaaaggatgctggggtgccagtaaaaacaaggtagaaatggttcagacaggggagaaatggtagaggtggaaaagaggcttttcctcctcactttctcctttttcattctccaaaatcttattttcctataatttcctgaaatttctctaagactattggcagacacagagattattatttatcagacacagagatttttcccctcctctcttctcatttttctagatattttagtggtatttaatatcattggagaggaaaatggattagaaatccaagaggtgtctgtctcctccctggctggggtaacattaacccaggattgtcctatgggatatgggcctgggcccggtaatgctgtggaaggagcacctacctgtagagatattcagatgtgcccctctgccattttttggctatgagacttgggcaagtcatttgacttctgagacatagttctgtcatctgtggaatggagagaatggaatctgttttggctacatcacaggttcatttttgaaggagatagtgaagtacatgtattcgt

SEQ ID NO: 95024 - DNA, 1081 bp, Homo sapiens
cttttaaagtgtgagcagcttcagtggagtggtagggatggagccagatagcaatggatcgagaagtagatgggaagtgaagatagagaatgtgtactcactttgagtagttcagcagagaaaggaagaatacagaatggtggcagcttgtggaagaggtagcagggacttgtttttcctagaatggaagtcttgtttatgggttttctgatgccatgtaagatccagtagacagggtgcaatgaagacacaagagaaaagacgattgctaaatcaagtcctcagaggagaggggaaggggtgggccctgaaaagaaggggataccattttctttaaagaggaatgttggaagaaaggaaggaatttaggaagaaagagataatgacatatgcatgcagatatatctaaattttcaaagaaattcttacctaatagggccagttttctttttcagcaaggttatctgctgagaggtgggaatgctggtgttggcttgggtgggagtaaggacttgaaaatgtaaaggaagcttgaaataactgttaagaggaaagaggaagacagtggaactgaaataagctccaagagtgttgagtaccctctgaactgaaatcctacactataagcctccccttcatctttctcataataataatggctgacatttattgagtgctttatacaaggcactgttctaagtgcttttcaggcattctcatgtgatttttacaacaatcctgttagaaagttattgttattatccctttcttccagaagaggaaattgaggcatagaggattagtagcgcttgtatttgatgaatctcttacgtctgcagaaatggattccttttcctgaggcatcagagaagacagaaatttaatcccaactcccggtttctgaaccttgagagcctagagtctagggttgctaaggagggaatcttaccatgccagtttgtgggcatgatggtggcatggagggggcaggacagtgggatcactgttgctgtcagcttttgacaactacatagggaaactcggatattcttgagtgatttttccagcatcctgactagaa

SEQ ID NO: 95025 - DNA, 1042 bp, Homo sapiens
cgggttcatgccattctcctgcctcagcctcccaagtagctgggactacaggcgcccgccaccacgccctgctaattttttgtatttttagtagagacggggtttcaccgtgttagccgggatggtctcgatctcctggccttgtgatccgcctgcctctgcctcccaaagtgctgggattacaggcgtgagccaccgtgcccggctgttatatatttttttagaggtggggtctcactatgttgcccaggctggccttgatctcctaggctcaagggatcctcccacctcagcctccctcacacaccactgcacctggctacaaagcttctctggttattcgtgggcagctgagattgagacccaatgcctgctcttgaactgcctaaaacattagtttcttgtcagttttactggccacagcccacctggggactggggagtgctttagcctgtccactgactgacatttccttctcacccttcccccaaccctggctaggacacggagttgcagaggaagctagaccatgagatccggatgagggaaggggcctgtaagctgctggcagcctgctcccagcgagagcaggctctggaggccaccaagagcctgctagtgtgcaacagccgcatcctcagctacatgggcgagctgcagcggcgcaaggaggcgcaggtgctggggaagacaagccggcggtgagcaagggggagacgaggcctcgatggaggcaggaggccttctgggtggtggtggtgcagcatgtgcgtgtgtggcatgtggaccaccttaaagatgacttccccatgaagtcttatcagggacctgggagagaccttggtgttttaccaccactgtgtgttgcccagaggcgcatttgtgagtagccagggcaggacttagaaaagtcggtgtgtctggtgaaaggtagctgatctgaagggtagcaagtaatgcaaaagcactaatttgctaagccctgtctgtgatccagtaagactggctatctggcttttggaaaattaatttcctcaacgc

SEQ ID NO: 95026 - DNA, 1048 bp, Homo sapiens
cccgcctccgaaggcctgcactgctcaagaccctgccttccatgtcccttctttcccctcccccgatctggccgacctcgcctctccatcttcctccattttcagacagcaccccgtctctgtctctccctagcgagctctgctccagaaggcgcggagtcaaccttcccctatgctgccgctgcctgtagctgagggctgcccacctcccgccctcacagaggagatgctgctgaagcgcgaggagcgggcgcggaagcggcggctccaggcggcgcggcgggcagaagagcacaagaaccagactatcgagcgcctcaccaagactgcggcgaccagtgggcggggaggccgggggggcgcacggggcgagcggcggggagggcgggctgcggctccggcccccatggtgcgctactgcagcggagcacagggttccaccctttccttcccacctggcgtccccgcccccacggcagtgtctcagcggccatccccctcaggcccgccgccgcgctgctctgtccccggctgtccccatccgcgccgctacgcttgctcccgcacaggccaggcactctgtagtcttcagtgctaccgcatcaacctgcagatgcggctgggggggcccgagggtcctggatccccccttttggctacgtaaggcccttaacccggactctgcgccccgtcccatgcccgctcttgagtatcttccccaccctattaaattacatccggtgcttcggcttgtacagaactgggggagtgggatgttgtgggcagaccagtctccggtatacacgtattttgcccctgtcggagcttgcgtcgatgcctggggcttggaaaccaccgcaaaaaaccaggctgcaaaccagcggaccgacttttgggactccgcctcttccagccgggattacctggcgtgcttcggcctttggcgtcattccgaaaacataccgcaagccaatcagcggcaaccttgctcttcggggcggctgttcgttggttgatatgccagagcctgttctgttgtctgtattgg

SEQ ID NO: 95027 - DNA, 1151 bp, Homo sapiens
ttgcctcttgcagggttctggctgctctggactgtcctcatcctctttagctgctgttgcgccttccgccaccgacgagctaaactcaggctgcaacaacagcagcggcagcgtgaaatcaacttgttggcctatcatggggcatgccatggggctggtcctttccctaccggttcactgcttgaccttcgtgagtgacttgatgccctgggtcagctaccagtggccctccccaaaccagaaccccaaatcgtctcacattcccttttccacacatttcaaagtatttttccctaatataaaaactagcaccctatacctggttgtcttcaaccaatcatgccaattttctcccctgcaggcttcctcagcaccttcaagcccccagcctacgaggatgtggttcaccgcccaggcacaccaccccccccttatactgtggccccaggccgccccttgactgcttccagtgaacaaacctgctgttcctcctcatccagctgccctgcccactttgaaggaacaaatgtggaaggtgtttcctcccaccagagtgccccccctcatcaggagggtgagcccggggcaggggtgacccctgcctccacacccccctcctgccgctatcgccgtttaactggcgactccggtattgagctctgcccttgtcctgcctccggtgagggtgagccagtcaaggaggtgagggttagtgccaccctgccagatctggaggactactccccgtgtgcactacccccagagtctgtaccgcagatctttcccatggggctgtcttccagtgaaggggacatcccataagtagttttgagagggtggatgggttacttgcccaccagaaacagccctagtcccaactccttgcgttcctttggcccctccctgcctacctagaatctgcctgaaagggctggagaggggcagtattgggggactgtgctagctttacccccgcaggacatacacaggagcctttgatctcattaaagagatgtgaaccagctacttgtggatttgggtggactaaagctcaactcactgcattgcacttgacctgactgggtttgaaggggacaggttatggccacttgaccccaccttccctgaggacagcagacagtgctgaggcc

SEQ ID NO: 95028 - DNA, 1309 bp, Homo sapiens
ccgcctgcatgcctggttttcctggctccatcagagccaggcaggcccactgccactatcttaccgctggcggggacgggaccctgccttaccaaccttactgaaccccaagaccctaccctctgggctggatgactacccccgggcttcacacccttcagtaaccgagcggcacctggacctgcgatgttgggtggcactgggtgcccgtgtgctgacgcggctggcagagcatctgggtgaggctgaggtagctgctgagctgggcccactggctgcctcactggaggcagcagagagcctggatgagctgcactgggccccagagctaggagtctttgcagactttgggaaccacacaaaagcagtacagctgaagcccaggccccctcaggggctcgttcgggtggtgggtcggccccaacctcaactgcagtatgtagatgctcttggctatgtcagtctttttcccttgctgctgcgactgctggaccccacctcatcccgccttgggcccctgctggacattctagccgacagccgccatctctggagcccctttggtttacgctcccttgcagcctccagctccttttatggccagcgcaattcagagcatgatcccccctactggcggggtgctgtgtggctcaatgtcaactacctggctttgggagcactccaccactatgggcatctggagggtcctcaccaggctcgggctgccaaactccacggtgagctccgtgccaacgtggtaggcaatgtatggcgccagtaccaggctacaggctttctttgggagcagtacagtgaccgcgatgggcgaggcatgggctgccgccctttccacggctggaccagccttgtcttactggccatggctgaagactactgaagggagggagaggaggggagccaagacactcatgccactctggctctgaagggacaaaggcttctggcttttgcccccagccccttggataccagtaattcaaaccttcctcatttcatctcaggtgtctccttgctgtcatcccacatagccctggggtgaatgtgaatccagagtctatttttctaaataaattggaaaaaacattttgaactctattgcttttgccagatttgcctcaccaagaggccttaggtcagtccaggcctcagcactgtctgctgtcctcagggaaggtggggtcaagtggccataacctgtccccttcaaacccagtcaggtcaagtgcaatgcagtgagttgagctttagtccacccaaatccacaagtagctggttcacatctctttaa

SEQ ID NO: 95029 - DNA, 1006 bp, Homo sapiens
ctcagctcactgcaagctccacctcctggattcatgccattctcctgcctcagcctcctgagtagctgggactacaggcgcccaccaccatgcccagctaattttttatattttttagtagagacggggtttcaccatgttagccaggatggcctcaatctcctgacttcatgatctgcccacctctgcctcccaaagtgctgggattacaggcgtgagccaccgcgcccggccccgaagggctaatactttattctcatacttcaccttcttctaggtgaagagaaacggattcgggaattctaccagtcccgaggtttggaccgggtcacccagcccactggggaaggtatgtccttggccgcgggacagtaaagaccccagagcattcttcttgcccagttttgctctctggggaaagaggagtatggaatgtgtgccaccagccacctcactaccctatctttctcagagccagcactgagcaacctcggcctccccttcagcagctttgaccactctaaagcccactactatcgctatgatgagcagttgaacctgtgcctggagcggctgaggtgaggagaaggtcaggggttgcaggaggtgacagtgccaatgacccagagccagggagggtctaggggagaggctgagcagtgagtgagtgcctatccccttgaagagagtatatcatggctctgggtggggaagaggaggaaagataggattccctaacctgtgtctatttccccccagttctggcaaagacaagaataaaagcgtcctgcaggtgagaagggctgaggggagggcctctctaaggagactcacctcccatggtccttccctcacacaccttgccctcttccctcccctccctgctcccagaacaagtatgtccgatgttctgttagagctgaggtacgccatctccggagggtcctgtgtcaccgcttgatgctaaaccctcagcatgtgagtagtcccacagtaggtttcttga

SEQ ID NO: 95030 - DNA, 1023 bp, Homo sapiens
gtagggcctattatgatgatttctacaggaggttgaagagataagacccttccctgtgctcccccccccccactccttaattacggattgagcaggggaggggccggtggggctcaggtgagcacacagggagaaagggacgtgggcggggccttacagagggtgagcgaatccgaaaagacctagaacctcgttgctgggagacaagtcccgccctgcaggcggcaccggaagtggccggctgggatcagcctttaagatggcgtctcctcaggggggccagattgcgatcgcgatgaggcttcggaaccagctccagtcagtgtacaagatggacccgctacggaacgaggtgcaagggcggcagggttactgctgtggtcggccagcggtgcgaattggggcgggctaaaggacgggcggtggctggccgggcgcccagtgcgcctgcgcagagacagagtgcccagtgcgcctgcgtggttgcgatcgggttgccaaactccggttaggacgcctgcgcgttgtgtcgccgacgttgtgtagtctcccctgggaaaggagggtcaggcgagtccacgtgagggaagcccccgctgtgcgcggagccctctgctgggcggagggggagtgccagcccccaggagctaatccccggctgatggcgcagggcgcggggcttggccgtctagtgtgatgaaggaggcgacccccaaggtgggaaggcgcacgggttggggtttgagggtggatgattggtgacggagggtgtatcttcaggaggaggttcgagtgaagatcaaagacttgaatgaacacattgtttgctgcctatgcgccggctacttcgtggatgccaccaccatcacagagtgtcttcatacttgtgagtgccttggagactgcctagttcttccagtccctagtcttcaccaagctgactgccagcttctgtgcggcctgcctcacgcatccaggcaccccacccagcccatgaatccagtttccagagggcctgagaat

SEQ ID NO: 95031 - DNA, 3515 bp, Homo sapiens
gatccacgtcttcctggtcagctgcgcgctgccagacagcgtccttcgcaggttccgacgcgggcgttcggggagtgtcagagctgggtctggcccgaggccacacagtcaccacctcctgtgtccccagattcgtagtgcggaccatgtgtgcggtgctagggctcgtggcccggcaggaggactccggactccgggatcacagtgtcagggtcctcatttccaaccatgtgacacctttcgaccacaacatagtcaatttgcttaccacctgtagcaccgtgagtgagagcgaggccgagagcgccacggggcggttccctggggcccagctgaaggcccccctgtccccactcgcgttccccatggaggatactgagccttacccctaaccccgatcctctacccaacatgtcagttttttttttcattttcctcaatatttttcttcttgctttctcttctcctggttcccagcctctactcaatagtccccccagctttgtgtgctggtctcggggcttcatggagatgaatgggcggggggagttggtggagtcactcaagagattctgtgcttccacgaggcttccccccactcctctgctgctattccctgaggaagaggccaccaatggccgggaggggctcctgcgcttcaggtgggtttagcacaggtatggggcgccagctgggtaggtggtcaagcttgtgggcccttgagtttttacaactttcttcggcccttagaccccatcatctccagttcatttcctttctgtccactttaagttctttctcctgaatcccttcattcttcaattatgtgcttgtagagtttgacagttgcctgttataaggcaggtgtgagctgctgactaggctggctggattcccatcctactttctccttcctcttctagttcctggccattttctatccaagatgtggtacaacctcttaccctgcaagttcagagacccctggtctctgtggtgagtgtgtgttgaacagggaatctctggggcttgaaggggaaatttcccatccctggccctggcttaggcctcatctcatgccctcccctcagacggtgtcagatgcctcctgggtctcagaactgctgtggtcacttttcgtccctttcacggtgtatcaagtaaggtattaactgtcctcacattttggtcgctggggagaggctcacctcaaggtcaaggaattagtggcctctgccctgtccatttgtagatctttatatcaaggttctaccacagaggcaacacaaagtatttacagtatttactattttcccacccaccatgcaaagaggtaccaaagtggggaatggtgacagcctctaccctgggtgcccacaacatagccctggattgtttctttgcaggtggcttcgtcctgttcatcgccaactaggggaagcgaatgaggagtttgcactccgtgtacaacaggtggtcgggtgcacagacagggtggaggcggggtccctgcttaggaggagagggaggaaagcttgagatcttgacacttccagtcttccaattctccctagctggtggccaaggaattgggccagacagggacacggctcactccagctgacaaagcagagcacatgaagcgacaaagacaccccagattgcgcccccagtcaggtatgtggtctctatacattacagcttttggggtttttttttttcggcctactgtgattcctcccctatttctgtgctagttagcctctccttctagttctctacttaccagaatttcttttttctttttttcctttttccacagcccagtcttctttccctccctcccctggtccttctcctgatgtgcaactggcaactctggctcagagagtcaaggaagttttgccccatgtgccattgggtgtcatccagagagacctgggtatgggaaagggtggccccacactgggagatgggcacagggaggaaaagtgggttgtgaaggaagaaagtaagtagggagtggactcccttctcttttctccccagccaagactggctgtgtagacttgactatcactaatctgcttgagggggccgtagctttcatgcctgaagacatcaccaagggaactcagtccctacccacagcctctgcctccaaggtgagacccaggaaatggtcagatccaagtgttggggtgagttgggggcaggctatgtactcccttatccctgacctttcttttttgatcctgagaccctagcatagtgcctctcttgcaaagtaggcattcgatgcgtgtttaatgatgatgactccgcaagccctctgacattgtgatcacctcagtttcccagctctggcccggtgacccctcagccaacagccctaacatttgccaagtcttcctgggcccggcaggagagcctgcaggagcgcaagcaagcactatatgaatacgcaagaaggtgagggggttagaggacaattaataggatgtggcaaattggagaatggaattatggagctactacggcaaagcctgaataatatctctccctatgtcccacaggagattcacagagagacgagcccaggaggctgactgagctcaaaggaacaggatggcacccagagccgcaggacggagactgggggcagccctcacccaactcacaacaggctggatgggtgggtggtaaaaagggaaggatgaggctcccccaatgtcacattaaattcatggttttcattcaaggcatctgttgtctctctcggtctcaaaagccctgtgagtgggttccttattccttggctgcgggggatgggggtgagagtcttctcgtacatttgaagggggtagtcagactgcaactgtctaaaatcacctcctcatgccaagtgatgagtgataaattaaggaagtgtaactgaactgaagacccagcttgggtgatcagcccaggttttggaggaagctgctgcaaaactacaagtcccagcatgcctttcacaagcacactacacatcatctatagagttcacacatgctcagtgtggtagctggagcctgttttccataggttcctgactaggttaaataaggtggagcaaatagccccaccccaaaagcaggcttcaggatttgaagtttgagcccatccctgaggtagagccggaatttacctttgtacttcacacggtcagggttggtggtgactacgtgggtctggagctgactgccgtcctgacacgtcctagagctgcaagcaggtttgaatccaggatccctgtgactctgctgttcctctccccaccccctatattctttatccttttcccttcaggactttcccacaggttactaggtctcacataatttctactgcccttgaggacccctgcctaagtaagatttctactacctgccaacggggtaatagtctcaggtagatttctactacctgactatagggactgtcgactaactctcagtagccctttatcaaaa

SEQ ID NO: 95032 - DNA, 1427 bp, Homo sapiens
atcctggaccggtaatggtgggggtagaccgggaggcactgaagccacaggctggagggcgggcgggtaggaggggtcagagcctcctcttatctgtgctttccctccatttcaggcaccctttcttgggccgcgaggtccctatctcgaacggctcaggattcgtggtggctgccgatgggctcattgtcaccaacgcccatgtggtggctgatcggcgcagagtccgtgtgagactgctaagcggcgacacgtatgaggccgtggtcacagctgtggatcccgtggcagacatcgcaacgctgaggattcagactaaggtgggggctggggtaggccaggtctggttggagctgcttatttgctcgcatcttcagatgacaggtctcttttacccattctcccttaggagcctctccccacgctgcctctgggacgctcagctgatgtccggcaaggggagtttgttgttgccatgggaagtccctttgcactgcagaacacgatcacatccggcattgttagctctgctcagcgtccagccagagacctgggactcccccaaaccaatgtggaatacattcaaactgatgcagctattgatgtgcgtcctgataggagagaaatgacaaatgatgggggaggggggagaggctgtgtggtacaagcaccaactgatatatggtggatgagcctatatagagcttaggctgcaaaaatgtggccacttattcatgggctgagaaagaagagaatttggagaaagtacctacatcctggtatgcccccagacttagaatccccagatctctttcatgttttctccttgtcctacagtttggaaactctggaggtcccctggttaacctggtgagtgagacatccttccttccaagaatccctgccccaggtcagtgtgggaagggtaggtttcccctaattcaaggatgtttggtcaagtttctgagcagttctttgttggctatctctcaatatccaaccagatctccccaacacttgctggtacttttgttcgggtgcccccatcccctactatttgtttaggctagggaactgggggctgtatccctgcaggatggggaggtgattggagtgaacaccatgaaggtcacagctggaatctcctttgccatcccttctgatcgtcttcgagagtttctgcatcgtggggaaaagaagagtgagcctgccttatggggaaacgggttcctttaatgtggtggaaataggggaagggcattcagtgggacttcctggagggtggtctactgggagaagagggcagggaaggaaggatgtagctgggtggggctcatttgtccctctgtcacagattcctcctccggaatcagtgggtcccagcggcgctacattggggtgatgatgctgaccctgagtcccaggta

SEQ ID NO: 95033 - DNA, 1024 bp, Homo sapiens
attgctagaagacagaaagtgagttgccattgtattttgtagtacctagcccatgtcctgtccatatatttatcaatgtgttgatgagagacttgaggtggaactcaggatggggagaatgcctgggtttggctaatagggtgatctgtgtactttcagcatccttgctgaactacagcttcgagaaccaagctttcccgatgttcagcatggtgtactcatccataaagtcatcctgggctcccctgcacaccggtgagggagaggctgcagtgtgatatggggatgggcaaggtgtgcatgtgtccttgaactaggctttgtactccttcctttctctctgtccatttttctctatagggctggtctgcggcctggtgatgtgattttggccattggggagcagatggtacaaaatgctgaagatgtttatgaagctgttcgaacccaatcccagttggcagtgcagatccggcggggacgagaaacactgaccttatatgtgacccctgaggtcacagaatgaatagatcaccaagagtatgaggctcctgctctgatttcctccttgcctttctggctgaggttctgagggcaccgagacagagggttaaatgaaccagtgggggcaggtccctccaaccaccagcactgactcctgggctctgaagaatcacagaaacactttttatataaaataaaattatacctagcaacatattatagtaaaaaatgaggtgggagggctggatcttttcccccaccaaaaggctagaggtaaagctgtatccccctaaacttaggggagatactggagctgaccatcctgacctcctattaaagaaaatgagctgctgccatcttttgtgggcagttagtcaggtgctgctctttgtggtgtggtgggctctggtctgttctgctcggtgctgggcctgggagcaaagattcccatgcttggctacagatactgacagctggcctctgaaggagggtgaaaacttctgcttgacagttccacatc

SEQ ID NO: 95034 - DNA, 1002 bp, Homo sapiens
gacgggggcttgctgtagaggggctgttctcagccctaggcagagaaggccttggctgaggagccatagcgcctggcctcccgttgcccggtgacagggatggtggtgttggcaggaggctgggacaaccctaccccatcccccgcccagccttgaggcctggccctcctgggcctcttgaccctgcagggcatctgagagcctgcgtgttggggagggcgtgcagcaggttctccaggcgagctttggtgccagccttccctgcctgggaatctgctgggttaggactctgggctcccattcaggggatctgtgatcccagggccgcctagggccccttacgtgcctctctgcacaatcagtacagctgtctgtcctccctctgagtaaatggggtcatctggatccctcccacgtccgccccttggctcttgtcaatccctctccttctcacccgcggtgtgcttggttcccctatactgagtgcttagttctttgcctatcactttctatccgttgtctctctcctctgtgtctttctggttttctctctctcattcccacagtctcccttcctctcacatcctgtctgtctgggtcttcctctctctctacgtgtctcttgctcagtctctatctctttttattgacccttctctgactctcgatctctcatagttgtctcttatctctgggtctctcaggctgtgcctctatgacctgtgcctcagcccttatttaatgtgtttctctccctgtctcttggtccctggggctctttctctcctgttgtctctcgctgtctctgtcttactcagtgtctgtttttctttcgtgacttctccctctctttctgactctgggccccactcaatctgtttctctcacgcacactttgtctctggggcacccaggccttccctgccatgcgacctgtcagtgtctggcagtggagcccctgggggctgctgctgtgcctgctgtgcagttcgtgcttggggt

SEQ ID NO: 95035 - DNA, 1037 bp, Homo sapiens
cctccagggaacccggccccgcctcccgccccgcctcccgccgcagggccaggaagcgcggaaggaaccgccgggggccatggacggagcagtgatggaagggccgctttttttgcagagtcagcgctttgggaccaaggtagtctggcgcatggatgccgaaccttatccgggctagtagtgggtgagagagcccagaaacagggagaggtgggcagcgggctggagagcggcgccgggagttggagagcctgtgactttcccgtgaagttgctttgcacactcccgggaagcgtctgtagtctaggggttctggtcctggggagacggagtggcatcgtccttgggaaacttcgcccccaaccccgtttggaagccccagatcccaaatcgacttgcgccgcaacctccttccccgtcgggacccgggccgcctgcgcacgccactccctctcgagcactctctctctctccctagaggtggaggaagacctgggccgtgctctacccggccagtccccacggcgtagcgcggctcgagttctttgaccataaggggtcgagctctgggggtggccgagggagctcgcgccgcctggactgcaaagtgatccgtctggctgagtgtgtgagtgtggcccccgtcaccgtggagaccccccctgagcccggcgccactgccttccgcctggacactgctcagcgctcgcacctgctggcggccgacgcgccgtccagtgcagcctgggtgcagacgctgtgccgaaacgcctttccggtgaggagctgcggcgatgcggggtgggggcagttacagaggcagagaaatggggctgcctcagaccgacccccgctccccgctgaggaaattacgggtttctcgatgctctctactacagaaaggcagctggactctggcgcctaccgataacccacctaagctttctgccctggagatgctggagaactccttgtacagccctacctgggaaggtagacgcctcagaagcccgggcagggatggagtgaagaggagg

SEQ ID NO: 95036 - DNA, 1047 bp, Homo sapiens
cccacctggcccccaagagctcctcgacagtcccccagccctgtatgctgagcccttagactccctgcgcattgctccatgcccttcccaggactccctatactcagaccccttggacagcacgtctgctcaggcaggagagggagtacaacggaagaaacctctctattgggacttgtatgagcatgcgcagcagcagttgctgaaggccaagctgacagaccccaaagaggatcccatctatgatgaacctgagggcctggccccagtccctccccagggcctttatgatctgcctcgggagcccaaggatgcatggtggtgccaagctcgggtgaaggaggagggctatgagctcccctacaaccctgccactgatgactacgctgtgccaccccctcggagcacaaagcccctccttgctcccaagccccagggcccagccttccctgaacctggtactgcaactggcagtggcatcaaaagccacaactcagccctgtacagccaggtccagaagagcggggcctcagggagctgggactgtgggctctctagagtagggactgacaagactggggtcaagtcagagggctctacctgagaaggacggcaaggctgaggtggctaagggggaccatggggaggtggcactagggatcaaagaagatggttagaaccagcagaagccagagggtgggaggggccatgctgtgtgagaccaggggaccagagggatgggagagtcaagggaaggacaatcccaggaagtcctaagaagtggggcagatggcagggctgaggatgggctctgcatcccccaaagccatcccttccctacttccccaaatgaagggacggctgtgggaccaggtctgtggaaagtggtgcatggtcagaatgggtgcagtttgaggggcctgtgtggaggcctcagggagatgttggactgtgcctggatccttactcctgcattgttctttgccagagacctatttaaaaattttaaaattctcattaaagtcagcttgggtttaagaagtttat

SEQ ID NO: 95037 - DNA, 1038 bp, Homo sapiens
taaaataacatgaagctgaagtcccctttgttcaactaagtatttaatttgcattgctgtataatttttggtggtttttatattctagaatgttttggggttgtttgtttgtttgtttttacagtggatttctttctcccatgttttattttttatttattttatttatttatttatttttcttttgagatggagttgcccaggctggaatgcagtggcctgatcttggttcactgtagcctctgtctcccagattcaagcaattctcgtgcctcagccttccacgtagctggaattacaggtgcccgccaccacacctggctaatttttatatttttagtagagacaggatttcaccatgttggccaggctggtcttgaactcctcagctcaagtgatccacccacctcagcctcccaaggtgctgggattacaggtgtgagccaccatgccccacctagaattttttttaacacaagaaatgcacaactccaataaaattcaaacagtatagaagtatgaagagtaaaaagggaaagtatctcagaaccctgccctatttccacttcctgtccactgttaacagtttgatgatagccttccagagctttgtaaaatgcatttacatatatatatgtagatagttttatttttatataaatgggatcatgttatatctgttctacagcttcctttatttacttactatctcctagtttttcatgtcagtacatttagctttgttaacaaacacgtaatactccatagtttgagtgtgtcataatttaaatattccctattgaggggatttgaactgcttcccgtttggggtttttattattacagcaatgctataccaaacatctttgcatatgcctttgtgtactgctcaagaatgtctctaggctagatgtctagagatacagtcaatggatcaaaaaataggtgtggaagctgggccagtgacaagtgcctataatcccagctaatcccagctacctgtgaggctgagacaagaagattgctttgaggccaaga

SEQ ID NO: 95038 - DNA, 4087 bp, Homo sapiens
cccgagatgccagacagtgtctctccgcacagggcgtgtgctggtccagaggcccgtttttccagtcgccccacaccccgggtccgcgatcacgctccccccacccatagccgagcctgacgcggcggtggctcatgcgcctttccgtcccagcctttagccacggaccacacgtcccatctcaggcgccccgcccctcccccgccccccgcccccggcgcgcctccccaggctgccggctccggtgtctgagcggccgcgcccgcgagccgtgagcgatgattggctgcgccacggcggcgggcggtccgtgggcgcacacaccctccccgcgcagccaatgggcgtgcgcacgtcactgatccggaggcccgcgggccggcagcccctcaataagccacattgttgcatgaaactccggcgcaggagtcccgggctgccgctggcaacatcgtgtcacccagctaagaaaatccgcgggcccgagccacgcgcctgtgaatcggagaggtcccactgcccgagtggagccgggctgagattcttctcaagttgagcctcagtgatcctgtggccgaagttagcgccttgacgtgggacaaccggacacgtcgccaggagagaactgaggcgccttctagcagttgtgacgccaaaatcacgtctccggagacccgcgccctccgccagccgggcgcaccctcgccggtagccttctttgtgcgccgtccggactcccagctcccggcccggcagccgagccccagcacaaagcagtcggaccgcgccgcccgcctcccctctcgcgtctccgcctcggtttcccaactctgcgccgtcgggccgcggcaggatgattgcctcgcatctgcttgcctacttcttcacggagctcaaccatgaccaagtgcagaaggtaagtcagcgcgggcggggcggcaggctgggctctggcaaagtggtctggcctccatcagtctcttcctcgaccctgcggggacccgcttcctccctactccgggcctgggagcggaaaaagtttgggcagccgggacactcctgggcgccaggagccacgtccgctaagcacagccggcgagtgcgcgcgggcggggagccgaggtcgcgctccgccgggcgccctccctccctgagctccggcacgcgctcacgctctctcccccagtccctttttccctgttactggaggggcgggtcaccccgcaggtagtcagggattgctgcgcccacgtgggagggagcccccttctgcagcgcgagttccggcgagagcacgtggagagaatcgtggctgcgggaggctgctccgctgccgcgtggggccgccgggggccgtccgcgctcgcggaccgcgtgtaggagacgagcggttcccttctccttccccgcggccctgcgggggtgggctcgaggagaagctgacccgggaaggagtaggaaaggggcagaggaactccgcccgccgcgccccctccccggaactgtggcgcccggaactgaggctcggcgaggggcgtcccccattaacccccgcccctccaaatcagcctcgggaccgcccagcctcgtgtcctcaggatctgcctctgagtaaggggaggactttggttgttactttctggtttgccctaaaagttactcggagaggccaacgcgccgcgttcctggattacttgagattcttgagatttatgtccttccgaaaacgagcttttttttccttaagcctcgacctgtctgttcccacctggctccgcagctccctatggctgagcgctcaccgcggccgggtcatttacataagaaagagcctcaggccaagccgggaagctctcattccccgcctcggggtatgggggtggggatggggccggggccggggacgggcagggccaggggcgcgctcagaattgagtttctgaaatgcccgggattaggggattggctcctggcccgggcctgggctacgatttgaggtaggggacaagttgggaggggattagctggagggaggttgttttaagagctgtgaggcaacggagcgttgctcagttacatacttggaatttcaatatctgatgggaacacatttttgggaaaatgtcttgccattaccgttctgtgcgacaacctgctcatattcccattctggcggtcccgagggcataggaggcatattaatgtagtgatggcgcgtgaacctccaagaaaagcagaagttacccagcctcaagtctggaggagcgagcagaggcggttgatttacttgggttttactgtttgtaaatggctgttattctctaattcctgggatgtggctctgcaccttgattcagtttacttaaaaacgtgcctttgatttgagctggcaggatcttggtaacttctcaacttctaagaactcttggggaaggctatcatctcttggcaagtcctaaaatacacagtggagcgtcattaatctcagggagttctcctttgggtattaccccaggacatttgaatccttgcataaatttactcttcctcaatccagaggagggcaccagggttggaaccccgttggagttataccactctcaatcttggaatgggggtcatctctcttcccccagagtggaacgggaattaaccagggtatctggaaatgagttgtaatctctgtcttgtggtttattaaccatagcaccctgagcctctttggacagcccgtttctctttgtgaaatgcaataataacagtaggcttgtccactttatggagttgcgattattaagcgctgcagtgtgcaactgtcattcctgtaggttttctctacccttgcagccacctgtcagtttgagaagtgtccctgaagacccttgggtgtatttcctctaaactaccaataggggcagaattgaatcaggcctttaactcagtaattgtcagaacctgggatttgactcccagcttaggtgagcgaagctgtttgattccagtggcagttacatagaaagcagagactcagagtatcttggaaccatctttctgagctgccattggaaagaagaattaagagagaagaatgaaaatttagtataactttagagtcttttgaaaagaccttttgatttggacccttctgaaatccccttgtgataagataatcttacatattctgggttgtagtctgaggacgtggaaggcttgggttcacctgcccaacgaggtcacttgtcgtctcctgatggacaagcccagtgttttggggcattagagatgagaatcagggttatttcctcacttttgccaattggaactcaggagcgactgcagagcacctactgtgtacctggcactgttctaagctcttaggtatgtcagcttattaacattcaaatcagccccatgaggtgaagactgattgttattagcatccctgtttaactgaggcccaggggtaacttgcccaaggtctccagcttttctgtacgagctgggaatcgaagccatgcatttggctttagagcaccatgctcttgagcacatacttgcctgtctctggggaatgtgagcgggctcctggcccgggcctctgcccactcctggctgctggtagcacccccacccatcatgaccacagatggaactagctcttctgttggtttgatcagtggcaccagtaccctctggctactccagctgagagtcctggattcattttcatcaactctctaactctgtcaactggtctcttggttactttggaggcctgctaagggtgtccctaaaactctttctggagccagactggatcatttcaggagctctctacagctcttaattgcctcccgcttctaccccccagcttagcctcatcttcctctccatcctttcattcctctgtcctgcctgttcacactaggtccttttgcccttgtcttttttttttttttttttttttgagacacagtttcactctgtcaccaggctggagtgcagtggcgctatctctgcttagtgcaacctctgcctcccaggttcaagcgattctcctgcctcagcctcctgagtagttgggatt

SEQ ID NO: 95039 - DNA, 1050 bp, Homo sapiens
tggcctaatatcttaaccaccgactctcaaagattccaggcagaaaagtgatatgcagtgttgatcagaacagggccaaccacgatcacgttattggcatattggaaacctcccagaggagaggggaaggtgtttgagccccagccttagaggtgtcatttggttagtctggaatggatccttggaattcttactgttttctttaaaagctcctcatgtgattctgatgtgcagcaagtttggaaactcttatcacaagtgacagaatggagattaggcagaagtatcagaaagcagatttatctttgattgaggaaactctttgaaacaagtagagctgttcaaaaatggaatttagagaaatagcgagcctctcaggcttggaagtattcaaacctaggccacatgactatcaattgggtggagagagacaaactagataaattcgaatactatgtttagtgggattttcgaactagttaccctaagggcctttcctttctatggatgaatacttttcagctgcagtcccactgctgtgtgtacatctgctatcacctgcttggctttctcctttgactttgggcctggtgctccctcccactgatggcactgtgggtgaaagttggcaagattctgaaaattgcattcatctccttctcaatccaggaaaatcatctttgtatggtggctgcttcttgtttctgacttctgcttcccttggctaccaacacagcagtgcctaccagggctgggtgggctccactggtgtgtttaggaaactgtggcattaagtgattattaattatcccttcctgagtggccctaataagctgagtggacacatcatcatgccctggtgccatctgttctcaagttttgagagttcaaagagctctgatgtgaaagaggggaagtttgggccaagctactggcctggacatttttcactgtttcatatccacagctgtttcatatcttctctcttagtctcctcatgtgatggagaggaaaataaggtcccagggtcatccaagaaaccacagggca

SEQ ID NO: 95040 - DNA, 1059 bp, Homo sapiens
cctcataataggtgcctccattttagagatgaggtgcttgtgaggcccatgacgggtggtgggtggggggtaggtactcacatctagaggacaggagagagaacccaaggggcagctgccagggcagaggaagaaccaggaggcacagtgtccaagaatctaagggggacgagatctccaggaagctggcaggtcgctggtgaggcatctacaggggcgttgttgggaggggagtaggggcagggcgtgggtcagggcttgttaatgccacgcgcctgtgctgtttccagcacatgtgtgtccttgaggctcatctccctaagtgcctctagggacctggttcgtctgagactgtatcgttcccaaaataagtaagtgtttgctgaagccttgggacccagcctggacccagtgctgagggtatgaccttgcttaggattgtttcctgagtgtgtttcttggcccttcaaagagcccctcgaggtgaggggcctcttatctcttccatgtcctctagattggcatgtttacctaccactccctctgactggaaaccacacccacttctgagatttttatttgacattcagataaatgtacacactccggaaggccagggccttgtctttatttcacccagcactaacactaagtaagtaccctaaatcttttctaaatacatatgggctaaggactcttttgggcacctcaatgtattaactcatttacttttcaaaaacctttatggtaagtacaaattttatccacaatttttagatgaggaatttgaggttcaaatgtcaaacaagttgtccaaaatcctacagccagtgggaggccgagttaggaatcaagcttgtgtaagccaaagttcaggcatcggtactgcacgtgatgtgttatatgtgttcatgtatgtgttagcctgtgcacttggcgctggagcacactgcaaatgctcaactaaaatttttttggaacggagttgggactgattgtttggactgtattataggcaggtgaattaagtttgttggggagaactaattatggggcaag

SEQ ID NO: 95041 - DNA, 1041 bp, Homo sapiens
gcagttacctggggccactggaaatgatattgtagggcagaaagggcaggtccctttaggggcattaagttataaatatagggctggttcaggaactgaatgtgaaagtatgcgtttgtgactttgacccacctccaagtttacggctgcatgcctcaggcattgagtgacaaggaagagccagaggctctaaggttggatcaaatacagtccagtgttctgatttgcctgagcctctcccagttttggcattgaaagtcccatgtcataggaaacccctccatcctgggcaaactgggatggttggccaccctacatggccctggagctcatgccctcactgctgctcagctcaactgtggcagcagcccttgagctgcttccttgtgctatcccagccctccacagtgccactagagccactagagcccttttggaaacagatctgaccttcttaagaacgaaagaaagtccttggcaatggtatttgctgtgcgtttatagccatgtcacgtgagccctatgttgtagctactctggacatgccattttttggcacccacaaattaatgccaacttatagttataccaaacctctgtcctgccttactggacaccagagcatgccacaaacctccatggccttgacagggagaaagggaacaagtaccttgataggatctattaacggaggaataatttactgtgtttcttctttgttgttgttgtcatttgtttgttttttttttgagacagagtctggctctattgcccaggctggggtacagtggcgagatctcagttcactgcaacctccacttcctgggttctagtgattctcttgcctcagcctcccaagtaactgggattacagggctacgccaccatgcccggcaaatttttgtattattagtagagacagggtttcaccatgttgaccaggctggtctcaaactccagacctcaagtaatctgcccgccttggcctcccaaagtgctgggaatacaagcatgagccaccacacccagcctgtgtgtttc

SEQ ID NO: 95042 - DNA, 1892 bp, Homo sapiens
aagtgaagtaactctggaatggaaaaccaaacatcatatgttctcactcataattgggaactaagctatgaggatgcaaaagcataagaataatacaattgactttggagactcagaggaaaggatgggaagggagtgagggattaaaaaaaaaacagccctgtgagtttccagttttaataaagctctgagaattaaaaaaataataatgtaaaggtgtatagcatgaaattagactatatgtaatgtctgtagaggagtgaatcccactggccgccccttacccacagatattcctggagggacttggagttttaagtctcggttggttcctggaagaattttgcccaaaattaatagtggcccttcctttctctgcagaacacggagagttcctggctctggatcttggagggaccaacttccgtgtgctttgggtgaaagtaacggacaatgggctccagaaggtggagatggagaatcagatctatgccatccctgaggacatcatgcgaggcagtggcacccaggtatgacccttctctcagggcagcccctggtgacaaaaaacttccttggcatgttctttctgtactttctccagccgctcccagcgtgtggataggcagtcacccaagacactcatggatgccagcacagctgtaagggctccctctcagccggagctcaggctgttctggttgtattttatacccaacatgtactcagtattaaaaggagtgactagagaagaagcatgaaatccaagtaagacgctgttcagtgttgtcacatctcgggcctcagggcttggaagaggtcaagccctctgattcgtggtcggctgttccctctcccacacaaggctccctcctgggaaaggaatttctgaccatgagtagaacacgctggggagatatttttagactcattatttgtctttggggtggccttgaggtaaacctgctttccttgttatcatgctggggttggagaagggaggctgcatccctagggctgtgggcatttgagctttaccgaagttgtcacgtggctccagtataacgtcaggagggacacagagggtagcggcccttccactgccactcctatgcctgcaccaagctgaggtattaaagagattgggtcctgtattcaggcactctagctgtgtgattctgggcaagtgatagacctcagtttattcatctgtaaaaagggatgatagtgtacggattgtggtgtagattagaggagatgatacctgttaagtatttggcatagtgctggtgcataatctagtactcttcgtgtttttttcacaggggtttttgtctgtttatctaattgcttcttgtgctgtcactttctgtggctagtaattgcattgttccctgttgtgggggatgtggttgccttttcttcccgttgcctcgatctcctgccttgggccacatcccccagatgataaatgtttaagaaccaagtaaactagataagacaaaacaaaacaaacaaaataacatctaaagtttggctgtgattatgtaaaagacttgtaacgtgatggtgacttgttaggtggatttttaagttttacaagaacaacaccctccctgttgcttgtatcctgacaacatgcaggggccaggcaccttgcagtccctgcagcgtcatccctagagcctggcaaggacaatgaagtgcgtctctgccaattgagaaaaaaaatccattttaaacattcaagatgtgagtgaagttcttcttgaaaaaagcttaaaattgctcagaccacctagttagagggtatcaagaaaacctactctccatgcaatatataagaaaaacagtatagtccggattaaaaaaaaaaacaactatgagaccca

SEQ ID NO: 95043 - DNA, 1484 bp, Homo sapiens
ttttcagctctattataatcttgttaccaccgcagtatacacaatctgtcactgactgaaacattgttatgcggcacatgactgtgtcttatagtgccagttgtcctgagtttctttttcctaggctagccaggaagtaacacacaaattcaatcatgactttaccccagtggcagaggtctctgctaatgacggaggtttgaggggtgtggtgtgagtttcagttttagtgggaaatcaatattcacttcttggtccctttccagagtttcctggtctcatggaccaagggattcaagtccagtggagtggaaggcagagacgttgtggctctgatccggaaggccatccagaggagaggggtgagtggggtggcaggagcttggggtctgtgggcttttctgggtccaccctgaagactccctgagtgtccttgactcatcattgtttgcttacgtggagcttaaggagagttctcttttccctgacacatgtactcaataattttgtatgcgatctgctgctttgggggtttttagattatcaaatggataaataatcttagccttggcacaagaaaagctctttagttcttaacctgaagaagacttgaatgtgatttccaagtaagaaagttggaatgatgttgacatgggagtggaatggctcagagagagaatgaattaaaagtcttatcacaggaggagttatggggagggaggggggagagagagagaaggaggaggaggaggaggaggagtgatatatagctggtgttaggaaagtcgccctctgtgatgatgaaggtcagagccctcccatttgtctccacaggactttgatatcgacattgtggctgtggtgaatgacacagttgggaccatgatgacctgtggttatgatgaccacaactgtgagattggtctcattgtgggtgagtgaacaccgtgcatgaagggcccgtgctggccaagggatgggggtgtgggctggaaagggagaaggggcccatgggctgggtgttcctttgtagttcatattagaagataatggtccagtcactttggagagccgagcagggactcatggagttgggggtggcagaagattagaccatgtattgtgatgcccccagagtctgcagtgagaaatcccagccatcctggccgggcagtctcgggacagtagtataagagggaagaggggtgggaaggggccggagcaggcgtgtgcatagccgtcccttgttttggcaggcacgggcagcaacgcctgctacatggaagagatgcgccacatcgacatggtggaaggcgatgaggggcggatgtgtatcaatatggagtggggggccttcggggacgatggctcgctcaacgacattcgcactgagtttgaccaggagattgacatgggctcactgaacccgggaaagcaactgtgagtaggcccttcctgtgcgagtgggcttggcgggggcctgg

SEQ ID NO: 95044 - DNA, 1051 bp, Homo sapiens
aatagactcctactgctttagagagagaaaccaggtgggcatcaccgcagggttcacatgttgagagtggctgacagcagagacactgtctgtctcccctaacacaagcagatgtaacacaaactctcacacacacaacttggtggtaaagcaccaagaacagggccttgtttttacatagcacatgcataagaaatacttgtgtttctcaactccgtgtgtctctgtgtgtgtgtgtgtgtgtgtgtgtgcgcacgcacatgcgtgtgcgtgtgtgtgtggtgtctgggagaggagcctcagggtggctgtgctatattttgcacccccttcctcctcctcctgcccctgcacaggtggactaagcaatgaagagggattctgtccccactgggtggtgaatttgctggaactaaagggcttccttgccaccccccgacacacacactggccacagtgggtcagacacaggcccacatgctatctttctgtttcccagggagaaggatggcatccggaaggcccgtgaggtcctgatgcggttgggcctggacccgactcaggaggactgcgtggccactcaccggatctgccagatcgtgtccacacgctccgccagcctgtgcgcagccaccctggccgccgtgctgcagcgcatcaaggagaacaaaggcgaggagcggctgcgctctactattggggtcgacggttccgtctacaagaaacacccccagtgagtcagtgtgcagggcctggagatgcggagttcctggagtacctggggctgagtgactcctcatgccagctccattttgcatttcaggggtggtgtggagggaccatagagctgagggtcttggtggaatgaaagttcccacctgggcaagggggaatgggaggaagtcatatctggtgtgggtggaggtgatttctgaaggctactgatgactcgggctctccgcagagctcctctggctgctggacactctctttgccaccctcttgtatgcgttattgttcctgtctttactcttagaattcttggtgattc

SEQ ID NO: 95045 - DNA, 1051 bp, Homo sapiens
ggggccttcttcagtgaggaagaggaggtcttgtgtggctgcatgtaggggacagtggcttattaaaaggtcttttcctttcattggcgggggtgaaccaatcctgggtggtcatagttgatatggttcttgtagtggttcctaacttgggacagtggagagaggatgtttagggcagcacccactcctgcaggtgccttttggcatttggattaaggcggtgggcaactgtctaactatttgcaccattgaccctaaccatggacacctgtctcttacccgccctggggaactgcagttttgccaagcgtctacataagaccgtgcggcggctggtgcccggctgcgatgtccgcttcctccgctccgaggatggcagtggcaaaggtgcagccatggtgacagcagtggcttaccggctggccgatcaacaccgtgcccgccagaagacattagagcatctgcagctgagccatgaccagctgctggaggtcaagaggaggatgaaggtagaaatggagcgaggtctgagcaaggagactcatgccagtgcccccgtcaagatgctgcccacctacgtgtgtgctaccccggacggcacaggtacacggcagggttgccacctggctcacatggtgggcctttgtcctggtgttgataccctgggagggatcccttagcattagcattggacatttgaaccagaacacgtttcttcagccgtattactagggagttctagtctttgataaactcaaacaaggtgctcctctgcaaacagtagtaatggtcaacacttattgaatgcttactgtgtgtcaaagcactttatgtgtatgagctcatttaatctttgttaactgttaaaaaatattagcagttaattttatgtattcacctatgtttgacagaaaactgaggcgcagagaagttaagacacctgcctaaattcacacaactagaaaatgtcggagctgggattcaaacccaggaattcaggttctagaatctgctcttgcaatcaccacattggtctgagtcagggttggca

SEQ ID NO: 95046 - DNA, 2033 bp, Homo sapiens
aaactgctttgcccagtgagcgaaccaagcacataggaagaagttgcacagcagggtcagctgcgtggtgcttatgagcccattcactggggtcggagggcctcggagtgcatcctgcttctctcttccaagctgtaggccttgagcaagtcactccagagcctcagtttcttataaagtggccataaacatgatagatgttccacaagggtgctgtgagggttaaataatgtaatgcatgatctatgcttagcccagtacctgctacacagtaggtgctcaataaatccaagtaagtaccttaggaacagtttaatttgcgggtgagatgattggtgactctgggggatccgtctgacctgtgaggttgagagctagaagcacagctggacccccagaactgacctgggagctcttccctgatgtcctttccatgcttgtgtgtgatttttagagcatcctcctcaagtggacaaaaggcttcaaggcatctggctgcgagggcgaggacgtggtgaccctgctgaaggaagcgatccaccggcgagaggtaggagacacatggcacgaggtctgatgtgtcagctcctcaatgattggcctggtctgtgtgttcagaaagtgaaggcaacagtaagtgtggctgcatgggttgggaggaagattaactcaagcgtcgttcagcagtttagtgtgcactgtgtgtcaagcaatgctctcagcactggcggttcaggagtgaccacaacaaagctttgttctataaagtccatgacctagtggcaggtgctgttaagagctgtgaaacacacacacacacacacacacacacacacacacacacacagtaaaggaataaaagaatggccactccataagcaaaacagccatgagggctgctggttgcacatttttatggttatttcttgattatatgctaaacaaggggtgtattattcatgccttccctttttagaccatatagagtttaaaaaaaaaaaagaaagaaaaggagtgaagtggggtgaggagagcagatggagcaagtgtgctggaaaggggcactgttaaatagcacaacttgggagggtctcaccaaagaggtgacatttaagcacagacctgaatggaatgagagggtcagccatggtgtatgatatatattttatatacctgtaaatctcccatgcaattgtctgaaaggagaatattggggttcacctgtgaactgggcatctgcttcttccctctcaggagtttgacctggatgtggttgctgtggtgaacgacacagtcggaactatgatgacctgtggctttgaagaccctcactgtgaagttggcctcattgttggtaaggacccagactgtcctttccacatggggatgcacagccttgggtgtggaggggttggtgctgagtgaggccctggtatcctgtgattggcaggcacgggcagcaatgcctgctacatggaggagatgcgcaacgtggaactggtggaaggagaagaggggcggatgtgtgtgaacatggaatggggggccttcggggacaatggatgcctagatgacttccgcacagaatttgatgtggctgtggatgagctttcactcaaccccggcaagcagaggtaggcacccaactggggccctgttaagtgtatcccaggactggatggcaacaagtgatcagagcttccacaatggcatctcccaggacgccggttctcgtgagatgttaataaaggaggttttcttggaaagggtttcttgtcgaatgcacctggaaagttctgagttagtaaatgtaagaagcatctcccacccaaaagcctaggagaacaggtgggagaatactagaccctaggtctggcactctaaggagaaacaagtagaaagttgaagcacctgctgctgacaggctgaagagcatctcttgggtgatgcagacaggagcaaatcctctccctcctccatcttccagcgccgagcaccacctactgtcagaattgagcaaggggccagcccca

SEQ ID NO: 95047 - DNA, 1327 bp, Homo sapiens
agatgttgtctgtagtgtttcctaactagattaatcaaacaccctagtcctgcagaatacgctttgcaaaacatgtgtctagaatagaagttacagactaaaatgcctctaggggccaggcaggcaacattaatgaaggaagcaggctgggtcaagataagatggggtggtgatgggctattggttgaaactagggacctcgtttttttttcaaggcaggattcaggaccaaaagaccctcaagccactgcataataacgtttagttccagtggccaggatgggggccctacagctggcagtagttacttgagtaatgatggttaggtccaagagaatgtatactgaatgcctagtgaggttaaagattaagactcagcattctcccctgctccgagaagtccagtggggttatggtgtgttccttctcgagttgcttcttgaaatttcgaaataagccttggaaaggaaatgagttcctttccctgtgggttcctttccaaggcttatttccccaggagccccacgggcctcgggcactgtggtcagtgttgctgaaggttgtgaattagcatgcaaagacaccagggatcctgcccaagtgaatcaagtagcaattcctttcccatcaggggagtctgcctgtctgccactgctgatgcactgggggtgactaagctggcctgtcctgtctcaacacatccctccaccttcctacttaacctccatgaatgttacttgcattgcaggttcgagaaaatgatcagtggaatgtacctgggtgagattgtccgtaacattctcatcgatttcaccaagcgtggactactcttccgaggccgcatctcagagcggctcaagacaaggggcatctttgaaaccaagttcttgtctcagattgagaggtgagagcttagggctcagggtagcaggggggccatgtccttttttctcactggcagacaaactgaaggatttccataactcagggcatgactcatacaaaagtcagtttagtggcaaacacattcatgtctatagtgtttactaaaagcacattatgggcagttgtcattttaagggcaaacagagcattctcatgaaagtttgtgctaagcctggcctgaggtcatgcaaagtgatattgttgggttttagaccatgtatcaaaggtagaaagatacctgctcatagcatgtaaattgaaacgcacagaggaagataacctattaaagcatccacacttggcttgaaagcccttcctaactgctggctgcagtaatcaggcagccaggattgagtaaaggttggaacgtcaggcaatgcag

SEQ ID NO: 95048 - DNA, 1048 bp, Homo sapiens
acagcagcgagaaaatggacatgaaagagctttgtaactgaccactgtgataaacagtgaatttgctttgttttgagtatctactttgtagtagtaatggtctatctggagtagggagagtagaatgaggagctgtttgtattcctgtcaccgtcaggaagagtcaatgcagtgcagtaggttgagcagtggtctgaatttaggaatgggaaccacctcgaggggccagctcctggagagctagacccccacagagcctcccctgtaaggactcaggccctggtgtggtaggctaccagccttcttggtgcatgactgaacacttgctgtctccctcccaccccagtgactgcctggccctgctgcaagtccgagccatcctgcaacacttagggcttgagagcacctgtgacgacagcatcattgttaaggaggtgtgcactgtggtggcccggcgggcagcccagctctgtggcgcaggcatggccgctgtggtggacaggatacgagaaaaccgtgggctggacgctctcaaagtgacagtgggtgtggatgggaccctctacaagctacatcctcagtgagtgcctgatcccagccccccctgcctaccttctttctgtctttgttctttcccttttctttctctctttcctttgttactttatagtgaattatcagccattccaaatagtgtatataatacatggattatagtttaaagattcataatcagaagtaggcctgtgtttcaccccccaccgtgggaagccccctccgagcccctccacaactgtgtcatcattctcccatgccaggggtaagtgttgtgctgaatcagtcccttgcttttcttttccacccccatatatgtaggtatgcatccatattgtttagttttacttatttttgaacttgccacaaatagaatcacatggtatctcttctgtggctggcttttctcacacagtgtttgttttgagacgcatccgcattgaagtatacagttggtagttcattaattttcagagctgtatagcgtaccttt

SEQ ID NO: 95049 - DNA, 3406 bp, Homo sapiens
gtcctggtctccccctccagagttgtgctcctctgttaggcacacttgtggcttccatggttgttgaacttctcttttactgactattagttttaagaacacagtttgccaggatctcagacgtttgtcccagaattgaatcctagctctcctaatggctgatatgatgtggaaattgggcatagtactagtgtctccaagccacggttttctggtacttaataatatatagtaaatgtttaatacattatagctgtcatccttctcctcttcttaattatttctgtgtttccagcatcgcttcttagctttcatttctaagtgcaaatacaaaccaatcatgactaagatggtttttcctgtgtcttcctcccaccttttccagctttgccaaagtcatgcatgagacagtgaaggacctggctccgaaatgtgatgtgtctttcctgcagtcagaggatggcagcgggaagggggcggcgctcatcactgctgtggcctgccgcatccgtgaggctggacagcgatagaacccctgaaatcggaagggacttcctctttctctccttcttccctgttttaaattataagatgtcatccccttgtgtcagagacagaccccttggcttttgcttggcagagaggaccccactggactgggttttgtctctgcatctcattgtagagcttggtggctgagcttggccctattaagataaatagagttccaaataaggatttgttcacatgcatcataaccattcccattggttctcctaaaacatgaaaattatctcccttagtaatcccccttgccaaattccatgtccctgtataattctacaggatggggacactaatgaagatacggttgcttcaccttggagcctgaacatgacatttctaagtggggtgcatcccccagcactgatgttgttactgattctcctgtcagagatctgggaggtctccactgaggatgtgagcctgattatcctataggcagacgtggggagggtggaggggtgacagtggaggaaaatccatggatatccacgcagcagcccctctttaacctcatctacaagcatttgccctgtggattccagcatttgccattcctggaatcaaggaatcctgagtctgggcaatgaaaccaaagccaggagttgacgcatcctgcagttgggccagctgtcgcatctcagcggggcgcacatgttatccacaagcaatggacctttggggaagggggagtttttagtttgttttacaaatttttcctgcaaaagtggaatcactgtattttcattttaatttatatttgaaattttatttagttcttgagtagatctgcttcttcatcttgacatgtaatgaatggtcagttgtacgtaatgtatttatatgttaatttgttatgtatatagatgtgcaagtcttgtcagaattggcctcagtgtagttaaagggcagaaggggaagatactgactagtcatagaaatacctcattcgcctgtgggaagagaagggaagcctcttcagggtgagtgaatggcaaagcggttgcttctggctcctccttcccctgtggtcttggaagtgtgtggaaggcagggacagagatggaggccgagccaatagactgaagagaccacagcaattggctcctccatctagagattttcttggcagtattccatgggatgttaagcaaaggaaaccaaaggaatcgtttcaaatggactcatggcttagaaatctttattcttagggcagtcagtagtattctaaagctttctgacaagataaaggaagtcaccaaaatttctttttttaaattgtatctaatcctcaacaacaaaccaaaacagaacaattaaacagccaaataaaacctcagggacaacatttttggtgtatttgagccctcccagcaagtttcaccttgggtttgtattttaaatgttttacaagaattgtccatgtgcttccctaggctgagctggcattggtctgctgacctgtttttgtgtttttcttttttttatacacaacatttatttcaaactattgggagggatgagagtggcttaaaaacttccatccctacttttcaagagtgcagttgattctgaatctgaaagcccgcctctgtcctaaaatacaaacaagcacagacattaaacctggatactatatgataaagagggatgtaactattgaattggatacaaggatcagaatggaaagaaactcacgatgaaattgaacctggtttttgtatatttatcaaacttgtgctgagaatagtgtctgattatacgacttttaagcaaagttgggtgtaattaggtgaaaacagcccaggtcctcccgggagcacagaggggctaggggctggtccttctcgtttgctctagtcttgctttgctgtctggtgtagctcctctgctgctcccatctgcactaattgacccaaaacgtgggtatttcctgctacacaaaagccaaaaggtttcatgtagattttagttcactaaagggtgcccacaaaatagagattaattttaacttaaattttaagcttgaagattaggtactatctgtgaagttacacttttttttttttttttaaaggtagagatgtgtgtgtgtgtaggtattaaagatgtgttgttggtttccaaaaaggaacactggaaaataaattttgaatgtttatgttctcagaatcaggttgacagtcccttgctgacatggctttgctttgtgtaaatacagtggatctcaatcttcggggtgtgatgaatagcgaatcatctcaaatccttgagcactcagtctagtgaagatgttgtcattatgtacaatacataactagtttaattaactatgtgatgttaactattattaataaattttaacattttccaaaataatcaaatgtgattcatgagtgtttttaagagagtagtcatcttccggtcgtatcagtacttcctggccagcccgatgagtaatttatgggtgtcttgattttgagtgtgtgtgtttgagaggcatgtggcttttccagaaactcagtcccagtggaattagaaggcagcttttcctggactgccttggaccccttagatttcaagccactgaagagctatggctagtcctgcggtctactgtttaaatagcttggctgaaattagcaccaccctgagggcctctggctggtcttggttggcaaatgtgattcatattcaggatatatagctctcgtgaacatccaaaaagcacttgcctctgtcctctccctaccaagcttttccttctccccagtaagcagaacacaggtctggggagtaaattcatcaaaagtccctagtgatacccattaacattcacatg

SEQ ID NO: 95050 - DNA, 1017 bp, Homo sapiens
cattatctttatttctccccacgtcgccagagcctaacacacagtggctccatctccgctcactgcaacttccgcctctcgggttcaagcgattcttgtgcctcagcctcatcatgagtagctgggattacaggtgtgcgccaccgtgcccggctaatttttgtatttttagtagagatggggtttcgccatgttggccaggctggtctccaactcctgacctcaagtgatccgcccgtctcggtctcccaaagtgctgggattacaggcttgaaccatcgctccaggcctcgataaatgtttaatgaataaaacgatgaaaggacccgtcgcctcctaaatgcagatctcgagggagcctccaggtggcgctcgccgctcggagaagcagggagtcggtgcgccgcagctccggcaggcgtctgggaggtggtcgcctcctcacctgcccaggcggccgtcccccgggagcgggtggcggtgacctcaggactgacgcactgcctcctccgggcgggtgcgcagcctgcgtcaggggcgctgttctccctgtgctcttggaccccgcagttgttttaggaacattcactggagagcgagaagggggccgccttccggtgcccggtgggcaacacctaagccgcggtgtttactggtgagggagtcggctgtctgctggcggctgtgacagctgcaacacgccacacaaagatgttatttacctgtcatattaatgatagtgttagcaagtgcgtggcacgtccagtacttttttttttttttgagacggagtctcgttctgtcgcccaggctggagtgcaatggcgcgatctgggttgacagcaacccccgcctcccgggttcaagcgattctcctgcctcagcctctcgagtagctgggattacaggagcccatgacgaaggccggctaattttttgtatttttagtagagacggggtttcaccgtgttggccaggatggtctggatcacctgacctagtgatcctcccgccccc

SEQ ID NO: 95051 - DNA, 1028 bp, Homo sapiens
gaagcctaggtcccagctccgcagggctcctcttccaagctttgaaattattgcaaccccagtatcttccctgtgttcttcagccccagaggtagagctgcctctggcagttaccatccctgtgtttatcttgatacttcctttttgcctttcagcctctaatacctgcttactcaattgcctagattaaattatttctgttaaaatgcaggtccttttcctgttttctttcctaactagatctgactgttaacatgccccttggaggcattgcctgagaagcacatcagggtgtagccttacctctctgtgctgctccgaggaccctgatctcagaaaccctgccagtggccccaacatgtgaaccatcgtggtaaaagaactctctgatcacaagaaagtcccctaatctaagataatgttgataaacaagctaactccaggagggagggtttaatttaagaaagccagtagggaccctaaatcttttcattccaatcaaagctgtcaaagccagttatcgtcagagccagtcaggtggccccaaagccgccatctacctggcagctgtcctgtcaccacggaaaccacaagttggtgaacaaggcccgaaggaaccctgctgaaactcagttgcttgacatatttgtcattatcgagtctgccagagtgcagcatctcttgcaagagtgattctctgaaacttctcctgcttcaatccctctacccattgtttcccaaatagagaatatgcccacctctgagaaagacatgtgctggcaggcatcacaggcccaagaggaggcacttgtttactcgacaacagacaaggtgactgtctgctgcattggcaccaggactagcattctttgggcatccccaactaccttttcaggcccccgtgtcttcaggctgtctaggtcctggactggtggtcgtcaagtctgcccaccctcactatccagcagcaccagtggagcatgcttcataactaccctttcctctctccgaattgagtttgatgtcat

SEQ ID NO: 95052 - DNA, 1056 bp, Homo sapiens
gcaacaaaagttttcattagactttaaaaactttgagtcttactcatatttaatccttagttgctgaagaagtgactttcatatataggagaccctaagggggtacattctcagtgaagtgacagccatgggggagggaaagattgatccatatgaggacttcaaggtcctggcatatcaggacaggtctttaggagtcctgttgacataaataaaataggtagattattgagactgaggccaggccctaaacactagtgtattaatttgctagaactgccataacaaaataccacaactgggtagattaaacaatgacatttgttatctcacagctctggaagctagacttctgaaatcaagttgttggcaggattggttccttctgagggcagtgagggaaggatccattccaggcttctctccttggcttattggtgggtgtctccttgtttatatcatattcctgctgtatgtatgtctgtctgcctatttctcctttctataaggacaccggtcacgctggattaaggctcactccttaatgacttcattttaacttaatgatctctctaaagaccctctatctaaataagttcacattctgaggtactgatagaaatacaacatgaatttttgcggagacaacattcaacccataaaaactagaattaatattcctgagaacaaggggtggcaaagcctcctccttcatctggggtgaggggagtcttctgagtagataaagaactccttttagggtagaaaggagctgaagttcatccagtgcaagtactgagtgaatttattctaaggtcccaagacaagagaaagataaaaacaaaaacggatgtatcactgaaggagatgtgctcggccagcttccggcagcagcaagaacagtgggtatataagctccagtagccaaggttgcccaggttacccttttcaggggcagcagtagaggcatagttggttccggagtcagaaagacccagcatcttctgctgatgctcaagctgcatgttttttttcaatcttcgcagctacaaattt

SEQ ID NO: 95053 - DNA, 1329 bp, Homo sapiens
agaagtagagggggcaaagaaccaggtagctgactcatttaatcctcccaaaagggtttttcttattgcagtttctttgcaactctgaccatattgtaatattaatcaatcaatctatcacttgcctttgttgatatttctgtaccctccccctgccctaaatttatatgtggatgccttaacccccaatatgactgtatttggagatagggtcattacagaagtaattaaggttaaatgagggcatacaagtagggcattaatcccacaggattagtgttcttataagaaaagacaacagagagctcctgctttctctctctctctctctctctctctttctctgtctctcctctcttcctttttgcacatgcacaaagaagaggtcatgtgagcatggagcccgaaggtggccatctacaagccaggaaaacaaccctcatcaaattggctgacacctcgaccttggacttccccctccagaactgcgagaaattaatttctgtttaagccacccagtctctggtattttgttatagcagcccaactggactaatgaaatttatttaaattatatttcccccattagaatgcagaaaccaagcatctccatttcccaaataccaccagtacctggcatggtagctttcacatggcagacactcaataaatatttgttgaatgaatgattagtaaatcaataacataataggtagtattatcctcattttaaagtggagaaaattgacagatatgaaaggatgcttaatactcacaacctagggacacaaatggcatttccttaaccaaagttagttgaaagtgggccaggataaaataacatcttcagacacaaactacattaaagattgctttagctgatccaagagaagggtcatatttgttccaatttcagtctagtgtcctctctgtaaaagggattagagatttgccaatccacatctggttcactccctgtaaatcaatgccctcagagtcagtagacagacacaaagcttagaggaatttaattgccaaaggcaatgtggggatatgagaggatgagcatttgctgtctcctgagagacctcacagggtggcactgcctcggtccagggtctggtctatgccctgcaggtttagaaactggatctgtcagcacactgagagtggatccatccctcagcttcaactctaattaattaagctcagagagctgatgcatgaaaccagcatgtcaatgtattgattcacaagagggataaaactgccactgtgtctggaacacttgtctctacatgacttgcacattcttttaatgaagtcaga

SEQ ID NO: 95054 - DNA, 2030 bp, Homo sapiens
atgatctctactaatgagatatcttcagaaggtagaattaaagcaaaattaatgtacacagaattcctatttcaatatatttattattcacaacatttctacacacacacacacacacacacacacgcatacacacacacacacacacattcctgcacaggtaatttatagtggctaatccactcagtactgtggactttggttttagagagcattgttttcaagggtagtacagataatctgcctccaacatattctattcttagggctctaaagtcaaaggagtttgtacagacccctccctgctaaggtaattatgtcctcttcatatcttgcatgaatgtttgctcttagagtgatgatctgaaatatcaacatcctgcaggacctagtctggtctggaagaagaagagatatgtcatctctatgggctttgatcttggtaggcatatttattcaccaggtacacaaatgcaactttaaaccctcagccacatttagtaaactatttcttcatctgttgcagtcttattctgatgggaaaaatttcctctgtttttcaagtttaatttattattttttcaaattacaagagcaatgcatattattgtaaccagagagataatgccaagatcggtagagaaaaacttaataatctcgacctcctataaccatctctcttcccatccccctgaggtaatagcaaatgttaacagcctgctacctctgcacatcttccttccttcatgatttccctacacacacacccatacacacacgtgcgcatgcacacacacacccactcaaacacacggtgtacgtccaggagtcagaagtggctacagagatggagtcttcattattaaggtgagaaaatgataagacaaatcacccttctatttctacctccatggaaagctaaatcttccatttatatttttatagtcttttcagcactgtcttaatggtcttgagaacatattaccctgaaaatgtaaaaatagagccaaagaggtgaaagctccttgcgtggcttctgaccagggatggctgcttccatgggctttagctctgccagttctccctagactggggcaggtaggcagtgaggatttcagcatatattaagtgccaaatagaaacaaatatttgtttctattattagagtaaaacaacagaagcctgtattttgaccagaggcctggaatctactactttgtgaattagctaagcagccccagttgaacgtgaaccagcctggaacagagtggactgcagaggcaataaacaaggatgtcgtgaagaccctgtttctttctagcgtggcatcccaggataaaatatacaattaatagatactggaaggcacactttctgattatggagaaaccatcaaatttggccatggttttgcataggggctaggttggaaattcaactagaacaatttaatgtctactggcaaagcttcttaattatggaatgaaagctacctcaaagtgcctggaggcttgagctgaatggtgagatcttcattgacctgacctcctctgtgctgaagtttgctgacttgaggagacctcccctaagaacagaccctcccctcagggctgccttcagcgatgatgattgacgctggcaagtcagtcaagtgggaagtttgcagcacacacggctcaaaggactcacccagtttgccctgttggaggatgttaacctttgcacactatttttgacatttaatttttccttccatttagtgcatgactctttttttgtctttctagtaaattcatttagttagtattattctttgcctattttgtcttttaaacttctggtttttaatctttcgtattttatattatttattcttggtgttcatgcttcttattctcttttctgctattttatcttattgttgtgataatagtatatttgcagtaagctccttttactaacttcatttatttctacataatgttttatctggctttgaccacaactatataaggggacagcaaagtgga

SEQ ID NO: 95055 - DNA, 1756 bp, Homo sapiens
acaggaagccatcttcattctggcacgagccgcggtgcgcctgcagcgcgagggcatgcgggagtgggggaggtggagtgtggggcggggcctcggggcctcccgcgggcggggcttagggcggcgtggcccgggttttgagatgtgggcgtggacccggaaggcggaggaaaggggccggggacctgtgcgagttttgttaacactcctccctcttgttgaggacctggatagtgagtgactttaatttgtatctccagggcctcgtacagaacttgtaggagtctttagtgaatgagggagaatactgggaagagggtagcggaatggatcttcatgaagtccaggacaatcttagcttccagaacattttcttgccccgagcctttcttctccctttctgcccccacccacaaaccggagccctcacctcctcagtgtgttagaacccattactaaaactttgcttttttacttcacaggaactgtttgtggagaccattgcaaaagatgcctactgttgcgctcagcagggaaaaaggaaaacccttcagaggagagacttgggtagagtggcactgcagtgtctggggacagacaagggagggctgggctggtttccccttgtgcaggttgagaagacgtcactctgatctgagaggtgccacagcgtctctccccaggatggtttctgttggccacagtgccaggaagccctacctgtagaggctgtctgcttggggtggcggggcagtgtgtgaaggtgtctggggttgccgtagcggactggatcccttcataccttctgccaaattgcaccagaaaaagatatttctttttcacctagcaactggggatttgatttctgactcttgtctggctgggaaccctcacctgggtaagatttcgtataccgtattctcatgcgccctgcgtctattgccacgttcttctctgacaactttaagagcaaagcgaataaataatttaggggtaatttaggaggcccccaacccccgcgttgaatggtatttgcctatgcttttcttaactcttctagggagacagctaatatatataagagttgctggtagagtagatatggatctcaaggcagcaagggacgcatcttataaatgccctcatttgcccaaagcctcatgcccttcactgcagattgtgctgttttctgactgaggtcagcatggctgaagttagtcaggtgtctcttttccttgtgtttcagataatgcaatagaagctgtggatgaatttgcttttctggaaggtgagttccctctcagtgggcaatcatttccgcctgtcttttgcatgttgatgtgaaattcaaaatctcataaaacggatgcctgcttcttgtttgtgtagggataattctccgcacttgctattaggatagaaaaaagtaacttgctaaacctagtgaggttcagttttctcccttggggaattaaaatttctacctgaaaattgctaaccataaagaaataggagggaatataaagatcccagtggagttagatgaattcgaaagttcgattcctactttgatcgccatccctaaatgtcaggcttgccccccctcatcatgttacagatcagaaacaattgttaacatttaaagggtcaccgcttgttcttttttcttcaacaatctgtgtgaagtgattattttgctgcaataagacttgtacttgtctgtatttttaggagtcatggattaacttgtgtacta

SEQ ID NO: 95056 - DNA, 1038 bp, Homo sapiens
atgtagtcatgtgctgcgtaataactttttggtcagccatggactgctcacatgagggtggtcccatcagattataatggagctgaaaaattccttttgcccagtgaggtagtggtcataacatcctaatgaaatacattaccttttctatgtttagatttgtttaaatacacttatcctcatgttacagttgcctacagtattcagtacagtaacatgctgttcaggtttgtaacctgacaacaataggtataccctgtagactaagtgtgtagtaggctataccatctagctttgtgtaagtaccctctatggtgttcacacagtggtgaaatcgcctgaagatgtgatgcatttctcaggatgtatccttgttgttgagcgacacatgtattttgattgaatagcttagcaaaagccatgtatccttattctcccagggtgttctcattacctccttcaagccttattacctttagaaatatcttgatttattccactcttttttactcctttgttctgcatctccctgtcaacctaggcccctggtccttttgatagatattttttaaatgtcttattagatagatagactaccatggccaactctatgtctagactattgagcattcttttaatttgcagatttttcttcagcctctctttccacctactcatttttcttaaaattaacttttgttagtcctacctaaggcaggcactccttgtgacagactttctgtaagttctgcagtcaaaaatgtttggagcctactttacctcttcatttttaattaccagcttttcaaagacatgagtgatatgatcagatttgtattttaagtgcacaacattgctgccctggggaaaataaactggagggtactaggaatagaagtggggtggtcttatgtagttttccactctagcctctatcacagcatagtgcttagcttggatttttaataaatggccatttattgaatgattggtgtgtttattttcatcctctgccttcatcctcatttatctctgtaa

SEQ ID NO: 95057 - DNA, 1891 bp, Homo sapiens
atgcagaatgctttgctgtgggaagctggcagttttagaggctgttctagttttctccatatagttcatttggttctttagaagagagccctgtgatctttgttttttttttttttccaagttaggtttaaatgcctgtcttctggttgtcctgcctgtggggagggttgtggggagataggggcaactgtttgtcatacagaccctctggtcattaacccattttcatctcacatcaccattcctggtgacttgagcctggagcttcctcatggttcttttaggcatatgggcctccttttctgctgcagccccctctgttcattctaggctcctttttcctctgctctatttataagcatactttgatcaggtttctgttactcagttttttgttgaaatccattaactgccagtgggcccctatttgttgtagatttatactttttaaacttttttaccttttgaatggaatcttggatgggagggcatacgtacttgtgggcccagtcccccatctggaactgaaactttctaaaaagattataaactctttaattagagagtttacctcatttattttatattcttttcttatatggtcttcatcaatgttcattaactaacacaacgacttcttagcccttttcccacttctaattctagctcttccgactagtatgcttaattcctaactgcccaccatctgtaatgacatgttttccctggggatattttggatggatcatcctcaaaattagtattttggtcttagagaactgctgccaataccggagcctcttctgcattaagtttgcccagcttgttacactaatccagcttctgaggtcccctgatatactcattgctctttgtatgtttaggtactttagattgattgccgagcggggcagttttgtgagccttcatctgaagccttcagttcacccctctgcacaggcctcagctttgaagaacggagtctttgcacttacacacactcttcctgttctgccttcacctatgccgggataagcagagatctcatcaattagctcttctctgcaaggtcttccactatttctgtctgtcttccatatcaagcctggatgcagctgctgctgcttagagcagagatgaagaaagtgttctgcataagtggcttcctgaatgatgaggaccagaataaaggtttttgatcaacctcagtccagtgtgttttataatctcgcctttgttcctaccctgtgactggagagtcaccatacctggtcacagaccttcctgatcttccctgccagccattctaacatacagtcctttcattaattttgttcttttatttttccagcacatcaccagaaagtggttccagaatttatggaacaccacttgccctcaggagttcaaataaatatggtcctagattgaaagccagttaaattttttttaagttttatttattgacatatccacatactctatatttcaccaatttaaagtgtacaattcagtggtatttagtatattcacaaatatgtacaccagtcatcacagtcgattttagaacattttatttatttatttattattattatactttaagttttagggtacatgtgcacaatgtgcaggttagttacatatgtatacatgtgccatgctggtgcgctgcacccactaactcgtcatctagcattaggtatatctcccagtgctgtccctcccccctccccccacccgacaacagtccccagagtgtgatgttccccttcctgtgtccatgtgttgtcattgttcagttcccacctatgagtgagaatatgtggtgtttggttttttgttcttgcgatagtttactgagaatgatgatttccaatttcatccatgt

SEQ ID NO: 95058 - DNA, 1284 bp, Homo sapiens
tgagattcttaatcctgagttctcgtttcattgcactgtgatctgagagatagtttgttataatttctgttcttttacatttgctgaggagagctttacttccaagtatgtggtcaattttggaataggtgtggtgtggtgctgaaaaaaatgtatattctgttgatttggggtggagggttctgtagatgtctattaggtctgcttggtgcagagctgagatcaattcctgggtatccttgttgactttctgtctcgttgatctgtctaatgttgaccattttcatatgaatggaatcatgtaacaatgtggtctattgtgtctgggttttttcactttgataatgtttttaaggattatccatgctatatagcatctactagtacctcattttaaaaaattgtggtaaattgtacataaagtaaaatttacttttataacaattcttaagcatatagtggcattaagtacattcacattgttgtgcaactaaccccatcatctatctccagaactttaaaaatcttcccaagctgaaacttcatactcattaaataatcattcctcattccctacatcctgcagtccctggctaaattttggtttggaggaaaggtgtgggtgacataacaggaaggaggcagagtacctagaaagtagcagttaaggaaagcagcaggaagccttggacagtggttctcaagtattactgggtcatggaccatttttaaaatagtccatgggatttgctccctggaatgatgcacagatgttcagtactgtcacatttaaaaaataagctttattttggagtaatactagatttgcagaagagttgcaaaggtagtagagagaagtcttatatgccccttacctagtttccccattgttaacgacattaccaagtacatttgtcacaactgagaaactgacatttataggttactgttaactacagtctatttggatttcatcattttcttcattaatactccttttctattcccagatccatgttactatatcacatttacttgtcatgttgtcccagtcttcactggtctatggcagtttcttagtctttcctcatttttcatgaccttgacagcctgagtagtgctggctgggtattctgtaggatctccctaactggggattgtcttgtttttcttgtaattagttctataacgttgcatatgattttgagcatgaaacagaccccagaggcccttctgtaggcctcctattatcattgccaatgggaatttaaaaggacatcgtgg

SEQ ID NO: 95059 - DNA, 1172 bp, Homo sapiens
tgattatgaataatgctactgtaacatttgcatataggtttttgtgtgaacatcactttttgttgtctcttaggtatataggagtaggattgctggatcttatttaagtgtatgtttaattattaaagaaaatgccaactattttccaaagcggctgtaccattttgtacttataccagcagtgtttaagaatttcagttgttttgcatccatgtcagcagttggtattaaaaatttttgccattataataggtgtgtaggggtatttcaatgtggttttaatttgcatttaccagatatgtattatgtaaatattttctcccagttccacaagacattaaattttgaaaaaaatgctataaatggttcttagctgcactcagctctgttggtgagatgactcaaatgaggcacctgtgccttccaggggactcctcacttttccaccttttggtataagcccctgtggagaagcagggcttcctttgtggtcaccaactcctgtgccctcctcctgcctcagtgtctatcagtcacgggctaatggatcagaaagagaccaggcattcccagtatatctgactgggagcactaaagcagaatttcctggtggtaaagatcatgcttggagacggggaaaagcaagctattgaaatctgatattaacagtgtgaaggactaatattcaaaaagaatcagagaacattatgctaaaaagtagaaaactgtcctatttatttatttatttatttattttgagatggagtcttgctctgtcgcccaggctggagtgcagtgggatgatctcggctcactgcaacctccgcctcctgggttcaagtgattctcctgcctcagcctcccaagtacctgggattacaggcacgtgccaccacacccggctaattttttatatttttggtagagacagggtttcaccatgttggccaggctggtctcaaactcctgacctcaagtgatccacctgccttggcctcccaaagtgttgggattacagacatgagccactgcgctcgacctaggaaatttaaaatgtgttcctgatttcttcattgtatctgaatcagggatctgacattcctcattcaaggcttcatatctctggacatcttaacacttaaagcatttttctttttttcccctaattagct

SEQ ID NO: 95060 - DNA, 1034 bp, Homo sapiens
gtgcttggcacatcatgttcagtcaacattagacattgctatcgtagcttttcttacctataatcttggccttcagtaatgcatactgagccttccagactttcctgttctgagtgtgggttgcctatggtaacaaaagctctaaataagtaatgagggctatttcaaagacacataagggaaacaccagacatgtacatcagacactgagcttggctaatgagagtatgtttctgagaaaaaggttcattttatgtgctgacaatcccaggtttctcggcctgagaaatactcactgagattattaatgttaccatgaaggggctctttggagacagctggagagctggacagccaaagacagacaacatgtcccttgccctccccactccctaatagagtgcaggatagcaaaaggagaaagacatgcttttaaaaagatgtctgtgctggtcagcttgtgatgtttcttgatgagccgataatgagcgcatctctaccttattagaaaagataaatagagactgactagggcgctgcagggcagtgacagctgtagaaattatctgctctcatctcagggatgtcacaccagtgtcacaaaacagagatcaacatttagcttttaaaattacctgagtaaagatagtgaattcactagagactgtcaatgcattttaaagaaatgtgtcatttcagaataagcatctgtgaaactgtatttcaaaacattgtgtgacagtatttcttatttgtcttacctgctaaaaagaaactttgtgccttctgtgtttagaaataataaaatactaatctggtgaatgctggatgaaaattttagggataatttctagattcctcctctttaaattgttactatatggcgcatgttaaaaacgaaagctaaattgggtttttgttttctcttaatgtccctcataatcatgagtgacatgaaatacagtgatttcatgacatagtttgtaaaagtgagaaggtctgtaattcagaacaagtatcctagtagagaaaaa

SEQ ID NO: 95061 - DNA, 2020 bp, Homo sapiens
attcctgaaaatgtctctgagcctccactggtctctggaccacactttgaaaactgctgctgtagtatcttgctgctcaaagtgtagctcagggactagcagcaacaatatcatctgagatctgtagaaatgtggaatctcagaccttcagaatcagaatgcacagtttataagatcctcaggtgactcctgtgctcatggaagtttgggaggcacttcttcagtagcttctagccaggacagtattctggggaccttatatgtctgaaaattcctttcttctagcctcatgctggcttggtagtttggctgggtataagctagatgctaggtggataatcattatagttttccgtttttgtttccccagagaataaatcaatggtatcgagtgggagagttggggacattatttacttggcagagttggggaaaggacaaggggtttctcagtgccctgtaaatagacttcccacctgtctcccttttttcagttccttgcctcattcctgcctccctcagaacattgtcctcatactttctgggtgtctgaaggggcattgtgatcttgtcctcattgttatatcatcttctactctgaataaagtcctttacagtaatttcatagtgatcttttctttctggttcaattgcaatccaggatcacaccatttatttaggttttatgtctttttaaatttacattagatcttcagacttttgtttcccatgattttgacattttgaaaagaaaacaggtcattaatattttttaagactataacttgggtttgtacaaggttttaaaaagtcacacaatgttatttgtatcaacaagggtcctggcaggaaacacaggcactcagaccattcaggagactttagtaaagagtcaatttttggaggtgtgggcagaattaaggaaggcaatagggatggtgaggtgcatcatccttactgccttccttcattaggaataaaggctataaaggcgcctcatttatagcttcctctgcccctccccttctctttggatttttgttttcccttttattatttcactgtccttttaatgatgtttcaatggttgtgtttgcccaggagtgtcccaaatagttttaattaccagaacactacaaaatgttctgctctctgctggagctaaaagagtttttctggcccatcttttatttttattttttcatagaaacgtataggttccccccccccccccgcctcaatctattggcatttttattgagatcatattaaatttatagtttaatttaggggagaattgacatctttaaattactgagtctttcaaagacagggtatggtttttcatttattcaattatcttttatgtccctcagtagaattttaaaatttacttcttgtagattttgcccatgttttgaattttatctctttggttgttgttgtaaatgagatcattttttcccatatactttgtaactgtttggtgtttcacttaccatcctatcaatgaggatttttgatctgtaaatctccttttgatatataaatctccttcataacttaaaatgtattcactagatgttggtttagttttaaaagtaatacatgatattataagcaatattaacaaatgaaaagtaaaatttcctctctcttggtccccatttcacccctagagtttatcactgtgggttatttcttgtataatttttccagagcttttttttttttttttttttttttacttatacatgggtatatatgtatgtaacaagatattctttcttgttgaaatgatattctttctcccttttgggtgaggcccaatagcctggacacacaataaaggccttatacttccatgggttcaaccacctttgtaggctgtgctaagagattttaagtgagggttgtctgcattagacagcttccctctggccaatgagagtagggggtgtagaggccgagaggtttctttggagttttcttctctctcttttcttctaagagttcttta

SEQ ID NO: 95062 - DNA, 1058 bp, Homo sapiens
ctaacccctggccttaaaattattgctaagtcagtggcagtagggatgagaaggagaagaaggttcaaacaatgtttgggaggaagcattgaaaggagtcgataactgatcaagggaagataagatctattttgtacataatgaagatatatgtgggacaaatagagatacagaggtctaggaggtggttggatacataagtctgaatttcaggagacagatctgagctagagatttgggagtccactacctgtaggtaatatttggagccatggtcatgaatggcaagctgcgtaaggagactggatgaagcatgagaagtaggccaaggacagaacctcgggaaatactaacagaagaggagaacatggaggcttcagggaatctgtagaatcaattatgagccttaggatgatcacaagagaatggcctcaaggaagctaaatgaaagattttcaagaatgaagaaaagagtgttaaatgccaccaaagagtattaagagaaagactgaaacactgtttattggatttgacaattagaaggatataggtgacctcaccaagagtagttttaatagtgtgaattaatatttgtcatgtggttgaatcagggaaaaggctttctgggaagagggaacaacatcaacaatgagataaaatgtgaaaaagcattacattttagtaaaacagcatgtagttcagcactcagagtaatgaatatagtactgcaaaaaaagaaacaccttaaaattcacagaaagatctgaatttagtagagggaaaggacaaccaatattttattagaatttattatggttacttaatccaagttatcttcaaactcaaaggtgattataaatctttatgtatcagaggaatgaagctctcagcgttgattgccttctcaaggtcacatgttggtaatggcggccctagttttgacagtagttctttatgaatcacgtggtcctgtggtcttatacttgatggcccccggctttgagagaaaatggattgggaaggaagattattgatctggaaaggctctagtgaagtta

SEQ ID NO: 95063 - DNA, 2107 bp, Homo sapiens
ctcatgcctcagcttcctgagtagctgggactacacgtacataccaccatgcctgactgattttttgtattttagtagagatggggtttcatcatgttgcctaggctggtctcaaactcctgagctcaggcagtctgcccacctcaacctcccaaagtgctaggattacaggtatgagccactgtgtctggccatatggaacacattctaatgtaactgtgaactaagagctagtagtccaacagatgttgagtattacggtttttccctaaaaaatttaaaatgtctcactacacccctttaaatttgctaggatgcctttgcacacagtttaggaaccacaatatgcatgcaattttgaattctgatttccttgcttgacatattataaattatcttctcttgtttttatatcgttataacaactgattttaatagctatataatattcactggagtcactgaatcataatcttaaccattcttcattttggacattttaggttatttgcaatctgatttttttaattaacaaataagaatcagtgaatatttaattattttcctcctctcctttcttttgttcagatgtgtgtttttgaactattcctttgtaataattgccaagagttgtattactaatcgagatgaacatttttatggcacttagtatatttttctctattgccatttaaagaaaacttagctcaatctgtaatgtcgccaatatcatgggaatattttaccataatcttgccctcttcaggtccaagtatagttggtgaaaatggaatctcacacttatttgattttcatttttattgctaatgtgagtacatttactgattcctttattgaaaatctaccatttgccactgtgttactttcctgtggctcctgtaacaaattactgcagacttggtggcttaaaacaatagaagtttattcgctctgaggtctggaggccagaagtccaaaatcataatgtcagtagagcaacccccctttccagaaactctgtaggagaatccattccttgactcttctagtttctggtggctgttggcatgccttggcttgtggccacatctctctttgttgcatcttcacatctgcttcttctcttgtgtcccaaaattccctatctcttaggatggtacatgtaattgtattcagaccccatcgggataatccaggatatacaccacatctcaaagtcttaattacatcttttgccatataatgaacatgaacatgaatgtgaacatgttttcatggggtcaccattagcctgctacggccagttacaatgatgtacaacctctgcaggaagggagacaactaaacaaaacaattatagtgaaatcctacaggtgctgtgacagaactctgtgcagggtcctgaggtggcacaaaggagcaagtgggtgatcagttttataggagggaaggtaagtgaggaagtctgagaaagcatttatggaagtggtgatatttgaatgggttattgactgcaaaatatcaagagtgtttggagattttgtagatatgcgtagagctggatgggaggcttggtgagaactgaaatgacaaaagatgatgcttcatggaaaatataaaaagaatagctaagccagtgaaattggctaaatatctggtcagttttcttcatgtgtctttgtgtaaaatagaggttcttcaggatcttttgaacattccaagcatggaggagctgtgattagacagaggacactaatgtgaaacataccatgttataagatatatgttaggagtgcatttctttacaaggaccagaaaacccaaataagaatgtcttggctgggcgtggtggctcatgcctgtaatcccaatactttgggaggccacggcaggcagatgacgaggtcaggagattgagaccatcctggctaacacagtgaaaccccatgtctactaaaaatacaaaaaaattcaccaggcatggtggcaggcgcctgtagtcccagctactcgggaggctgaggcaggagaatggcgtgaacccaggaggcggagcttgcagtgagccgagattgtgccactggactctagcctgggcaacagaacg

SEQ ID NO: 95064 - DNA, 1026 bp, Homo sapiens
ctaacttctgtagctctcactgattggggaacaccacactcagccctctccacatccctgcgctgacaatctcagagcttccagaaatgagaaatagcgacccctcaacaaagtgagcagtacctgatgagtaagagagttaaaagataaaatgaagcagtttcagtatattttctgatacttctagatttgtttgatttttctaagttgtatttaatctctattaagttttcttcctttgctgatacagattttgagccatttattaaagtcacattcatatatcaaaatagcaaataatttaggaaaatggtgcttttttctttttcttaaatgtgaggaatatttacttacattggtctttggtttttagtgtcctcgtctttgtttccttcagttaagatcccagatgcagcttttattcaggcagcccgcagaaaacgtgaattggccagggcccaagatgactatatttctttggatgtacaacatacctcctccatctctggtatgaagagagagagcgaagatgaccctgagagtgagcctgatgaccatgaaaagagaataccatttactctaagacctcaaacacttagacaaaggatggctgaggaatcaagtatggatttaccaatatatgaagattaggatattttttattagaatataatatgagagaatctccataaaaaatgtaatatgctggctcacattttatagtgttgataatggtttttaacatcgatttggtccatgatattgtgacctctaaaagatgtatctgtatcaaaatgttattatcaaggagtatgtgtaataatgtttattaatgcctgacctcccaccttgatgtttttggacaggttaaaaaaaatgtgcagtatcttactttcaaagcattgaaaacgatcgtttttacctgtataaatatattttttttaacatggaagcatctatagagattttagatgtcatgtattaaaatcttccctgctgtaataaaaaatttcctctaccaataat

SEQ ID NO: 95065 - DNA, 1021 bp, Homo sapiens
attatacattttattagaacaaacattacaaacaatgtgttgttaataccctctgtttcttcccaaaactaaaggttcctctatgacatctcttcgtgtaacgtggcccttggcaatacatgtgaagtataagtgcacattgctttgtctcacaccagatctttgaggagcgaccaggcaggaaatttgcatttttaataagctccccaaggtgacctttatgcacactatagtttaaaagctacctgtgacagccaatataactgaatttatttacaaattcagtatatgcaaaaaaaaaaaaaaaagaaattcaaatggagaattgatgacagcttgtacttcacacccttaaatgttagtggggaaagaagggcacaaattatgatgagtgggcaggatgccaagctcattaaaattcttactggctcattgcctgatttcccagtgacctggtcatattttaagcaattcatcaatcaagaataaatatttagcgagaatgtgtggcatgctcaaggtgtggtgtgatttctcctggtccccgggcatatggacatatgttatatttgcatgattgattgtgcatgatctctcagtatttctccaatctgttggcaggacgaaaccactgctatacccaaattgccctcaacaggctacttatgaagggggaaatagcaatgaaataagcgagtcgggtttacacattaggcaaatccaataggattattttcaatgcagatgaagcctcaaaatagttttgggatggacacagaatctgggctttcagatcgttctctgtattcctttttatcatattagctaaaccacctatttgaaacgatacaaatttaaaacatatttctcatatagactaggtgaagtttaagaagcaaagaagttggaatggaatgataggtgtttgagttggactgagcttctctgacacgtcatctctaaaatgtggataaaaatggacactttcaggacttctgtaactatgaagagcaaatgagtt

SEQ ID NO: 95066 - DNA, 1261 bp, Homo sapiens
ttgtgttgttttgttttgttttgttttgttttttgagacagggccttgctctgtcatccaggctggagtgcaggggcatgatcataacttaatgcagtctctacctcctgggcttaaatgatccatcctcctacctcagcctcctaatgtgctgagattacagacatgagccactgcgcccagcctacgtctgttttattaacaaattcatgtctgacattcaacaaaatgcctcacacttaccaaaatattaaaatttctcactactgacagtaaatgacatgaactgtttcagtctttgtgcaggtcgattttgcaaatttaattaaaattctaaaaatatatttattttccttaagtgatttaatatttagaaacttatccaattaaaataacttccatggattcaaaaagtatgtgcataaacagagacttcacaaaatgattgtaaaaattccttttttttttttcccggttgctgctcgctgtcccggtccgtgccagctcccagttcgcctcgtcgccatgcctcggaaaattgaggaaatcaaggattttctgctcacagtccgatgaaaggatgccaaatccgtcaagatcaagaaaaataaggacaatgtgaagtttaaagtttgacacagcaaatacctttacaccctggtcatcactgacaaagagaaggcagataaactgtagtccctgccccctggtttggcagtgaaggaactaaaatgaaccagacacactgatttgtgctgtattaaaatactaaaaatcctaaaaaaaaaaaaaaaaaaaaaaaaattccttttcgttttccatatgcatgtgcatctacttatgtaatatgtttattttacatacgcgtactatttacattttgaaattctcagtgtattttaatcatgtattgattaagtaactacaaagtatctgtagttttaatactttataatcatttgaaacagtgtggtaaatccttatatactaacatggagagatgcattatgcatagttaagaaaaaaatgaaaacataaaataaaaaggcttataataatgtgtatgcattcacacatgaatattctttcaattctcaaaaatatatttagtagatagtgcctcggaatagtataaaaagggactctatttactttttcagtttataattgagcacaaataattaaaaagaagctactatattaacattatttcctaatcatgtatttaactgagataggaaggagaaaaatatgacaacat

SEQ ID NO: 95067 - DNA, 1049 bp, Homo sapiens
ttattgcacaagaaattctaatttataggcagaagaacaaagaataaattaattgccaaagaagctatgttcctattaaataatttaaagttacttttggactgtaaagataattcctcaagatatgttacctggcatactaacagttctgattttcagttgttggaatctactgtccaaatctgaattgcggtgttgctgaaggataataagcaagttgaacaatgttaacctttggtcaagaaatttcatttagacaatttgggtccctggtgggacactggacacctcacatggcatatagagtaagcactacttacctgaatatcacataggttgatactcaagtggaaaacaacccataatttaggagtagactgagtctgtatatgtttccaaaatgaattaaaatgataagactgtgaatgcagtgaaaagcaaggaaatgaatttgacagatactaaattttattttcaatttcaaattactggctttctattagcatactccaggagtggtgaatttctataaaattggcacggagtattaaattttatgagtgtgctattgtaagtataaaaacccatttcagtgagatatggacatggttatttctttttactcagcaaactctaggccatgtattattagtcttaacttatcaccttgaaagacttgaggctttggagctttctttgtatatatatttgtggtaacattttgtttatttgggtagaagaaaaaggagattctgaaaagggtatactagtttgataagtttattaaagcattctttaatatgcatttatgctttgacattgagtattattacagtaatattttcaaattattacaatgatatttttgttcagcagcacttctttgagtgttttgttaaaaggtgtggctttaccaaaaatagaagtcttgcaaatattgtaatatttgaggaaagtacttaactacactttagcaatagcggagatacccgcaccccaccctgccttcactgcaaatagcaaaaactacttagacattgcatatcact

SEQ ID NO: 95068 - DNA, 1064 bp, Homo sapiens
ggcgacagagcgagactccatctcaaaaaaaaaaaaaaaatgtctttttcatataccttttagtccagttatctaaagtccttctgttgcagacaaaagcaatgcattaaaatattttctcaaattaaggacagtgaagtggctaattcatatttgttcacataatacagtagaatgcttaaaacttttcttgaatttcatacagagatttggcactgtaagtagtcttaacatccttccagtcccctatctatatgccttatatttcctcctagtattccatactgatttaaaaaaattaaatatgtgaattttaagatgggattttccttatgatattacttccctacaatacatgactgtgttatcaatactaactaattcttcccttggaattaaaccttcatgataggactgatgtgactgttgacccttaaaagacttatgaataaggaagaagagataagggaatattagctataaacttcttactcaacatttaaagcaaactggaactgtgagagggaaccaaaccaaggccccagttgtatcaaacacatacacacaactttatgaattgaacaaaattcatagcaatatgcaatgatacagtttgctcatagctatcccacagtttctaataaggatggataagggatgaaatgaaaaacagaagttatggggttctgagtagaattctttcactgtcatgagaaaaatgacattaggaatttactgttgattaatatttaaaatatcccacaaaaccttaccttatatcaataatgatatatatgaggcctatacatttattgtataatgttgaaatggcaagattccttttggagaaattgtacattattaaaatgatgaaactgctaatgagaagagatattcatcttaggaagtttagtccttgaaagtgtctgaactttttataaattcaaaaaaggaaggagtttcaataggtcacattctgtattaagaagccttattagaaaactaacacaatttattaggcaactttattacaaaactaaaaaaaaattattaggaaattaaga

SEQ ID NO: 95069 - DNA, 1021 bp, Homo sapiens
gagcattcactgtaatttagttttaacagtgggttttcctggtgtatctaaaatatagtttaactttctttaaattatttgttttacacctagaaaataatgtatcggatgaatataaggaatttgtttttcagatgtgcacatattccctaggccacaaccaactgggagatataactagaggtgtgttaattataaaagcctcattggtgggcgggttggcatcccaccttgttccccactccactgcctcttagcctcaccatgtccccgagcccttttttatcccctggcagatcccaggtggctcacacctttcaccatggcggtcatgaaagacttcctgctctggagtctctgccctgttcccattgcagccatcctgccccgcagcatgcagctgtaaaccgccccatgctggagcccctttcccatctctgtggtcctggccttctgtttctgttccatggcagctgacaccgcccaggggagttagggtgaacgtttgtcgcattactgtcttctgatgttcctagtattttaactctttcaatgtcctgcagcctctgcttcctacgtcactgtaggcttgcaaaacctctgtttggaggaagacaggagggaccagtgagtgtttaactctcttcttattctgggtaaggtctctgtgatacagtgtgaagagaagtcctcctgcgtcttctccccgatcccctattggaacacagagacagtctccatggcatctcatccctaggcccactaggcagtttttgcaccagattaggctgtttctacactaaatgttacaacttggggattcctccaggtatcacctcaggaactggaaatgttttgcaacaaatcgggaaagggggatgagcagcaagagaggaagagaaagcaatggtaaaatattcctgatttggaaatttttattttattcttatttttggactgacccttattgcctctcggtggccacttttaccatgaatgtttttggttttggtgttgtttt

SEQ ID NO: 95070 - DNA, 1153 bp, Homo sapiens
aaggggatggtttccagttctcatggtagtgaataagtctcacgaaatctgatgattttataaggggtttcccctttctcttggctctcattctgtcttgcctgctgccatgtaagatgtgccttttgccatctgatatgattgtcaggcctcctcagccacgtggaactgtgagtccattaaacctctttttatttataaattacccattttcaggtatgtctttatcagtagtatgaaaacaggataatataattagaatatctgaatatagggccaaatctagagaaagtattctaaaggcaaattcacaaatcctttctctggtagctaaaagaaaattatctgataattgcaaatgcttgcagaacaatatttctcaagatcaaattcttcgtcaaataaatccctcttacatatcattaacaacaaaacgaaaaaataccatttttataattttaataaaacaataaaagtttaaagataaatatttttaaaacgtgtgtttccaaaatggtggcagtgatgcaagagggtacgctgagcagcacctatgacagtgtgggcaagaagggctttaaagtgaaaaagtggaatgcagtaaccctctgggctgtgatattgtgcttggtaactgtgccatctgcaagaaccacattatggatcttttttgcatagaatgtcaagctaaccaagtgtctgctacttctgaagagtataccatcttatggggcatgtgtaaccatacttttcacttccactgcatctgtcactggatcagaacaccacaggtatgtccattggacaacaaagagtgagaattccaaaagtatgggcactagaaaaagacatcttccattaagtttaactatttcgttattcattaatgattttccctcctgtcacctaattttaaattagatagaactgtgtcttttctgctttgtcttttcaatttgctgtttctacaaccatattatattctgtgtcaaataaagtccacttggattctagaaaaaggaatgtatttttagaactgccatcttaaaaatattcagtcttctaacagatgaatatgatgtgtctcttcatttatttagatcctgaattttggttgtcaatgttttatagttttcagtatacagatattata

SEQ ID NO: 95071 - DNA, 1116 bp, Homo sapiens
ggttcttgacattttgttcaaatccttgtaacaatctgtctttagctttattctctgagaaactgagcaaacctgtttccattgccttcttagaagggttcatgtatatagcactacagaagcataatgaagtttctcagctcccaaaattattgttattatactgctgtgaaaaaataaatattattcaaaacctccctctctgcttctggatttaggaaatgtaaagttgaagctctgcatctgtttcgtgaaattcaggctgacacagactgattttgaaagctgttattctgtgttcaaacaccctcatcctggtacatttttcttctgtaatttgattgttcaggggatcctaaagataataggtttcaaaatcattttgatcctaaatgtgatttggatcttttatctttattcattccatctctcttctctctctcttctgtttctgaaggaatttgaaaagaggaagatgctatgaaagaaaaaaaaaattcctaaaactgtggaatggatcacgtagacatgtaacccagcagcagtttgcttctgttgtccactgattaatcagcctatgtgcctgacactggtcttgcagtacaactggaagccaaaacaaggtggaagatgtcctgaattaagatgttttcaccacattgtattacagagacagccaataaatctactatttgatttcaatatggttttggaggcttattattgttccagtgtgaaggatgaggagagtgggagaaatggaggtgtatttatgtgtgtgtatgttttaatatgttctttttgtttgtttgtttgtttgtttgtttttcttggagacagagtcttgttctgtcacccaggctggagtgcagtagtgtgatcttggctcactgcaacctccgcttcccggggttcaaacagttctctctgcctcagcttcccgagtagccgggattacaggcacctgccgccacacccggctaatatattttttttgtatttttagtagagacggggtttcaccaagttggccaggctggtcttgaactcctgaccttgtgatccacctgcctcggcctcccaaggtgctgggattacaggcatgaggcaccgcgc

SEQ ID NO: 95072 - DNA, 1099 bp, Homo sapiens
tcctccccaggcatcaccccacactttgtggtaggtaagtcgttctcctgctgaacagatacattcaggccatcagcccgagagcccgcacttgacctgcagacttggttttcacctgtgaccagtattctttctcccgatctcagagggaaataagtggttttttctctttttcaaggctgacctaaagatcctatcccttgtgctttttttcaggctctggcttccttccagttttagactttccttgtggaatggcacttcccttcagagatcaagtagaaaagctttactgtctatgtcctggggaggctttccttgttgcttctcacttagaattaaatgtaaaggagtagtgttgagttatgtcatcatttcattcagcttgagggagttaagccctgttcctgtggtgaaaggagagatgggggtgcggtagtgactgaagcagtgtggtggccaccagcccccactcagtgaatttgtgctgtggccattgttgtgtcagagaactgtgggaaaaaaatcaagcaactgattttcagaatttctcttatactgaggaatgagtgaaaatttttcttcaggggaccaggcaagagagtggagatcactttctctctatatgtatgaaaaaaatccaccagtgaatgaattaaatgccacataaaataatactggagagttaaaggaaccaataatatcatgtacagggtggtttacacaaaacaaggcatatttatttgtgttttaaggaattttcaagggctattttgaatatacttgattttcttttgtggtgattttaagccctaactcccatattagatatgactcaggtttaccctcattctctcattctctttccttacttttcattcattcttgaatcctcagcaatcaggctcctgtctgtcacttagaagctatatgaccttgggaatgcttaatctctcgttgcctcaggttccttattggaaaaatgacgatatagtagtgcctgcctcctagagttattgtaaggactgcgaagtttaaatgacttagtaacgtatagcaaagtagtgcccggcacttagtaagcactcttactgagcca

SEQ ID NO: 95073 - DNA, 1078 bp, Homo sapiens
taagccattcatgaaggatctatccccatgacccaaacacctcccaccgggccccacctccaacactgggcatcacatttcaacctgagatttggaggggacaaatacccagactacataaggtagtataagtctaatctattacattctgccactgtaggtatgattagtacctaccaaatttatactgatactagcttcttcataaagattctcagaagaggtaatttaagtctttcttgcattgtttttatagtcataaaataaccttaactaataatatactttctcctttgtctaaattaaaaaacccccctgcttgaatttaagcctttccttttcatttcatcgtttgaagatactattgattttgatggcaaatcatggaatgaattttatacctatgttagtcactcgaagtgtttggtaatttagtttaccatgttttagtctaacatagaaacacaatctaatatttttgaattctctttcgttaaggcattgtgtccagatctggcaccctgacttatgaagcagttcaccaaacaacgcaagttggattggggcagtctttgtgcgttggtgagggacttttgctaaaatcattttattggagtgtggtgtcttcattggatgagtataataataattattgattttattatttgcaaaagattttgatactcttatgaaaaggatgttacgatctcaaatttaatttgcttaagtgtaaagttattctgtagttgtttcaagattcatggtccaagatttcatttctaggttgaagaactaacatcttggaacacgtggctcccgaagcaccttggtgcctgaaaacatcacttggtttgattgctctgaagaaatggttccttatattaggacttttgttatcattgccattatgttcatcagtgctttatagttactgaattctttgccattcagtgtctcattcttgagggaagcctctcaggtgcctctgagctggaaaattgtactgttagagccttattggtgagaaagtcaaggttgaggaaggttcatttcctcagaacctctctttttatcacac

SEQ ID NO: 95074 - DNA, 1023 bp, Homo sapiens
gcactttgggaggctgaggcgggtagatcacaaggtcaggagttcaagaccagcctggccaagatggtgaaaccccgtctctactaaaaatacaaaaattagccaggtgtggtggcaggcgcctgtaatcccagctactcaggaggctaaggcaggagaattgcttgaacccgggaggtggagcttgcagtgagctgagatcgtgccactgtactccagcctgggcaacagagtgagactctgtctcagaaaaagagaaaaaaggaaaaggatccagttgaagtggagagagaaaatacaatgaaaaatgaggaagagttcttccatgagaaagtttaaggatttcataagcacccttgaagttgaaatagtgaagttttaagagaagcataaagtaatgcaaggtctttttaaaactggtcagtagtttctgtaacttgaatcttttagaataaatagggaataaaagccagtatttttgaacctcagaattttggtattttaatgccagaaagtaaaccttaaaacccaactggtcccatacctttgtacggcagatgaggaaatcccaaaagtttccagtgagtatcagaagtgatactagcacccaggtcttctgactctgcagtatcctttccgccagcatgtaccatgtgataacttaagcttttttcgaagctctgatttttttttggcagtcttagtgatgtgttgagaaggtgactatcctgctcaaaggtgttgccttccttttccccgtgtttgccaagtgcgtaggcctgtttttcgaatcagagatgcatttaaagtgtagtttggaaaatgagatcctcaacagtgatgttgtggatattagcatctgttgccattgcatgtaataaccaaatctttatttcagaaatacaaaatagccttgattcagatgtaccagtgtagccatgagaaagtgatttgattttctgacatcaaatttgtttctccatagaaatgtaattgggaatattaaaaataatttaagtacag

SEQ ID NO: 95075 - DNA, 2533 bp, Homo sapiens
aggagcaaaagcaagaggcctgggggcgactggggtggggcgtctcctagagcgaggattgctgcagagtgcgcgtgcacgcccgcacatccacacccacggctacacatcatatctgcacacgcacaaaaccacacaccctcccacgccggtcccatatcctttctgcggggtgagcagcagattcccggaaagggggaaatgtagccgcaaaagcaaagccgggggcctggcgcccactctggcggcgactacagcccccacgctgggcacactgcgagctgggggtgcccggcgcgggagaagccgcgcccagccgggctggtagcccagcggggggcgcggcagggcgaggagcagcccgcgctgctcccgcccctcgggtgccagcaccgcccctgctgcggcgggtgaggggcggggcggggcgcggcgtatataaggctaggggcgggcgccgctcttttgtttcttgctgcagcaacgcgagtgggagcaccaggatctcgggctcggaacgagactgcacggtgagtgcggcgccggggcggggggcccacccagggtgtggtcggatccggtgcaccgggcgggcgcgccgcaaccgcgacaggcgcccttctcggaccggacgcaggggccggcgaccacgccctgggaccgagaagaggggtgcgggacgcgcccagatcctcggccttggggctgctcggcacgccttggcgcgagtgccacgtcgagaggcgtcggcggggagcgcggaaggggacgctggcccccaggcccaggtcaagcgccttggtttgcccactaggattgttttaagaaaatggcagacaaaccagacatgggggaaatcgccagcttcgataaggccaagctgaagaaaacggagacgcaggagaagaacaccctgccgaccaaagagagtgagtgtgcctcggtctcccgcgccccagcccagcccctcaccctgctcttccttgcaaacccactcctccaccccccaccccgccgttgtccccggtgtgggcggccccggccactctttcagtttcacaaagcgccttgtttctccccagccccaagcttccttctaaatccccacacctcgtgggtgcctcgcccacaccgggaagcacctcggttgcgggtgggggttgcagctcccctccagcgcccgcttcccgctctccacagccattgagcaggagaagcggagtgaaatttcctaagatcctggaggatttcctacccccgtcctcttcgagaccccagtcgtgatgtggaggaagagccacctgcaagatggacacgagccacaagctgcactgtgaacctgggcactccgcgccgatgccaccggcctgtgggtctctgaagggacccccccccaatcggactgccaaattctccggtttgccccgggatattatagaaaattatttgtatgaataatgaaaataaaacacacctcgtggcatggctggcgtggtctgagtcttttagttgagtatgcgtgggcagtgccactgcagcaaagcccctcgatggagtagagttcctgccgcaaaggggaggaggtgggtcgcagaatgggctgactcggagggagtttttaattttggctttacctgcttctccgtaagatttcatgacttgttagccacttaactcttgctcgtaagcaatctgtgtaaaatttaaccccactttgtccccaggttgcgttggaaaatgctttttcaaaagagcaaggtttgcttttgataagcttcgaaagccccactgtttccctctggcctcctcctagctgactcagaagggaacactgattttaaagaaagaaaagacaatctggaatgttggaaattgggtgaggtcacaaagtctccggaagcctttcttcgggagcttaaaacaaaggcgggatctagggatacagcaacgggaacgtcagaactagaagaaccaacactagaactgggggaggggaggggggaagagcttttgtcttttaaccctagttcagaacctcccacaaaaacattagccattagaggaagtgctagactgatctgctaccacccagtgctcagcaggaagggtggggatgtggtgggagggaggaagggtgggctggcgctggcgctggcggccaagctccaagggatgacacctcaaacccacagggaaggaataggaccagcccaagggggcctgacagttgggaacctggggctgcaggccattcagaagcagaagaaacaggcttataaagacaggggtggagttttctttaaggaaggtggataggacactgcttagagattcgtcccacatttttgcccggccccaagaggctgggcactgggtgaagacagttaattcgaataagatacggtccctgtccacgaggaatttaaaatctggtgagtgagatagccacagcagaccagagtcaggacacctaggcttggcagggagactcatgcccaaaggcattctctctgaactcctatctgcacctccc

SEQ ID NO: 95076 - DNA, 4869 bp, Homo sapiens
gtcgcccccgtcgcgaccgccggccgcggggcctccgggcggctgggcccggcgagggcagcgagaggcggggctggcgtgcgggcggcggaaggaggcggaggaggaggaagaggaggaggaggaggcggcggccgggagccgggggagaggggcggggggtgggccgggggaggggaggagcgggatttgcggagcgccgcgccgctgccgggagccggcaggcccgagagtgaccggagtcacggcgggcgccggcggagctgcggcgtcggacccgcctcctggaggagctcagccccgaccaggcccggccccattcccgccccgcgccgcctccccgccgccgccgccgccgccgccgcgggagcgctcccctgcccaccccgcccccgcggccgagcccgggagtcgagtgggagtcggccggccggcgcgggcagcgccgggaccccgcgggggacactgcagccggagcccgggaggggccgcgccgccaccgtctgaactaggatgtcccgacatgaaggtgagaggagcccccgcccccacccgcacctcccgggcctcggcctaccccgcccgggccgggcgcggcggagggcggccgggaagcggcggagactttggccgagcccgagccgggcccgaggcgctggacccgggagcgagcgagcgagggcggagagccgcggcgccgctgccgccacggccgcggcccttagctgggcctggtgctggaggcggggcggcccgggcggccggagggtttgcactgtcatggggcggagggggaggggaggcggcggggcccgttaccggcgggagctcggccttcgggactgataccggacgccaaggcccgcccggccggttcaggagccgcgggccccagcgcggcctagcgctcccgccgccccggaagagcccggtgtggtcgcagagccgggccgcgggcggcagcaggaggcaaaagagccggcccgggacccggcaggcgcgtccggtcgccgggagacgacggcgagtgtccccgcctgcgggcgaccgcggggctggcgggaaggctctgcggccaagggacgggaagccctcgccgcctggagcccgccccggcctcgcggctaggcctcggcgcgtccctgggctcgggtaaccaagttcccggggtggatccgaccccgccgcagcaagcaaactccctgctcagtcacccaggcggagcagggctcgctccccgcggccctggtgccctcgccggcatgtgctgcctaccagaccaggttttggaaaatgacgatggtgaggtctgttcatggtcgggggtcgttttggaccttgttttgccattttaaaacacgattggagtacagttgcaaataagcagacagctctaagcccagtcccagggcacaaagagacaaatgtttagggtcgatgtataggctttgagctggtaagaaataagttaactttaatttattgccatatggtttagaaaaggaggagggggttgtgttttctttgtttcactactacaggtttttggataaaaagtgttaagagtcttggcgaaaagtttgtcctgctaaggttaatacaagattgtagaagtggcttgaaagtttgtgtactccggattttaaaatcctgtataggtgatgtaggagtggagaaagtttagtgagtcagtttagtgtgtgcttagcactatgggaaggatattctttgggaaatacggaccttagaatttcaaggctgaaaaactcagattgattaaaattgtatttagaacaagtttcaaaattcgcattactaattgcgacgttgaaattgactcaacattctgtgttcaacgattctgtattttaaaagttacaaaactaatatgaaatatactatattttcttcgcaaagcatttgttgagtacttacagtgttcaagtgttgggcattttgaaataatgaggtacctagcctcattgaaagggacacagaagtaggaagctatgcctcttttccccacttcgtctgcttaatcgaaatgtatccttatctctgtaattttaagaactcgtaattaaagttataatcagttttcaatttgggatattaaagtttatcttaaactgtagtcctgtgtacattgaccaccttcaagacaaaacaaaagtgagcaatggctgcaagctctcttactcttgaaaactgggagggttagttagagaatcacagccatggaagagtgtttcagacccattctccttggtctaagaaagcatacagatagttccagacgagcattctaattgaagtgtcctgggaagaaaattccttcacccccagtgctctgttagagtaattaaaatctcatatttggaacattcttgaatgtaacatatattctgtaatttaagcccatttccccccatttggtgctgtgcaaaggtgtgtggttatgaaacttatattaccttttagttacttgaatattgctgaacctcagcacactagtagcacacctttcctagtaacttatgttaatgtcagtaaatagaacatacctaatgaaaaaggaacatacctaaatacatctgttgaagacttatagtacaatattcgacaagtgattctctttcaagggtctagtttatggcctaagacaggaatagcagtctcacgaatcacatttaactcattagatacatattttgtggaatattagttcagactgtcattattgtcatcagtaagactttgacctatcagtaaatacagtgtttggcacccttgctattagttcttttcttacctttgccttttttgggccaaagaatcccatttctttcagcatttctttctttctttctttttctttatttctttcttttttttttttttttttttttagctggagtctcactctgtcaccaggttggagtgcagtggcgtgatctcggctcactgcaacttccacctcccagattcaagcagttctcctgcctcagcctcccaagtagctgggattacaggcgcctgccaccacacccatccaatttttgtatttttagtagagatcgggtttcatcatgttggtcaggctggtcttgaactcctgacctcaggtgatccacccgccttggcctcccaaagtgctgggattacaggcgtgagccaccacgcccagcctccgtgtttctttagtggtgtaatttttgcactctcagtcatctgtccacctccaaattctctgtagttctcatttcctttcagtagtgtgatcctgaactggatataatagtctggtaaaaggtttgaacaagcctatcatgttgtacttgcttggtgcttccttttcagggccttatgtgtgcaggtaatatgttactttgtctttgtacccaccctaatgaattacactaaatcctatgattttattaatgtaactttggatgacacagtcctgagatggacacctgtcaagcttgaaggctcaaccttgtgaagcagtgcctctgagaaaggcaatgcaaccaggagcatagagagatgctctagtcccgggttcagcatgcttcttctgtaaagggctaggtggcaaacattgcaggcttggcggagctgtaatagtacgaaagcagctatagacaacctgtaattgaaagatcatggctctgttccaattaaaactttatttgtggacactgacattttaatttcatatatatatatatatatatatatatatatatattttttttttttttttttttttttttttttttgagacacagtcttgctctgttgcccaggctagggtgcagtggcgtgatcttggctcactgcaacctgcacctcccgggttcaagtgattctcctgcctcagcctcccgcgtagctgggattgcaggcgcccaccactgcgcccggctaatttttgtatttcgtttagtagagatggggtttcaccatgttggccagggtggtctcaaactcctgacctcgtgatccgccggcctcggcctcccaaagtggtgggattacaggcgtaagccaccgcacctggccgaatttcatataattttcatgtgtcatgaaatatgatttgtcatttgacacccccaccattcaaaaatacaaataaccattcttaactttcgggctatataaaagctggtggtggaccggccgtggtggctcacgctgaggcagagaattgcttgaacccaggaggtggaggttgcagtgagctgaggtcgtgccactgcactccagcctgggcgacagagtgagaatccatctccaaaaaaaaaagtggtggttggatttggcctgagggctgtagtttgccttactttacctctgccctagactggcgctttagagagttgatagagcttgaactatcaagagtctagaaggggcccagtcagcttgggattccgtcattttctttgggtgatgggaaatgagttcacagactgaaccagctcctccgtacttcacttttcagcagcaccatgaggaatggaaataattgttcctcaggagtggacaacaggctccccaccctacagacccttagtggagatggcagtaccctacatttttcctgcttgcccgttaatacttttccagtgagaattgtagggccacttttaactcactttgtggtgttcttgtcatgttaacattttatagactttagcacccactttgtgttcaccctgccaacactgtctagttcacagtgaacccaatcattttttatcttgatgtattttttaaaatgtctcactatcatactttcaaatacatttaaaatgtaagtatgttattcagagcttaaaatctacttttaaagctttc

SEQ ID NO: 95077 - DNA, 1044 bp, Homo sapiens
tttttttttttttttttttaaagacagagtctcgctctgtcgcccaggctggaatgcagtggcgtgatcttgtctcactacatcctccacctcctgtgttcgagtgattctcctgcctcagcctcccgagtagctcggattataggcacctgccactgctactggctaatttttctatttttagtggagacaggtttcaccatgttggccaggctggtctcgaactcctgaccgcaagtgatccacccacctcagcctcctaaagtgctgggattaccggtatgagccaccacgcccagcaccttcttaactctttctgggctacttttgattttgggtaaaattgtttgagatttcaagccggttgcagtgatgtgcacatgtagtcccagctagatgggaggctgagagaccctatttctttaaaaaaaaaaaaacaaaaaaaaacaaattgagatttcaagtagagtccttatctttatctgatttataatttctctagctttttgaagattttcacatgtaaaaatgatagtggataaatgagcaggtggtcatattgttatgctagtttcagaagtatctgatactatttatttttaaaatgtaaaatacaagactacgtaggccattaatctacttagtcccaactttttttgtttttatttttttaattggcaaaaattgtatatatttatcatgtataacatgatgttttgaaatatgtatacattgtagaatggcagctccaactttttgaaagttgtaccactcttttcttagtagattctaattttctctctctctctccttttttataattatttttttttactctctgttgcccaggctagagtagagtacattggtgggatcttggcttactgcaacctccatctcccaggctcaagtgatcctcccatctcagcctcccagagtgttgggattacaggtgtgagccattgctcctagccttaattttctcttctcaaaaaatgttatctgccactgaagcacacatatagacagaaataatttggtttt

SEQ ID NO: 95078 - DNA, 1035 bp, Homo sapiens
ttttagtgaaggctaagctgtcattgaattatcctagaaataatgttttttaaatcactttatgagctgggcgctgtggcttatgcctgtaatcccatgggagaccaagatgggtggatcacttaaggtcaggattttgagaccagcctggccaacatagtgaaaccccatctgtactaaaaatacaaaaaaatatctgggcgtgatggcaggcgcctgtaatcccagctactcgggaggctgaggcaggagaatctcttgaacccaggaggcggaggttgcagtgagctgagatcacccattgcactccagcctgagcaacaagagcgaaattctgtctaaaaaaaaaaaaaaaatcactttataaatatagctgtggggctactttcatgcatatggactcaaaggaagcgctccctaaactgcatattcataaaagttaaaagtagaatgctgttcctaataaaagtctttttttatagaagattaattttttaattaattttagtgttgtgctaaggaccatgatgtttttcatttccttaaaattataaggtattttttcagtctttgaagttattcattaaaattgagaaaagaacccgtaagcagtatacagatcagagcatcttaaaatttggtaatttttttttttttgagaccgagtttcactattgttgcccaggctggagtgcagtggcgcgatctcggctcaccgcaacctctgcctcccgggttcaagtgtttctcctgcttcagcctcccaagtagctgggattacaggcatgcgccaccacgcccggctaattttgtattttttttttttttgtagtagagatggtgtttctccatgttggtcaggctggtcttgaactcctgacctcaggtgatctgcccacctcagcctcccaagtgctgggattacaggcatgagccactgcgcccagccagttatttttatatgttagccatgtcttgatttatgttaaagatctgggataaggcagacagtttcctaaaggaacatattaccta

SEQ ID NO: 95079 - DNA, 1052 bp, Homo sapiens
gcaccttccaccattccctctctgctacatccctgatggccctcttggtgtttgttaaccatggtaactgcctgtagaattgtttttagttgttggctctctgagttgtagcaaagtagaattatgagttcatccaattcatatacacagtcaattagcctcatatctttttttttttttgtcttgaggccgggtctcactctgtcacccagactggagtccagtgacataaacaaggcttactgcagcctcaacctttgggcttacgtgatcctcctgccgcagcctcccaagtagctgggagtacaggcatgtgctaccacgcctgaataatttttgaaatttttgtagagatagggtctcattgtgtcatccaggctggtcttgaactcttgggctcaagcaatcctcttgcctcggcctcacaatgtgctgggattataggtgtgaagcaccacacccagcctagcctcatctcttctatggccacagtgccagccagcagtccatcaaactttgccagtggccacgggggtactggcaaagaagtatagatggatccctgtaacttaatcactgctactagaaaaaaaaaaactgagatcagaagagtgggtcagttgtattaccctcagctagaagaaatagcagaagaataagtggatgaagcatcttgatatcatgactaattaggtttgcacattatcttctgttgaattttttttttttttttgagacagagtctcactctgttgcccaggctggagcgcagtggtgcaatctcggctcactgcaagctccgcctcccgggttcatgccattctcctgcctcagcctcccaagtagctgggactacaggcacctgccaccgctcccggctaattttttgtatttttagtagagacagggtttcaccgtgttagccaggatggtctcgatctcctgacctcgtgatccacccacctcggcctcccaaagtgctgggattacaggcgtgagccaccgcgcctggccttttctgttgaattttaatgtttttttaatctcttttg

SEQ ID NO: 95080 - DNA, 1315 bp, Homo sapiens
tcttttatatttaaagaagcttagcagaggctgggtacggtggctcacacctgtaatcccagcactttgggaggctgaggtgggtggctcatctgaggtgaggagttcgagaccagcctgaccaacatgaagaaaccccgtcactactaaaaatacaaaataacctgggtgtggtggcgcatgcccataatcctagctactcgggaggctgaggcaggagaattgcttgaacccgggaggcagaggttgcggtgagccaagattgcgccattgcactccagtccagcctgggcagcaagtaaaactctgtctcaaaaagaaagaaagaaagaaagaaacttctattatttatttattttgtgaagttggggcctcactatgttgcccaggatggcctcgaactcttgggctcaatccccttgcctcagcctcccaaagtgttgggattacaagcttgagccaccatggccggccagagtatgggctactttagatagggtggtcaggaaaagcctatctgaagatggacatttaaggaaaagccatagttaaatgagagagatttaaaggaaaaaaaaatacgactgaggatacagcaagtgtagaggtcctgaaattggaatgttcttggaacagcacagaggccatgtggctggagggcaatgattggggtggaaaggggtaggaagtgaagttggcgtagttcgagccagatcttggacaccctcgcattgtaggctgtgttgaggactgttgaactgtgaatgctttgagaaacacatttcggaagccctgcttctatagaaaggtctttttgactaactaaatggcagggggtggaaagtacatactcagtttgtgtcccaaacatctctaagaacatttctttacaaactttccctacatttaccgttcttttaagctttgtctttcttgacccctgttactctattactctatttaactgatgtttcctgaagggtgtggggtttggtggaaggtgaatcttcctagtttgaatgtaaaacccttgggcctggcctggcgcggtggctcacgcctctaatcttagcactttgggaagcccaggcaggcggctcacgaggtcaggagtttgagaccagcctggccaacatggtgaaaccccgtctctactaaaaatacaaaaattagctgggtgtggcagtaagtgcctgtaatcccagctactggggagactgaggcaggagaatagcttgaaaccagaaggcggaggttgcagtgagccgagattgtgtcactgcactccagcctgggtgacagagccagactccat

SEQ ID NO: 95081 - DNA, 1032 bp, Homo sapiens
gggacagggacttatttgtttagacttgggttcaatgctagtagtctgttttctcatctgtaaaaggaggacactaatgcctgtttagctactctctaaggcctttgtcaagatgaaatggcggtgcatgttaggttttctaaattagataaagcactgcataaatgtaaggtgatggtattttttatcacggtagataagataagaaatgaaggtgggagcaaggtagataagtgaaggattttgattgtcatgtgaaggtcagtcttgttcttttcccatacagattgtgggacagaggaaggagtagtgcattaaaagttttaagcagagaaagggaacaatgaaaattggtatcactgaagcagattgttatggtagtatgtgagagattggtgcctgtgcctgtagcagggagacctgtagacctttttgctggaatgagcttgagcttgaaataaaaaggatctgaattagtcaatcgtcacaggaacagaaagaaaaaagatgccttaagataaaggcttattgttgagagagcaaggaataaagtataaattgcaggacagccagccagagtgctggaagaattgcaggttcttgtagtaaattgggcatctaggaggggagagacaggaaaaagaatcattttcagcttttgatgttttgaatttaaggtgatggtaggccactaggtagaaatcagaagtgggaaatactactctggggttcaggagagagaaattggggctagatttaagaatttcatagccttctttactgaagcctggggataggctagatttctaaggatgaaagcatagagaagggagaagtatgttcatatttagaagcaagagcagaggagtcagggtcagcccaatcagagagctaagaggaggaccctgcttgtgtattgacttggaagacatcttttatagtataatagcacttgtcatgtgagtgttgacttacttgtctgtctgctttaaaaatgtaggcttctgccgggcacagtggctcacacctgta

SEQ ID NO: 95082 - DNA, 1030 bp, Homo sapiens
aatgaattagtttattttagtccatttctctccaatataatcaagaggaagatagaataatagaccttttggtccagaaggaaatcagccgcaacagcctcctccccagccccctttcataatacctccaactgtggtctagaagaaagattgaaccatactacttgagatcatattacaagttaatgacaaagtcaggactagaatctagatcccatgactcatatttcaacccattttctactatgtatgctgctggtatgagagacccaaaactgcaggctcagagagaatttattagttcatcagtaccctgaggccacacttctgcaatggatgaaattttcctgtttactcttaagtttttcctgagataatgagtagtgaagttaggaatggaactttggagccagactgtctgagttcaaaccccagcctggtcacttactgtgaccttgggtaagttgtttatctctctgcatcattttatgaaataggcttaatgtttagtaacctcagagaatggttgttattagatggttttatatataaaatgtttggagtagtgcctggcatatggtaagcaatcatcattttagctctttttctttttttgagatggaatctcactctgtcgcccaggctggagtacagtggcgcgatctcggctcactgcaacatctgcctgccgggttcaagtgattctcctgcctcagcctcccaagtagctgggactacagacgcacgccaccacacccagctaatttttgtatttttagtagagatggggtttcgccatgttggccaggctggtctcaaactcctgacctcaggtgagccaccgcgcctggcccgttttggctcttagtaaccatcttcattttcttcttggatacagaaaaatagctgtctaccatccttataaatactttgcatacagttttaacgattttatttatatgtggtttttttttgttttttgtttttttcttgagacggagtctagctctgtcgcccaggctggagtgca

SEQ ID NO: 95083 - DNA, 1058 bp, Homo sapiens
gttcttttctttgagaatggaatttttatgtatgtgtgtgaaatgtgtcataacatttagaagagtgtacaaaagtatgtatctagtaaaaagagaataaaaccaacgtccacacatccactactcatattaagaaatagaacatctcggccaggcgcggtgctcatgcctgtaatcccagcacttacggaggccaaggcaggtggatcatctgaggtcgggagtttgagaccaggctgaccaacatggagaaaccccatctccactaaaaatacaaaattagccaggcacatgcctgtaatcccagccactcaggaaggctgaggcaggagaatcgcttggacccgggagccagaggttgcagtgagtcgagatcgcaccactgcactccagcctgggcaacaagagcaaaactcagtctcaaaaaaaaaaaaaaaaaaaaagaaatagaacatctcatccacatgtccatatccactaactggatctttgttttgataatcctcttccctttctctgcaggtttactcccagtatatccatttctatctgagccacatattgtttagttatgaaacatggaatagcaagcccaggtctcaccatgtgaggaaagagcagtttgcactattaggtggaagcccttagaagagaagctgaacagagtctgccttcggcttccccgagtttccaagagtctggagaaatcattgggcaaggtcacaaatgcaccttggaaactcaggacccaacatatatggagcgtttagcagggttattgtatggaccagcttggatttccagcacaggggtagtcagaggactgcccttcacttggcccacctccagctcccaggaacaggtcagagggggacactctcatggggtgaaatgagatcagctgaacctttttccttaaggcgagatcaggaacttcgacatcacttgggcaggaccagccaagtccagataagatacggggactgggccccaggtaccactgtgtcctcaggttacaaagaaaatgtatgatattgtgtgattttatgtatgtatgt

SEQ ID NO: 95084 - DNA, 1033 bp, Homo sapiens
gatgcattgttaatgaatattaaagccagtgtttaaaaacttttaaattttgtataattatactgtatttgtataccttggtttgagattcacatcaaactgtataagcactatccattttcctcattttatgtttatgcttagtcccttccttctttcttttccgtattaccgtatatcactctcagtgatacaaagacatcctttctcagagaaagtctcccaaagatcagttcatcctaaccaactgtttactgtacctttcagcttgcatgtcttatcacttcaaaccaaacatgtctaaaatcagactcacatgcctcctaaaccagacataaaccacaactcttttccgccagtgctagagtattctctatactttgtattaattattcctactcctatacagagctttatgtttgttgtaggtccctttattttaaaatccgtgaagaaactggagcagacataaagaaatgtaatttaacagttgacggtaggattttggaggacttgctaacattttaaattggttagcctacaaaacaggggaaagtgacttagttcatgtttgtggtgagtttttgagactggatttaggataactgctctatatgtggagaacattagaacaaagggacctgaagttatatttcagtgtcttagcgaggatttcaggaactgcttggtatgaagagttgtgtcagggtgagtctgttgtacttccccagctagaacaagtcatctttcatcattttcatatgtttggctttgtttctgtaggtctctatcccttagtcttcatactgttttaaatgcttatttacttatccttattccccatttaggctctaagcactaagtgggtactgcaagtgctcaaaaattttggttgctagaaatagtagtgttaagtcaatgagaaatggtcttaaaatatagacccagggcagatcttttcccacctcagtacaatgagctgtcatgtgccttacttgactgggaatctatcacaaatacatgtgcagacatt

SEQ ID NO: 95085 - DNA, 1123 bp, Homo sapiens
ttttttgagacaaagcctcactctgttgtgaggctggagtgcagtggcgcgatctcagctcactgcaaccctacctcctgggtttaagcaattctcatgcctcagcctcccaagtagttgggattacaggtgccagccaccacgcccagctaatttttgcatttttagtagagacggggtttcaacatgttgaccaggctggtcttggactactgacctcaagtgatccacccgcctcgacccccgcaaagtgctcagattacaggcgtgagccactgcacccagcctgtatcagtcattttaaattattttcatgtggagtataaatcagagtaatgaatccagcacatggctaaaacttcccgtatcattttactaagtcatttctagtcattttggaaaggacatatgaggttaaatgagcacctgaaacattcataaaaatgaaatcaagagtggcctttacaactggtaactaaagatatttcttttttttataggtgtcagctgtgatgcatgtttaaaaggaaattttcgaggtcgcagatataagtgtttaatttgctacgattacgatctttgtgcatcttgttatgaaagtggtgcaacaacaacaaggcatacaactgaccacccaatgcagtgcatattaacaagggtagattttggtaagtaattaaaaatttaatgaattacatcatttagaattttatgtacgttgaagaagtaaaggcaaagtgttctaaaactccccagcagcataccataagccccaaattcattaaacatgaaataaatcttacttttttttgagacggagtttcgctcttgttgcccaggctggagtgcaatggcgcgatcttggctcactgcaacctccacctccctggttcaagcaattcccctgcctcagccacccgagtagctgggattacaggtgcacaccaccacgcctggctaatttttttgtatttttagtagagacagggtttcaccacgttggccagactggtctcgaactcctgacctcagtcaatctgcccgactcagccgcccaaagtgctgggattataggcgtgagccactgtgcctggctttttttttttttttttttttttttttg

SEQ ID NO: 95086 - DNA, 1026 bp, Homo sapiens
ggatattacaaatgtaaacaggtacctaagcactccttgatcacgtgacgttgttgaatattttaggcacactttcttttggagtgcagtggcatgatctcggctcactgcaacctctgccttccaagttcaagcgattctcctggctcagcctccggagcagctgagattacaggcatctgccaccatgcctggctaatttttgtatttttagtagacacgaggttttaccatgttcaccaggctggtctcaaactcctgacctcaagtgatccacccaccttgtcctcccaacgtgctgggattgcaggcatgaaccactgctcctggcccacactttcttttttacattattgtatcgtacgattacatttttatatgtttaaaaactaatattcctcaatgcaattctaccttatttttcagatttatactatggtggggaagctttctctgtagagcagccacagtcttttacttgtccctattgtggaaaaatgggctatacggagacatctcttcaagaacatgttacttctgaacatgcagaaacatcaacagaagtggtaagtgaagcagcaaccttatgactaaaatgatgttgtaaagtatattatttctaacattaataaagctaggtcactgtcatctgcttcctgctcagtgtaatgataccgtttgcatagttattaaaatcatcttttaacagcaaattttatacatcatgggaggctgcatttttgcaaaataatacctcttactgtccacactgggtttcttaacctgtagctaaacccacagcatggagtcttgaccaaattcaggagccctttattcaatgcattgtgaaaggttaaaaggatggcaacctgcagtgcatctcttgttatagtatccttgctatctgcttaacttttcttctacaaggaacttcacaaggaaatttaaaaacctttggtagtatcataataatccattgtcacatctcattgtagcatatcgctgatcttacctggttttcatcag

SEQ ID NO: 95087 - DNA, 1064 bp, Homo sapiens
actcctcagttttccacaaccttgcctctggttggtttgccccatgcccccccatcccgcccctgaaagtaaatactcaaaatttgttgtttacactctggcatacctgatacacagtttgaaaattaaatacccaccacctacaaatgctatcatggtctgtttcttgtgagttgtgtttatgccttcattaagtttccaggcttttggtacatagcccaaggcagttgtcactctattttcatattggtttttgtggaatattttaaggatttatctctcctcattagcccttaatctttgcatgagtactatatctacatatgttcccacccatacacctagacatttcaaagtgaaaaatggcaagcagataagaatctttaatataaaagtacaggatttcttcaggtcatgtgggtcaagtcctagaggcagggctggcattcagcaggtacagccaagtgtagcatgctgactagtgtccattctgaaggattggtgcctatgccataccagttgttaagtgttttgaatgcctctctgcatatatgtgaaacatactatcagctccagtgtgctacagttatatgtaaatgtccaggtgatattactgtgtgtcccctctcacccctcaatgttttgcattttttaattagggaattcaagagtgatttacatcattttggtttaggggattatatctacacagcaacttgctatatatctccttttctattcctcttaacatattcctttctaaatgctctgtttgctatcttgctttgccccacgttacctgcatgtgtcctctagaccagggttccccaacccctgggccacggacgggaccagactaatacccgtccatgacctgtttggaaccaagccacagagcagaaggtgagcagtgggccagcggacattaccgcctgaactccactccctgtcagatcagcaacatcattagattctcacaggagcgcaatcccttttgtgaactgccttctgatttctttggaattatttttcagtgtagctaaattatattaatactatttcaa

SEQ ID NO: 95088 - DNA, 1385 bp, Homo sapiens
ctctccttccctctgtttcaccaattctgttaactatagaaaccaccttcccaacctgtcacccgctccccgaactgtgactgtgtacacaccattttattcctactttctcccatctcttgccaagaggcccatggaaagttgttctactactccttgagcctgacctggttacaagcttctggcctaccaccccatttcttcaggaaataaggtttaaaaatgggcttccataccatattccccttggaagtcacattcataaatttatagaccacatttgcatattatcagtaatcataatttgtcttacattcaacatgtctgttgaatgtttgcacagttgcatttaatcagatctctgctgtcttatttgggaattggctctcaagtatagcttgctttggagaagtgtgccataggcttgtatctgtctttaccattcaagactggacttacacgtaaatgtgcactaaatagcacattttaaagttttttttaatggaaactattttgctagaccatacaaatgaatcaggcaggctgttagaaggccctgccagagatcaagtttggtgtgtctgaaactgttgtgtttgaccctgagggaccttgtgtgaacagttcttgcttaggtttctactgcttttcactgatttaggatctgctgtgttttctgttggttaaaacttgataatagtaaaacttacagcagaatactcgtccagaaagatgtcttattgacgttcatttattaagctgctttctttacttccatttcagatttgtccaatatgtgcagcgttacctggaggcgatcctaatcatgtcacggatgactttgcagctcatcttacacttgaacacagagcccctagagatttaatatccttttaagagatgacaaggaaaagagttgtttgtaatgtttgtcattttgattttttgttttggagacaagatctcgctgtgtcgacctggctggtctcaaactcctgagctcaagtgatcctcctgcttcagcctcttgagtagctgggactataggcacacatgtgccactgcatccagcttgtcattttgattttttttaaggatcatatcccccaaaagaggaaaagtaatgtccaaattatttttacttatttgaacttttcctaaaagtgactcagtgctgagatgcaatttatttctctttttatatactatcaccattgtatgaaccattttcattaagtgaaagttgacttgtccttcatctttagttcattacaattagattttttttaaggcagtttgaccaaattgtgtcttccaggatggcgttttcatacaaaagaggaaaatgttaatccaaattaaaatttaattagttaaatatgaag

SEQ ID NO: 95089 - DNA, 1026 bp, Homo sapiens
agtttgacttacactcagctgtgtaagacggttgaggctgctgggaatttttcttcgtgataaatgtcatgttaatctatctgtgtgtcttatacaagaaatgcaaatctgttttctgcttagcagcggcattggaaagaagcttgaagacagagtaaaactaataatccaaaaggaacctttgatgtgctgaatatacattcagtattgttcctttttcattataggtggtatttgagatttcatgagctatatagagaaacttttttacctcacacacccaatacacacacacacactcacatgttgccttacatttgagtgtctttttagggttaatagccctcatagatagagttgggacatttgcactttaagttaaatgtgctgtttttaaatgcttacaattcaggaaatctttacatctgtctagcaaggactcaggtgattttttttctttctgtgaaatactttcgtttttttcttaacttttgggttatgatgaatcgagtggtgttcgacatgtacgtagaatgtttcaccctggccggggattaggaggtcctcgtgctcgtagatcaaacatgcactttactagcagttctactggtggactttcttcttctcagagttcatattctccaagcaatagggaagccatggatcctatagctggtaagttagtttcacattaataagggaaatggcaggggaaggaggagctccttttaaaactttttgtgatgccaggtgcggtggctcacacctttaatcccagcactctgggaggctggagcgggtggatcacttgaggccaggaattcaagaccagcctggccaacatggcaaaactccatctctactaaaaataaaaaaattagccagatttggtggtgggtgcctgtaatcgcagctactctggatgctgaggcatgagaatcgcttgagcctgaaaggtggaggttccagggagccgagatcgcaccactgcagtccagcctgggtgatggagtgagaccctgtctc

SEQ ID NO: 95090 - DNA, 1033 bp, Homo sapiens
gcaacagtgagcaagaaaacaaactgttaatgagttttaatgataaagagtttttgctggcctgaaagtgtctgcaaggcagtcatcgattccctataagcgaggtggaccctccacttggaagaaggcatttcactgtaccttacttagatgaggatgcggggacaaaagtttacacctctcttaatgagtacagccttatggacacaagacagtctggatcataacaggccactaagtaggctgtacagtcagatgcagcaggttctcaggagccagtcagccttgctgagcactggtagtggtatctactgcagtggtactctgaaacagcagtaccagaaggtactagagggagaaagcagaggcagagagtgtgcaagggccaccatcagaaatgatccaggcctcttggactgaatcctaataattcattcagtcattcagtaaatgtttgaattcctgctatatcaggccctgttctgatagctgggaatatagtcaacagtagacctcatccctgcttccatggaacacatattgagagagcttatattataattgggcccacagataaaccacttcattaaatactaagagaaagcttcactaaattagtctattatgcaaataattttaaagacaatttaagttttacttcaaacataattcagtctgggttaatattcgtatgcatttgcattctctgtccacagtaactcctgccttcaggaggcattctagaaggattcagctcttaaactgtgtgctgtggtggttacctacctgttcacaatgcttttgatgttgttccagtaaaagagtgatctgtagcgttttgttttcctcagtattaagcagacattaattgtcttcatttccattggcagagcttttatctcagttatcaggagtgagacgttctgcaggaggacagcttaattcctctggcccttccgcttctcagttacaacaactgcagatgcagctgcagctagaacggcagcatgcccaggcagcacggcaacaactg

SEQ ID NO: 95091 - DNA, 1388 bp, Homo sapiens
tctttttatttacccccagatgaaattctggttagatactttcccaagcatctaatctgtaagaaatcctgttttccttagaaaattttcacctagctttctctggagtggaaaaagtctaaatgtctttttttttctcattgagtctaattaaagcatagatttgcacctccaggtaacagtattgcaacaagtgtggggaattcgtctcaacacaattaaggataaattacagccaagtattccagcaatgtctcattctgaattttgccacctgtaaaacttcacagtggagagcactgtagaaattggccatgccattgttcattgactttttaacaataaggtcttttctttttaacttacacaggttgaatgatcctaaaatgtctgaaacggagcgccagtccatggaaagcgagcgtgcagaccgcagcctgtttgtccaagagctccttctgtccactttagtgcgtgaagagagctcatcctcagatgaggatgatcggggggagatggcagattttggtgctatgggctgtgtagatattatgcctttagatgttgctttagaaaacctaaatttaaaagagagtaataaaggaaatgagcctccaccacctcctctttgatgacatcccaattcgcagacaatgtcctctgtgctgtatttgccaatgaaagtggacaacaactatcttgggtttgtttggtgattgtaatttcaggtctgtcactcttgttacattgtgtacattcaaaaggaagagagaaaatatatatgataatcatttccacttaactaatttttacttctagcaggtaaatgtaggtagcagtgcaggggtgatctctgcttcctgtaccttgacatgcaaaaggctctcctaatactccacattcaaactgaagaggaaaattgaaatctctaatgaagctgctgtgtgtatttatgaatattaatgaataaaaactgcttggatggtttaccttaactactgcatgaggttttttgcagcgtgcatgagttttagtgaccttgttatttaagaagttaaatacaaggagtaaaacttaaaaaaaaaatacaaagcccaaagctttcccaaacattattcaatggttacacgacgaagtagcttttgaataatgtctgcctgaatcacctttctttgtgtgcctcctacgcacaaagccagctctgcagtggaatctggggattatagccgggtgtggcactccgccctgtgtgactgtcctgtcgccctgttagtcatcttgcctgtgtggagctcagcctgtctctttaactcatctgtagaagacacaccagtaaagctactgttggaatctgctgcaggggcctttgtgtgccctaaaaacaaatc

SEQ ID NO: 95092 - DNA, 1527 bp, Homo sapiens
ttgttaaatatgttttattcaggtgtagatgaatttcatttattgactgttcaacagagttaacctgaattatgttgtctttgtttttaaaaatctcacattctcaatcatattttgcattatttatgtatttgctttgtagtttgctgagacagatcagtatcaggggagctttgaggatttgccttcccagatttgtcagtatattacaaccaaattcttaatgctaattttagcaccttttatttattgggttttttctggcataaaaagtaaagccttttaattgaatcatgccacctatatgcctatattattaatcctatgtgtaaaaaaaatgtacagctttttttgggtttgttttggggtttggaagggccgggttattttttatttcctgtttcagtttttgtgcatagactttcacaatagctccaaggcagggacagcgggtttgggggttgggagggcagtttttggaatgtaaatttaggacttttaaaaaggtgcgcacagcttctgataaatttataactagacttaacctaatcatgtctcgttccagttctcttttctctgagcccttttcaaagtctcctctctttctcctgtcatccttttcctttcctgtccgtgtatctccgtttcttcaacatgacaagcatacagacttgaacacccctccggtgttcttccgagaactgtgaagtccatgttcatccaaatgtaaccaaaaaagaagtcaccctacatgtctgaaaaactgttgcttctcctctgaaacttcaaactccaacgatttccaaatacaatagctttgttttctttagttctgtaatggataatgtttaaaggaaaactttacaccaggcttctggttacactagaagtcaagcccattagggattttcattttttttcatttggttgttgagaagtttcaaaaatcagttttcaagctgtggtctttcaaacacatctgcacataagtcacacatttcaataaagcattttcaagactgttgaccacttgaatttctttggtgttagtggattaacctaaccattactctgagattttatatctctaatccagtattttttttctttttatgctaaacatgggagatcctggttttgtgtgaatgcattattttggatgtgagaaataaatgccaattatatgtactttcccttttctgcacaaattctgggaaaatgtaaaagccttcattttttaacatggttttagggaacaactgtaagtccattcagagcagtttaatttagatgatcacttttaacactgcagaagacctaaggagtcataagattccatctcatgtagaatactgtatattaattattttttaccagatattttacaaatacctcacctcatcctgtatgtaatcaataatgtattattttagggtagaacgacacagaatatcaatataaaaatatattcaagcccttgaaattcttgtgtcctttttctttagtttctgaatgaaaatcttatta

SEQ ID NO: 95093 - DNA, 5790 bp, Homo sapiens
cgcggccagtatgtgcgtccgaggctttcccgcagggggcagtgccgcccgcccgcgcgccgatacggtgggagggggtgggaacctgcgcggagttctggaggttctttgggagaaagttaggggatgcggaggggtgggcgcaagacttccaggactccagggaggccgtggggagggccgccgagggtgcagtgtgaggcgcaggagggggttgggggcggtgcacgttgcagggagacgcagcccctggaagatgcgagtgtgaacgtgtgagtgtgagtgcgtgtgtatgtgtgtgtgtgcgcgcgcaccgcagctctccgggttccgcgaggcgcgcgggtgtcagcttgcagccggggctcctccctccggcccccctgcccagcccggcggtccctcctccctccctccccgctcgcccctccccggcgggccaggggctgggacgccccggcggagcaggcggcggcggtggcgagttggggagccctaggctcggcgctgccggaggggcccgagccgagccgcctgcgccccggccgggcagcgccgggcccgcttcccgcggggccacgccctgtcaaactttgttgcggcggctagcgcagcgggcccgcaagcgggcgggaggggcgccgggccgggccgggcagggcgcgggcggctaggggctccgagagcggcggccccggcccgcggccccaccatgccccagctcggcggcgggggcggcggcggcggcggcggcagcgggggaggcggcggctccagcgccggggcggccggcggaggggacgacctcggggcgaacgacgagctgatccccttccaggacgaggggggcgaggagcaggagccgagcagcgatagcgcctcggcgcagcgggacctagacgaggtcaagtcgtccctggtcaacgagtcggagaaccagagcagcagctcggactcggaggtaaggaagcaccgcggccacccccgggggatcccggccctgcgtccgctcacccgctcttgcctttgtgtctcctccgcaggcggagaggcgcccgcagcccgtccgggacactttccagaagccgcgggactatttcgccgaaggtatgtgcccgctgggacagccccccactctcgattcccgctgcgctccgctgctcagcccgggcggcccaccgtcccccttgcttgggtggacgcacccttgccctccgcctttattggcggcagcccccgtggggcgcgcgtggggggcgctggggtccccagctcccgcctcgagccccctgccgcggcgctgtcagtcccgggggcctgggcctcacctcgccttggtcttgttcgcagtgagaaggcctcaggacagcgcgttctttaaaggacccccgtaccctgggtaccccttcctgatgatcccggacctgagcagcccgtacctctccaacggacccctgtctcccggaggagcgcgcaccgtgagtgcccgtcgggcgcgccggggagggtgggaggccgcggcccgcaggatgcgcccccgggcttggccatggagtgggggatggggccttctgcgccgatcccaagcagaacttgtttgcggagttgaactactctctggcggccgagcgcgaggctgcgctggccagtgcctggatgaaagtaaagttactttaacttttcccctcttgcgggttgaggttttggagtccacctctgggatcttccttggcctccagaattcttcgcctgcaccgaaggaaacttggatttgtgcccgctttgggggggtctcgctttccttcttggaaatcggtcagctttctctggcagtggggcaaggggcctagggagctgggttggcgacgttgtcctccgactccgggttcactgggcggctgcaggctggttcctaagaaacccagttttcgtggcgggttattcacagcccccgttcccacccccagccctcgcaccggggcctcagcttttctgcggagctagctccgaattttaaactcgcgtagatgatttcgaggcgacccaaggcattcttcaagttgaggaacttggctttttcccccttttgtcgcctgcttttctcatttaaagcgagcgctgcgacactttaaacctgttaatgggcgcgtattgtgtgctgcccgctggcatttagagcggtgattaagcaaattgaccgggccccagacgacgtgcaaatgagggcggattccttcgccccctctctctggctctaaactcccgccccccgcgttgcgaggggcgcagctgggggctggcgaggcctttgtgtcccccaagccgccactccacccctaggctccctgcccaggtgctgggtccgatgacagatgttgggtgaacgcctacctactgtgtgccaggttcccgcgtgctgctgcttgggcgcgatgtgaatcgtagtagttctttgcttcccgcccagattcccattgcctgccacttcgctgtcgacggtgggtaagggggcagggagtgttagcctcttaggagcagggtcccagcaacacactttatgctaagactgccctaaaataacgacgataattaaagggtgctagagaaaggctaggtgctgaatggccattcctgctgtcattgtacagcggtcggtggagagccaagtcctccacatttggttcagcgggggcgctaccatcaccagatgggttggagggggattgacggggggcggtggaagagactctgactgagagagaggggaatggggagtgggactacacagacctcacagttttgccccgagagggagggaggtcttgcagctttggccctgctggcctggagcaccccaggaagtcctgaatgtaagtgtcagttttgcagtgaaaactggatgtgggtctatggctgttgctttttctcattaaaagaaaagaggtgcgtgccaatcaaagggggggggggatcaacgagctgctgcggtcttatttaggttttcagtgattcccaccagtgcccacacatgtagcttagttctgcaagttttgttgggattcgtgtaactttgcgtatgggggagagttaatgccgctaaagtctcaggtttccatttactattaggatatctagagagaggggtctgggaggcactagcatctgtgcatcagccctcagccaagtcctgatgcagttaaagtcaccagaaatgactatttcaccatcaaatatgactatggctccctcaaggctatttctccatgcacccatttctctttagggcattttgattcatccaggctctgctgtctgctctctctgacagtccaagtgagacagatttttgttagtgtcccctccttccttccttctatcacattatgtgttctttcgcctaagaacttccaaaggctgattcttgctgatcctggagattcctgattactaaatccaggcccgtgtgggattttggagcccctccttgaggcagccaacctttcgtctctgcatgcctctctgactgtccttgttcatctctgcagttgttccctgccctggcccaggcaccagcctcctttcaagcctcctaggacatgtactttcttggggacttagtatgtcccatcccacccccatacctacatcttgtctccctggtgacttgcccttacagaagttagttcagttcccagtgtttctgtgtctctgtgtgcctttcgctgtgttagttcacggatatactggggaagtgtcctgcccttaggtcagcacagttaaacctaatttgaccctgttcgtttgctgccagtaagtaaagcaagtgaggaaacacttaagcacttggttgtctggactatagggtggagatgatggttttctgctgaacgattctattaatataattaagataattgtcactgtaggcaaatggtaggtacagacaaagtggccctctgttggtttcccagcctggtaaaatgaatgtggatagatacgagtggggagggaggagggaggaaagtgcctgggatatatgatccgatctctctgacatcttaggtcttttttattgtttggcctctaaactgcaccactttaggctttgctgctctaaggcctagaggtagtataaaattaggtgaccccagttatctgctgctctaacacttcctctggaaataccaagccagatgcagaagtgggaattgtctggattgttttcagggtgttaatgaaccctaggaatagcaggcaggaggcttcagcagcctcacccactggcataattcctgctgagaccactgggggctggcccatcctacagtctggccatctctccccatgagccatcacccttgccctccactctggtttggctgggatgctgggaagtggctttttcctgaggctctttagagaagaggtcccctcagcatgggatgtgggccaagtctctgtgagctgcaattgcttcttgtctggaggccctgggaccctgtgaagagaggaataactgccacaaaccatttttcaaataatcacctcaaaattatacattcatttctgaaaaggcttcacggtttactaaactactttggggctgttgcctagaattttgttaggaaaatgtaagttggctgggtgcggtggcttaggcctgtaatcccagcactttgggaggccaaggcgggcggatcacctgaggtcgggagttcgagaccagcctggccaacatggtgaaaccccatctgtactaaaaatacaaaaattagccaggcgtgctggcgagcacctgcaattccagctacattggagactgaggcatgagaatctcttaaacccgggaggcagaggttgcaatgagctgagattgtgccacttcactccagtctgggcaacagagtgagactctgcctcaaaaaaaaaaaaaaaaagaaagaaagaaaatgtaagtcaacacattagaaagtgaatgccaaaaatggtttaagacaaagaagagccaaaaagaaaatgttgaatgtggttcagcaagccagctacaatgtgatagaaagtaatttgactgtgaccatgaagtgagggctgatgacattttggaaagaaacacttctaggtagtattgctgagggagtctgtggtttttgtgtccatcttataaattacagaacctctttcgttcagcacaagcacacgaaaggctttgctttattatttctcagaccatctcatctcaggcttgtgtatgaaattgtcctggtcctcaaacgcgtgctcatttttaagtcctttatatcccactgcttcccatgggcagtcttgctcatatcctgggagctcctgttctttcagacccaaaggaacccaagcagaaatctttgtatgtatatgtatgaagaagttgtctgtttttaggagttgtatgtaaaagctaaggaaaccttttcttttggaagatcagtataaacatgctgcttttggtaaaattcttttgagccatttcatctaaatataacttctgtttcatttttttttctaaatataactcagagtttaatgagggcttttcacatggaacaagcttttgagagggcctgtgttgctgaagttttcgcccttggattgctggggtgatattggtgacaaactctgtagggaaggactgggaacctgtcaatcttttttctttggttgggtggattgggcagggaatagctgacttgatttgttataagtttggaaggttatagtttggtcacattcttcattgatcacacttttagggat

SEQ ID NO: 95094 - DNA, 2018 bp, Homo sapiens
attccagcctttacagtgatgtgcagtgttactaaaataattgggaaataaaaaagagtataaatgattaactcgctggaaaatcttttaaatcttctataataggaaggccctacttacattctaatttagagacaccttttacatgccaacctagggaaatttagatttacacttttctttttttttttcttttctttctttttttagacagggtctcactctgtcgcccaggctggagtgtagtggtgtgatcttggctcactgcaacctccacctcctgggttcaagtgattctcctgcctcagcctcctgagtagctgggattacaggtgcgtgccaccacgcccagccaatttttgtatttttagtagagacagggtttcaccatgttggccaggctggtctcgaactcctgacctcgtgatccacctgtctcggcctcccaaagtgctgggattacaggcgtgagccactgcgcccagcctagatttgcactcttaaaactaattcctaactcttaaacttcttcaactgaagtctattggatacctatcatgggcaatggctaagggaccatgggaaacaagataagacccaggctttgccctaaaggatttaaaaattaagtaggaaagaagtcatggtagcactgtaataagaagttaagaggtagtaaagtctggagaagcattttcataatagaaattgagaaaaattacttcctgggtgatccaagaaggcaggtcgaagaagtaggtttaaactggtccttaaaactcagtcattctttaatccaggtaattcttgttaatttagaagaatgtaaatagtaagaggaggcatttagagtgaaaaagtggaagtcttccttcactctcatcttgaggtgggagccaggaccaggagagtgaagacatggaggaaggaaaagttcagggcgatttgggggtaatgcagcttatttcagttccatttgcctggaaggagaaggggccaggacatgggctaggggacctagaatgccatggaaggaatctgatcttatttaagaggcagcagagaaccatcagaagttaggctgggaagtgatgtgacttgtacacatggctagaaagataatggtggattggaggacgaggacctggaaggggatagagcaattagactcacaggagtcaggggtgaggtgaaaagggcttcagagtagcagagtggaaaggaaaggtgggatgggaggaaataggattcttgtctgtacctctttggggaggggaggtaccagatccagaaagtggctgatgtcacagttaattcctggtgtccaagctcaggcacctggagactgacttctgtgggtggggaggcctccccagtctctacctccccagtggtggacagatgcttactgaatattttggcgatgacagagcccacacagtctatgagaggctctcattgggaggaaccctcggtttcattggagacacgttaggtgtgaggggatgttgaggggatgattgaaactggctgatgtaagagaggtatagaagtaggagaagggatgcttagagcagggacagaagtcgttggaggaggatggaagggagcattgggtaaggtaggagaagcacttagggactcccctccccctttcttttcctccatggtggaagctggagggaaagaaagtgggaggccaggtgcagtggctcatgtctgtaatcccagctctttgggaggtcaaggcgggtggatcacctgaggtcaggagttcgagatcagcctggcaaacacagtggaaaccctgtctctactaaaaatacagaaatcagctgggcgtggtggcaggtgcctgtaatcccgggtactcaggaggctgaggtaggagaatcacttgaacccaggaggcggcacctgtatcccagctacttgggaggctgaggcaggagaattgctttaacctgggaggcagaggttgcagtgagctgagatcgcaccattgcactccaacctgg

SEQ ID NO: 95095 - DNA, 1098 bp, Homo sapiens
cagatgctgtggcttgtgcctgtaatcccagctactcaggaggctgtggcagaaggatattttgaggccagaagttcaagaccagcctgtacaacattgcaagacccaatctctaacaaaattttaaaacttgtccgggcatggtggtagctcaggagttcaaggctacagtgaactatgattgtgccactgcaccccagcttgggtgacagacagtgagaccctgtctctaagaaataaataaaaataaaaaataagaggagcttttggaattcagctattaggaagttactggtgcccatggagggaagtgttccaggcaagtggtggtgttaaaggtagagagaagagacattagctcagtgcttcccaaataggatagccaaggcgccaagctgcagactgatctcaggtgtggcccagtgcctccccctcagctggaaccccagaccagactcctgcagtttcaagcagcctcctccttctatcccggtgtaccttccatatctcagtaccaccacggggaacctcaaagactcgacaacccatttcaaaagcctggctatggaaagaagaggaaagggaggagccgcaagtttgggagaaagtgtatttgggatgctggagtgggagcctgtttgtaggagccatagggcaggcttgaagatgaatgggaaagaagatgagaggaagaggaggtgagactgagagcttcaaaagcaggtaggcttcttacttcatccgtggagggtgctgtatagtaggtgtccccccagctttaaagacgagcccaagacttgaagatgaggttgtaggggaatgcagaggtgagttggcagaaatggatagtgtgcattggaggaccagatggcttcttggtattctcaggaaaaccaagggcaagttggctagagtgggggccttggaattttgttggcagtagggagactgcaggaacttcctctccatcctctcataaagcccaaaatgttgggaaccttttagctacatgttagataatgaaatgtttgtgtattgattgaaaggaagacatggcacacctgggaaattttccctccttttattatctggagctgg

SEQ ID NO: 95096 - DNA, 1081 bp, Homo sapiens
ccaaggcgggcagattgcttgagctcacgagttcgagagcagcctgggcaatatggcgaaaccccattgctacaaaacatacacaaacttagctgggcatggtggtgggcaccagcttcttggaaggctgaggtgggaggatcacttgagcctgggcatggaggttgtagtgagccatgatcacgccactgcactccagcctgaatgacagagtgagaccctgtttccaaaaaaaaaaaaaatgtgtgtgtgtgtgtgtgtgtgtgtgtgtgtgttgtgtgtatatatataatatatatatatatatacacacacacacaacacagacacaatttgtgtgtagctaggggcagatattgagatattgaagtgataagtaactggggatggggaagtactggtcacttaagagcatatagaaaaccgtcccagattgtcttttctaatctatttttggaggaggtttttatatatcccatgttttatattatttctcccaaaccggattagatatagtgaacaataaaataaatgcagtttccaaaaccttggtgttcagaaatgaagggaaccatgaggggagtgaaggggacttgccctttgctctgtgctgtatgcactgcccagggaacagccccaggacacttctatagtttctttctgagactcacaaggtgttagcaatgctctgagctcactcaattgacagatacgtttaaggttctcaaataaatttcaaacttctaaatttttccttttcattgtgtgcataatgtacagattaggaaaatgatcttctaattgagaagtatacttcaaagtttggaaataaaatcataaaaatgttttcctaaacatagcctttttcaggagtttttgtggatatggtcaaaggcaatagctctaattatctggggtcctcaggacaggaaatgagctcacactcatgctctcaaactgtgtcacagcatttttggaaatattttcatttctattcaagaggaggaacaaggccccaagtgttcaccctaattgtagaaaataaacataaacatgaaattcacaaaagaacaactataaa

SEQ ID NO: 95097 - DNA, 1324 bp, Homo sapiens
aagcacttggcaatggctgctaagactttagtgtttttcatagcttctaacctgctaagaagtagatacttgttcccattttgctgctgtgcaaacagacttgtagaggtcaagtatctcgtacaaggttacattgatggtgattgatggcgccaagatttgaacttggttgtgagtccaaagtctaggtctcccattctacccatgtgattttacacacatgcctgatataattagctcctcctcctctccagagaagggcagctgacctttgtttcccagttcagaaatcctggtgtgagttatcagctggggttgagggtggatagatttgttccaactttacacattggacctgagaatgtactttcctgaataaacagttgtagaagcgagtgacagttgtggttgaagttgttcccccagtgcagtgccccagaggggttaatgacctttcgtgggctgtcccaggaacttcatccgaggaaaaggtgcttacctgctaacatttgacctgtttggaaattggggattgtttttcctcattgaaattggtgagggttggaagaatacgcaaacgaatgtttggtgtggaagaacgctggaggagtaaacttactatactcacaatttggattacaacatagtttggttaacccagctctggtgaaccaaatgtacaagtattatttccttatggttcatcttataaaatattttataaattggttgctttctttaagctctccacaaatgaaaaatcagtcccaaaaatctataaaagactatttcagcgttaattgaccattaaggaaatacatactaggctgcatgtggtagctcacgcctgtaatccccacactttgggaggctgaggcagacagatagcctgagctcaggagttcgagaccagcctgggtaacttggcaaaaccctgtctctacaaaaaaaaaaaaaaaaacaaaaaccaaaaaaaacattagccaggagtggtaacgtgtgcctgtaatcgcagctactcaggaagctgaggtgggaggattgcttgagcccaggctgttgaggctgcagtaagccaagattaccccactgtactccagcctgggtgacagagtaagaccctgtctcaaaaaaaaaattttttttgaacaataaagaaatacatactaaacatttacacagttattttgggaattgcagaggggatatttgtcttctttcccatccccctttctctctctctctctgtgtgtgtgtgtgtgtgtgtgtgtgtgtgtatgtgtgtgtgtgtgtatgtatgtttaagatggttagaaatcatgaa

SEQ ID NO: 95098 - DNA, 1225 bp, Homo sapiens
cattcccttgtctatcagttataatatttttaaaaagagaaactacccctcaccaactctttagttacctcagatcagaggtcagcaaactagagtctacaggctgagaccagtttgccacttactttgataaataaagttttattagaacacagctatattcatgcatttgcatattgtttagggcagctttggggcactacaaggtgcccagttaattagctgtgattgaagccatatgtggcccaccgagctggaaagattttctgtcaggccctttgcagtaaaaatttgctgacccttgttttagatcatatggggaaagcaatttaaatgcctcattctttccctttatataccagtttcctcctggtttcatggcaccctgtaaaggtgaccaatgaagcttaaaatattatgaaatagatttaaacctacttaatgtctttcaatccatttgcaattattatccttattgatacccaaactgtcccatctttagccagggggagcctcttcaggctggcttctgagtccttgtgacacaatcctggtggtcttggatgcttctctgcttactggtctggcaggatactccagcacaccttgtacatttcttgtcccaggccaggagctggccatttctagaagaagctctgtcttcttttagtggagaatgttacttacagaccactgtctgaaccctagggttgcatatatagctactaaaggttattgtgtttaatgttatgagtgcactaagcagttctgtagcgactagaggtagaatataatatgcctattgtaattttaaaacaataagcatttatttgctctaaaaggatataccattctctctctctctttttttttttttttgagacagagtctcactctgtcaccgaggctggagtgcaggggcgcgatcttggctcactgcaaccccagcctcccaagttcaagcaattctcctgcctcagcctcccaagtagctgagattacaggcacgtgccaccatgcccggctaattttcgtagttttagtagagacagggtttcaccatgttggccaggctggtcttaaactctagacctcgggttatctgcccatctcggcctcccaaagtgctgggattacaggtgtgagccaccacgtccagcctagtctctttttttaaatgtactcttaatattggtgattctgttcatcaatccccctacttaat

SEQ ID NO: 95099 - DNA, 1753 bp, Homo sapiens
gtgcctggcacacacagcaagggttttgttaagataaactcattatctgttttagtggtcctgggtttcatgatcttgctagcctttataaatttttttttttttttttttgagatggagtcttgctctgtcacccaggctggagtacagtggcacgatcttggctcattgcaagctccgcctcccgggttcacgccattctcctgcctcagcctcccaagtagctgggactataggtgcccaccaccacgcccggctaattttttgtatttttagtaaagatgggatttcaccgtgttagccaggttggtctcgatctcctgaccttgtgatccacccacctcggcctcccaaagtcctgggattacaggcgtgagccactgcacccggctagcctctataaaatttaatctctacactgcactattcctaggacactaacttatgtttaattttggattgctagttttctagaatacatattcttaagtatgttggctgtcatatttctcttttgatgatcattgtcgctaacaccattctttgcacacaaagtctgccttctttctgcatatgtgtgaatatctgttactgttgatttacatttccctcttttttatgcacagtatgtaataaaataaacagcaaaagctgtcttcctcttagacattttaggttaacaagggaaatcattgttcacttcgggtatctttccatgtgtaatttttgataagttgattactggtggttgttcatttttattttgctttttatggaagttttctcaattcgtcccagaattgaggctgtacatcctttaaaaataaataaagccgaggtctgtgctagagttagaacattgaatctggctcgctggtttgtgctatggactttccttcatctgtgttactgggagtatgtgagcagttgtagaggccatatcgttttataggcctgtgccaaggaaaatacttgagaattacattagcaactccaaggtattttggctgctctgagaggacacatgatagttttccagttatatgaacaagagcttttgttttatactgaagtttcttataggctatgagaacaatagtgcctctttaagtacttcccagagtaacatccttgggatgttattaggtagaacgtgctgggcttcatttctgcaggacttctcaggcctttaacatgccagtgaatctcacagaagggagtgtattatgcaggattccttgggtttgtttgaccaaggctttccttgtgtttggaatactacccctccacctactccccgtcaccccatgcgtaagtctcacctcatacttccctgcctcccagccttagatgtggtttccctgctgtaagttctcagctctctgtacttgagcacatttcactgtcggtaaatatgtggcctaataatgatctgatcctctggatcttaaactcactgaagaaggcaggcagtggatttgttttgttccttccctcctgtgttctcagcaccagatataaggaaggccgtcaaacaagtatttgccgtccaagtgagtgaggcacccatagaactttttttttttttgagacagttttgttctgttgcttaggccagagtgcggtagcacaatttcagctcactgcaacctctgcctcccgggttcaagcaactctcctgcctcagccttctgagtagctgggactacaggtgcgtgccaccatgcctggctaatttttgtatttttagtaa

SEQ ID NO: 95100 - DNA, 2291 bp, Homo sapiens
tggggcagggactggcttggaaaccagattcacccagcccctgccatgtggcaccacctcccccagggccatgctgacagcttgtgtaagcctgagggacaaggcagtgaagatgctgaactggggacccatggggttccttccaatagttgcattctgaaactccagtttggaaatggttaataatgcctgaaccttgtccctaagaggccctgagctattgaacccatggggttttcgggtctgcagccattgcttaggaggcctctgggtgaagagcaagaatgatggtggccaatctacctgcaaggaccaggggagctgggtaggggcaggatggaggggccctgactggctctcctgccttcccctcccctcctctccctccttccctccttaagggaggtctcggggttaatgcgaggtgaggggcagttagtggtaattgttcatcatttgtgcagatgggggcatggcttttagaggtgccttctgggatggagagagcctgggaactcagaatgctacatggcggacagaggaaagcaggcatttccagggaaggaggaaggactggagttgctcctgggaaggtcagctttacagactcctggccatagtggtgtaaggtgctagctgagtgggcagaaggcggggcaggggctaggagagctgacagcaagtgtggtgcatggccctcaacgtccaccccagtctagtccaggactcctgctctggcttctgcagccaaacccaaacggactggtaaatgacttcatttaacttcccgtgcccaccagcatggcactttagaacataggagacccagtcccctctgggagtcctctctctcccctctccttttgggtctggtgtccaggagaccatgcacatgactccgtgtgaagctgaagccagtccagaactccgaggcccaaacccctgcaggctgtcttagtgcttattcaatgtattttgtcttggggtgatatgagcctgtttaaaaataatgtctgcccaaactcttgcctgagagaggttgggggcagaaagaaagctcacatttgagtcctaagaaaagtcattgtgtctctattgccaaaatcatgatagctcaggtcaggttagtttcggaggtgtgataaagtttttatctcttttggaaaaaaactcccgggattttctatcgtggacatatctttcatctacatgtccagctttaagaaaatgtgattatgcctctctgtaagtggataattgagcagaacagcatgctaatttctctctgtcaggccttggttgaaggccggccctttggaggtggtccaggccctgtggccacagctcacctactgaagggcctcctggtactgccacaagctgggacccagccacactttctgtttgtcctcggaaggtttgctccaccctaaggtagatctctgttactgaagaatgtgtctttaaatctacctgcatttccatgtctggttacaaattgtcttaaccccaggcaagttgctgtctcagagttggctgcgaggatgttgaagcataacccggctttgtggtagaggagggctttgtagcaccgtggacagtgcggttcagccttcgatcaataaatagaagcaggctccagcttcaggaaaaggggagtcttggaccgagagagattggcgtttgagacaggaaacacttcctggtgttcctgcagtgtctgcggcttcttcccagccttttaggcctttcctagggtttacagaccacccctcgagcctgtgttctcctcctgatggtgcccaggcgcccggggctccctgggcagaccattcacttcgggaacctggtctcctgctcagcctgcagcttctgtaggtttagctgtctgttggttgctctgggctactcagggaccagttgtgcaggcactgtcctcttttggcctttcttccggccttaccaagttgtggtggttgtctgcatgcccagtgaaaccttctgcagaaaggaccaggaagggcacacattggctgcctgcacttgggaagatctgagggaatgtgaaaggaaacaggttggcagttcctggtgccttccagaccagtgcctgccctctcctttgcttgtggtactggccctttgacctactggagatgggagaagccccagagaaattcaagatcgccttcaggcttccttgacccaaggcctgtgggaaggcttgcgccctgggatgcttagggtgaagtgtaacatctggccttctccaagtccctctcacagcaggc

SEQ ID NO: 95101 - DNA, 1065 bp, Homo sapiens
caccacaatcagatacagagctgttttatggaacttattttaaaacttgatcgggaggcaaatggcagtgagtttgcatcagttctgttaaattgtcctttagcctcaggtcacagtggtggttgtaacatctgcctcctgagtcacctgtctggtcagccttggggctggaggtagagatttgactgtagggctgagccccagagtatttggagtccagtgctaggtgggctattatttacagggctcagcctggatctggagcactgcagcaggagtcttgggtgccagtggcctcttgcttcacaggcacaagcactctggggctagaccttgggagcagagtatgtttctctgggctggagagcaggaataatgtgagtgaggggcagggcacaagggcaccagctgagtcctcaggggttcagagaagagctccaggcctcataggcaatgaggggacaggtcaggaataaatagagatgccctgactagacctgggtggcgtggtaagggttgtagggtaaggtcttagcctggtgggcatgggggtacccaggagccctgccctatccttcccatgcacactggaactgactgtgctgagtacagtcagatcggacatcactgctgggcatggcttcctacagcctataatgtgagatccgattaccacagtagatgggaaggcatttgatacaaatcccagagcacactcaaaaactaaggtggtggttttgtcccaaagctggtcatgggttgattgtctctttagcacctctcagttgaccaggacatctgattaagtggaaagctacattctccaaccacaaaagataataatgttcatactgtgtctgggttttatggttttagatatctggcaatgctggtgcgtgtatttttttcttttttcagacggagtcttgctctgtcgcccaggctggagtgcactgacgtgatctcggctcactgcaagctctgcctcctgggttcacgccattctcccgcctcagcctcccgagtagctgggactacaggcgccggccaccacacccggctaat

SEQ ID NO: 95102 - DNA, 2081 bp, Homo sapiens
gaatatcattcagctttttaaaagaaggagccaggcatggtggttcatgcctgtattccccagcactttgggaggttgaggcaggaagatcacttgagcccagaagttcgagaccagcctggccaacacagtgagaccccgtgtctaagaaaaatacaaaaataagctgagcatggtggcacatgcccgtagtttcggctactcgggagactgaggtgggaggatcgcttgagcccaggaggtcgaggctgcagtgagccaagatcccaccactgtactccagcttgggcaacagaacaagaccctatttcaaaaaaataaacaaggagaaggaaatcctgccgtttgtgacaacaaatggatggacctggaggacatcatgctaagtgaaataagctagtcacaggacaaatattgtatgattctgcctgtatgtgggatcgaaaatagtcaaacttaaagaacgctggttgccagggaatgggggaagagggaaatgtgttgttcggtgggtgtaaagttacagatatgagatgagtaagctctgcagctccgctgtacaacatagtgcccatggtttagagttgggcacttacaactttattaagagggtcaatctcatgttaagtgttcttaccaaacacacacacacacacacacacacacacacaaagggacacaaggaagcttttggaggtgatgatgtgtttattaccctgaccatggtgatggtattatggatgtatgcacgtgttcaaactcatgaaattatctatattaaatatgtgcagttttttggtatatcaatcatacctcaacaaaattgtaaaaaacaaaaaaagagtaagtgtgggaacagtgaagatggagaaggaggggtaggggtggtttaaccaggcaggccctacactgtccctgagggggacacctcaggtggtgtgggggtgtcggggagtcatggagctgggtgctgccgagtctgagcaccatccacccaccgcctggtagagctgcgtggactgaacctgggacaggctatcagaggagggccacaggtccatctgtaaatacgactttttttttttttgagacagagcctcactctgtcacccaggctggagtgcagtggtgcaatcttggctcactgcaacctccgcctcccggaatcaagtgattctcatgcctcagccttctgcgtagctgggactacaggcacccgctaccacacccggctaatttttgtattttagtagagatggagtttcaccatattggccaggctggtctcaaactcctgacctcatgtgatccacccacctcggcctcccaaagtgctgggattacaggtgtgaaacaccgcacccagtctaaatatgatttttgaaactaaacttgtggcaggaggacagggttgctgcaatcccaggacagaataaatctgagaacctcctgcctctatttcctccattcaacttcccttgcccattagtgtcagtttcatcttccaaaaaacaccatcatttcataacttcatttctaggaaagccacaattgctccttttcacttcacacaccaagtctaaacttccctgtgtaactctcaaggctttccccatctgacctcactcggtcaggtcagccttccttctcatcagtccttcattcagcagtctctgaaccttccccactgaacacacctagtgcgcttctacctccttccagactctaccccctagcatgctggcctaacaacattggctttgatgacctgaactccagattcgcctgctgtccacagtttctttctttctttttttttttttaatgagatggagtttcgctctgttgcccaggctggagtacagtggtgcagtcatagctcactgcaacctcgaactcctgggctcaagtgatcctcccacctcagcctcccaaagtgcacattttctcatatgtacctcacaatcaaacacaattgcctttttataggatgtattatcttataacttctacctgtcatttatctatgtgtgattggtgaacaagacaaagcatattgtgttgttccctaattgtttcag

SEQ ID NO: 95103 - DNA, 1055 bp, Homo sapiens
acagtgtcagcacaccggaggtgcccaagaaacgtttctaaaagaacgaataaatgagtggcagcagtattttaaaagatcgaaatttcccgcctttgcccacacacaccttatttcctgagaaaagttaaacttgccaaataaatattcctttcaaaaggaaaatgaagataacaagcttgtcttctccccatcttttcctgctctgtctgagcagaggggcctcaccgggtgactgattgaaactattcattctgagcattggcacaagcacagacctgcccttgcacagttgagctgcaggggtgtggaggagcaggggagtgggtacggagggggtggggggctccaaacagcaggtaggtgttggcccacagcctgacagggagcactggagacaggcaggaggcagaaaaacagaaacagcaccatggggggatatatagaagcactctgcggggaggaggggcgcatgattttgattacagcacagggtacctattgattgaattattaataaagattaaattgaatcacacatatcctatatatgaaggcaggggaatcgcaaatacatttatgccagtttttgtttttcaagagacagggatatcgaagtctcctaaactcaaggggtcctctggcctcagcctcctgagcagttggaactataggcacatactacggtgcctggtttaagccagtttttaaacaacagctttactgagatttgcattccatagaattcattctttttttttctgagacggagtctgtctctgttgcctaggctggagtgcaatggcgcgatctcggctcactgcaacctctgcctcttgggtttaagcgattctcctgcctcggcctcctgagtagctaggattacagacccgcaccaccacgcctggctaatttttgtatttttagtagagacaaggtttcaccatgttggtcaggctggtctcgaactcctgaccttgtgatccgcccgcctcagcctcacaaagtgctgggattacatgcgtgagccaccgcgcccggccagaattcattct

SEQ ID NO: 95104 - DNA, 2751 bp, Homo sapiens
attcacaggattgtgcaaccatcaccactatctaaatttagaatattttcatcactgcattagcagtcactttgttctcctctcccccaacctttggcagccaccggccttctttttctatgttctggacctgtcatataaagggaatcgtacagtgtgtggtctttgtgattggtgtctttcacttagcctggtgttttcaaggttcctctgtgtcatggtgtgtatcagcacttcctccgtttttgttgccaaatactgtactgcattatatggatatactacattttgtatatccattcatcatttgggttcgttctacttcatggctaccactgagtcatttggaaatgtgatgcaaggctcaaggctaatggggtttcctcgcttccaaaaaagaggtgatgttgcccacctggcaggtgggtatgaggctcagcaatggtacatgcatctcatttaactggtcactgtcaactccaaaaatgggccttcccccatttctgtggctgttctgtgctggtgtgcagtgtgtaagatggtcagtgttcctgtgttttgactggtgagtcaagtctgaactcactagcctagcacctgagagcctcctcatgggatagcatccccctgactccgcctgacaaccatcatttctcttcagttttcactcctgcccaactggtttcttcgcagtctatgcccagggcctccagctttctcacacttgggccctgctggggcatccagcctctgctcctacatccttgggtcactgcaggtccctgcccgaccctacctttcttcctccggacctcatattagaccagctcctcaggcctttttggacatgaccgtctcaaagtgttactatgtttaagtgtgtggttttttgtttatgtgtgtggttttgtgtctttgatatcgttgatttgccttatggcctcaaccaaaccctcactgtaacatggcacaggcagcgccatgtgacatccttgtccctggcccgcccggcgcagctcacagtgggctctctgtgaatgctggctggctgagtgtctgggagttgtgagccctttgccatgtaactggagagggtggaagtgtgaatggagacacctgctcagttgtacaatgctctttggacaggggatcaggtttaaatcagtttgaagcctgctttaccaccccctgcccccacaattgttatttcctgaaagcatatggttggctgagctagctgaaaaattacccgaattttgataaaaatttgaaccatggatttcctttctgaccatgcctagctgtgtaaattccacaggatagtaacaggtgcctggccaccatccagcaagacccctgataacgtccatgcagtggggagccacgggggcaagtgcttcccctccctcctggtcataggcttgagcatgggtagccaggatggggggtgggtgcaacttgagataagcaaatcgacaacaatgaggtacaccctgttctttgtcctcttgtcaacttgtgatttcccgatggatcaggtaatccccagtagcagataactcagttgaattttttcactgtcgctgttatctgtattcattgtctgcctaaatagtagtgaacagagaaaaaaagaacattaaaataggaagctgggaatgacaggaagagggactgtaggcctggtaaacaaaagttggctgtaacatgagccaggatatggaagcgtgaccaatactttggactctctcaatgctggccctctgcggttcatggctctcctccctttctcgctgtcaccagccacgtttaggtcagtctttgtttttggctgttgttcctgaagacgcatttatcaggtggatctcttaaaatcagggttagggattggaagtctagctgggacaattcctgtgaagacagacttccttctgatgaaatatttactagcttttgtaggaagccatctcctcctctttgctgtgataagaggtactccccacctttctgtctcatggcaagggtggaaactgatgatatttgtagggcatactggggtgagccaacaggctggaggcagccaaccctgggcatgcaaagaagcaccgtttggaagctctggtgtagctctcgtgcagcagcagtccaggccctgggacatctgagtttgaggcttcagtcctccgctgactgaccatatgtttacactgcagcctgttgtggtatgaaatgagatctggaagcacctgagctccccagtgtctgcaggtagatgattatttaataccctcttcccatacatcttcatggtcaggagactggaccttggcaattctgttattagacagctccactcgtagggaatttctcccttatatttagctgttgttttctcctccattccactgtctggagtccccatggcaagttcgcatcctctttcatgtccctggctccaaaggctttggtgtctccaggtaagtagttctcacatgggctatgacccctcatccttcattatcctagaaaaataatgcttttctgaaaattgtatattccatgggaaaatcagtagattttggaagcctgacatcttagtccgttctggctgctataacaaagtgctggccaggcacagtggttcacgcctgtaatcccaggacttcaggaggctgaagcaggtggatcagttgaagtcaggagttcaggaccagcctggccaacatggtgaaaccttgtctctactaaaaa

SEQ ID NO: 95105 - DNA, 2043 bp, Homo sapiens
gctgcacaccattctgtggaacggatatagagtcatttgttaaccagtgatactgacagagagcaagcagatcagtgaagacaggagcagggcccccgagccctgagaaaaagcagggaccttgccaggtgaggaaaaaaatggtatgaggtagggctacactacgctcccagagacgtctccatggacagtgagctctttagaggggaaaggagtaagcttttgaaccatttgaattatttagaagaaaaaaacacagtgcctttcttacacacttttcagaatttcctgtgttttcacctgccattagctggttactgtttgggcttcctttcatggtggtaaacacagtttgttttgtttagccatttccttccccctcaaataccaacacagatcaattcagtctttgcctgagtcatacatggttcatgtgtctctttccttccatctatctccccttaattcacactatttactgaactcctcctgtgcacccaagtctccagaaggagctggagaaggagcagggtggcaggggtgggaaggggacagctgtgtggaaggcagcggggctggaatcctggcatctaggccctttcacgctcccactcagagggctctctcttcaggccagaaatgctgatatttaatgagcacttactagatggttatttgtccattttatagacagggaaattgaggcctgccagtgttaattgacctttctacggcctagaatctgaagttggtgcagcctcactgaagccctggctcagccatggttgccacccatcctgtctgagctttgagaaccacagagacaagacaggcggcagggctgtgattttagacactcttgtcttaggtgtctcaaggtgggggtcactttggagcctcagccaaccccactgtgattggatctcctgcctacagcctgtttcaaagggaagtggagtttagggagacagtcaagaggatggatggaagaaaggggctggttaacctgagaggagagaaagtaactacccacccgtcagagcctggggctgataagggagggctcctggaagacagagctggtgcttctctccacctctgagctgctttccctccagggccactggcttctgcaggcgttgttgtcttttgctcctaaacagcaaaaagagactaattgcctttattgccatgttaaaatcaatagagccactcaccctgagttcaaaatgatacgacctagggaatgaaattgggaccacctgtggtttgtttcctattagccaggcacagaacagtttcttgtttcccttggaatgaaacacaacctgagtcctggaggaatagttctcaaatgcatccggatctcctggagagcctgttaacacacaagctgagctccattcccagagtgtttgattcggggattctggggtggggccctgagaatttgtatttctaagttctcaggtgatgcagatgctgctggtcccagatgggactctgagaacctctatactaggtcatctctcagacttgggcctttgttctcatcttccccctccaaaacctaacataatccactacatgtggtagagagccatcaaaaagagagtttcagtcaaggggctctggctaagtcctggagctgagctgccccctcccttgctctgctcacacctttcacccctcagactgaaaccctccgttacctgctgctatgcagggattaggattagaacagggctgagtgggctggtacggggagggccctgctgtggtgttggtttagctccttttagcacaaggaatttgatgagctaagcattttccacggcaagtgcataaaaaagatttcttaccattttttgaaagaaagaaatatatcctttctcttgagtcatcactattgttagttgctgaatgaaaaaaaaagacttaaagctctgttctttgaacacttttctctgggtgcctttctgtagctgtagaagatctcttgggttaaattttaataattgttaatggcttcacacatagggg

SEQ ID NO: 95106 - DNA, 2451 bp, Homo sapiens
agctgcaaggactgttggagaaaggggcagggggcactggctggggagagggccgagaagatctcctttgagagatggggagggagatgtgaggctgagaatctagtattgagtttctaaacttctgatctgcaaagtggtttttttttttgtttttgtttttgtttttttttttggtagagacagggtcttgctatgttgtatgttacccaggctggtcttgagctcctggcctcaagtgattgtcccgccttggcctcccataatgttgggattacagatgtgagctacggtgccccaaagtgctctttttgttgaacagtgtgtgagcccagctacctggagggtgtgtctacctgcctgaccctcagccatcgcagcctcatgacggctacaccccgcacattatcatacccctcaaatgtgccttccaaccccacacagatttcttgtggttcccatcctggtgaatcttctcagttatccacattacagacctcagtggaatcttccacaccacctggctcatgatggtctctgctccttgcctttcacgttcttcagaggctagtgacttcctaaagtgaggattgaggaaataacaaccacgataagagttacagctgaccctggagtgtttcctgtgcaccaggagcccgttccaagtatctgtatttattcactcgtgtcatctgtagcagccccaacacataggttaggacctgtcactagtcccatttataggtaaggaagctgaggtgctgggaggttgcatgatgtgccgagcatctcacagccagcaaatagcaagtagctagaccgcttcctccctggcaggtctgaagcacatgattcctagccccagccttcctaagggcccctaacagacggtggccttcccctggcatccagagtggctctgctgactggagcagtcaactgtttctcctctgcagttcctgaaggaaggagaaaagggggaggctggtgggttcaggtttcgtagacctaagaggccagctgccctgtgacccctcctgagttggggcttctttttgggggattagggaggagagttataagagaaagaggtgcggagagcagggagcacctgagagagggctggaagaagtggtaaatagatggacctgcccaatgagagtagccagcgtgtgcatgtgaggggcaggtagcacagagggaatgtattccttgtctaacttggcatatagccaaaagctaggtgtaagttagtaaactacagccttcaaaacagcccctgggaaaggccctgctttggagggtagaaggacatataggaggctcccagaggtacgggtgtgcctccctgctgggcatgggcccgcctgctgggggcagcagcaaaaggaagcaagtagcccggaggaaaaaaagaactatgtgtgtgactgtgtggtggccaggagagagggagagggttcagcacacacagggaaccccaggcagctcccagagcccaggggaagcattcctttttgtagttgaatgatcccaggggagcaaaaggctggctggaggagagggagaggaattctgcttggaggagaaggtctggggccaaactgccccagctaaggtgactggtccgtgtgtctgcatcttaaatctgagaccattggttcctttgcacctgtgtagtatcctcagggagggttcccagggcgctcgtctggtgttgcccctctttgaggcacctcactcattgaccattaagcaagcatcgagtgggtgtcagtttaacaagtgtcttgtgttcagtgccaaggccaggggcaggtacaaggcatgctgaatgcagcccctgccacaggatccatgtttcaatagggagggagacgcagaactttgcgtaaaactgaaaccttatggggcgggccctgtggtgtctaaggccacactgggagtctcagatcctgccaaaggacaggggaaaagggagcagctggtggacatggggaggaggcaggatggacggggcgcctgaaggaattaagtgggatttcggttggagaggaaaagcaaagatggcagggagagacgaggccctcaaaactgagcttgttcgtcagatgggagatggacatccaagcctctccatgaggtctggcacgtgatctggggcacggtctgttctgcagtcatagctgctggcctgcgggacctgcaggcagagtccctgatactcactctctgtgagttaaggccagatgcaggcttcagacacctttaactgagaagcaggtgggtgctggcctggggtgccagggagctgagggtagaaggaatgtattaatgccagcagctgctctctgatcctggccctctgtgacttcctcttcacccattgtagcataccagccagactgtgaaggaatgaatgaagtgggtagagaggttcccggtcaggct

SEQ ID NO: 95107 - DNA, 1454 bp, Homo sapiens
agtcagccaagagtgtcactgactcataggcatacatgcctttcaagaaggcagatcatgaatggaggtcattactaatgtataacttgtcctattgtgctagcaccaaggggagtcacctaggacttgggttcctaggatggatggcccgtggtgtccctagtccaagctttatatcctaggcctagggaagaatgcgtcagacagtagtcagatcatcattggacctgatggactttgcttctgacatttccatgattttgacatgtctttcttggtgtctttgctgcctggtgtctctcagagcccataaccctgctggcttgaataaggcagtaggtgttttatattcagaatcttagccatggtgaataagcatgtcatatatagttcagccctgattttggggaaaatcatcgggcgagtcagcaagtttatgtctgtgccgagcattctggaggatgtaagagaacatgactccaggctgtttggagaggcaaaagcaacccaaataaagtaagtgaggacttagtgcagactgcaagtgtattagccagaggtggcattacagagcccagctcaggatacggaatggctccagcaactctgtactgctcaacccacttctggagcttcaggcttagttctaggagctgcagtttcaccaggacttagacaaacagatgatagcaagggtctgggaggcctctgcctggagaagagggaaagtcaaggggcatttcagccattgaaatctttgtaaagttgggtcgtggttgtgggaagagaggtgatacaaggtgtcattccaggaaggaaagctaggcctaagttctctcctcttctcagtggagtgaggttgttttttgtcttggggtatgtaggcaccagaactgttcacacagtttggcagatttcatgttaaggaaatgactttgggaagaaaaggaggtgtccatgtgggttagaaatctggaagggcattttccatggagcgagcctttagccaagctctaaaggccaggtaggatttgggtgagcaggaggagaggacgctgcagtcagcagatgggcagtgaggcggggaagaaaggcggaaccaggcctggtatcagagctggggctggcaggggagaggcagtgttcgggaaagtggagtccgcctgaagattgtgggaccttccgtggggaaggtaacccggaagcagtttcagattgggtattggaggagaatgagcggacaaggagcaaatttaagagccagctttcaggaaataggtctatagtccttggtggttctggtgtctagatgatgctggtgattatgaagtctctttgcagccccagcccttggagcatgcaggtggaaggccagattcctcacctggagagctccgcagaagatgatctcatcaacctacccttttcttggcccatcttcatggtgtgtaagg

SEQ ID NO: 95108 - DNA, 1054 bp, Homo sapiens
cctctgcaaaaggaggcttcatctgatttcataacattttatttgtttagaaaaacctggtcttgaagcaaacataacaaaatgttaacatttgtgaatttaggatgatggattttatttgttgtgtttttccctgtcctttattatgtgtttgaatcattccattatttaaaaaataaaataaatgtaaacaaaagcaataattatgccagggtatgtatctccctggtatcttggtccactcacaaaagtggtctgaatgtttaatatttccttagtaaaactgctacttggtcacaggcttctctccatgaattactaactccgggttgggaagcctaagaacataatccatcttttttattatgacaagctaatttaattttaattgctccttatagtattgcattatgaggaggaactatctttaattatctttttgggggggtgtttctaaagtaatgtgatctcagaagcagagcatcgtcccttccaaagtagccacctgactgtgaacttaaaatatttgtgtgcaacagtgtaaatagacttctctgctcctccaactggtggaggctgcccttccccccgaagcaattaaaagaattccagatgggtgattctccccttcctggtcctatttaaaaatacaagtgtcgcttcggggattttttttttcctggaatataccaagtgagtgacacaagaattgggactctccattcctgatttaaatattggccgtgtcctttcgagatcatttttcttggtgacatgttagacaatctcaggtcagtctgtgtccttaaagatcactgtgggtgtcaggaatgctgcttacagatgtacatgatgggcacatggaggcgcccttcagggcctttggctcagatccccatcctgctcttaaagaaaagggcattctgttatttatttgttggattttaatttctgcctctagccctctaaggcttctccatgtagtgccatcctctgctgctgttaccaccatcaggggtgggggtaggggtgctgtacagttggcggccagagg

SEQ ID NO: 95109 - DNA, 1038 bp, Homo sapiens
ggggcttaggctcttagcaactgaggcgagggctgctgccagcattaatgactctggtgcagtgaactgagttatctttataatttctccttcaattttaagtgttaagaaagaaggaagaaaaggaaaaatacctctactagtctttaagagccttataacttatttggagaaacgcagcacacaatatagaaacacttgccaagctgccagtgccgagtggtggtatcagtgctgaggacagatagggaaaagctttcctacttgtcacataccctggggaggtgatcacaaacccactgcatggccttcctcccaaggaaggagttaggttgccccatggctaagggagggatgtagaaccacttaacatgacattggtttcaaaccctctggtcccgccagcttcttctgttaggcacaggtgctatgtgacatctcacagaccctgatctggtgccagcccaggccagatcaccaaaccctgcctggcctcagctccctgcactatgcaatggtatagaagtgggatggcacctctcatagggttagttagtatttgcatgctgtgtgctctgtactactctgtttagtgcatttagaagttgatttccttggcacgtgactcatgcctgtaatcccagcactttcggaggctgaggagggcagatcacgaggtcaggagttcgagaccagcctgatcaacgtggtgaaactctgtctctactaaaaatacaaagattaggtgggtgtggtggcaggtgcctgtaatcccagctactcggaaggctgaggcaggagaatcgcttgcagctggaaggcagaggttgcagtgagctgagattttgtcactgcactccagcctgggcaacaagagtgaaactccatctcaaaaaaaaaaaaaaaagaagtttattttatttcctcattggatgtgaccaacttcctacaaagggaagaaacttcatcttcaagtccctaggataaagcttttcatagggaggggacaaaaatttaactccaggtcaccaagagaag

SEQ ID NO: 95110 - DNA, 1071 bp, Homo sapiens
gcagcaaaacacctttgttcttcttacagattcatctgatttttgtgttggagatttgagattttgctcgttactgaaaatgtttcctctgctgagagtttgagcagcctcctggttgtgcagagtggccagggttgggctcagctggccaggtggcaggtgcaaagcagggttctagaagagagtctgcctgtggcctcataggggtaacttacttcagtgagcagtgttgggtgcctgagtgaggaagtagaggtggcagaggaggggtccagtgggctgtctgggccatgtgaggctgtctgcaggactcctcagaaaggttcaggactcacgttcagtgcaagggaagacaaagacctttattgctacaaagttgggtgggagactgaagtcctcagatggtctacaagcttgaaaaccaaatcaagttgaccaacaaccttcagttacagtcatgtggtattgctgcgacttctgaatttcccatttggggttttattagcttttagtaaaaggcgacattgtgaagaaacccagattagaattcagtttataaaacagctgagtgagaaagtgggataggggagccagggaactacatagaaaatcattgagcaattactcaacacaattagagcccaaacaccaccatctcatgtgcactccttgagctggcaagtagggaagggggtgcagagccggagctcagggagaggtgtccgtggctccctcacttctggtctcagaggcctggagtgtcctctgttctgagcattttccacaggcaggggctggtttcaggcccagacagactcccaaagctaaacaaatgagcagccctcgctggccatgactttgccatttagaagtggctttggggctccagaatgaatggggagcctaatgcagacccaactgaccaacttcggcagctttggggaaagtaataaaaatgagcccaggggtttgagacaagcctgggcaacaaagtgagatcccgtctctacaaaaaattagctgggtgtggtggcacacgcctgtggtcctagctactctggaggctgtggc

SEQ ID NO: 95111 - DNA, 1052 bp, Homo sapiens
tataagcagagacccgaaggaagtgaagggatgaaccgtatccagttcatggctaaattctcaccattccatgttttcagagtgaattctatctgtgtgtctatcttgtctcatggtgcagttttagtttttgccacacatctaaagctaaatacaccaggtttagtggaagagggcctctggaaggatggaaatgggagctgcctctttttgtggaagggacaattccagggtgggaaaaagatatttatgggccacattttttatatcttcaatttactttttattatcttgaggaagtaatagatcattgaaaatgtgaatttttttacttctcctgttgagagacaatatgaagttaataagaacaagattactttacaaaacattctgggcttggcaggttcagcctcatttgtatgtcattgatttctttacatttttctctgcatctgttgtaggattttacaggagtcatagaataacggggtcaaatatttctcttaatctgaaaggcgccacattaaaacagggtggtctggttgtaagcgtttcctccgagtgggacagacgaatgttacatatccagttcaggtagcaggcaagctgtttccgattgccaggaaggcccttagaaccagctggccttcgttaagttaggctagagagcgaataaggcagtatatctctaagcagtagcccaaagaggaaagtgattgctgtctccaatggagggatcacaaaggtgtggaggcctgagtgacctgttcaccttcctttgcctgcaactgtggacacagttatatgtgaggtggtggcacttgtcctattcgggtacatgcatgagatggaaaggcttagctgaccattctgcagccctttccaaactaggtgtttcagtggcagtgccagtacttgctgggaatcctgctgcttttcctgtggtctgcccgttgcttatgctctgaaaaggcactgtttgaaacctcaatgccctaaggagcatcttgggtgagaagagagattgggaaactacacagaggatgctcagg

SEQ ID NO: 95112 - DNA, 1336 bp, Homo sapiens
ctaaggtgggcagtactgcgcttttgggtgaggtcaaaactctggagggaaggccaagaaaagaaaattctgcccatgcccctcctcccagcacccaggagtgtgttttctcttctcagaatctctgtctgatgtgctagcctttttgtgtcatttcgactgaaacgtctcacagctccaacccactgcccccatatcttgcatagctttctgtccagatttctgaattaaaggctggatccagagggtgtcccactgtgcatggatggggggcttcctcccaccccagtgggatgctcctgctgccattctcaccccggaacgcccctgactcagccacctccggggcggtgagaggtgtgagggatgatcggggagtgccatgctcagcagcctgaaccgtgtcagggaacccaggcattccagcctgtgtcatcctccccctcccgtgaagagccacagccacatcctccatgccctgctgcacttcctgaggagtgaaagatggtggctgtcagcgtgtcaaggatgacgggtggcaagaggggtaaacacagcttgttactaccagattcgattaccgggtgatgctcgaagacaaatggcctggggcctttctgccccttgagggcaggggcagtcttagtcaccaggagcagggtcctatgaggaggagttagggatgttgtggaattgtctcccaaagccagtgccagccgataggactagttgtgttatctcgagttttcgttgttggtagttttgaattgggagccttgatttgaccctgagaataaccaaaactgtacaaaagacatgtgtattcaaaacaagacacaataaggctcaaaaacaaaactgtctatggtgataaaggttagagtaggagttaccttgggggcagaggaatgttggctgggacaggatatgcaagaacctctagaatggttctggaatgttctgtatcttgatctggtggtggtgacacaagtttatacagatgtattaattgagctgtacatttaagatgtggggaatcgctctgaacctattctggtaacaggggctccccgagttttaaaaaagatgtgtacattttactgtatatatgctatatctcagtgaataagtaacaataaagaaaaatatgcataaaggtggactgtgaacagaaacaccttggcaacatttgaataacctagcttttaccatatttggagtttgctgtcccctggtcctaggtgctaaaaacctgatttggttcagtccagacatttaaaacaccagccagctatggagagtaaaataatggcaagtctcttcctagtttgaccat

SEQ ID NO: 95113 - DNA, 1047 bp, Homo sapiens
gttcccacacaacgcaacttttcctacagttgggtgggctccagggtgcagaggccccccgccttgcttggcaggttggcttggctggagcctttgctggttctcagagcgggaacatggtcgagttggccaacagtgtacccacgttgaagcagctgtgccgaacatctggctctgattatctggctgggaatggccgggggtgggagcactgtgatttatagattgctcctttggctgtaaatcccatctgtaattgtgacttctctgtccctaattgtttgcagagaagagaggagctcaatggcttacaatccctggcagagcccaaggctgctggggtgggggtgggggggggtgaggggggtggtgaggtttgttgctaggacacggctgtctttgttttggtccctgctcagcagtgtttttaaggccctgtatacatttctctgtattgttaatgtaatttgttcaggcagtgaacagccaagttcagccgaaggaatccgatactcataacagaaacaccagaggccaggtttttgtggtcaaattagggttttgaggcctctgaagagaatgaaatgttggcgctgggcgggggacaatctccctttctcctcttgtggtgatgctggcctgggttcagcttccttgaggagcttggctttggggcaccaagtccactgcattcagggctgtgttaggtggggagcccggctgcccttctccgagaaagggaatgcagattttattcaaaagggaagaaaaggcactaacaaagtatgagcaagtttgggccctgcctgcccagcctttccttccccgtggctccgggcagcttttttccccccatcccccaccctgcattacttgactggtgaggaaataatagttgggctctgctgagaaggtatgtgactgtgcaaaatgcaatttgcccgtttccgctgcccatgaagacccgacagcccacttgccatctgggaacctcgcgccctgctgtgcttggagttttcggaaacgatggattccaaacaacttcca

SEQ ID NO: 95114 - DNA, 1084 bp, Homo sapiens
gcccctacttcagatagtgctcaagaggattgagttaatgttagcgaaggacttcggatggtgcctggtatgctgtaagatgggtgtcatttctcattgtcacaccgttgagagtccagatcttcatcatgtttcctctgcatctgactggtgagcctcccagatcagcagcccacaaggcgatcgggtcagggctgagtagctgccagcagaggctggagacttgaggctgtcgtgcaatccattctcgcctttgtctgctttctgtcttttgttttctgctctgtgtgtgtttgtttttgtgattgttattttaagtctctctcaggaatgcttcgtgatgctcagcccggtcaagcgatctgtatacatcctccattatttcttctccatttctttttaatcatatttcctcctctgaacttctaccctcagatttattcattatctaacaaatactgatggtgcagctccatggcccaaagctgttctgggggccacagcagtgatatgagtgtcctggggaagctgacattccacggacacaagcagccattcgtctgtctcattccgccaagacctctgtgaggtcttgttgacccctttgcatgatgatcttaagtttgttcaccactgttcagcatatgggcattaaaccctatttttgcattctccttcccactattttctcctactgattaagcggtatctcctccactgttatttttcttccagtgacatattcaggaagagcaagatctcaaaaaatataaatgttgatgttccccatccaatcccggttgtcattagaatgtttatacttatccacgcagtgcttcagttctggaatatattcatctttaccttaccctggttagcaataacagcaacaggaattaaaaccagtgggctactgttacagcttggcaggtgtaacttcagagaacaaaggggattcttttttgttttttgtttgtgattttgtttattcatttatttatttttttgagacagggtctccctctgtcacccaggctagagtgcagcgaaatcacagctcactgcagcctcgacctcctgggct

SEQ ID NO: 95115 - DNA, 1044 bp, Homo sapiens
tctttgctttgagatgacctgggtcaccatggttgtcctggactccaggagacatcacaggcaaaatcaggtccatacttcccccgtttgtctgcagagaggcctctggtgtgggtcagatccaggggctttccttctatgtttgcagctggaggcctctggatgcaattgtgtgaaccccctggtgtgtccctggagccccagaatgtaagaatgaattttcaagagaaaggtgagagacaggtgctgggcttgtcagatttctggctgggaggcatcccataaggtaagtcaggtaatttcttggaaagagagccttgccggggatcagttatatgtatctacccatgtatcatgctctgggggctgtgttgggggcaggggcaacataagaggtaaacagagtcccaagtctgagctcctgggagaaagtcagaatgcaaagtaacaatttcattttagaggagcgtcaaaagtctcatggctttctaggaattgccgagtaataggaaccaggaggagagaaggagggactgcagggtcatttgcagtgactgagatttccaaatgctttgttccctaaacctgtctaccaccacggggcgagggcatcagctctttgcatccctcagaccccaggtcactgtcgtaagctcttttcttggaactctgatctcagataacctgcattagtctgaaataggatgctgagataccaccataggctcaggagaggtgctttttagacctttctggttgggttttcccatctgccctgaagtatggtccaggaggtggtgatcatttggagcacgtcttaggactggagaggcccaaaataccttcaagccttttgttatagttctaaggtatttgttagaactcctggacagtttgtctagtggtttgttgtgttttttaaaatttccagcaacttgcccacacacttggccaagctttggactgagaaggatgcagtggtgcaatcacagctcacagttataacaaggatccttcactggatccttgttataactgtggccc

SEQ ID NO: 95116 - DNA, 1101 bp, Homo sapiens
aaggggtcaagggtagaaaatcagagacaagttgttgggccagtggggcctggatggtggcagtagaaatggggaaagttctcagattctggacccattttgaaggaggagtgacaggatttgctgatggaacaaatgtggggagcaagaggaagaagagttaggaatgtctcctgggcagtgggaaagaagaaagtgtcattgacagaaatggagaagactgtgggaggggcaggtttgggaggaaataattaggagctctgtttgggacatgttgtattggagatactttttggacatccagtggggagagtgataggtggggtaattgggtctagaagtcagggatgaggtctaggttagagacagagactttagtcatcagcatgttgatggtacttcaagccatgagactggaggagatccctgagactgaagctgagaaaaaaagaggtcaagggctgagccgtgggcactacagcttttgcacactggagagaagagcaagaactggcaaaggagactgagaaggagcagccagagaggtaggaggagacctggtgggcgccgcattcctgcagccaaggaggggagtgtacgaaggaagaggggctgctgctgaaggtcgagtgagatgagggctgagaaacaaccattaggtttagcaaatgcaggtctttgctgtcctcaaaatatagacttggcactctgcccgctagcaggacagattccagaatagaatctggtatcaagacagataccagggagaggaggctcttcaaaatcccaggcacgtctggccccctaggagactcaggaaaaagtctccagacttggaacctaagctggactgccttatctgagaagattggtgtaatcaatggtttggtgtcaggctcccatagagaatggggtgaagctgactatggctcagcacttgcttaggatagtgggccatagggggttcccttcttggatggagggccgaaggcaagcctcttcactgggcatcagtcaccagtccctcttccctctaagatggggtaggttggctgacaaggcttcccactggcacagtgcaaccagaagtcccagatgggg

SEQ ID NO: 95117 - DNA, 1752 bp, Homo sapiens
cttagagaaactggtgaagtgaacacagcttaccaggatacaatatccaaattagcacactaccttttattgttattaatatcaccatgaccgctattattaacctctccctcttatacaaacacattcactcatatgcatcctatttcagaaggtttatcttcttaaagactgatataattttcacattttactttaaacagtaaatacaagtgtaggaggccagaaagcaacagctaagttagaccctagtccgtaaattccaatcccttataagaaggaatctcttccaatgagaccttttgtttttcctgccccaaggtgaatgttttgagaacctttgcatcaaatcaattcagatacttgtctttaacttgcaaaacttaaacaaatggacttttttctgctagcactattttaggattcacagaaaatccagtctccttaagcagttgaattgaggtttttgccaaaattgtgagggtttgaaaatcggctttaaatttagagcatgcccatggtaaggttgcgcgggtgtcctatggctctgtagaattaagcattaacgttgcagctggattccatttctttgtgaacatgcaaattaacatcttcagtggcttcctctgcctgcatacttatataccagcctccaaatgtgttatttgttattaaaatcaccgtatttatgtgtgggggtttgcggtgactttcccagatgcagtgatcctaattgtaaccatacaggttattcaaacatagcttggatatttaaaacagaagcgaatctaggccagcatgcagttagttgagtgtaatgtagatgtgaaaagactccttgtggccggtagtgttcggttctgttagctccaagaatatatcttcctatggtgattgaataatgtgcaactgacctgggtccttccaggtacctacttttaaaccaggagttataatagatttataaatctttaggctttactggtatttgctttctgtgaacaggaaatctagggagctaactgcccccctgcaatatgaaaggcacatgttccccaaatgtgactttgggggctctctggggtttaataacaaacacttgcttggtttttgggactggcgtttcttcaactcacccatgcatgggaaccgtctgaagagattgtgtaaacgcagattctacttcagtagggctgtcgtggggcctggaactctgcatttctaacacaattccacatagtgctgatggtactggtccagggaacacacttggagtagcaggatctgcagccaaataaatacaacccagtctccaaactagagcggacaggcccccaggaggctgtttccatgggccctgggttttgctagccttcccgtcccacttatacacacttacatttgcagaggagaaatggtgaacacctgacaacatttgtttaatttttatcgttgtggggccttttgggagggaggaagaagagtatctcagccaaccaccaactcccaccccctaaaccatcaagattgctagcgttgtgcttgtagttttccaaaaatgtacatgaacatagctgatccacccactttggtggataaccttgccaataacagaggcagctcagccaggagtgagtgattggtccagaataaacccacccaggtggcagtcagttcttcactgccctgtttagacctggcctgaggattgacatttcctttaactgtctcaaatgagagctatcctgggct

SEQ ID NO: 95118 - DNA, 1007 bp, Homo sapiens
gagacagagtctcgctctgtcgcccaggctggagtgcagtggtgctatctcggctcactgcaacctccacctcccgggttcaagcgattctcgtgcctcagcctcctgagtagctgggattacaggcgccggccaccacgcctggctgatttttgtatttttagtagagacagggtttcgccatgttggccaggctggtctcgaactcctggcctcaaatgatcacccacctcagcctcccaaagtggtaggattacaggcgtgatccaccatgcccagccgaaaaatgagatttttaataagcctggctagctttgtattacactattttgtgtttcgtgtatgttaaaagctcccaagttgtgccgtcccctgcaaagaaagccctgaatgcacagaattaggcacatcttgaggacagataacctttgagagacctttcagagccactaaagaaaggcaaaggagaaactgtagtctcggagaatgcttagtgttcagactgagcagcaaaaaggtgttaaataagtaattaacagctggattctaaatagcagctaagagttagaggcctgagaacatggcctgaggccaccagaaggtgggagagagataaaccagcctatatttaggagttaaacagatggcaggatcagggccctactttgtatttaggaggtttgtgtggtttgtttacttgggttttgttttttgctgtaactaatttaacaatttaggagtggaaagaaaaattaaccaatttatcttgctgtctgaataatgttttgcaataaccaagaataggtcagtggaccaagtgggtaggtcactgccctgcttaatgacccatatccggatattattatgtctaaatgataatcagcactcatttctatgcacacaaagagaagcttgtgaggaagaaataaaaagcctttgcctttattgtgtacagtatatagtgtaaacagtaggggtctaatacatgtttgtttccataaaggctt

SEQ ID NO: 95119 - DNA, 1028 bp, Homo sapiens
cctaaaaacttgatctctattgctttactttaggaaattttaggccctttctcagacggcctaaaattagaccttcgccactcccaaccaaagcatgtcatgacatggaagaaggtggtccctggcctaatgacccatttctgtaaaaatgaggtaggatgtgtaaacagtgcaataagactatggaacaacagaccgtgagccagtgtcaccttaaatgtaaacgttagagatctaggcttctgaagaaatgttggaaagcctattaaaccacataggtttgggatttttcattgtgtagcagacatatggcttagtgtttgatttaaaaaataggaagttggtggccattttcatgaatagtttgacagccagtcagaagtgtgattgtcgttttacctaaacgcaactgctgttgttcgtaaggtcagaaacctgctcacaggggcgggggcggggaggtctggtctgttggctgtttgacccatttggttacgacctccatgctttgtcctgagtaggctggttcatgctggcaagtcaatgcagaaatattgatcaggttcctactaattgcaaggattgggttgaacgttgcagtaggtaagtaaaagatgagtggggccatgaccttatataggaactgtctgtttcctggtccaccagagcaacaacacaagtagtggaactgatctcaaggcagggaaaggttagtgtcacaacagaagaacagtgagctttggagcctcaaagaaagaggggccatctccctgtccttaaaagaaatcttcctcctttttactaccatcgtaagagtttacctactccaggccctgtgcatgctaagcgttcactcagttaaaccaccacacaatcttaggaactggattatactaataccttttcaacatgtgggagctgaggctcagaaagattaactttagatcaaggtaacaactggtaaggggtacagtcaggattcagtcctagctcagccagaccccactgtcatgtgtgaccttgcagtg

SEQ ID NO: 95120 - DNA, 1003 bp, Homo sapiens
tgtcactgttggatgtcttaatatgaggaaggactcaaacagagctgtccgcagctgcaactggctgtcttgagaggtggtgacctttctcgagaagggtggaaactgtagccagacaactacttggtgaagcagcatacagagagatcgcccttctgatgatgcgcccagtctgaggcctcactgagatggcctcaagagtgtgtcttgagctggttagaaacttaccatcctgggccccacgacacacctcttgacccagactgcatcttaacaggatcctcagctaatgcatgcgattgttcacttccagggcctctggttcaggaccagggtgcatgagcatcacctggaggagatttttaatacaaatgcaggggctgagctgctggcctaggacatagaaggaccattcccatacctcacagtccagctgtctccccattccctcccccctacatgctgttgtgtttccaagttcatgcctgtgtgcacacctgcacacaagggaataggaaaatggctttgatgtatggaatcatgtctacaagctgcttcagtcaggggcccttcttgctgagagaccaggcagctttcccagggagccccagggcaggggcctgaggcacctgcttcctgttctgtcccctgagagctccgctttgccgggagaaaggagaagcctaaacagggtgggctgggtctgcgaggcctgcctaaggctgccctctgccttcccagcccttcagtccctgatcctttcgggcccctcctaggccagaatgtcccagattagatggggtggggaggatgtcttctggttgctgtaggcctgcattaggggagtatcctctctggtcccacgtggggcaggtgcccagagccaggaatgagccgcctgtggtgattcctgtgtgtctggagtccaggagtcccttgcactgttggccagtggtcactgtgcggtgattgactgggctcagtgtctgtagcttttgtctga

SEQ ID NO: 95121 - DNA, 1045 bp, Homo sapiens
gacacattgtcattctgtcccccacagcaccacacacagtggctgcgcatggtggatgcacagtgagtatttgtggaatgagcggccgagccgctgcagactgatgagtgttctggggcctgtgtttgttttctaaaactgctctgtcagtaagcgccccgccaatccccgtgtaaacatattcagatcctaaagaagatcaggcagccaccctttaaaaagcccgataaacccaaccttcatttgtattatctttgggcagggtttgcttgggaattcgtatctgtaggaaatcttagtgctcgctgctgggaggcaaattgttcgcattcatttgttctttcagtggtttggccctataaagcagagggctggcctgagggaaaattgtgaaagaatctgagtttgtctttggggtagaaattaaacagcttctctaggccttgccctcaaacttcagccctgtttactattgaagattgtgtgtctcaaggggtaaagagagccgtgggataatggagactgaaaaaatgttgcgatttagccattttgttttcttttttccttggagaataatcttttgggaaaaacttggatagagaccctttgagccatacaattttttaaagttgaattcaagcctctagtcatggcttgattcatttttttctgaacaatgaacaaagaaatgctggtagagagccttgaaatgcggggatgttgaatgaggaaaggaaaaaggagggccgtgagtgttcctgagcactggctggaccctgcagaagcttccgatcattctggaggtctccagaacttggtggctgggacaccagatactgtgcatatgtgaggggagggcctctgagaactcccaagaggcccccagcagcctcccccacaactgacctttcacagttggcactaaactgcaggcttatctcctttctccatttccaggactgcaaattgcagcacctggaactaagacatccctggagggcaggccttccaaactcgcccccattgattaaggcaaacactgctt

SEQ ID NO: 95122 - DNA, 1143 bp, Homo sapiens
cactccccattacacaggtggaaatacatgtttcgtatcttgctttttcacttaacagtgtaaacacctttctgtttctgtaaataaccacctactacataaattcagatatcataattgcagcataaggcatttaatatctttcagctattataaacagctcttcagtgaacatccttgcagctatattttgcttgcatccttaattatttccttaggatgcattcctagagacagtaagccttcagaagacttgatacatacttccaaattgcacaagacaggatttactaatttactttcccaccaccagggtattaaaaagtgcctgtggtaattaaagggggaaaaggccactgccaacatgagagactaaaagtagttaactcattactgagttcataacttctttatctcaaattctgcaaacaaatgggagtggaacccagagattttccttgacggcttgatgcccagcccaggaggatctttgttgtctggcccaccaggtcaccggctcctggggttttcagtgcagcaggtatccttgtccagggcctttgtttcccgctggtcattggtccagcatgcttccggtggggacttgggaaccaccagggggcagtgtggagctgttgagcatgctctgcatgccttacggcttatccatattgaaactttcaataatacaagtattcttttgttgtgttttatgacttctcagattggtatttataatattgatttgcttacattagtatttcatccccttccaattatttttatgtttatgtgttgtaaaaaaaataacctgatccatcatagctgttctgtagctggcggccaggacacctgggttgttctgatcccagctctgccagtgtcctccgtgaccttggtgggacagctcaccccatgggcctgactgcccttatctgaggagtgccaggatgggctgcaggagtggtatgttttcttctcttccagcactagcataatgaaaggattgagagttggccttggccaggtgtggtggctcatgcctgtaatcccaccactttgggaggccgaggcgggcggatcacttgaggtcaggagttcaagaccagcctggctaacgtggtgaaaccctgtctctacaaa

SEQ ID NO: 95123 - DNA, 1045 bp, Homo sapiens
cctttatcaggagcaatggccctgtatagaggtggctggtgtgacccttattctcctgtgttcttgttcacctgtggggtcggagagctctcctggaactgcccgtctatggagaggcctcctcagacatttcccatctcccggtgcccaggagttgttgactttggccagctgctgggcctgcaggagccgcggggaagggttctaagagacccttgaagctctgtggctggaaggcagctccaggctgcctggctgttcttttgtgttgagtatttcactggccccagataagcgcttcctgttcctcactgattatacacagatcctgcttcctttctcctcaatacctgggatgctttccagcttctcctcccataggggaaagtccgtaaactttagaattctcaggcctgcttttggtcaatggactttctgcaaattatgactgtttttgccatctagtcacattcttggtgaagccttcacctctgtctaggagctgagttccgctttgtgccagccaggagagatgcttctatgacctggtttctgcccctccttctcaccagacagaacatctgtatctacctcctggcgtaaatcagagagaataaatagattgcaccttacaggtcagttttaatcaactgttagtagctgcctcagtgttgaggattctgaggtcttacccacctttagcaagaaagagtgccatggtctactagcagtgtctgccacaagcacggagggatgggactgctcctgtgccccatatttgctatcccaagattccgagatcagttggaagtttctttattttttatttagagacagagtctcactctgtcacccaggctggagtgcagtggcgcaatcacagctcactgcagcctcgagctcgagggctgagtcgatcctcccagctcagcctctcgggtagctgggactacaagcgtgcgccaccacacctggctaattttttttgtatttttgtagagacggggtctcatctaactttgtttcccaggctggtcttgaactc

SEQ ID NO: 95124 - DNA, 1060 bp, Homo sapiens
cgagatccacgttgagcagaaacagcccgcctggccaagtgctcgccccaaggagggctctaaggaggggcccaaaacattgagaaagagaggagcagagcccctctgaataataaagccacaaggacactgatggcaacactcgataaagatgtcacccaaagaaaagaaaactttgttcacctttacttaggaatgtaaaagtcaaaaatttaaaacatgactagcattccacaatacagcgtaagaaggaacaaaccaccatgaccaaatagggcttacctgggaaatgcaaaaatgccttcatgtaagaaaatctattgctatatatacatctcataaatgagtcaaataagagaaaccacatgaccattttggtaaatgccgagagaaaaatgcaacaactgctccaatgaaaacaatgtaaaaataggattagaatcatccttccttaatgaggtaaagacatgttttaaaccacagcctcagtctacttaactgtgaaccacagtagcagaaccccagtccccagaaaagtgtttctcagattcagtgagattggaaaactgtgtatctgtcctgtcttagatagtcacaacatatgtaaatcgaagacagtagtacctgccgtttgggtttggtgttttcctttctatttttgagcatccaaaagcgggtatttaacccatagaaagcaccccagaagtgggagcgatcgctattgccaggccatcagttgcattgatgccattcatcaccatttcaatgtgttacattccggtgggcatcccccaggagggaggtggctggaccagcccgtgtacacatcttcgctgtgggctgaagcccagccacgacacactggtcaggagctgggccttgcagagccagttaaatgtagcctagactgggcatggagaaaccagcagttttaacctgcccacataccattaccatgcaaagaatctaagcacagtcagccatcacttacttccccaaggacatgctcccacccatgagtgattgccctcagggtgatcgtggggttggccttacagct

SEQ ID NO: 95125 - DNA, 2796 bp, Homo sapiens
gaccctgtcgtgaacaaaaaaacaaaactaacacgtgtactctgagtttcccattcttccttttgcacagagcaatcctctgagaaatgaaagaaaaaccctgtgttcagccttcctgttcctgtgagcaccgtcctgtttcttttttattgtttaccgcctgacttcccacacctctgtcacctcctttattctgccactccactgcagcccggcttagcgcttcagtcaccatcgaataactaactccactcattttcctgcttttttgcaacacagccgacagccaaggcctgactactctctgcttcctgtaaatcttatcattgactccaagatactgtattaatacacataatcagttgtttgtctttttgaagcttccattttctttctagacttttattcaaataaatcaactcttcatcatcacttattcctctcaatgtttgtgacagaaaaaatatataaaatcccatcaagagagctgtagaactctcaagaaagttctacacccgtagttccaactgccaaacaaacatctaaccattgcagatgtgtgctctgcaaataataactcagcattgtggtggagcaggggtcccttattttgtctaagggcagagaagcatgaaccgttgccacacatggcattatagatagcaacatggatagttttctagtaaattttatattaccgtagtctatattataatatagcaaagcagacacaggcctcaaaaacttaaggaacatttatgggagaaaatcttaactgggaattcaacagatggggagaagaccatcattctcagtttttgaggcagagcatctcattccaacgagaggtgtgtacgtgcaggagcaaaacctgagacacccggggaggagggtatatgagtgggaggctgtataatacacttggttgcaatcccagatccacctctttctatttatgcagctccaagcaaattacctcatctctctttgccttggtttcctcatctattaaatggggattagaagagactgacttcatagagtcgttgtgcgaaaatgagccagtgtattgtaatgagtctagaattgtgcctctaccacaaaataagtcctcaataactattagcttactactcccagcgtcaccaccaccactaccgctacctctactattattaaatgagagggaaagaacaacgaaaatactgtttaattagcaaaactaagaggtaatgagggcctgaattaggtgccagaacaaatggacagattgcagaggtaacagagataatgagcctatagaatttagcatctaatcccccaaggatatgatttaattggtctggggtgcggctggtatcttagtttttaagctccccaggagattccaaggggcagccagagtcgaggatcattgttgtaattgcaaatcacaaaccagaggcggagtggaaggaggacctagagacatcccagtttactccatgcggctctccaggctagacgtgtgagcagaacttgaaggtttttcggagggagtcacagaggtttggacaccggcttttttgttaaaatacttgagattatgaaatgtattttagagtcaggagtaaaatatttaaggtgaggtttgccctgggagtagagcaagcgaaggaaacagcctgcatacttgcagagatttagtgagtcatgtagaagctgcctaacaaggaagtatgtctaagcaagtcacaactgggcccgggtgcgggatgaagttaagtgcttaataatttggactttacaccttcaaaacaagctctaaagactaacagtaacattgtataagcaactatttgtaagatccgatcagtgtaatttcatcacttgcagattattatccagacccctcaccatggccccacatgccaggtgcctgtcttccctccagtgtcccccaggagcactgtgtccagccacgcaaaacacatatatgcccctctagaatataagcaacacgaagacaggaatcgcatctgagcgcctgttgtaatgctcgggagcatttgttgaatgaatggaagaatgaatggtctggtaaaaagttaataccccttctctacccacatttacccaagatccaaccccttttttcattcagaactgttttttaattttaaaaaatctttttttgaaaccgtaaaagtaatgcatgcactgtgtagaactcttgggaaaatgccagaaagcacagaaaaagatctataatcccacaacccacaaacattttgttaaatagtatttcagtctggagtgtgtgtgtgtgtgtgtgtgtgtgtgtgtgtatacttataacttgctctctgatgaccaaaatgcttcctgtccaggtagatgcctaataaattctgctgagttacaggcaaatggggccagagacccagagaccaggagacaaataatccagataacttggaaatggttgcagttctccaaaactttagagtgacttaatccagctttttggaaaatggtcagatattcaggggttttttaatgcaaattttagctgttaggctgagcatccagaatcagaaaagggacctagagagtaaggagttgagggatagaggaaggtgtagagaaaaatctagatgaggttagtgcaaaggcagaaatatctaccacctttgaaactttgccacctctctcttcctggttgccttttatttaaacattttaaaaatagatagacatagatggtttccagttgtttgtttgttttgagacagtctcactgttgcccaggctgga

SEQ ID NO: 95126 - DNA, 1285 bp, Homo sapiens
gcactaaagttgcatcctcgttacctcatttcaggaggtagccctacagtctgcctttgtcccagtattagtgatgttagcatcaactgtttggattaggtggtatctgacaaacgtttccaccctagggtaacaatttttccctttgtaattaataagtgttttgtagggagaggctccaaggctatgccaatgccctatttctcatcaatttttcacccactagttttagcaggcagtgatggttttccacctgcatcgttccttctgttcatttctgctgttgagcttcagcgtctttgaaattcttactcatgtctcccagcccattcgtctttgtatagactggagttgacattgtggcaagtcacatttgtgccatttgtaactgtgatgagaaagtcgctgatagatacagagaaaaaaaattaaaaaccattctacaaatagtgtttctaaagaagagaccaaactgaaggaaaagaggcaattaagaaagttaaaatgggctctaaaaacaaaaacttgaatttatggattgaaagagctcctttgaattctataaaactcaatgaaaattgacattcacctagacatatcctaaaaacagttcaaattgcaagggtttagaaatgttttccttcaagcacccatgcagaagagaaaaaaaggcaaatgccaaaggaacaaaaataaaggtaaccttagggctgtcttttgccacccttaatgccagcaaacagtgggaaaagaagagtttgggtaaggaaaggcttatcccaagaatgacaaatcctgtcctacttgcaaagacctcagaaacataccattgctcagaaggacctgaaagcacattccaggtcccagagtcttttctctctcctattgccctgcagagactcttgacttaccttcacatttttcgtagcctgcagcacaccactttcaggagctcagaaagtatttgttgacccatccgtacagaccctcattctcctctctgctgcagcccactggcctgccgtgggtcctcacacgtgctatgccaggcatactacactagtgtttctttggccaaaatgtccttccccacaatcaacgtgtccagctccccacttctttcaaaatgtgaaagtcatgctctcaggccaggcgcagtgcctcacacctgtaatcccagcattttgtggggcccagacaggcagattgcttagtccaggagctcaagaccagcctgggtaacatggcaaacccccatctctacaaaaaatacaaaagttagccc

SEQ ID NO: 95127 - DNA, 1028 bp, Homo sapiens
ctcagcctcctcctctcacagagctatagctgctcactctttcttgtattttccccctaggtgccctggcctccaagagcaagaagccatgtgttcagtacctgccccccgagaagccctgtgacagccctgcctcctcccacgggagcatgctggactccccggccactccctctgcagctttggcctcaccagctgcccctgctgccacccattcggagcaagcccagcccctctccctcaccaccaaaccagaaacccgggcccagctggctctccactctgccgccttcctgtcggctaaggctgcagcctcctcctctgggcagatgggcagccagcctcccctcctgtcccggcccctcccccttgggtccatgcccacagctctgctggcctctcccccgtccttccccgccacgctccatgcccaccaggccctcccggtgctacaggcccagcctctttccctggtcaccaagtctgcccactaagctccccccgacccctgcaggctgtcacatgactcattgagtagtaatgattcagaagaaaaagaaaaaggagactttattggtcaatatttgaccactctggactgttctgtaaagtggctggtaacaacagcactttacagtttgtagatgtaaccagtagctgatcttaaggcttttttaaaaaacaaaacaaaacaacaaaaaaaaatctttataagaaagagaactgaaaagtagcgtgctattcgtcctgtaggtgctgtggtggatggacctgggcagagggcacttctctctcttacctctcttgcactttctgtctcctgtctcttctcgcccctgccgcctgccccagcttccccgactccatctgcagctctgccattgtgacatttcctgttacccagcccaagttttcatcgtctgctcaataccgtgggttcttcttcgtcctctgtcctctgcccagtgtgaggccatcaccatgtgagaagacatcttggcctgatttgctgccaccagcgtcccctc

SEQ ID NO: 95128 - DNA, 3756 bp, Homo sapiens
taccatctctactaaaaatacaaaaattagctgggcatggtaatcccagctactactgaggaagccgaggtgggagaatcgcttgaacttcggaggcagaggttgcagtgagccaagatcatgccactgcactccagcctgggcaacagagcaagactccgtctcaaaaaagaagaaaaccaccaccaacaaaaaacacatgtaaataattcacaacagtacagaacagtatgaagcagaagccaggattcctctctctccatcaagtgtatatctttctagtgttaggtttcatttcaaactttaaaaatcattttgtgtgctattttaattaattgctgtttctgtggtggtgggtcagtatgtcttaattctgaatgttttccctgcacctcctaaaagatcttttttcccctaagtcctaacagaatggtatattcctctggaaaaagatgaacgtcaccaatggattgtgctgctctcgtttcagctttgatttttttgtccttgagaaccttgtcctccctgctgatttgtttctaaatcaaaagaaatgaagaaaaaagtactgtgacctgagagacaccctcctctagaatttagtggcgggtctgggctggcagaggtagggggctgctttgggctttgcacctgcactttggtgacattgttcttctgtgttccctttatttatgctggtggcttccatccgttcctcctctgagggtgagtggaggggtatatggaaacacggctatgaccaaagggagatcccagcctgggcaggctgcgctgctgaccaccctccctggggcccgggctctgtaggaaagttggtccttgactgtggcattgcactctgcactgtttctctctgcagacctaggggaaaactgcaggtggaagtgcttttctactaaggcctcttactttgggggggatgtgccctacagaagacatagaagatggggaaatgccaatgggcaaagagctactttgaatacataattctcttcaaagacttcagcagcaaaccaaaacagcaggttaaaaaaaaagatgcttttttgggtgcaagtctaacctgtctagcatgagatcttcttgattttctgattattttatgtagcttgagacaaagtgaatcaacttccacttagttgtaccgagcataaaacagaacttgggcttcctggcagtgaggccactgtcccatcacagatttttaaaataaatatgatttgaagtagtgtgatctttcacacaatcatactcagtaggaactttttgaaatagggcaagtttatgtttcatgcgagaaaacatgaaggagggttttggttttggtctgcagtttttccaaagggcttttatgagatacatttcccacaaagtccattttgcctttgttgcctaaaacagacaaaatagacttagatttattaatagaaactatactctctgccaattttacctcagtgtatttaatggtcctttaatctgatataagatgccaagggtatttgataaaaattcttcttccatgccatgtcaggagttaatacaaatgaagaaattccgtgggttcccctgggataagtgagggtagtgtcttggacaacactattgtttgaaggtttatcttttctaatcatgctctaccgcattgtagagagcctaaagagagttgtttctgagctgatctcagggaaatacaaataacttgggagatgagggaaataagatgaattctgtgctgtcaaggcagtaagtctgaagaaaggaccatgcttcttatattatcttccaccttgcttaaaacagcccatagctttgagttgacattttcattcttggcggatagcctactttatgaaggtaaggaatgaactcctacccttcttgggtcattctctgtactgatgcgttagtcttataatactttgcaccaacctgaggaatcttctaggcttctctagcatcccctaagactgtggctatttcacgtctctctccctgcctgccttccttttcccttcctttcccctcctcatgttttctggttgtgcccatctgtaccagctcctttccatccaccttcgtatgcacccagatttttctgttcccatctgtcctatttgttattcatcccgctgctcaacttctccagtatgttgcttcccttaagttgccattcattctcttcatgacttttactaactcacttcggtctctgtctgtcaactaaacttttctaaaggttaccagttatccaatcaccaaatccatggctttttctcaaagcttagtcttgtccttggcagaactggacactattgaccatccaaatggaaattcccctttcttggtgtctctgacaaatggtcctttgccttatcttgtgctggtggtgaagaggccctcaaagccaggcctctctattcctttgactgtctcctcagccattaacccattcttcatcctcggagtgagtgattcccaagtctttgtcttggcttaatccctaaagaacccagttctgctggtatcgaatagttcagcttggttgtcattgaaaggaatttctctcttctgtccatcagcctgtccctcccaactgtctaggacagtcttcggtcacctaaattcctaactgcagacttttgccctttttctctctcatcaccaaagtcccatccatttttttttaataaaagatcctcagctacagtctttccattttccttgcttctcttattgcacacccccagcccattttgcttctctcttggattttgttttttcagatccacatttattgggtttcctgtccagcttcttggaaaggagctcactcttggaaagactgatctttccaaaatattttccctggtctgaagctttggtgtgaacttctcaaggcttagagaatccagttacagaccttttggggttcaggatgctatagattgacaccctcctgcctgtttttctctgcatcccaacctggccaaggcccctcctgtggggtgcccatctgtgcctttattccggctgtgccctcgactttccagcttcccatgtttctttggttaggtttctctcccttccttctttctccttccccaatccgcctgtttcgtcagggcccagtttgtttcctcatacaccttcctcactaccccaccccacatggttgactctttccctcagctccaccagctcttcatcatgccactcatttcagaacttgagcaaaacagggcagtcaggatctgatgtctttctggtctccctaagaaaactaagctcttgagggacagcccttggcaatgctttcctatctgctgatcatggtgaccttccttaggacttccagagttcagttccttctggcagagaggttttctttctccatgccatatggatgtgactcaaatgaggggtcccacagcttttcctggctaccacttgctgtgaccttatacatgttggggtttgctcttaaagaggagagcaggaagaaaggttggtttcagaaaccaagagggtcggcagtggacgcgtacattttgtcacggagtccacagagctgagcttttgagcagactctgagaagtatcattgcttgtgttgaaagaatacaacaggatttaagtttctctttagaaattgcactgaagaaaggccgggcgcggtggctccccctgtaatcccagcgctttgggaggccgaggcggggggatcacgaggtca

SEQ ID NO: 95129 - DNA, 1065 bp, Homo sapiens
ccaacaggtcgggtgcggaggcaaagacccaaaaagacagccctagcaagtcaggttcggaggcgcagaccacaaaagatgtccctaataagtcgggtgcggacggccagaccccaaaagacggctccagcaagtcgggtgcggaggatcagaccccaaaagacgtccctaacaagtcgggtgcggagaagcagactccaaaagacggctctaacaagtccggtgcagaggagcagggcccaatagacgggcccagcaagtcgggtgcggaggagcagacctcaaaagacagccctaacaaggtggttccagagcagccttcccggaaagaccattccaagcccatctccaacccttctgataacaaggagctccccaaggctgacacaaaccagcttgctgacaaagggaagctttctcctcatgctttcaaaaccgaatctggggaggaaactgacctcatttctcccccgcaggaggaagttaagtcttcagagcctactgaggatgtggagcccaaagaggctgaagatgatgatacaggacccgaggagggctcaccgcccaaagaagagaaagaaaagatgtccggttctgcctccagtgagaaccgtgaagggacactttcggattccacgggtagcgagaaggatgacctttatccgaacggttctggaaatggcagcgcggagagcagccacttctttgcatatctggtgactgcagccattcttgtggctgtcctctatatcgctcatcacaacaagcggaaggtaagtcgacagcggccttccggaggggagtggggtttccagcaccctggaagcttgggtgtgggtgggtatcccgtcactagatgcccgtgagcactggggactttaaaacaaacttcagttttttcctcaggccctattaggcctctttactcttgttttgttaatcgtgttttcatcctgtcacctgtttactctgagtgtcctctgctactgcattaggagccaagttaggacattattaggatctgacctgacttggaatctcctcccataactttgcacttaggtc

SEQ ID NO: 95130 - DNA, 1030 bp, Homo sapiens
gcaggtgatcggatggatttattcccacatgggagagaccagagcacagcacgtttgtgtacggccaggagggaaccacgaaaaaagcagaggatagaaacgcaagcacacgatggtggtggccaagaggagcctgcccctagtgacctcacttccgcggccagtgcgagaggcgagggagctccagctctgcctgtaaggtctcggaagtacgaggcggaggggacgaaaaacggggggccagactgttgtggctgtggtggagacgagaaaccaggaagaagaggctcgcctcccactcggcgacagtaagcgaagcagccgaaggcgagcgccgacatcagcagctgccccctaaatcccgcccttcgtcttggcggcagcgggagactgagagacgcgcgcagcaggggcgggactggagaggggccccgcgcgcggatctcgcgagagcattagagggcggaagcgctatccgagcaggatgcggttcgtggttgccttggtcctcctgaacgtcgcagcggcgggtaagaccctccatcccgcatcccactcttgcccccagatcccccattctcacctgggcaggtcacctctaggctcgcttcttccctacccgacccacctctccgctcgccatcgtctcccgccccaccccccaatccccattcccccgctgctcccgatctcttccagttctgaggagttccttcttcccgcctgcccttctccggtgctaactcgtttttctatttcaggagccgtgccgctcttggccaccgaaagcgtcaagcaagaagaagctggagtacggccttctgcaggaaacgtctccacccaccccagcttgagccaacggcctggaggctctaccaagtcgcatccggagccgcagactccaaaagacagccctagcaagtcgagtgcggaggcgcagaccccagaagacacccccaacaagtcgggtgcggaggcaaagacccaaaaagacagctccaacaagtcgggtgcggaggcaaagacccaa

SEQ ID NO: 95131 - DNA, 1024 bp, Homo sapiens
ttttgtggggccaggcatgatggctcacacttgtaatcccagcatttagggaggtctgcaggtaggaggattgcttgagcccaggagtttgagatcagcctgggaaacatagcaagaccccatctctacacacacacgaggttttgccatgttggccaggctggcctcgaactcctgacctcagatgattggccgcctcggcctcccaaaatgctgagattacaggcatgagccaccactcctgcttcacaaactccattttgcctttggcagaggacgtgttttctttcttcatgccctctggatatgatagaggtccccaagcttttcctggctaccacttgctctgaccttatacatgttgggttttgctcttaaagaggacagcaggaagaaaggttggtttcagaaaccaagagggttggcagtggatgtgtagattttgtcacggagtccgcagagctcagcttttgaacctctgagaagtttcatttcttgtgcagaaagagtacacttgaattcaagtttgcctttagaattgcactgaataaaatactgcacactaaaggaaagcttattttctgcatggttgtcttttcaaagacaatattcgaagcatgtttcctagagattgtgtggatgagggtgagctggctgaggcatcactcaagctaggggtggtgtgtaagaagcacgaggagccacaagaggcacctcctatagtcagctaagggcttccctttctgcgcccagcttttggttgaagggtgaatttttttttttttttttttttttttttgagacggagtttcgctcttgcccaggctggagcacaacggcacgatctcagctcaccacaacctccctggttcaagcaattctccagcctcagcctcccgagtagctgggactacaggcatgcaccaccacgcctggctaattttgcatttttagtagagacggggtttctccatgttggtcaggctggtcttgaactcccgacttcaggtggtctgcctgcccc

SEQ ID NO: 95132 - DNA, 1011 bp, Homo sapiens
ttgattctaggatccgggcacagaagaaaaagaattagttccatcagggaggagtcagaggaatttgcccaatggctggggcatctcccttgacttacccataatgtctttctgcattagttccttgcacgtataaagcactctaatttggttctgatgcctgaagagaggcctagtttaaatcacaattccgaatctggggcaatggaatcactgcttccagctggggcaggtgagatctttacgccttttataacatgccatccctactaataggatattgacttggatagcttgatgtctcatgacgagcggcgctctgcatccctcacccatgcctcctaactcagtgatcaaagcgaatattccatctgtggatagaacccctggcagtgttgtcagctcaacctggtgggttcagttctgtcctgaggcttctgctctcattcatttagtgctacgctgcacagttctacactgtcaagggaaaagggagactaatgaggcttaactcaaaacctgggcgtggttttggttgccattccataggtttggagagctctagatctcttttgtgctgggttcagtggctcttcaggggacaggaaatgcctgtgtctggccagtgtggttctggagctttggggtaacagcaggatccatcagttagtagggtgcatgtcagatgatcatatccaattcatatggaagtcccgggtctgtcttccttatcatcggggtggcagctggttctcaatgtgccagcagggactcagtacctgagcctcaatcaagccttatccaccaaatacacagggaagggtgatgcagggaagggtgacatcaggagtcagggcatggactggtaagatgaatactttgctgggctgaagcaggctgcagggcattccagccaagggcacagcaggggacagtgcagggaggtgtggggtaagggagggaagtcacatcagaaaagggaaagccacggaatgtgtgtgaagcccagaa

SEQ ID NO: 95133 - DNA, 1234 bp, Homo sapiens
acattgagaaccagctgccaccccgatgataaggaagacagacccgggacttccatatgaattggatatgatcatctgacatgcaccctactaactgatggatcctgctgttaccccaaagctccagaaccacactggccagacacaggcatttcctgtcccctgaagagccactgaacccagcacaaaagagatctagagctctccaaacctatggaatggcaaccaaaaccacgcccaggttttgagttaagcctcattagtctcccttttcccttgacagtgtagaactgtgcagcgtagcactaaatgaatgagagcagaagcctcaggacagaactgaacccaccaggttgagctgacaacactgccaggggttctatccacagatggaatattcgctttgatcactgagttaggaggcatgggtgagggatgcagagcgccgctcgtcatgagacatcaagctatccaagtcaatatcctattagtagggatggcatgttataaaaggcgtaaagatctcacctgccccagctggaagcagtgattccattgccccagattcggaattgtgatttaaactaggcctctcttcaggcatcagaaccaaattagagtgctttatacgtgcaaggaactaatgcagaaagacattatgggtaagtcaagggagatgccccagccattgggcaaattcctctgactcctccctgatggaactaattctttttcttctgtgcccggatcctagaatcaagattcttaaggtctgagtacaagttccgcttcaggatggcgctgctgcacagcagggcaccttgcagggccccgaccagtccacaggtgaagatatcctggcctaggaggcaagagcagaggcccctgagcgtgcacccaggcaggcccaggggagggtggggccttggtgctcttccctccacatgagggccacccagagctggctccaatcagacaggggccacagcctgcccaggcagccctgctcaggggatgggaggctgcaggggacagcagggcctgagggcaggaacagaggacgttgggcgacaggggcccagggtctcaggtcctgacaacatggggcagtgagtatacctgtcagatagaggttggggatggggctctgggccctcaaggaggccatcacacaagggtgcaggcggcccaggtcatggtcagccccgtagcaggcacctcggggagcagccag

SEQ ID NO: 95134 - DNA, 1885 bp, Homo sapiens
ttgcagtaagcggagattgcgccactgcactccagcctgggtgacagagtgagactccgtcttaaaaaataattaaacacataaaaataaaaataaaaataaaatggcccggcatggtggcatgcacctgtagtcccagctactcgggaaccagaggcaggaggattgcttgaggccaggagttcaaggctgcagtgagctgtgatcacatcactgcacttcatcctgggccatagtgagaccttgtctcaaaaaacaaataagcaaaaccccaaatctgcctggctggttctgagtattcccaggtaaaatgtttgaaacatgttagtcaagagttctgtgccaaaccactctagaggtttcttgcactgtacaagctagagaagtcttctttggtttccctatctttgctatttccctgcccctgcctgagaaacccaccctttggcccttctgctgtagctttttcagccaaccaagtgccggagaagctggatgtggtggtaattggcagtggctttgggggcctggctgcagctgcaattctagctaaagctggcaagcgagtcctggtgctggaacaacataccaaggcagggggctgctgtcatacctttggaaagaatggccttgaatttgacacaggtaaggcttgtgtggaaaagggttgggagcatggctgtatgttgaagaggcttggagcagcccttgtggggtgatactgagcatttctgttgttttggaagtgccatcttctctctgggtactttttttctttgtttgtttcagacagagtctcacttcatcacccaggctggagcgcagtggtgtgatcccagcttactgtaacctctgcctcctgagttcgtgattctcatgcctcagtctcccgagtggctgggattacactcagtaatcccaccaagtgggccaccacaccccgctaatttttttgtattttagtagagatggggtttctccatgttgtccaggctggtctcgaactcctgacctcaagtgatccacctccctctgcctcccaaagtgttgggattatgggtgtgagccaccgtgcccagcctctgggcagttttcttatgtgacagcatagctactgggagttgaatcgggcagcgatctggcggtttctgctgtgacacctccctacagacagagtgagcagctcactctgggcgtgaacttggccaggccagataaactcttccacctcacttcctcagccacctttccagggctcaatccccatatccctttactaccttgtttttccatctcccaacaggaatccattacattgggcgtatggaagagggcagcattggccgttttatcttggaccagatcactgaagggcagctggactgggctcccctgtcctctccttttgacatcatggtactggaagggcccaatggccgaaaggagtaccccatgtacagtggagagaaagcctacattcagggcctcaaggagaagtttccacaggaggaagctatcattgacaagtatataaagctggttaaggtaacatggacatgctgaggacccagagtttgttctcgataaggctgggtttctttattattagtggaggcactgggggtggagagtgcagtgcgggaggcaggaagggaggaagagtcacatctgttcttagctcagcctccacccaagtccatccagttctctgtctctctctctctggagccttggctccacggctgctgctgtcaccctggcctctggggatgccctgctctcctccctgactaggctggcttccatgacatcagatcactactcctttttactgcatccgagaccagattgggatttttgaaaaggaatttgagcaggaaaatta

SEQ ID NO: 95135 - DNA, 1034 bp, Homo sapiens
gctcgcatgggagggtaggtgaaaaagttaaggtcctggaaccaagtggaggaatgagtcacggggattatcagttccacgagccacggggattacaagtggcagggcgggtgccaacaccttgcaaaccaaggacaatgaccacacccttgggactactattcccggggcctactagggcaaaggctatcgacagtgttgcacactaaagcggggctcctccacgtgcaaggaagccctcctagtactttacatatggggaaactaaggcccacgtctggtagcggctgccttggcaaaatgagaacccaaatctgtgagaaagcctcgagtgcagccccggaccccagggtccctcctgctaccttgtttgagaaccttcttcctggcctccttgtcagttaccaggggcgctgggggccgtttgacatcttcggagaaaggattcggggagctgccagagaatagtcccaagtaaactttgcagaggacggccagcagcagcacagccaggagcagcaccagcggaagccacatcacgccggcgtcgggtcgggtaaatgggacagctccgactgcgctcagcctctaggactgtggctccgcccgggctagttcgctctccagtcaggaggcggaggcagctttgagcactgattaaccagccagccagcgaagagccaactctcaggtgatgattgaccctcccggctctccgtacttcttttgggtttccattgcctactgggaaatgtagttctcggggccaggggagccggcacggaagcggctgtgcgcatgagcagatgaggcctagccgaggcggcgggacccccaagtttggaaagctcttttaacggtgagaacgcgttaacacttgccaaggggagtggttggtgcctgtgcggagctagcagccggcctgaggagggagggagaatgtgatccggtggaaattatcactatggggcgagacaaggccgagagttgtaagactgaaagagaatcccgactgggagacaggagtcctgagt

SEQ ID NO: 95136 - DNA, 1076 bp, Homo sapiens
gttcctggggtgccaggactaagggggcattgccctgtcccccggattacagtgagccacatgtcaagcccaagagccaggaggtattcttcctctcagtgttaataatcaaagcatcctgacaccagcagccagtttttatggcatcctggagggctgacctcatagagaggctaccctccttccttagtcacccaaagttgtgaactatgattgtcagttgtgtgtgggccatctgcccacttaggatgcaatttttgatgtgacagacattccggatgtccaattcccctgtgatgaggtatgagccttgtccagcccttttcctgagggaagcaatgtcagatgaaagacttagaattgcccaaactggctagccagctgccacatgcacagtattgctgataactgagaaaggttagaacatcgtgttgcattttgaatttctaccattgttggaaccaggtctagtattataagcccctgacccagcctgtgtgtgaggcctaaacaaagcctgagcacttcagctaagaccacccaccaaggtgacacctttagcctcacgcctttgataagctggcccaggtcccagtaactccattgtcagaaacagaccccatcccttctagtggtgctgctgccttttggacacagaatccagctcacagtcccctgtgtggtccccttttggccatcctgtggcttgggtagtaagaggtaagcatttggctgaggcaagttgttcattcagaataaattcacagctgcttaaattttgtcaacaggccgagcgtgttggctcatgcctgtaatcccagcactttggaaggccgaggcaggcggatcacgaggtcaggagttcaagaccagcctaaccaacatagtgaaaccccatctctactaaaaatacaaaaattagcagggtgtggtggcgcacgcctgtaattccagctactcgggagactgggacaggagaatcgcttgaacccgggaggcggaggttgcagtgagccgagatcgcacggctgcactccagcctgggcaacagggcaagactccaactcaaaaaaaaa

SEQ ID NO: 95137 - DNA, 1050 bp, Homo sapiens
gctgggtgtggtgatgcacacctgtagtctcagctacttgggaggctgaagtaggaggatcacttgagcccaggaggtggaggttgcagtgagccaagatcaggccactgcactcccgcctgggcaacagagtgagactccgtctcaaaaaataaataaataaaaagtaaaagaaaataaaactgacttcagtcaacccatcagggcacactaggtccttttggcctccagtgtcaaggacattcagtacagtgggtgggaagcgtttgtgtatatgggggtatgtggattctatcctcaagctaaaggtcagctgcctctacagatctcagagttgaagaaccatggcattctccaggctctgaccacagaagcttatgaatgggagccacgtggtaaggttcccttcagggcccttggagtctgggtgggacccaagtcagaccttcccatgcatctgctgttcatcatttgaatttctctcactccttgtctttcagaattttgtagatgtatcagtccttggggaaaaatagaatcaacactgaattaggaatcaaaagaccagagttctgatcttcctctgctagtggtttactgtgtgcctctgggcaagccatatgatctctaatattagtacctcccttatcctcaaagggatgttatgaaaatgagacacaatataggaaaagcctttgaaaagttattctacttcatctgctttgcaaggcgcttccccatactatatttaaagttcactctacttgccaagtgattatggagaaaggtacactccagcctggccaacatggtgaaaccccattgtattagtccgttttcatgctgttgataaaggcatacccaagactgggaagaaaaagaggtttaatggacttacatttccacatacctgggtaggcctcacaaacatggtggaaggcaaggaggagcaagtcacatctcacatggatggtggcaggcaaagagagagcttgtgcagggaaactcctgtttttaaaaccatcagatcttgtgagacttattcactat

SEQ ID NO: 95138 - DNA, 2929 bp, Homo sapiens
cttgtcccaggccagcagtcatcccgggatgagcagggggcctgtgccgtgctggctgtgcacctcaacacgctgctgggagagcggcctgtgcagcaccgcgaggtgcagggcaatgagtctgacctcttcatgagctacttcccacggggcctcaagtaccaggtcagagcccacctctaggcacccccaccctgcagcttccctcagagccagccctgcttctggctggttctcaccctgcagaagacccgggtgcctttggagccgggtccccacctttctgcccgtcttccagtgggatggggtgcagagggctctgggtctcctgtcagtccactcagatgggccgtctgggctgcaggaaggtggtgtggagtcagcatttcacaagacctccacaggagccccagctgccatcaagaaactctaccaggtgaaggggaagaagaacatccgtgccaccgagcgggcactgaactgggacagcttcaacactggggactgcttcatcctggacctgggccaggtgggtaggctggccagactgagcactccgtattggcaccatcctttataaggacggaggggcaggaggccaggaaagagggagagaagctgagaagccgtaaacccattccaagtgagatcactctgaccattggagaatgtccctatatttgtaaggactgatgccagcctccttctgccatctagacattgcctctgatgctctggagctttttccctcctcttggaagcctctgagttcactgcctgccagaccattcattaattcagtcatttatctcttcgttcagtgaatctatgatgctctctctgagccagcacagggaccataaaagctcgctctggggaggcagccaagatgggccagtcacttgccataacctgaggcaggatgtgatgagggctttaagggggacagctgccatgtgctgggggggtcttggggcagggaggggccctctagcctgagccgaagccagttgtcccaggaaggtgacattggactagacctataggaggggagatgccactccaggcaaagggagaaggtgagctgagccaccaaggtggggaagggtgcagacatgcacacaccaggggtctagtgagactgggacccgggctgggggacaggagcagggggagggaaattcctaagcaaggtggaaggtgagccctaggtcatgaggagattggctggctgaggagtatgggctgcgtcttgtggcgctgaagatttggggcagggagatcaatccaggagctcttggtgaggactacacgtgctgagacaaggaaggggacaggtgaacagacctcgccattaccagaaaaggagaggtgacaggggctctgcctggcagggcggtgggtagaagtgtgagatgctgcgctcaaggagccattcagccattcacccatccagtccttcactcagtcagtcaatatttattttgcgcctaaatccatgccgggctctgttttagcagtgggcccacagtggtgagcaaagccaaacaaaaccttcatgtcctaatgaagctcactttctagtaggtggagataggtggttaagagacgtttaaacataggagatatgtgatgggaagaaaaataaagaggtgctgggcgtggctgctcacgcctgtaatcccagcactttgggaggccgaggtgggcagatcacctgaggtcgggagttcgagaccagcctgaccaacatggagaaaccccatctctactaaaaatataaaattagccgggcctggtggcacatgcctgtaatcccagctactcggcaggctgatgcaggaggatctcttgaacccaggaggtggaggttgcggtgagctgagattgtaccattgcactccagcctgggcaacaagagcgaaactccatctcaaaaaaaaaaaaaaaaaagaaaaagaaagaggcttgagcccagcggtttgtaaccagcctgggcaacatagtgggaccccatttctacaaaaaattaagaaattagccaggcatggtggcaagtgcttatagtctcagctgcttagaagctaaggtgcaacgattgcttgagcccatgacgtcaaggctgcagtgagccatgatcacgtctttgcactccagcctggatgacagagtgagaccctgtctcgaaaaaaagaaaggaagacagatggcaggtgggcagagaaacagttgcagtgggtggtcgtgggcattttcagagagccctctgtgctgtgctctgccttcctggttgtcctgcctcagggacagttcagagaggagagagggagagctgtgcgcccttctctgagctggggagcaggacacaggcatctggctctgacccggactttcctgcttccttgcagaacatcttcgcctggtgtggtggaaagtccaacatcctggaacgcaacaaggcgagggacctggccctggccatccgggacagtgagcgacagggcaaggcccaggtggagattgtcactgatggggaggagcctgctgagatgatccaggttgggggacattggagtgggtggctgggagcctctgcttgaaagtggccaagagaggtggtgatgagctgagggctgagagtggccggtggagggtggcaggggccatctggtgtactgcctagggctgtggccagctcacagggtgcccctctgggtagatgctcgtcctcgaggctgagcagcctggctggtggggtgggctggactcagccctcactcacctcacctctgctgggtgccctagtgcagggcgcagtttgccccaccagaagcagtggccctgggcatgatgggctgggaagttccagggcaggggtccctataaacctggcctgccctggcccctgcaggtcctgggccccaagcct

SEQ ID NO: 95139 - DNA, 2076 bp, Homo sapiens
gctgagtgtgaggaacagtgattcccattgatccttgttccctccgtgggtcacagagtccagaacttaagagccacccaaggtatgcgctgttgtgaccaaaatctatgaagctttccagcgctggggctggggatggaaataggagagtgctctgtggtttaactttctttcctcctgtggagaaaccgggagctaggggagtggccaggcacatttctacctcaggtgctgatggcacattgcaaactaaagggaagagaaagaagtctgggtttatcgagcatgtattatttgctcattaatcataggatctcatttcatcttcacatttaactgtatgcacgtgttacagattggggcacagggaggctccaggaggttaagtcacttgcacagctagtaaggagccaaattgtctagctcttatcactctaccaggttaaccgcccagcctgtggttttgtggggactaggccctactgggattctcacccagactatccttttttttcttttttaaacttttaagttcaggggtacatgtgcatgtttgttatataggtaaactcgtgtcatggggctttgttgtacagattattttgtctccccggtattaagcctagtacccattagttattttcctgaatctctccctcctcccaccctccaccaaactaccctattattattgttattattattattttttgagactgagtcttgcccagtcacccaggctggagtgcaatggcgcaatctcggctcactgcaacctctgcctcccgggttcaagcgattctcctgcctcagcctcctgaatagctgagattacaggcatgcgccaccacccccggctaattttttgtgtctttagtagagatggcggtttaaccatgctggccaggctggtctcgaactcctgacctcatgatccacccgccttggcctcccaaagtgctgggattacaggcgtgagccaccgcgcccggcccatattaccctatttttaagcctggcagtttggccatggagacacttggatgctagctacaggccatgttctttggggagaagatttaacttcccgtcttgctctagtgaaattttatcaatttcgtttcaatgagaaacattcatccagtattgctttttttttttttgagatggagtcttgctttgtctcccaggctggagtgcagtggcgccatctcggctctctgcagcctccgcctcctgggttcaagtgattcttctgcctcagtcgctccagtagctaggattacaggcacccatgaccatgcccggctaatttttgtatttttagtagagacagggtttcaccatgttggccaggctggtcttgaactcctgacctcaggtaatctgcctgcctcagtctcccaaagtgctgggattaccggagacagccaccatgcccagcctatccagtactgtattttctccagacttttcccacgcagtcaaataatgaggttttgtttgaaggtctgctaattaggaagatttgttccagattttgctccagggtccccaggccttgaccctgaacctggagccttgtctcaagccagcctgctgaccaatacctttccaggacaggccggctaggttctgggcagaggaactacgcttgtgtggctgcataactgggtgctcactttctcctggagcctcatactgagtccgctcatccttcccccagggattcagaagggaatgggagcctcccttgcaggggcttccactccctgtgtgtttgtgggcagtctcttgtgctctcaggacctcggtgtcctccagaaagccagcgagttggaggagacaagctctagggtctagtgactgtgatgtaggcaggatagttgccctgggtcaacccaggatgggctgtctctcagagggcccagggcccagaagtcatgatgataaacatctggtgaatgagaagcagaccaaagggtagagacctgagaggcatcagcatggcatgcggaagatggtgaagaatgttttatggcctcagccattccctgagaactgagcttagccagg

SEQ ID NO: 95140 - DNA, 1079 bp, Homo sapiens
aggcagcgccaaggtccggctggctgcggccggccggtggtggggcccgcgcgggtcgtcctcgtccgccgggtgatggaagagcggcgaccgcgcgctttcctcgtggcgccgccagggcctggcgcgtggccgccgctcctcttccccctcccctctccacccttcccttcccccctcccttttcattcggtcgcgcgcctaggcatgcggaaggttccagaaaacgtgaagggcgggggctgtggtcgctagtgagttctggccgggaagggagggcactgttaacccctcccggccctgccgtctgacaaacctggagtgggcgacccgccccgcgtgctcgcgtccggccctcgggagcgcgcgccccgcattgcagcggcgaccacgtgtttgccgcatgtggtatctgggcgagggggagccgtgagcctccccggctgtcctggccctcagtttgaggggtggggggcctatgccttgggacgtcgtctggctccactgcctcagtggttaggtcttgactacacactggagaatacgcacatgcccttcggcggatatggccttgcctccaaggtgacggcctctgactaaatatagctcatgtccaagaaggcagtccttatttggaccccttgtgaaaaggatgggaagcatgaattaggagctgccattgctttgggttcgcatttaaagtcttcggtgcagggttttacttgaggctttgtccgctcaaccgccattatggggatcaattggcacgtgaaggaggagtaaagctatatttccaggaactgaaaatctcagcctgagcatatcggctagtaaagatgattatttggctcttttggctgtttctgcccttaggatgaccgcagtagttatctatctggtggctttagggtctggtcagtttactgtgcccatgatgaaatcccacaagtaacttagtggtatgagaggacaaacccaggatcttgatgagtgctgaaggttagctgttacaccagttagtagtagaccgaagttcagagcctgcagtctggcttccacattatgtttggattctgttt

SEQ ID NO: 95141 - DNA, 4995 bp, Homo sapiens
aattggtgttccttaagattagggaaactggcctacctgtggcctcagttctaccagactcccaggtgcagaggggtttggtacagttgtggaagtgaatatgatatagggcaaattctgttctttaaaggatataggactaacagttcacctttctggtgattagatttataatgcaaactttgaattttaggaggaaagtgcaaacacaatgaattaagatgtattaagcatgttttttaaaatctccaaagattttacagatagtaacagggagggagcttgcatacatacatacatactttgtttaaagttaaagaaactgagccaggaatttctcttttccagataagatttgtgaccaaatcagtgatgctgtccttgatgcccaccttcagcaggatcctgatgccaaagtagcttgtggtaggttcagaatgtgcttatcaactggtggaaagatagcataaaaattatttttatagaagtgatgtttgagttgaatgtctctttttattagaaactgttgctaaaactggaatgatccttcttgctggggaaattacatccagagctgctgttgactaccagaaagtggttcgtgaagctgttaaacacattggatatgatgattcttccaaaggtgtgttttaatgattttgctcatttttttctaggtaacagctgtgaggtttgaagaaactcctagaatgttcctgctaatcctaaactccagttgtatcttactatacactaagccctattctgttcattctctaaaaggtccgatggtttaggtatatttgatttcttcagcagtgtttagaattccagataattgctgtaaacagcaggtatttctaggacgtaaacaagatgttgtgttttttgcttataggttttgactacaagacttgtaacgtgctggtagccttggagcaacagtcaccagatattgctcaaggtgttcatcttgacagaaatgaagaagacattggtgctggagaccaggtatcttggtgtagaggctgttttaatctcttctaacattaaattctggagcttgatcacattggtgacttttctttctttagggcttaatgtttggctatgccactgatgaaactgaggagtgtatgcctttaaccattgtcttggcacacaagctaaatgccaaactggcagaactacgccgtaatggcactttgccttggttacgccctgattctaaaactcaagtaagtgatgatcataaagcttggttgtctcatttattacatcagcacagaagatccataattttgataatagctaactggaaaaaatagcatttgttttcctatattgtaacttcaggtagagaaacaaatacaaagttattgtttggtgtgatgttctgatgacctgtgttgccttcaaggttactgtgcagtatatgcaggatcgaggtgctgtgcttcccatcagagtccacacaattgttatatctgttcagcatgatgaagaggtttgtcttgatgaaatgagggatgccctaaaggagaaagtcatcaaagcagttgtgcctgcgaaataccttgatgaggatacaatctaccacctacagccaagtggcagatttgttattggtgggcctcaggtaatgtcattttgttgcatttttctggatttttgatggttacttaaaattttggctactacatttttttcaggctttctgaaacctacatgtgaatcatcggaggatatttgctgaatgaattcagaataggcaacctaatccacttggaaagcactaggcgtaaagtaacttaaatcctgtaatttcagggtgatgctggtttgactggacgcaaaatcattgtggacacttatggcggttggggtgctcatggaggaggtgccttttcaggaaaggattataccaaggtcgaccgttcagctgcttatgctgctcgttgggtggcaaaatcccttgttaaaggaggtctgtgccggagggttcttgttcaggtatacactctttatataacgaacgattaaaagtcatgtaagtgggagggtatttagtagtaatctacttaactacttgttttataccaacgtattatacaagtatatgggtctttgcaatcactgattcttacgacatttgaatccttttaggtctcttatgctattggagtttctcatccattatctatctccattttccattatggtacctctcagaagagtgagagagagctattagagattgtgaagaagaatttcgatctccgccctggggtcattgtcaggtaaagatggtaaagcctgttgctagtcaagtattgagggtgttgggtgtgtgtgtatatacttaaggctgaggaggtgaaggtgtgaaggaagactcctcaaatgggaatatattttaattcctggaacagttttgaactgctgccttagtgaagacttagttatttgagaaatttaaaattacggtgctccatggcttaggctaaccactctagagaatgttccagatttgatatttgagctttgtgctcttctacttaagggtgttaagaaaatagagataaagtgggttgctcaaggtttgttgcaatgtaaaaaccatggtagggtgtgggcggcgggaccttggtaagtattgtgtgatctcaggtgagctttttgacaattgaaatttctcagaataatgacaagttttcgtatttgttgagccagggacggaaaaacaactatagttactaataaggactgtgcaaggagtttggacaccagggaagtaacacttttgccacaaatttttttcctagcatatcccagagaactcatttgccagagctcttgaaaatgagtcttgctgattgttttgctttattttaatttaatgctacatattaagttacggacttgtatattccagggatctggatctgaagaagccaatttatcagaggactgcagcctatggccactttggtagggacagcttcccatgggaagtgcccaaaaagcttaaatattgaaagtgttagccttttttccccagacttgttggcgtaggctacagagaagccttcaagctctgagggaaagggccctccttcctaaattttcctgtcctctttcagctcctgaccagttgcagtcactctagtcaatgacatgaattttagcttttgtgggggactgtaagttgggcttgctattctgtccctaggtgttttgttcaccattataatgaatttagtgagcataggtgatccatgtaactgcctagaaacaacactgtagtaaataatgctttgaaattgaacctttgtgccctatcacccaacgctccaaagtcataattgcattgactttccccaccagatgctgaaaatgtccttgtgatgtgcacgtaaagtacttgtagttccacttatagcctctgtctggcaatgccacagccctgtcagcatgaatttgtaatgtcttgagctctattatgaatgtgaagccttccccttatcctccctgtaacttgatccatttctaattatgtagctctttgtcagggagtgttccctatccaatcaatcttgcatgtaacgcaagttcccagttggagctccagcctgacatcaaaaaaggcagttaccattaaaccatctccctggtgcttatgctcttaattgccacctctaacagcaccaaatcaaaatctctccactttcagctgtcttttggaggacgtacgtaataaggttttaatttagtaaaccaatcctatgcatggtttcagcactagccaaacctcaccaactcctagttctagaaaaacaggcacttggcagccttgtgatgtcatacagagaagtcacagggcagtacctgagggtctgtaggttgcacactttggtaccagataacttttttttttctttataagaaagcctgagtactccacactgcacaataactcctcccagggttttaactttgttttattttcaaaaccaggtccaatgagctttctgaacagctggtgtagctacagagaaaccagcttccttcagagagcagtgcttttggcggggaggaggaaatcccttcatacttgaacgttttctaattgcttatttattgtattctggggtatggcgtaagtacagagaagccatcacctcagatggcagcttttaaaagattttttttttttctctcaacaccatgattcctttaacaacatgtttccagcattcccaggtaggccaaggtgtcctacagaaaaaccttgggttagacctacagggggtctggctggtgttaacagaagggagggcagagctggtgcggctggccatggagaaagctgacttggctggtgtggtacagagaagccagcttgtttacatgcttattccatgactgcttgccctaagcagaaagtgcctttcaggatctatttttggaggtttattacgtatgtctggttctcaattccaacagtttaatgaagatctaaataaaatgctaggttctaccttaactgtgtctgttactcatttgttaaagtgctttggggccataggtacgtgcctataatcccaacactttgaaaggctgaggtaggaggatcactttaacatagaagttggaggctgtagcgaaccattatcaagccactgcactccagcctgggtgactgagactttggctcttaaaaaatgctatcatatgaataacctgagaatactatatgtgtatctttaaccttgaattgtaatccataattagccataattcaggaaaataacctcaatccctagacccagtgggtgggcattttttaaaagcctaagcaagatttagtcctcctagtccacttaagccaaaattcatgtgtccttattgcagcagccattcaatgccatttttaagttttcaactaaggttgagggcttcaaaccattgaaggcataaaaaccgctaaaagta

SEQ ID NO: 95142 - DNA, 1763 bp, Homo sapiens
ataataccttgaatgaattagagattttccaccaaactccatttggcctcctcagtggtgggggagggtggcaatctgcttgacaactaacatgtcggccctgtcctggtctatccctaactagatgctaatacaaaggttgaaaatacagatataggtagtaatgaaaacagatttggctgggcacggtggctcacacctgtaatcccagccctttgggaggccaaggcaggtggatacttaaggtcatgagtttgagaccagcctggccaatgtgggaaaccatgtctctactaaaaatacaaaaattagttgggcgtggtggtgggcacctgtagtcccagctacatgggaggctgaagtggaagaatcgtttaaacccaggaggtggtggctgcagtaagccaagattgtgccactgaactccagcctgggtgatagagtgaaaccctgtctttaaaaaaaaatagattcaagaggtatccaggaggtaaaattgatgggacttggcaattttaagaaatgcaaggaaaaaggaagagtcaaggctgatgacctagagataacagcttggctaaggtacagagctgccattcaataataaagaataaggaagtctgagttggggatgaatgtaagttctgtttaggatgaactgagcttgatagccctgtgggatatccaggtggaacttagacctatacgtctagggcacaggaaagaaacctagcatcgttggaaatcctggagtagacacaatcatctgaagtatgtatactgaaaaagcagttgcttaggaaagaacccccggaacactgtccaaggaggagtgggggagagtatgggaagagaagcctgcaaagagatgcaatcatttacagaagttactgagactgccaatttactaccggtctctgctacaagtccatgagctcccaaagcagggatcctttttcataaccctgcattctcgcttcctagctcagtgccaaccctttgaattttcactgaactgaggagcttcctgagttacccttgtataccccaacctacaaaatgtctaagcattccctaatcccttactaaatttagttaattcttactttacctccccttctgctcaccaaaggctagaataataccaaatactaagcttatttttagagaaaatctagcaatcatctagatttccttatttaactttgatgctgctattctgactgctctcataactgctagtgaaacactgggtgtatatagataataggaacaaagaaggaaccaaaattgcaatgaagataaattactttgtgtgcatttacaacctgaccaccatccaattatacttttaattaagaaaacatgttttaagctgcattatttcagattatcagtgattctgaaaattacaagtggcagggtgcaggaccttaagtcaaatagacgttaagttcaaaccatcagtccattcgtcactagctgtatgtcttcgggcaaattattttacctctcagcctaatgtaataatgcaggtaacactgctcacgcggtgtgttgcacatagcaaacacttgggaacagttagctattcatcgtggtacattaaattgcttttccccaagagccactttatttatttattttgagacgaagtcttgctctgttgcccaggagtgcagtggctcgatctcggctcactgcaacctccacctcctgggcccaagcgattctcatgcctcagcctcctgggtagttggattaca

SEQ ID NO: 95143 - DNA, 1061 bp, Homo sapiens
agagagtgatccatctcagtgattcctcttttttctgtcttccgggcagaaacagggcctctacccccagagctgcagcctctgttggaaggggaagtaaaagggggccctgagccaacacctctggttcagacctttcttagacgccaacaaaggctccaggagattgaacgccggcgaaatactcctttccatgagcgattcttccgcttcttgttgcgaaagctctatgtctttcgccgcaggtaagttcacaacaatatttgtcattgccatcatatgttggcaagcttggtaactttcccctggggagagtaactctagagactgtcatacaggaaaggacagtttagctctaggtatcttttcctgccattcttcttgatttactggaagaataagtggcctatatctgatggcctgctttcttgttctgcctcagcttatctccagcctctctgtgggctgttcctaccctatcctggaatcctctaccagactgtataaagagtggtgtacccttccagctgggagatggagggtcacttggggggagattcccatatatgcctgtgtgggaggagtgaggaccaggtgccttctaagggctttagctgaaattcttctggtgaaacaggagtttgaacttggtcggctttttcctgtttttcagcttcctgatgacttgtatctcacttcgaaatctgatattaggccgtccttccctggagcagctggcccaggaggtgacttatgcaaacttgagaccctttgaggcagttggagaactgaatccctcaaacacggattcttcacattctaatcctcctgagtcaaatcctgatcctgtccactcagagttctgaagggggccagatgttgggtgcagatgtagaagcagccagtcacagacccattctatgcaatggacatttatttgaaaaaaattctcaaaagttttttttttttttttgggggggcggggttctaaagctgtttttaactccgagattacaacttagaggaaccaaggaaataaagcaaataagatttaacaaccc

SEQ ID NO: 95144 - DNA, 1070 bp, Homo sapiens
gattctctcgctttagcttcccaaaatgttggtattataggtatgaactactgagcctggcctgttcacattttaaagataaagaagctaagtattattgacgagtgaagaatttgcctaaggtcagctagcagttaagaaacagaagtgagtccaggtgttcatgactgcagagtccagtgctcttgaccacagtgtaagctgcccctttcccagcttctacttcttgaaaacttgctttgcttctgcttccccagagtacatctggtgttagtagcctgggtctaatcagttctcttccagaatacaagctgttagcaggaaccctcttatactggatcctggcacccaggtctatgaaatgttagtttatgttgtgtgttactctgctgttgagggttttcatttttttttaaagataatacaccgcatatttatttacacatacatagcttttcaaacactccatcaaattcctcccctttttcagtaattttctagtattgtagtccttttttcctgatttgatccattagaacaaactcaactgggagctaacaagaaatactgaactttttgctgttataacttagtagcaatatttcttctatgacttgtataatcatgttagaatttgctcatataattctaaaaggtctcagaataaccagggaggatatgggagatgtgcccaggatagataggattatcgtgtataaaaggaaggatggagatgtagctgcattaagcagctcccccctcaatgtttacctccctcggtgtaggtctgtggacggtctgctgaatgcccataggaggaatgcccacgtgcccctttggaactatgcagtgctccgtggccaggtacagcattttaggacagagggaggagctccttgacagccatgtggtcagcatggccatcccactgccagactacactctccgctgcctccctggatcttctgtttttagtttttaccctttgctggaaagctaggctggcttctcattttttccaatcccttaatctctgaattatcttatttgtcaaggaaagactagagctt

SEQ ID NO: 95145 - DNA, 1121 bp, Homo sapiens
ttaggcaaagctgccccccaggctgggaaatccaagagttagtctcatctctgtaagttggaccccagtgaggaccccagctgagtggaaggctggaggccaaaaaccggtaccactgaggttcccagacggagagggaagttggagcagtgatatagggagcaggatcaggccaggaggcagaactggcctgaccagtcagaggcccaaagaggaagatctgagcttctcagtttggggatagaggggttaggcagagactatgatgtgtgctgcttcaaaattacctttctagcctgtagggtaggtctcctccctgtgtgttccagccaggtagcttggttacccattctttgctgccttcttaggccagtgggaaaccttagggcagctgtgcattgattgggtagacgccattctggagcaggtgagaaaagaatcagctttgtgggagggtggggtcctgggaagatcccaccttgggacagcttagaggaagctgaggtgctggaagccgggacttacctaggtcctaggccctgccttgacgtgcaaggggaggagcctgtgagacttaaggtgtgccgcactcaccccgaaggccagaccttcactccgcacacatcatacccttacacgaaggatgctgttactctcatgctgtacccacctacagggggagaaggaggcttctagatctcaggggcagatgagggccaggtgggggcctcatgcagccctgacctcgggcttggtgtccaggcaggaatagagttggagcggtgccagcagcaggcgaacgaggtgacggaaattatgcgtaacaacttcggcaaggtcctggagcgtggtgtgaagctggccgaactgcagcagcgttcagaccaactcctggatatggtgtgaggcctgggggagcatggaggggaggggagaggattgggaaagtctctcttgggctgtattcaggatctccagttccttggtggggttgaggccttcttgagggccagtgtggggcctctgggtttcctcaggcacccatagcctagacatgcaacagatagaccccacaagataagaaggccttggtttgaagctgtggaccttcttaaaggtag

SEQ ID NO: 95146 - DNA, 2081 bp, Homo sapiens
gtccggcggggatccggacagcgcatccggaagcgccatgggccaacgctcgcaggaacctgaacccctgggccagcgccgcctttgctcgcagaggcctctagcatctgtactgtcgaagccctctgagcttcagggcagactgaagagccttacacaccagacacttggacgcgatcgcgccagaaatccccgggaattcagtcttggctccgactccaaaacaaatgattcctcaccagccagatctccatcattggcgttagtctctggtcacctgacttgttcaagccaatgagagggggccgaattagtacttccgctttccgtgctgtttaacgagccactatgcccgtccctcggatactctgattggccagcctctctcagctcgtcagtttattggccagcgccgctaggccgctatcgagcagggtccgagggctgtgtcagaaggctgggcagccatggcgtcctatttcgatgaacacgactgcgagccgtcggaccctgagcaggagacgcgaaccaacatgctgctggagctcgcaaggtgggtgcgcggggcttggggatagggtccaaccagcaggtttctgggctggggctggctggagaaggcggattaccaggggcagcggattctggggaggacagatgagtaatctggagtgttagtacgggcggcgagactgaggggtgtggggatgagcatctcgataatttgggccgtccgttgggccggcctggggcaaggggattgcgggaaagattggagctggagagtggtgggcgtgggggcggaaggacagcaggctctgggaggtctcagagaaggtgaggcatgggggcggggttggggccgtgtgctgtgagtgggtatattcatcagtaacagcaggcactgctgttactggacctggaatctggcttggtcttggaatctgggctctaccaggttattcagcgtagcctgagtaacttctctgaatctgttgcctcatgtgtaaaatgggaataaacactttacgtgctggggcggtctgatagcagttgtaaactatttcccatcgtgctttttatctagtgagcatctactaactactaagggtagctattattcctactagctgggcagcgtgtttattaatgtccagtggattatggggacaaagaaaaagcatagttttcctttgttctgactttacatccccttccccaggtcacttttcaataggatggactttgaagacttggggttggtagtagattgggaccaccacctgcctccaccagctgccaagactgtggttgagaacctccccaggacagtcatcagaggctctcaggctggtgaggacactgattctttctgctatttgggccagacccaccccttccccaagccagactgtggtctggtccttcagttttccaggtcaggtgggggcaagtgtccttcaggagtgggagcttgggaggcagagcctgtagcagctctcctgatcagcactccttcctaaagagctcaagtgccccgtgtgtcttttggaatttgaggaggaggagactgccattgagatgccttgccatcaccttttccattccagctgcattctgccctggctaagcaaggtactgcttctcttcttctagctctcaccgtgccctgggcccagtactcaagcttctttctgttcatggactgctgggggatggaagaagagtggcagttgggagcaggggagggtggttatcagcttatgaagatcagaccaaggctagaacactactctacttttctcagacaaattcctgtcccttgtgccgctatgagctgcccactgatgacgacacttatgaggagcacagacgagataaggtaggggctgatgcttaagtggaggggtcgtaatgggctccctgagtcctgtccccgctgccatcacttcccacctcagcaggactgggtaggcctcagaatccctggctctggctgtcttcttagtgactttgatttgtggtgagagcctcagcaatgcagacgccagaggcctgaaaacagagccagccccataata

SEQ ID NO: 95147 - DNA, 1048 bp, Homo sapiens
tgaggcaggagaattgcttgaacctgggaggcagaagttgcagtgagctgagatcatgccattgcactctagcctgggcaacaagagcaaaactccgtctcaaaaaaaaaaaaaaaaaaagctgataaactagcctgcaccctcctcccactgcaatgtctagttaactttgtaatcccacaggttttctttttgctccattgagaaagccacttttaatattttaaagttgctctctgtaccacccccaccttccccccatgcctcctaaggaatcaaagttcaaaccagactctgagtgggggatgggtgagattatcagaccaagttagttctttagattgcttagaggcccagaagggtttcaagccctttgaaggggtatttgggtggcacctggcatcctttgtttctggcaacagagtgcactcagcactcctggggggcaagggcttcctcccatccttggcttatggaaagccatcccagatcaggccccccaactctccagaacaggctacaaacatgcaaattagaattcttttaatataaaaaaaagtactaaaatacccacgtggttctgctgtgttatttgccctaaaggaagtgaggggcagagtgaagaatcccagtgcagctcagtgggcccagaaatgggcctttccgtaggctaaggcgtgcccactccacctccaccagacttctatcccctctgctgttcccagcccccaattcctgcagcaggaaaccccagtggtctggctttggcactgggagtagaaggcacctgaagggctggctgggtgagtgaggacaggtgacctttaaaaacaaaacgacaccgtggggtggggaagcaggtcatgcagctgtggcagctggcagggcccactcctccatggcacaggtgggcatgggatggccacttctccagaagtgaggaagcccagatcccaacagaatactttctcaaaattgtttttggtacgaaataaatggaaagaagatatggggtggggtgctgtggaggccgggccagccaccctcc

SEQ ID NO: 95148 - DNA, 1457 bp, Homo sapiens
agggagagaggagattcattgaaggaggggtggagaggtggggccatggccacatcaccaactggcccttctctgggcccaggtggatcatgccaggtctctgcactacgttggagctggcgtggccttccctgcggggctgctctttgtttgcctgcactgtgctctctcctaccaaggggccaccgccccgctggacctggctgtggcctatctgcgaagtgtgctggctgtcatcgcctttatcaccctggtcctcagtatcctttcaggacggggcagccaggaactcatcctctagctcaacctttctccctcccaagaggatggggggtggaggcctaacactgccatgtgggggagaggactaacacctctccctttggagaggtgaggcctgagactgcagaaggggtgttgccaggtttccgtatgtcctactgaacatttccttagcctcgttttaggtggagtcttctttgtccatgagagttctcagctgcaacatggggcagccctgtgtgagtgggtgtgtgtcatcgatatcctcattttctatggcaccttcagctacgagtttggggcagtctcctcagacacactggtggctgcactgcagcctacccctggccgggcctgcaagtcctccgggagcagcagcacctccacccacctcaactgtgcccccgagagcatcgctatgatctaaggtctggggagggtggctggcccggcctccacagcaccccaccccatatcttctttccatttatttcgtaccaaaaacaattttgagaaagtattctgttgggatctgggcttcctcacttctggagaagtggccatcccatgcccacctgtgccatggaggagtgggccctgccagctgccacagctgcatgacctgcttccccaccccacggtgtcgttttgtttttaaaggtcacctgtcctcactcacccagccagcccttcaggtgccttctactcccagtgccaaagccagaccactggggtttcctgctgcaggaattgggggctgggaacagcagaggggatagaagtctggtggaggtggagtgggcacgccttagcctacggaaaggcccatttctgggcccactgagctgcactgggattcttcactctgcccctcacttcctttagggcaaataacacagcagaaccacgtgggtattttagtacttttttttatattaaaagaattctaatttgcatgtttgtagcctgttctggagagttggggggcctgatctgggatggctttccataagccaaggatgggaggaagcccttgccccccaggagtgctgagtgcactctgttgccagaaacaaaggatgccaggtgccacccaaataccccttcaaagggcttgaaacccttctgggcctctaagcaatctaaagaactaacttggtctgataatctcaccc

SEQ ID NO: 95149 - DNA, 1670 bp, Homo sapiens
ttaacagctttatagcccatcctcattgcttactgccacccctcagctggggtccaaggcagtactattcagtttattcaccagacctgcctccagacatctacttctttcaaaaattagtgttttccatcaaggagcatgttccagagcatttcccagagatgtcccaaagaacactgtccggtgctgtggcgtacagtggcaacagcattagactaagtggaacatcccagcaggctgctttagaatccgctcatttgactagatacgatgtaattggctgtctttaaaaaacgcgcacacacacacaatctgataggcatatctcatgcccattcaatatggaatgttcttcgcttgctgaatttaagcctgtattttaaggttttgtggttcctcggccacaatgggtgatgtcactgatagaacgaagctgagtttccaagggtttggggctgtgcaagagtaaacactagagcttgagttgttatccagctggcaagcacggaagtctttgaagaatgtaatgtaaaaagggaaaagaatgtaaagctttttgtaccaaatgagagttggagcccagccaacaaatgcttttccctgtgtaaaagtctctctggaagggacattccatctccatggtgcactctgaggggcactgtcaactagagattggccccatccaggtgggaggaacccctttgggatggtgagtatccaatctgctgtgcatttgacaggatctctgaatggctaggtaatggatcccaagcaggctcacaaatttaaatgagggctttgtgtgcagaaagaggaataagtacagattattttcctaccactagatttttggggagagtcaccatggaatgttgacaattacttaaaatattttaagctcccttgctgaattcctgtcctgtccctgaggaatcagatggtcatacagccataggcacccacccgaaatttccctaggagttggagtaatgctagaattgaagaccttctgagtaaagggcttctctgccttctcagaggcaggagaatttgcactggttgtgttaaatgtataaaaagctatatgttcaccagtttactcatttccaatgtgtagatgaataaaatgtagtgtacaaattatttgaaaatcccagaaggaaggtacttttcaaatacagtattttttttaacaaataaacttacgatttttacagcactgtttttgccaagagttgtgaaataacttgtgtacttggggaagtggaggttaaatacctgccctaaagtcattccaccaccgagtcagcactggaaatctcatctcttgctttgccacactattttaagagctgtccctgttggaacataacaactagacagactcatgtagcattagagttggaaggtctttttaaagacatctggtcctacttcttacatgatacacaattccccctaccaactacctatgaagagcccttctgtcatacggagctccatcctgggataattctattttaggaactattagattgtcatactaagccaaaagctgcctcatgtcccggatctggactactatgccttgcccccacatcatgttagaacttgagtagtcctctcaggccttcatcttgattggatagggactcaaacccagctcaaga

SEQ ID NO: 95150 - DNA, 1482 bp, Homo sapiens
caaatgaggtaaaaacagctgggcacagtggtttacacacctaatcctagcattttgggaggccgaggaggaggattgtttaaagtcaagagttcaagacccacctggctaacatagcaagaccctgtctcaaaaaaagagataaaaactgtattctttgctctcgtaaggagcttataaggagtcaaggttgacatgtaaaacaaccagtgagttctgttagatcataaagattactgctggactgtggcacggagtaaaaataagtgcaataggagttgaatgtgcaaaaatcaatgttagctggagtgtttatgttgagttcatggaagagctgaggtgggacttgaattggcaggacatagaatttgaatggttaagggagagagattctagaaaggagtagcaacatgaaaaaagttacatagataaagcattgtcctgaatatgggcatttggaaatccaggactgagtgatgatggactgtcataggatatgtatgtatttatgtttatgtgtatttatgcacacatatatgcatagatatttctagtttcatgtatataggaaactatgtatgaatatatagttatatgtattatatatagatatatatataggttatatatattttacatatatattaaaaaatagtgaaatttgtttccctaatcaatgtcttaggccatttagagaatgaagtaactaatgtgctagtctttcttgctaatttttttatgagagaacttcatgtggaggattcattttatgaatggcataatatttgttttttgcggatattaacatgttccggtagaaaataatgaaaggaaaagcaaacctgatctgtgtgttctagtatctgcccttctattacagcttttcacccttccctacaggccggggtttgaagtctcacgcctacattcacagtgtccagtttagccaccatgttttcctcaacctccacaccctcaagttttactgccttccagacaactatgagatcatcgattcctcattggaggatatcacggtgtgtgtctaagagggttggtttggggtccattctttaatgagccatcccagggctcccaggggactgccccacctgaggacagggaagaatctcagtccctttaggcatcgagaggctgctttctcttttgggaagaactggggaaactgagtaaggtcagaattcataattgcagcctgtagtctgtaacttaactgtcatttctacttgtaacattgagggctaggactgaagaaatatgggtgtattctgatggggtttaaagtgtttttgtgaaattattcttctacactgtgaagtagggatatgaattggtcctggtgtaggacagtatttaccaagctgcacaccggctcctggctgcttttaacatacgccgtggccagagcatccagccacagatatcttatctgtgggctctagtttgtgacctgtgccaaga

SEQ ID NO: 95151 - DNA, 2183 bp, Homo sapiens
atgagaccccgtttctactagaaatacaaaattagccgggcatgatggcacatgcctgtaatcccagctacttgggaggctgaggcaggagagttgcttgaatctgggagggggaggttgcagtgagccaagatcatgccatggcactctagtctaggcaacaagagcaaaactccatctaaaaaaaaaaaaaaaagttatggtcagtatttatagagggaaaaactgggctaaattcagtgtttcaaagtgagtttgcgatgatctctgtccagtctgtgacataatgactgtggtaactctgtgcctgggaagagtctgatcctgctcttccagtaccagggactcatggagatcctcattcccacccagagtggaggaaactctcctgctccaaagctaggtccatgtgctgctcccaggaggttctatctgagacttagactgcctttaggaacttgagtattgtatggtttctggcagtcagttttcatgagttgaccagacctgaggtcggcgaaaagacctgggattcagtgattttgggatagacacagagatccccttgtagattagccatgggagaggatctactccgtgttacttcaatctttacacctactggttcggactatttttctgtgtgtggtgggatgttcatggccaagtgttttttgtttttgtagaaattactgttacagacatttcttgtgaactcagctcttaaacaacttagcattttcttttgctttgcagtatgtgttgaagcccactttcacaaagcagcaaattgcaaacttggacaagcaagccaaattgtcccgggcatatgatggtaccacttacctgccgggtattgtgggactgaataacataaaggccaatgattatgccaacgctgtccttcaggtaagatcaagacgggaacattgaggaagagaaggacacccagaaggctgagcacagtggctcacccctgtaatcccagcactttgggaggccaaggcaggcggattgcctgaggtcaagagtttgagccagcctggccaacatggagaaaccctgtctctactaaaaatacaaaaattagctagatatggtggtggaagcctgtagtcccagctatttggcaggctgaggtgggagaatcgcttgaatccgggaggcagaggttatagtgacccgagatcgcgccactgcactccagcctggggaacagtgagactctgtttcaagaaaaaaaaaagagagggacaggaaatagtatgtgtactggccaagaaattactgccttcggccaggcgcagtggctcatacctgtaatcccagcactttgggaggccaaggcgggaggatcacctgaggtcaggagttcgagactagcttggccaacatggagaaaccccatctctactaaaaatacaaaattagccgggcttggtggtgcatgcctgtaatctcagctattcgggaggctgaggcaggagaatcacttgaacccaggaggcggaggttgcagtgagctgagatcacgtcactgcactccagcctgggcaagaagagcgaaactcctccgtctcaaaaaaagaaattactgccttcttgtagagtatagtcagatgatcctcagacaccaagtcttgctaaggactctacttgagtaattgttctgcaacaggcagagcattcctttgctcactgggctgctgtcaaatggtgaggctttttctagcctctggctcatggcatctggaacttcagggaatgagggaccgaatctgtgttgccttgcagtatcaagtaagaaacatgccagatgcatttttttaaaaaaatggtgtagatatttgttgtgctggctgatcaatgactttttcctgcccatgtgctcataaccctgaaattggaaaggcagaaaaccaaagctgtcctattttctttttttttttttttgagacggagtctcagtctgttgcccaggctggagtgtagtggcgcaatctcagctcactgcaacctctgcctcccaggttcaagcgattctcctgcttcagcctcccgagtagctgggattacaggcgcctgccactgtgcctggctaagttttgtagagacagggttgtagtagagttttagtagttttagttttagagacagggtttcaccattttggccaggctggt

SEQ ID NO: 95152 - DNA, 1063 bp, Homo sapiens
ttagtggtgatttctgagattttggtcacccatcacccaagcagtgtatactgtacccagtgtgtagtcttttatccctcaccaccccccacactctttcccccaagtccccaaagatcattgtattgttcttacacctttgcgtcctcacagctccctatatttacttttatgtacaattatatggttttagtatgggaaaacatcacattttaagataattttcatattattttagtgtggagttgagagatgggagaactgtgtttcctaggtagttatttttgcttcaaccaaaatggatgatgaaggaaagagtatttggattatagccttctgccttatgaatttaagtattgtcacagcataattagagtaacaaaaggaaattgttgaataagttgatagagatttgaatacctgtgttttgttttgttttgttttaaccttctttgtggtatccacatcagcaaagttgtctgcagaactgtagttcgtatgaaactcaacgttaatgatatttctgtgatgtgagcctgggtaggattctccaagggtccatttacttttggctctttaaggccatcacaggcacatcacaaattctattaggagaactttaattggaagagcttggctcaaggggtcctacaaaggggctttgggttaatcggagtgtttgatttttaggctctatctaatgttcctcctctccggaactactttctggaagaagacaattataagaacatcaaacgtcctccaggggatatcatgttcttgttggtccagcgttttggagagctgatgagaaagctctggaaccctcgaaatttcaaggcacatgtgtctccccatgagatgcttcaggcagttgtactttgcagtaagaagacttttcagatcaccaaacaaggtaagaacaagtcattcatgtttcaggacaacaaaactagtttgatgaacaaatttatttccacttggcagtgaatttttttttttgagatggagtctcactctgtcacccaggctggagtacaatggcatggtctcagctcactgc

SEQ ID NO: 95153 - DNA, 1031 bp, Homo sapiens
ctgcagatactttgaagtgcagctcatgtttttaacttttaatttaaaaacacaaaaaaaattttagctcttcccactttttttttcctatttatttgaggtcagtgtttgtttttgcacaccattttgtaaatgaaacttaagaattgaattggaaagacttctcaaagagaattgtatgtaacgatgttgtattgatttttaagaaagtaatttaatttgtaaaacttctgctcgtttacactgcacattgaatacaggtaactaattggaaggagaggggaggtcactcttttgatggtggccctgaacctcattctggttccctgctgcgctgcttggtgtgacccacggaggatccactcccaggatgacgtgctccgtagctctgctgctgatactgggtctgcgatgcagcggcgtgaggcctgggctggttggagaaggtcacaacccttctctgttggtctgccttctgctgaaagactcgagaaccaaccagggaagctgtcctggaggtccctggtcggagagggacatagaatctgtgacctctgacaactgtgaagccaccctgggctacagaaaccacagtcttcccagcaattattacaattcttgaattccttggggattttttactgccctttcaaagcacttaagtgttagatctaacgtgttccagtgtctgtctgaggtgacttaaaaaatcagaacaaaacttctattatccagagtcatgggagagtacaccctttccaggaataatgttttgggaaacactgaaatgaaatcttcccagtattataaattgtgtatttaaaaaaaagaaacttttctgaatgcctacctggcggtgtataccaggcagtgtgccagtttaaaaagatgaaaaagaataaaaacttttgaggaactctcgtagtctggttaatttgggtgcttatgtctatgaatctacccaaaacctccttcttggatgctgctgctaggcggagacctctctgtggatgccagtagtgagggacaga

SEQ ID NO: 95154 - DNA, 1035 bp, Homo sapiens
cctggccctcttccagtggttcttgcacatgggcaggttggagaattcctggtagagacagtggtgagggtgtttataatttaaactgaacaaatactaggagctagtgggagatttgttgggtgcggtctcagcaccggcacttcctcagtgcttttgatttcatgggtgaaatttcacactcctgagagacaaatgagaccctgccccccagttgaaatcggaaagtaccatacagtgggagtatttttccttttggtggcgggaatggagtgagatggttataaagaggccctgctgcagttgtgtcaatccaggagtgggtgctttcctcctatgtctgtgtacagctgtacactctgcatggatgggccagacctaattaagagtcgcatgaaaatggtgatcattgcttaatgggaatatccagattgtgaccaaaattgctgttactgaggttgttcacccaccttgttctccagacatgaacttgcatagcttttggctagttccagaaattagacttacttagatggatataagcctttttgagggtattcaaaagcatataaaaatcaaggaatactctaaagagctccaaaaatgctttggtcagtggttcccttgttggaataaattcatggcattccagaagggcagctatggaggagatggccctcacttggtcatattccttttgtctttattggtcacattactttatagtctcacccattatattcaaatacatttcagaggtcagctgtcgaggagtgtatgcacatgtatagacatatgcacaaactagctgtctgtgaaactaatgggacgtattcaacttttcacgtaaactccatgtgatgacaaatttgtatttccaaagctgattctatatcagtcatcatggtcttctggattttctattgggcagaagttctagttggaagatgaagcatatatgaaacgacttcatgggactaggaaatagagtaagtgagagaggatgcgaggtgagggcagtttcagcacttaata

SEQ ID NO: 95155 - DNA, 1031 bp, Homo sapiens
aatctgacatggatacagtcaagatgtagaacatctccatcctcacaagagtccttcgtgttgcccttttatagccatatctacctatctacctccccttccacaacccctgacactcactagtctgttctccctttctataattttgtcattttaagaatgttaaaaatcagccgggtgcagtggctcatgcatgtaatcccagcactttgggaggccgaggcaggtgaatcacgaggtcaggagttcgacaccagcctgactaacagggtgaaaccctgtctctactaaaaatacaaaaattagcctggcatggtggcatgcgcctgtaatcccagccactcaggaggctaaggcaggacagtcactcgaacccaggaggcagaggttgcagtgagctgagatcacgccactgcactccagcctgggcaacagagcaagactccgtctcagaaaaaaaaaaaaaagaatgttgagaatcatacagtatgtaacattttggtatcagctcagcatagttccctctagattcacccactttgttgcatgtaacaacagttcattcttctttattgccagttactattccatggtatggatgcaacatataaaggctctttgaaaaccataatccatcctcctaactctctcctctctttttccccactgccctcttcgcctctcttcacagcaatgccaagtgagtacacctatgtgaaactgagaagtgattgctcgaggccttccctgcaatggtacacccgagctcaaagcaagatgagaaggcccagcttgttattaaaagacatcctcaagtaagtaccgcccctgggactgtagatccccctgctttgggtcaactgtgtagaactaggagaaaaattcagtgagagccctcaagatggctaatgttggagaggcatgcttggtcaaaggatgcctcagacattcaaaggcacgtctgagtaaagactgagtgcacagccggagtgagcctgtacagctggctgtatttggtaagtgcacagtgc

SEQ ID NO: 95156 - DNA, 1047 bp, Homo sapiens
gtggcaatgaatgctatgaagtaaagcaggaaagtgagggggtggaagtcgtgttttacagagggtggtcaaggaaggcaacttttgaatgaaaaccagaacggagatggtggggagggagccatccagagaggcagcagaggaagggcaagtcgagcacgaggcccccttggttgacatggagtgaggaggagagtgtgagataggtggaagcggaactgggctctgagagtaactgccctcttgacatctttacctcttcagtaaagtcttggagaaatcccatcgtgcgtgctgggaacattatagttttagagaatgttcatatagtccaagggctcagaattaattgccttaacacttttacatttataaaaagcaggcaattgaatgacagtaatgatgtgttctcaacactagaggaatagtagatttgaagtagattaaaaagcacgagaatcactgaagtgcttgcatcttggttgatggtcaaaattagtacagtattgattgtgcgttcacacagcaacattttaatttttttcattgcagaaggtaggtcctcataactctgctcagtttgtaggagaatctgaaaatatgtaggctaaaaatctgttgttaattacacggctttcctccagctgtgagaaacttgctggtgggcaggatttctcaaagtgctgcacccacataacactggggaacttggttaacatgcacagtcagcatcctcacctggacctaccaccaggggggacattctggggatgaagtgtgggaatctgtatgctttgcagcctcttccagtggttgtttttttgttttgtttttttgttttctcctgatgctccagctaaggtccctcctggggcgtcaggcctggttcttagctgtttgtgggatttaccgacctggcagcccacaggcgtttgggactctgcaaggccaagctgaacttagtgtctccatggcattttctcctcttcatggcctctctctacagagggctcctctttcctccctgtgacctgagtcatcctctcc

SEQ ID NO: 95157 - DNA, 1126 bp, Homo sapiens
tgcaagctggggtcttccttactcagaaggcctggaggccctgccagatgctgccttccggactggctgcccgctgcagtgttttcacgggagccaagccagccccgggcctgtagcctcccatgtgacaaagtttcagacaccacagtcctcagctggaccacagtaaacacttgccttccccaacccatgattcttgcttggaaacatgaacctgatgttccacgtgcgttcagccaatcaaacctcaagaatgtgattgagcagtgaggctgcgttttgggcaagacactgagctctgaaataagacttttcttggaatctcaagccctcaacttacagtgggaccctaagaaatgcacttcagtttccttttatgtaaaatggtggtaaaattaattgtgttcattaaattgcacacaactatacatgtttacctatacactaagtggttctcaacttggggcaatttgccccccaggggacattcagcagtgtctgcggacattttttgttgctactggagggaggtgctactggcatctagggagtggaggctagagatgctgctaaactacagtccacaggacagtctccacagcaaagaattgtccagccccaaatatcaataatgccgaggttgaggaaaccctgccacatacacatagatgcgggttaacattgtttattttacaaagtggaatcatttacattttagccattctgatagatgaagcagtggcatctttttttttttttttttttttttgagacggggtctcactctgttgcccaggctggagtgcagggttgcaatcacggctcacagcagcctcgaagtcccaggaccaagcaaccctcccaccgcagccttccaagtaactgggactacaggcacacaacaccatgcccagctaattttttaatttttttgtagagacggggtttcaccatgttgcccaggctcaaactcctgagctcacacgatctgctgccttcaccttccaaagtgctgggattacaggtgtaagccactatgcccagcctcatttgtacttcagtttgcaattctctattaataaatctaagcatcttttcacatgtttattggttattctgatttgca

SEQ ID NO: 95158 - DNA, 1606 bp, Homo sapiens
agcaggatgcaggggtcagggaaagatgccccagaccacggggaagggttaagtagcgtgagcaggtggcggagctgaaggggagccccagagtctaactcccaagccatgtgctgatgtggaggcagcttggcttgtgtctgctgactgctcccgtggtcactgcttaatccctcctaattttacctcccgtttgacaggcatcgcggtcgaccctcgccatctctccctggttgctgattatatgtgcttcgagggtgtttacaagccactgaatcgctttgggatccggtcaaactcttccccgctacagcagatgacatttgaaaccagcttccagtttctgaagcaagccaccatgctgggttagtgcgtgggcaggagccctggcctcccctctactgacgactctgggcacacgggctcacccatgggcatctttccatggttccttgcacaccagtgggatcttgggatctgaggggagcgggggcggctggagggggctgaacagcagacacgacagctgcctctacgctttgaaggaacaggaagagggccttcccctctcaagtgctagaggggggctgcctcgtgatcccatcagcttcagagactcaggacccacctgagtcccgagacttcagtgttcagccccataatcacctcatgacattcccaacttctacctcaacaccctgacacatgtttttgtgtctctgtcaggatcccacgatgagctgaggtctccttctgcctgccttgtggtcgggaaggtcgtcaggggcgggacaggcctgttcgagctcaagcagcctctgagatagcagctaccccggcaccatctgcccagctccaaggacccttggtgagggcgtggcccagcctgccttctgcatgagaggaccaggagactggaatccagggcagttccaagtgacagtacagagcacagcagcgaccttgggcctgaaagcagtgggcctctgagctgggccagcttcacctggaaagtgacagagttgctcatccttgcccctccctgtctctggatttttatcaaggtttaccaagtcttctgagtccccctgagatggctggggcctcacctgtgctgcaggaggcctctgtggcataacccctaaggagaagtcctgattcacgattcactgagaagaccaaggggaagccatgctttgctgctggggaccccaggcacctccagagtagggaagcggggttcttttgctgtgagtggccagggacaacagacaagattcctgggggctcccgatgagcaggaacgtggagcctgctgcccaaggcctgctccttccggctgctccagcccctgggggcagagtccacaaagagtccccatcaagacttcttccctgagtcaagtacagcgtagcatagtcctccacccacccaacctctctgcctggccagggtcctggccctgccactgtgtggcgaggtgtccttctagaccacatcagccccaaggctgggagcagtcgctccagggccgcagcagttcactcccacacatagaacccaggtcactgctggggcgattgaacaggttgcctggcttttctct

SEQ ID NO: 95159 - DNA, 1028 bp, Homo sapiens
tgcttgggggaggtaacgtctctccttcccaggttgcagacggggtgaaggcatgttcctatatcctccccatgtgtgaagaacaggctttgcttactgctctgaccctaggctcagattcccaccaatgagagataagctgtctctgccaggtgctgagcagagatggatcaggaagcttttaagagagtcattagttccacagcatcctcctgtgcctgaaaaataaaccatttcctgagtttgcctacccgctctgctgaggccactcctaggaggttcaggccactctctggaggtgactgcaggctgtgggccccccagcagatccacaccagtatagctcaccagggtttctttggggtttggcctgtggtctcagctgctatctctgtaaacccttgggtctcgtaacccactcacattgcgcagtcacctaggacctgaacaagtcaagttctctctgtccgtctggttccaggtgttgcagaaaattgacgtccaggagtccttctgtatggaagaaaaacagaacaaattccaggtgtaccagctgcggtttcagttcctgccacatgcatattaccagcaggagaagtgcctgagacccgaggacatcctgcgcttcatggaaacaaggtcagggctcaggctgtgattgtcattgaccttgacccagagaatgcgcttgaactggggcaggaagcacctagccacaaggctcctagagattgagtgcctttgcccaaatgagcccttcaagggaagtgtttaggaagcagagggccttgcagcctgatctggaaacctgaccacagtctggcttgtgggtatgactttcttagccacacgtcactccctgagcccatttcttctcttgggttgacgtcaggattgttgtcttctggggcttgcaggcattaagacatggaaatgtgggtgtggtaaagagaagggagcaccatcaaagcggtgcttctgtggtgtcggagcagcacatgctgttaatgtttgctagggtgttactg

SEQ ID NO: 95160 - DNA, 1208 bp, Homo sapiens
ctaatttttatagcaggaggtttaaactgtctccaaattgtcataattgagaagaaagaatggataaaggaaaaagtgaataatgaacccagaaattctcctgcttagggggcttgtggtaacagtcccagagtggatatgtgacattctgggggcaaacatgaggagtccaagcatgaatgtctagagcttcagccacccagctgggatctgtgctgtgtaatttgaggacatctcagggtcactggtgggaatttgaagattagagggatcttttgcctaggaaaaacgagtccagaaagaggtagaggtttcagttttctggtttcgggcagcattgacagtctgtggtgtctgctcctgacccctgccacaacccccaccctgaccccccaccaccgtctctaggttgaggaccttgctgcagctgaagtggcagcgctcactgtgtgagccgggcgaggctgtgggcctgctggctgcccagagcatcggagagccctccacccagatgaccctcaacaccttccactttgcaggcagaggcgagatgaacgtcaccctgggcattccaaggtgtggggcacaagggagcacagggtggggtctgtcctagcctctcctggagaaggggccatttaatgagagggggtgagtgagtgtgtgtgaatgagagagtgtgtctgtgtgagagagggacagggtctcattaaagtggggatcagggttagaatttccagagcccagctggtttctttggtgcccaggcctggtaggatctccatttattcctctgccaactcctgcatccacgttcctggggatgcctgtgagactgcacactgctgggggaaggactcaggaacgtacattgttaacaagccccacacaaggtgcctggttgcccaactccaggggagccattcacatagaacgtgcccccacgtggccctgggccctggcccttcaggtaaatatatgtgctggacaaggggaatgagtgtggggtcagacccatctgcattcagtccctggccctgcctttttctagcagaaagactctggacaggtacctcactttccaaacctcagggggtccttctgtggaaggccagaggctgggacccactatacatccaggcagtgagggctggctgagctcagcaggagcactgtgggtgctagttgccttccctgcatcgcttgtt

SEQ ID NO: 95161 - DNA, 1060 bp, Homo sapiens
tttccatcctggttcctatccctgagcttggccatcactcttcccctcttcctttcttcccagaaactcccttgtgctcctggaggggctctgagtgtgctgctttctttcctgtgtctccctctgctcccaagaccattggttcccaaatctggtttgcacaaagtgagggccctgattaacaatggatgctcagcctctctgagagtggtgctcggccccatcatgagggctccacaccagccacctgggtcccctgaatttgtgctccatggccctcttgtcacgccctcatctctttgatctcatgtgtgtgatttgtttgtttgtttttttgtttgtttgtttaggtgataatgaaatcacagcatctccatgaagttttatccagagcagatcccaaaaaagctctccaccacttcagagctatcaaaaaatggcaaagcaagcaccccaacaccctgctgagaagaggcgccttcttgagttattcccagaaaattcaggaagctgtgaaagccctgaaacttgagagtgaaaaccgcaatggccgcagccctgggactcaggaggtgatgcagggaggtggtgtccttaatgtccagcacgtccaggcttagtcagtgggtgagggatgaggggctgttttcctaagagaaggtagaatcatgaactccagctttgttcaccgtcagtcagaacagaatggctctcaaatgggaatgtaaggtggggactcttaacaagggtgtaggcagggtttggggggactaactggggcctgtgacttcggggttccccgcgatcccaggtgtgaaggaatggggagcagtcatgagaaacggagaggacgactatgtgctagggccactggacagagccctgggtagagacccactagaggggggttgaggataaataccaggatccccttcctcctgcctttccctctgctgctggtgcctcccatcagccaagcacacctgggagctggaagcaggggatctctttgaagcagtcactttgggacagccttgagggcacagagcgtgtgaaagag

SEQ ID NO: 95162 - DNA, 1014 bp, Homo sapiens
tgaaaaattccccttgcatttagttaactagaacgtgagacaaaagccacaccttggtcaagctgaggtgagcacttggaaagagccgtggtgatactgacgtttgcactgatcacccacctgtccactctgttcccaggtgtgccggcatgtgaagaatggggacattctgctactgaaccgacagcccacactgcacagaccctccatccaggcccaccgtgcccgcatcctgcctgaagagaaagtgctgcggctccactatgccaactgcaaggcctataatgccgactttgatggagacgagatgaatgcccatttcccccagagtgagctgggccgggccgaggcctacgtcctggcctgcactgatcagcagtaccttgttcccaaggtaggtctggccttgaggctgttccgtggtcatcgtcagcatgacttagcacttttaagttgggccctgccagcccctggggtcattgggcagctccaggacaggggcgcctggaatggagggtcctggtttctcccaggtggggcttttagcccatctagtggcttagaggctgggaaatgtttctgttttgctgcgttgtaaaatgtaaatcaggacagaaattgtgatagccatcccagaaagccaaccttaataactgtgtgataggtcttgtgttcagcacttaaatttggattctgcaacttagtagcccccggctagcattagcatcccaacactgtaatggttctcatggtccactgatgactttgatcctttgttctgacaaacatgagttttaagaagcagcctaaccccaagggcccagaagagatcccgcagcagcccgtgaaggcatcttctgtcccctttgaatcctttccttctttctccaagttcactcctcaagggcaaccccttgtggtcacagctgtccagagggacacgagggaaggatagaacttcctcccccgtctccttagcagctgactcttggccaggagtggcaggggcctgag

SEQ ID NO: 95163 - DNA, 1061 bp, Homo sapiens
actgcatgtgagaattggttatctggcaagataacagaacttcataagaaatgtactgatgtgggaaggacttcttagttttctttaggaattgcatattaagggatttcagcaaaaatgccttaagaaagaagcatgcttataaattttgagttcatcttactactagaaagagacaggctggtaaatatataatagtgctgatatgtcttattgacatgtacttacaagattgatttattagcatgtttgtctctgatctgtcaggttcagaggagataaactccagagtgcatagttgtcagatccagggtaagaaagaaaaattaaatcaagccaggccttttggagcttttttccatcatccctgttttcttggtttcatcttccaggaaaaagactctttgattgctattgaccgatcctttttgagtacacttccaggccagtccctcatagacaaactttacaacatttggattcgccttcagagccacgtcaatattgtgtttgatagcgagatggacaaactaatgatggacaagtacccaggcattaggcaggtgagcaaaaaactggattcccattgctagctacagaagataaataataaacattgtgtattgaaacaagaaactaataagcctactggaattcttgttgaatgttttttatgaccttttttctccataaagatcctggagaagaaagaaggcctgttccgaaaacacatgatgggaaagcgagtggactacgctgcgcgctcagtcatctgcccagacatgtacatcaacaccaacgaaattggaattcccatggtgtgtgtgtgtgtgtgtgtgtgtgtgtgtgtgtgtgtgtgtgtgtgcgcgcgcgcgtgcagggctcatttgctccccgtgggtggcagatgagaatgccgcagaggactggggacaggatgtgcagcagattattctggcttgggcggaactagcttctgcctcttcctggacagcccacaaggaggtgactggaagctgcatgatggcattgctgtcactccttgctaggcttacagacac

SEQ ID NO: 95164 - DNA, 1048 bp, Homo sapiens
tttacctataaaaatacttatttatccataattcaacttatatgaacttttctggtaaaaaacaggtagataaagatatttattataatgttacttataatagcaaaatatggaaatcaatccagatgtccaattatgagaatatggttaagtgaattaggaatcatccttaatggaatatcacatagccatgaaaaatggtgatcaggcaaaagctacatagcaacatgcagacatgctgatgagatgatactaaaagggcaaagtagtgtgcaaaataaatccacactgaagattacagttgtgtaaaatacgtgtatagacaaaaaggcctggaaaacaatatataaaagtgataggagttgttaatgtgatgggattatgggtaatgttttcttttactttgcttttttttttttttaggttttatacaatagccatatggtttttattactatagaaatgagattaagggccagagggaatccaggcctgataatatgctacccttgagattgatttttgtggtcaagttgcaggcttggggataaagaattgataaatcccattgcagaaagagtacctgtttctgatttattgcactttgattctcctccttggctccaggaattgaggaagctcagataggaaaacgaggatacttaacacccaccagtgcccgcgaacacctttctgccctgtggaagaatgaaggtgctgtatcaggctaaagaaatagccttgatcttctctaggcttttatttcctggactcattaaccctgccttattacttcttttaagttgtagtgattgtagcttcctcctggaactgatccagaggtttggggcagtcttcagggcacattgacattgagtcatagagcaggagaggtcatacccagcaccaaaaacttgacaattatcgcagctgagcctggttatgaaatgacaactgcaggtgggcctcacttaatacaggttggcatatttttagaaggttcagtgtaacttattttaaatgcccgtaagtaaaatgctttgtcctt

SEQ ID NO: 95165 - DNA, 1152 bp, Homo sapiens
tgtgcctcagcctccctagtagctgggattacaggcacgcaccaccatgcccagctaatttttgtatttttacaaaaattacgggagacaggttcatcatgttggccaggctggtctcaaactcctggcctcaagtaactggcctcaagtgatctgcccaccttggcctcccaaaatgctgggattacgggcatgagccaccgcacctggctgagaagtctcttaattaaatcttggaataaaataaagatatttttctacctcaggttgtacgcccaaagtaaatttcaaatctaaatggattaaaataaaaccttaaaagaaaatagagggtaatatttatctggttcttaagataacaaaggcctttctaagcatgtaggctgaagtagagtttttaaaggaatagactgactacataaagaaacttgtgagtataccgaaaatcaccatggctactgtgtctctttctaatatcctgtttgtttttattccctctcttcagaagctgtacctgctgcttcggggctcttgtttaaactgccacatgctgacttgtccccgggccgtgattcacctcttactctgccagctgagggttctggaagtcggggccctacaagcagtctacgagcttgagagaattctgaacagggtaggtgggtagtggtggtcacagaaatcagaaaaggcaaagtggtgtggggaacaagagatgcttgtatgttgtcctagttaccatgccgatagtcatcagaacgtttgatctttatatcttataactggataccaatagctgagtgtgaaaacaggaagctataagaataataaaagaaatgttcatagaaacaatagtgaaataccatttaatccatttatgagcttttgctgattttctggaccaaggattcaatcaaggtttattcaatcaaaagacattgcttttgattgttacatctctttgatctgtcttaaagtagaacattgtaatgtagaaaattctttttcatgataccaacttttttggagactcaaagccagttgtcttataggatttcttacattttagattgtccgattatttcttgtaattagattcacattttggcaagaatacaacctacatgatacagggtactttgtattgcatca

SEQ ID NO: 95166 - DNA, 1057 bp, Homo sapiens
gagcatgttgggaaagcgtgcctcgaccttcaggaaggtggggcgcagtgggcggggagcagggaacagctccgctattggctgaagcggaagaagacgaaagcaatcataaaatgggaggttgcaagctcatggtttgaaagacttcgtcacggaagctaaaagctctatacacccgatttgcctcggaggaattttcctaaatgattattttgatgtcttatatatctttgattgttttcaaaacaaaagagcgagcagagagtcgtacaactatttgttccccccccatgtagaagtgatctcatccacgtaaatgtcgttcctgcgaccgcttccgcgcgcaagcgcacgttgaatcgcgtggtgactccgggcttgaggttgaattaagaatagtcaggtggtgagtggaacgtctcttggggtgtcggaattcaaaacggacctggaggatgttgatctccaagaacatgccctggcggcggctgcagggcatttccttcgggatgtattcggctgaagagctcaagtaaggagttggtcgggtagcgtgcccagcctggatcttgaggtcggcgccctaaactacgattcccagaagcgcttttgcccagtctatcctcttgagtccaggcttgtctggcgcttgtcctgctgggagccgtagttctgggaacgttcctgggccggcgtggactgcctggataagaggccggtggtgctgggggaaagagtttgcgctgaggtaggggaatataagggtggggagggtcctggtctgcagcgttatcatctgccagtctcctcgttaactaacaagcatttgtggaattaaccatagtgtacctgacatggttaattaggcacgtagtaagtttcctcttgtttgtaaaatgattgtccttcaagtgtcagttcaggcgttaacttctctttgctaggaccctgctatattctcggtctggttgttaaatcaagggaactctctttagtcttcattttgatcaaggtagcatttgacattctccaatgcactctcttgaaactttccttt

SEQ ID NO: 95167 - DNA, 1147 bp, Homo sapiens
agttgaaagttcttcatttcaaaccagattgttcaagtgctattaaaaactttcctccctctctgccatttatgtaatgagattgcttgcttccaaaacttttgtctagccgggcatggtggcatatgcctgtagtcctagttactcaggaggctgaagcaggagggtcacttgagcccaggagttcaagggttcagtgagctataattgcactacttcactaaaggctaggcaatggagcaagaccctgtctctaaaaaaaaaaaaaaaaaagttttgacagtcttgtccatatcttgtatccattccttaatgatattgaacatgtgtacagactgtcttctcagcgttcattgacatgagttatccagtttaatccgtgataattggagaatttgggctcaaagtacacataggtggaggtgagctgggtacttcattaatgactattagatttaaggcttttgtttttttgcagattttattctggtagtgcaaccctctcaaaggttgaaggaactgatgtaacaggtatattttaaaatatattgaattctatttttatatcaacacgttggattccattgtagtactaggaaactgattcatgttttcttttttacattagggattgaagaagtagtaattccaaaaaagaaaacttggtaagtattctatcagtgttcattcagcaaatggttgagtgcttactatgagagaagtgtaagggttaggtaaggagacagtgacaggaagagcaataggagagcattcttgaagagagtagctgagcggggagaagctaggagtttaaaggacaaaaaatggaaaggtggagaatagtgagtgaatgagcaatgagatttacttaaaagaacaattgaaagagattttgaattagtgtgggttactatttacgtggttaataatacatggttatacatgaacatcatcattagaataatttttttcaaggaagttctctcatatgattcaagagcagacagttactgtctttattatctctaatgaggtaaaaataaagtaaatggtgtggacagcaaaatttagcttttttattcactggatatatccttgaacaaattgcctcatctcatttattcaacatttgttgaatatgcaggaa

SEQ ID NO: 95168 - DNA, 1012 bp, Homo sapiens
aactgaatcaagagctaccaattaggatagtaaaggcaacagtagtcccgaaagctgcagtaagaatccataggaaagtgggtagaggaagtaggccagatagttttatgagggcgggatggaaatcactagccctgggttatggcattatgcaccaggccagagaggacaggcaaagagaggaacatgtaccaactaggggaaagaaccagcagttttcttaatttctaatttattctagtgaccttgtgacataaccagcttcagatgagatctgcactatgttattggccagtacactgagagtagaatcacttgttcggtttgtggctatgaagagccctgatgaggattaacttgtggttcttatttttagggataaagtagccgttcttcaggcacttgcatccacagtaaacagggtaagtaggattttgtgtttttttttaacctaaaacttggctaataacacactttttaactcggctaataacacatttaatactcatacctcgtcattactcagaattaaactgttgtgcgtctagaaagtttctttaaaattgtctaggccgggcgcggtggctcacgcctgtaatcccagcactttgggaggccgaggcaggtggatcacaaggtcaggagatcgagaccatcctggctaacacagtgaaaccccgtctctactgaaaatataaaaaattagccaggcgtggtggcaggcacctgtaatcccagctacttgggaggctgaggcaggagaatggcgtgaacccaggaggcagagcttgcagtgaggagagatcgcgccactgcactccagcctgggcgaaagagcgagactctgtctcaaaaaaaaaaaaattgtctaatccagctgagccaggtggctcatgaatgtgatcccaacacttttggaggccaaagtaggaagaccacttgacatcaggagttcaaaaccagcttgggcaatgtagcaagacccccatctgttttttgtttgtttgtttgt

SEQ ID NO: 95169 - DNA, 1990 bp, Homo sapiens
tcaacattggctttccattagtataattcaaataaaaactgaagttcacaacagggctgctaaggtgaggctcaagggaaaggggtttttgaaaggggtagcagaaagctaggtccaaaataaaacactgcctccaggttccaggtatgagcagctttccgttgagagctgcagggaagcttctgtgccccctccctgaggagtccaggtcagtaaaacagcattaaggatataggataagtttttgctttggaataaaggcccaagtaaggcactcagacacagaagagaataaagaaagcaattctggggcatttctcagtggggcccctggtggtattggagagttgattatgctcaggtttagggagcaattttaatgggtaacaggacgtgggagaaggttctgttgttcattcctcagagggcacggtgatatcttccatttggaggagggactcttggtgaagttgagcgtgggtggatagtgaccttgctttggaggaaatcctattctgggattctgctgttaggactagttaattcagatgattcttacctagagtttaaaacagtccccagtggtagcaaacttaaatattaaaatcagccatggggagggaggcttaagccattgcttgccttgcataattaaaggcaagtcttgtagagctgagagtacagtgcaggtgtttgtcttttgtcttttttctctatatatacatgtatatatgcccacacacgtttgcgcatttaggttacatacataattacaacttacggaatttttgtttatcaaaactcacaaggtcctcttaaaaatttagctagaaagacttgtgggctggatacagtggctcacgtctataatcctagccctttgtaaggcagaagtgagagaactgcttgaggccaggagtttgagaccagcttgggtgacacagcaagacaccctctctgcaaaaaattttgtgaaatggccagctgtggtggcacacacctgtagcctaggctacttgggaggctgaggcaggagaatcccttgagtccaggagctaaaagttacagtgagctgtcttcaaaataaatatagaaattgtattatgtcttttccacaggataccacagctgtgccttatgtgtttcaagatgatccttaccttatgccagcatcatctttggaatctgtgagtattttcatataattttctagtgttttatctctctggtttgcgtacaacagtacataaataatttagttgtaataacctgggaaaggtttacaaatgctgagaaattgatagactatgtgaatcctttactactttcttcaaaaagatgtacatatcgtcaatggggaaaggatttttggttttggtttctaatacttagggctttttcacactggagtgacccactcagtttaaatggcttgctttttatatatttcaagctgtgtataagatgctaactgaaattatatcacagtagaaaaggtgggatagtctataatttctaattgggattctgcgtgttgttgcatttgtttttttttgtgaggggggagaaattcttgctgagagtgtaactataatcttgcttgagtttaaattacatgtatttaaatctttttctttatatagcgttcatttttactggcaaagaaatccggggagaatgtggccaagtttattattaattcataccccaaatattttcagaaggacatagctgaacctcatataccggtaaggagaggtagttacattatttacataatactattttaaatgtaaattaaaccaggctttcatggctaatatttcagtagctatttgaataccctcaatatttggatgataagccttttaaagtgtggagttagctttgatcacaagactaactttaaaattctttctgtatttatttgctcttcatcttaatattttccccatttgatttttgtgacaccatgctcttaggtctttaa

SEQ ID NO: 95170 - DNA, 1086 bp, Homo sapiens
tccacattgtatttccagctccctctttgttctgtagttttggagtgaggatttatgcagtgtggtgggtattgtgcttagtgcttgtccatacagtggtgagcaaaacagatgcgcctctgccctcctgagtttgttggtggaagtactaatctcagactcatcatatctaaactgctcccatatccctacatctctctgcttcccaaagctcacagggaaacacacacttcttgttttcatagtagaacttgcacatagatgaggaagccagtgtgattgtgtaagtcaaaatattaaaatcctaaactaagacagtgtctttctccattagattgtgagcaccctgaaggtagagaatgcctttcgtctctgtatccccagtgccaagcttaatgtctggggtaaaatagtaggcattcagaaagtatttgaataagttagtgaatgaggtaaaatcagcataccttgggtagtattaaatgtttagatgatacacagcattagagatgaaaggtttagttcaattccctgtgaagacagtgatgttaaaatgatcagtagtatctggtgcaggaaacatgaattggagcagtgaagttttactttggtatgttggtgataaaagttttgtcctactcagttatccttccctcacctttacctgtttgtagtaactttagtcatcttgttttcctagtgtttaatgcctgagtactttgaacctcagatcaaagacataagtgaagccgccctgaaggaacgaattgagctcagaaaagtcaaagcctctgtggacatgtttgatcagcttttgcaagcaggtgactgagttcgattaaagcccctctaataacatgggctttgaagtgggcccaagttatatgattcatatattttgagtaagagttacaggtcctgctgtacttactctgctttgatggctgcgtgctttatatttttagtagtttatttcatttttagctttagtgttacttaagaattacaggcgaagtagaattgcagctttgttggtttattgtagcactggtagagaaattgtatcacccttctaccttagcttct

SEQ ID NO: 95171 - DNA, 2680 bp, Homo sapiens
tactgctaaattaagaccactgacaacatgtagacatacacagcagtttgaatgaaaggtaataacttaattatattggagaattagctgggtgtctaaaaggaagacacttcatgtgaatgtctggagagggaaagctaccatgattatctaaaattgttattgaagtgatgaatttgataggatgaaagattaaattccttggggtaggctggacgcagtgcctcacacctgtaatcctggtgccgtgggaggccgaggcaggtggatcacttgaggtcaggggtttgagaccagcctggccaacatggtgaaacctcatctctactaaaaatacaacaattagctaggcgtggtggcacgtgcctgtaattccagctactcgagaggtggaggcaggagaatcacttaaacccaggaggtggaggttatggaatgagagaagagttaaaagtacatatgctagaatatgaccagaaggatccaaaagaaaccgttttgcctctgggaagtagtatctgaagattgaagaaaggtgaggaaactttactagggactttgtcatacagttgcttcttgtttttaatagcacagatatttatatacttgtttataaacttttcattttcaattgtaattctgccacttaacctgcgaagccctgacaacacattaagatcgttaagtcttgattttccccattttcaaaatgataataaccataataccctgtaagaattgagataatgtatagaaagtacttggcacattgcctagaacataataaaccgtcagtaaatggtggtagctctcattggtatttcttattgcctgggttcacatttactctcttgtgtctagagcaaaaaacaacgctgagagaatcttttctctaatgccagagaaaaatgaacattcctattgcacaatgatccgaggaatggtgaaggtacatttgttttatttatttttgtctttcatttccaccgatcagggtgtttcagcctcagaactactaacattttgggtcaggtaatttgttgtggggtctgtcctgtgcattgtaggatgttagtagctccctggcttctacccactggatgtgagtagtgtactcctcccccactttcagttgtgacaaataaaaatatgtttaggcattaccagtggatagaaaatcccactgcactagagtatgagcttcatgagaacaggagcctgatctattgagcctgagctatattaccaaactctaggacagaaatgtgcaaggacttcttaagtaaatgaatttgatgatgcttaatttttccttttccagcaccgagcttatgagcaggcattaaacttgtacactgagttactaaacaacagactccatggtgagtttgagaactcccctctgtccctttctccatttccttcttttaattgtctgtgtgaaggctttggatcgtgcctcagtcattggcctacactttaccttttcctgaggcgtagatgattgaagcaagagtagagatccagagaggagagtagttttccagttttgtggacatgtgattagtcaagggacacataggaatgactgctttgccttaaactcagccatttagggattaatcttcaaccccaaattttatcattttattattttacagctgatgtatacacatttaatgcattgattgaagcaacagtatgtgcgataaatgagaaatttgaggaaaaatggagtaaaatactggtaaggaggaatcctcagtttattttttaatagggcttaaatactctttaccagaaatacatgggctggccaggtgtggtggctcaaacctgtaataccagcactttgggaggccgaggcgggcagatcacctgaggccaggagttggagaccagcctggccaacatggtgaaacccgtctctactaaaagtacaaacaattagctgggcgtggtggtgcacgcctgtaatcccagctacttgggaagctgaggcaagagaatctattgaacccgggaggcggaggttgctgtgagcagagatcgcaccactgcactccagcctgggcaacagagcaagactccgtctcaaaaaaaaaaaaaagaaaaagaaacagaagtacatgggctggagacagcatttatgagcatgtgtatggcagtcactgtgtagcagttacctgttcactaccctttccgcagccctgggactcagctgtgtctggcacataagaagaaaaagttgcttgaccgagagtatagagctagaattctggaccattttattcatttatttttcataatagtttttctgttacaaagtaatgcatatttgctgtcaaatcctatcaggtgtaatttcaaaaagttgaaatcactggattgattctcgcctagtaacttaagaatagaaacggctgggcacggtggctcatgcctataatcccagcactttgaggctgaggcgggtggattaccttaggtcaggagtttgtgaccagcctgactaacatggtgaaaccccgtctctactacaaaaatacaaaaattagccgggcatagtggtgctcgcctgtagtcgcagctactcaggaggctgaggcaggagaatcacctcagcccacgaggcagaggttgcagtgagccaagatcgcaccactgcactccagcctgg

SEQ ID NO: 95172 - DNA, 1925 bp, Homo sapiens
aaaagagggatatagttactaacctgctttaaacataagcaagaaagctaaattctttactttgtatgaaacatagattattggacagattacccaggcatgaaagatacttcttgttttttattcacctaggagctgctaagacacatggttgcacagaaggtgaaaccaaatcttcagacttttaataccattctgaaatgtctccgaagatttcatgtgtttgcaagatcgccagccttacaggttttacgtgaaatgaaagccattggaataggtgaggatgcgcccttgagttctctgaggacagagactgtgccagccagaggtttcagggctacataagcaaagagctttaaattattcttgtgcttacataatatgttggaaattttctttccatgtttggcacatttacttacatgtacttattatagtgggagtgcctttatcatcttagtgttcattagtattttaggtactttgtttatggatctgttgaatctgaggagaagtgattgctttgagttagctagttttaaattcatgacattttcccaacataattaggtatttgaacctaagtgtgtgctagtgtattgtatatttttcattaattactttattgaaagttgctttgggaatcaattcacttcaatatattttactgttctcagtgaagaatgtgactaataagtatttggactttcaaaaagtgatacagtctttgtgatagttttttacctttacattaatgagttggaaaataactttgttcaaaggaatagaaatgcatattttgcttaaatattaacaatatgtttttaattcagtgtgtctcagtaaactatgttttggattgctgtgtttttacctcattgtttattttttctgtctacctggtaatttgagaaccctcgcttgcaacatatcaccatattattcgcctgtttgatcaacctggtatgtatggccttaaattgtgttaatttatatagaaaattgaccagctttcttgagtttatgtgattaattgttgtagttatcttctctgcatatgaattaagaagagagaatttgtaaattaacctgtacagcctgagcagaaagttgtggtttttttagatacaggatcttgcccattgcagccttgaactcctgggctcaaacagtcctccctcctcagcctcctgagtagttaggattacagatgcccaccagcatgcctagctgattttttttttttttttttggacagggtcttactacctaaaattattcttgagggtagcaatcttgtttgtggtctaaaacttgagctggaggggagagggttatggattgtactggcagtgatgttgtacaaacaggaattgggtagaatatattttggttgaaattccttttgttctctggagctgtgctatttaacaccatagccactagccacatgtggccagttaattaaaattaagtaaaataataaattattttgtcacattggtgctcagtagccatgtgtctagtggctaccatgtgtcgtgatgcagattcagaacatttccatctttgccaaaagtttgtggacgtttctgctccagaggaaaggtaaacttattgtgaagcgttttgggaggacctcaaggctccatgcgttgtccacttttaggtcagttccagtgggagctctgctctgtagtagatggactttgaagagagacacacctgagctgagatgtccactctaccatttatttaccagctatgtcaaagcgactagatacctacctgaggaatagcagcagggtgtggtagttaaatgagttccacactgtgtctgctactgtgcttggagggcacatatgaggcactcaaaatcttttggttcttgtccattatccccagcctgagaaataacccttgag

SEQ ID NO: 95173 - DNA, 1126 bp, Homo sapiens
gtacagtgagtttggtggtggtaaaggaagtggattaaacacatttgctttcttgttctgcaggagaccctttaaagagatcatccttcatcatttatgatataatgaatgaattaatgggaaagagattttctccaaaggacccggatgatggcatgtatagaaatcacttgtgttttcctcctctaaagacagagggccggtttacctgagtaccagttagaggccttgtgatccctatagcttagaagtatttttttttttttttaaataaatttgagtacatagtaggtgtatatagcttagtaatatttgccatggtctttctgagaaagccaaaattgtggtacattcctgcctctcttaagtttttatgttcttagctttatcttgcatgttaccagttttgttggcaggatttttgttaatgttactgacttgaaaatatattttatccattgtaaccaaagctcttgtgaactttgattttcagataagttttttcagtcagccatgagcatagtaagtatcatttctttattaatttgctatccatttcctaaatttatctgtaactggagggttctccctggttcttttcactttctaactcttctgttcatgtctttgcttctgttttttcttctttctctaaaatctataattttttttttctttgagatggaggttcactgtgtcccccatgctggagtgcagtggctcaccgcaacctctgcctcctgggttcaagcgattctcctgcctcagcctcccgaatagctgggactacaggtgtgcgccaccacacctggctaatttttgtattttttgtggtagagatgtagtttcaccatgttgaccagactggtcttgaactcctgaccacctcccaaagtgctgggattacaggcctgagccaacgcgcctggcctaaaatctgtacttttcaatcacatactatccctaccctttgtttattgtttacattgacatttttcatgcccctgaacagataagcttccataatatttcagatttgcctattagtaagttaaaattgataatggtttttattttagtttatgtaatcatgcttatcataggaaaaatttcaggcagttttagg

SEQ ID NO: 95174 - DNA, 1173 bp, Homo sapiens
tgctttactattagattggtgcaaaagtaattgtggcctttgccattactttccatggcaaaaaccgcaattacaaaagccgctactttcaatagcaaaaaccacaattacttttgcaccaacctagtatttagtatggatcctcacaaggtttttactctgggtactcaagcgtatgtatatccaggcatactttcagggtgttttatttgttggcagcaaccagtatttcatagtaagaaccataacttaactttcctgtgggtagattttggagttatttcatggagatttttactagtccagactctgcagtgcaggtgtcttttgtgcacttgaccaggtgttgttacaggattaatttttaatggtataattgcttaattaaaataatattgtaataaatttcacagaacttgggatttgtctcccccccatttcttataacttacttgctgtcaaccaataatatgttgaatcaacattattttcacaagacactctactgttgttatttatttgtgaaccactggctgacagggtatcagagtgatacttactacttgcatattttcagtgctcatctctcagagatctagaacttgcctaccaagtacatggccttttaaaaaccggagacaactggaaattcattggacctgatcaacatcgtaatttctattagtaagtgtgttggaaacatatccttttgcatgagttaccagattctgcaagtgggaggctgttgatgtcccttcatacctcacctctggtttcaggcaacatgccaatgatctaataggacatgttaattgagcacttaggaattaaagcagtggtaaaactgccagatttgaaagactagtttgtgtcctttaagggtttttttttttttttttttgcaacactgtaaaatccacatatctttttcctctaccccctctcattttacattttcaaattgttatagcagggtgagccctgaagatttcctttcacctcccttgcttttgtattcaaagatgaagatactggaacctagagatactccctaaatgggtttgcttttaggcagataagaacatgaatttaagaaggcagcatgttaacagatgtgtgagaattgttttctgtgtatccaaatccttgtttcacattgaatgtttttaaaat

SEQ ID NO: 95175 - DNA, 2744 bp, Homo sapiens
aatatggtcatactttccgcagtgacctgagagaagagatcctgatgctcatggcaagggacaagcacccaccagaggtaggcctgaaactcaccagccagtatatcctcccatactgaggtcttcttaaggctagcttccctggttttatctgccattttggagagttctgctacccaaacccatatttgagtgatgatacatctaaacatatcttgcccttagcagaaatctgttcttaaagttaccctctttcctgtagtccaaagcaagcaacatgaaattagcttctgtcttcagcttgcttttttaaaaatctccatctacaaaggaaatgcatagctgaatttgaaagttgtggctaatcaaaatacttaggacagggtcctttttttattaaattacttgtgtgctatacacataatatattcaaatggtaaaatgcattgctcagattttaaggatcctgtgttagtctcctgaactgaaattctcataaaatcagttaggcagttctgctgactcctaagcttctcagcttcaggtggcatttgctgactgtgctgctgatatcaaatctgcgtatgaaagccaacccatcagacagactgctcaggattggccagccacctctctcaactgtatagctatcctctttttaagggctgggagaactcaggaagcctggtgagtacagtaccacaagtatacactttagaagcttttgtatttgaatctaaaacattggcccacgctggtagaggttctttcatttggccacataacacgtatttgattcgggaacttgcaaataccaactaaaaagcaaacttttggaagaagacagtatgcatgatgtagttgagataaggcatagttctctcaaaccatacgctgagaattatctttctactttctgtgtctatggacaagtaagtcacttaacctcattattccacttaaatgaactaaagatcaaagaaatatatgatcaaagaaacgtagttttgaaaatggtttggtcatttgggttattgaagtatttttggatgcttctcccatcccactctccagcttaaaatgtgggctgtgtacttagacttctggaagctggcatttacgcacattaactaaacttggccttgaccacaacccgtccttgattggtgccactgtgttctggttatgtttttatcagcacttcattcacatactaatttttagtgtttgtgaatgggaaccttatgcatattcatgtttccaaaaatgagcaaaaggatcttttgtaggggtagtgacaggtggttttcctgtattttgttttgtatataaatgtgtgttctaaaagtcattagtggggggtgcttgtgcatggctccttgtacaagaaagtagctttatttgaacatctgattgctagtcagctatctccaggaaaagatgatgaaggcttgtctttgaggtgtggctcacacgtgtctctctagcaactatgctgctagtgacagagacgtatgacatttgcatttggttgttagcgcaggcagtttggcacacacttgatacaaccaggctgtgatgattggcgcaggggtacggacctcagctgagtcatgggagctgaatgtatgtgtttctcctttgtcctgcatgtggcaggctgatggggagcacttacatgagactgttgcctcaatctgagcctgcacttcataacagaattctaagacagactgaacccctgctgtactttaagagagggaaacagcaggttctgttctatgcctcttttccagctgtgcacaggatggattccctccttagaaggacagtggtgatcctctacaagaggacaaatacagttggagtatcccttttccaaaatgcttaagaccagaagtgtatggggttttagattttggagcatttttggattaggaatattcaacctgtaccagcaaatcttgacattggcagcatatcagatttacctgtgaaaactgcagtgtagattcgtttggggagtttaagcacctgcggtgattctcatgtacacacagggctgggagctagtagagcccacagatgtgtgtctttgggagcttacagtatagttaagaaaagggcatttagtctctgatttcagagagaagacagctatagtgtctgattgccttgtttttctaatagtattcataatctttttcctttcttgagcaggaaaatgttggggcttttcaggaagcataataagattcctaggtaagttgaaatcagccagctctctttgggtacagcctggaagtagccacatttggaatttcttcaccagccttagccaccacatttgggcactcttctgttaggcaagcataccgtcaactccctactatccagggcatcctgaggcaagcagttttttatctgtgttgacggatcatcatacattggggctacattgaatagatcatcatgaagtcatactgaatgaatgttgataatccatttggccctttagactttctaacctcactggaaacaagtaaaaataaatgttagacttcatctttgtctccagaaatactgttgggaattctgttactgaacttacactggatcttgcctataaatgttttactgaaggggctggagaaagttcacactttgcctttcttttacagaagtgagttgctgaatgagcttatggacagtgcaaaagtgtctaacagcccttcccaggccat

SEQ ID NO: 95176 - DNA, 1001 bp, Homo sapiens
taaaggcttagcatttaagtagcaacattgcggttttcagacacatggtgaggtccatggctcttgtcatcaggataagcctgcacacctagagtgtcggtgagctgacctcacgatgctgtcctcgtgcgattgccctctcctgctgctggacttctgcctttgttggcctgatgtgctgctgtgatgctggtccttcatcttaggtgttcatgcagttctaacacagttggggttgggtcaatagtttcccaatttcaggatatttcgatgtcagaaataacgcatcttaggaatgactaaacaagataatggcagtttaggctgcacaactggtaaaatgactgtagataaatgttgtaattagtgtacacgtttgtatttttgttaatatagccgctgccatagttttctaacttgaacagccatgaatgtttcatgtctccctttttttttgtctatagctgttacctattttagtggttgaaatgagagctagtgatgacagaaggatgtggaatgtcttcttgacatcattgtgtattgctggtaatcaagttggtaacgactacttctagcagctcttaccactatgacttaagtggtcctggaaggcagtaagtggaggtttgcagcattcctgccttcatgagggcttctaccactgaccactttgcacgtacctggctcccagatttacttaggtaccccacgagttgtccacataagcagcttcatctttaccttgccagagttgacaattatgggatactctagtctacttatacttgtgttcccatctgtctgccatcctctgaaggccgggacccagtcatacatccttagaaaccaaagtatggtttttgttttctcttggaatgtcaggtcttaaggcatttaattgagggacaaaaaaaaaaaaagccgatatagtagctagctacttaagcatccatgggtattgctccatatcaaagcagatttgcaggacagagagagta

SEQ ID NO: 95177 - DNA, 1004 bp, Homo sapiens
cagagctctgtgatttaagatgctcgaaaagagtgtccaagaggagtaaaggtcatgacagaatttactcccaggacaatctaagttctgccacaagtacccgtggtgtctgttcccacaacaatggccctttcacaagctcttgcctcacaacccctgcagaagtccttcaacaaaactaataatagactagtgaaacctactcctcacatgggtaagagttgcagtgggcaggtgaccctcctccctgcccccatcctttgcttcctcaagctccctgccaacctctggatacatcaatgggaaggaaaccagggaagcatagacctatagtacaacaggggtgtagtgaccactggacctgatgaagcgaatctgcctgaaatttaatacgcctttttatttcccttctgtgttaaatcaaatgatctgttctgcactgagccaagcaagttacttttaaaactggtggcaccactcatttgggacttggagactgcttttatccagaacctgttaagagaacaggggatttaaatacaaaggaatatgaaggtggtgtgccttaaagacagtctaaaattaggttttagtttgttacattattttgaaatattaaacatgaaaatgttaaatcaggatgtgtgagttttaagatgttgaacactgtcctacatcagtgaggagggaggcaataaagtaatttcagagtaaaacagattgaggatgaaaccaagacagaagtgatgatttggctttttatgatttttgctgtggaaatggcagtcgtgtgacttttcacttgcagtttaaatgaaagggtgaagagaagcctacctgccctaatggctcagggctatatccacctcccggataaccctggcccttgggactccatcatctccttgaagtagcactgagaatccaagaagaggctccgctgctttttgcacatgttactgagttacatctcaggaagatttttaagcacgaggaaggaaaat

SEQ ID NO: 95178 - DNA, 2465 bp, Homo sapiens
tacaccagaaataagtggtgggggtggggttgtaagaaagtctctctggcctcatcttgcacatgtgtagatgtagcttgttgaatgtgcatcagttctgtggatgtatgttgtcagatggagagaaaaatgtttggctttgcctttttttctttgtaggccatgcagttgctgaagaggaagccagaaaagcccaccaactctggctttcagtggaggcattaaagtacagcatgaagacctcatctgcagaaacacctactatcccgctgggtagtgcagttgaggccatcaaagccaactgttctgataatgaattcacccaagctttaaccgcagctatccctccagagtccctgacccgtggggtgtacagtgaagagacccttagagcccgtttctatgctgttcaaaaactggcccgaagggtagcaatgattgatgaaaccagaaatagcttgtaccagtacttcctctcctacctacagtccctgctcctattcccacctcagcaactgaagccgcccccagagctctgccctgaggatataaacacatttaaattactgtcatatgcttcctattgcattgagcatggtgatctggagctagcagcaaagtttgtcaatcagctgaagggggaatccagacgagtggcacaggactggctgaaggaagcccgaatgaccctagaaacgaaacagatagtggaaatcctgacagcatatgccagcgccgtaggaataggaaccactcaggtgcagccagagtgaggtttaggaagattttcataaagtcatatttcatgtcaaaggaaatcagcagtgatagatgaagggttcgcagcgagagtcccggacttgtctagaaatgagcaggtttacaagtactgttctaaatgttaacacctgttgcatttatattctttccatttgctatcatgtcagtgaacgccaggagtgctttctttgcaacttgtgtaacattttctgttttttcaggttttactgatgaggcttgtgaggccaatcaaaataatgtttgtgatctctactactgttgattttgccctcggagcaaactgaataaagcaacaagatgaaaactgagtatcttatcccttttcaaaaagtacagttctggccaggtgcagtagctcacgcctgtaatcccagcactttgggaggctgaggcgggtggatcacctgaggttgggagttcgagaccagcctgaccaacatggagaaacccatctctactaaaaatacaaaattaagctgggcgtggtggcgaatgcctgtaatcccagctactcgggaggctgaggcaggagaatcgcttgaacctgggaggtggaggttgcagtgagtcaggatcgcaccatcgcactccagcctgggcaacaagagcaaaactccgtctcaaaaaaaaaaaattctagtttgttgtatgtacagaaaatatccttgagaaacaacaacagcagaagtaggaacttctagctcacagtttccaggctgtgaattgcgtcaccagaagtccacagcctgctttttgcctttgaaggttttggtgaattgattcctgctgctcagactcaaaagagtaatatacaagccaaagtgccacatgtatttataattggggatatatcgttctagtgacttgttaaaatgttggtctctacccacaagttaattcagcagccctctatgggtcacagctgacagttctaaaacactggtaatggagcttagttctttctagtacctgggctgtgaatcccttcaaagtggggggatggggagcctggaatcttaatgaagagattaaatagttttgttgtgtatttgatgtagattgctataaaacccagagaactttctcagttcatctttctaaagattagtacaactgtcatattgcataagcactaacaaattcttttactccatgaagaccaccatctctacataaaaatgtcaactttcttcaaaattacaactgtttgttggggattgtgtgttcacaaagaaattgaggaggcacttttatctgggcaacacatctggaatcacaaaaggggcagcttctgcatctgtaggtgtatggcactggccttgtcctttgattttgggatatattggtccacctttggcttgtgttaatgttgtcaatagtccttatattccctcctaagtggatttacttaattcaacaaaatatatttagtttctgattggaacacatgctttgtgttccttcctgagattaatgcccgtcatctcaaaggcagaggcactctgtgcacctacctagaggatactaagtttttattaggagataataggactgttctaaattcagtcttcctttttcgaatggcacaaaattgcaaaatacattacttgtaaagctaaacttccctatttgtcatattagaaatgcttataatttccattcga

SEQ ID NO: 95179 - DNA, 1019 bp, Homo sapiens
ttccatcagtaaacctgtaaagaattatatacatcggccgggcacggtggctcacgcctgtaatcccagcactttgggaggccgaggtgggcggatcacgaggttaagagatcgagaccatcctggccaacatggtgaaacccatctctactaaaaatacaataattggcatggtgatgcatgcctgtaatcccagctacttgggaggctgaggcaggagaatcacttgaatctgggaggcggaggttgcagtgagccaagattgtgccactgcactccaacctggcaataaagcaagattccatctcaaaaaaaaaaaaaatatattatatacatcaaatatgagtcaggacatttttgaaactttacacaaaatgtaggaatttcgtgacaactctaaggccctctttgcttcagcaagtagttgctggaagattacacagttacatgacatgcattgagtatcacttttttctggaactatttctgttttatttcagaacctgtctgagaaactctctgaacaagaattacaatttcgtcgtctcagtcaagagcaagttgacaactttactctggatataaatactgcctatgccagactcagaggaatcgaacaggctgttcagagtaagcataagctatgtttatcttacagataattttcctcagcataatttatcaaaataattttatagggaaaatggggtacatgtactgacatcaggacataaaaatactaatcactctacttaattgcagtttttgccattaaaagtaatggcaaaatctatataactagaaatttataccttgtatgacaaacacaaaatcaccatttacaaggctatttacccagtatcctttggctatgtcgcatgtgcctgggtggtaagggctaggggtcagtgtggtcccatgcttgccttccacagacttggtgggttatctggaggtggtgatttgccgagtccaactaccaaatggacagtatttatgctgaggcctccatgtgccac

SEQ ID NO: 95180 - DNA, 1060 bp, Homo sapiens
gagaagataaatcatttccccaaggtcacacagatggttgtagtaaagctacgcttgattccaagtatatagttactttttttcatatcctggatttagttatttctcagaggagcatgtgattcaggaaatggcagtgttttatatgagaggcagcctggtgatgtggaaaaaccacaagtttgggggtgagagagacctttgtttgaaatctggtttttgccacagctgtgtgatcttgtttgaatcaccttccagggtttagttttccgtttcacatgagaagtagaagtgtacacatgcctggcacattagaggcgttcaggatatggaagctgctgttgtcatggttgatagtggtctttctgttttcctaaaagtatatgtggagaattgaaaactaataactactatgtttggtttcacagatagaagaagtcagagatgccatggaaaatgaaatgagaacccagcttcgccgacaggcagctgcccacactgatcacttgcgagatgtccttagggtacaagaacaggaattgaagtctgaatttgagcaggtgaggacctggactcccttcagccacacccctcttcctgacaggattaagagactctcctttccttttaatgtactctgaggatgtcgaagatttggaaatctccttgtatgtctacaaaactgcttctttttacataatggtgtacctgtgtgttcatgatcagatgtgtttttaaaatatatattctagtcatttggaatcttcagagctttaaggagagttggtaaaggggatttcaggaatgcagacagtaatatttgacatgtgtatcttcctcctatagatggcatggtactgcttagatttttataactgaggtaatttcccagagaagttttgaaatcccagtaaattatcaggatgcctgtaatcatagtttctattcaagaaatcatttacagtaatattaacttgttactttgtcttgcaagaagatattgaggttttctaagtaaaatcttccagagaatcgcgatgtatgtcagtatgaaaaggta

SEQ ID NO: 95181 - DNA, 1055 bp, Homo sapiens
tcttaaccagtacccaaaaggcttcttgatcactgcatgccatgagccatttcactgctccaggcaccctggtattttttgtctgtaccttgactatatcttttgtcttgggacctttatgttttctctgcctagtacattgttctatcctctctgtttaaaccttgagctctaagcttaagttttaagcctagatgtcactttgttagcaagactgagatttcctatcccttcagtccaaagtagagtctctgtattactttctgttatgttgccctgtttattttaaatgtaaggtgggggaaaaggaggttgaaggggtgttgatgcttcacaacaggtccttgcctgctcagtcatatgtagaaatatgtatcacaatctcagatgtcttttttgtttactgtctgctgcctccattgagatatacactgtgagagcaagaagttcgtctgccctaagcaccattggatccgtacagatagtaggcactgcctggcacacagggctagtagcacttcataaatacttatgcactgactgaatggattcattgatttattatattgtttctgagaaaaaataagttctggatttcaggtaatcagtgttaagtaatttgtaaagtgacctatggctatttgttaggcaaggtatattttttggttttttttggcccatgttgaatttaaattcatttaaaaataagcagttttctttgtttagaagtctatgtcaagtctatgtcaataactaccagatacttactaattttcttttcttttttctttttgagatggagtcttgctctgtcgcccaggctggagtgcagcagcgcaatcttggctcacggcaagctctgcctcctcggttcacgccattctcctgcctcagcctcccgagtagctgggactacaggcacccgccaccacacccggctaattttttttttgtatttttagtagagatggggtttcaccattttagtcaggatagtctcaatctcctgacctcatgagccacctgcctcagcctcccaaagtgctgggattaca

SEQ ID NO: 95182 - DNA, 1113 bp, Homo sapiens
catacacctctagtccaagttacttgggaggctgaggtgggaggattgcttgagcccagcaggtggaggttgtggtgacctgagattgtaccactgcactccaggctaggcaacagaggaaggctctgtctcaaaacaaaaaaacaaaaaatttaagttgattactgtgaaacagagataagtcctttgaaaccaaaaccacaattaatatcaatgattcttttattttctaaaatgttatttaccttgatttgtcttgttttacagtttaaattttagaaaatagccgtatcatttcattttccagtattaaaatagcttttcctggtactagtctccgattccttcttgtttccttttagatatttctgtttaatgatcaataactaaagtatgtgcattcttttttttcaaactgttctattttttcctttgtaggtgtttcagacttaggtgagtgttatgtatatttcatgtttaaagtcttttgttttgggtattaagagactaaagtctttttgttgtgcctatgattcttacacaaagccatctaaatagatataaagtagaattatgtcacatgataaatctgaattggatatttttggcatccgaatgctctcaggaatgaaaatgtttcatcaagtgattggaatcctatagatgtgaagtgtgtgtgtgtgtgtgtgtgtgtgtgtgtgtgtgtgtaatatggattgtaactgattactttggagaatttcaaacattaaaaagtaagaagaaaactaaagaacttccaggacccatcactcagttttgtagccatcagcacatgaccagttttgtctcatctattcccactcctcctcagcttatatagaaagcagactcaaatatcacattctttcacttgtaaatactttcagtatgtttcaaaaacatcaccatactattatcacacctaaaacttagtaacaattccctagtcaccaaatgtccattcagtgttaaaatatcccctattatttcatagaatgagtctttacagtttttatttgaatcgataacccatagacgttccacatgttgagtttagtcaataaatctcttgcccctttttgttttttgctt

SEQ ID NO: 95183 - DNA, 1051 bp, Homo sapiens
tactacttctgtttcttggaatgtttatggtattttttgttcaatttaatcacataccctgtgtatttgctcaggtccaagcagctcagtctgaggctaaggttgtatctcagtatcatgagctggtggtccaagctcgggatgactttaaacgagagctggacagtattactccagaagtccttcctgggtggaaaggaatgagtgagtacaactgaagtaatgttttttttttgatgttttaaccactaatcaatgaatctaaacttgcttcatctccattgtagtccacatccctctggcatgcatgcatatctctttttgttacagcgttttattttaaccacagtcattacagatgacacagctgcaacactactcttgtagttttagctgtggtgaacatgagttccagctagtgtttaattccataatccgtgattggttctgttctgatatttgctactcaaaaaaaaaaagtttggaatttgagtgaacaaaagtgacattataaccttgacactactgaaatattattgtatatgtataagtattaaaaaaccttattactttaaaagtatttgtagtgaattatttaaagcacactttatgtctgctctgtgacaaaacaacactttgttgagaatttacctagggaccctgcattgagaaaggaaccagctgtctggctatccacttcctcaagctgaaactacagagaactttgatgctgaagtcgttacatggtgtagctatagtcacatttccctgaagttctgtgagagtactaagaatcacagagatcacctgtctcagcaaaattaaaataccgtttatttttatttttattttttttgtcgttgcccaggctggagtgtagtcctccacctcccgggttgaagcgatcctcctgcctcagcttcccaaatagctgggattacaagcatgcgacaccacaccaggctaattttttgtacctttttttttttttctttttttttttttttgagacaaagttttactcttgttgcccaggccggagtgcaatggc

SEQ ID NO: 95184 - DNA, 2114 bp, Homo sapiens
gtattttaccatgttttcttttttttttttgagagagtctcgctctgtcgcccaggctagagtgcagtggcatgatctcggctcactgcaagctccacctcccaggttcaagcgattctcctgcctcagcctcccaggtagctggaactacaggcacccgccaccatgcctggctaatttttgtatttttagtagagacggggtttcaccacattggtcaggttggtctcaaactcctgaccttgtgatacgcccgcctcggcctcccaaagtgctgggattacaggcatgagccactgcgcccggcctttaccatacttttaagtgaaactttgattccctaaatttgagtctcatgtattttgttcctttttaaattttttgggaaatgcaatggaagactagataggagaacagcaaaagtttaaagtcatttatgggggtaggatttgttttttaactgttcttttttttttttaagctctagccaagagcttagaagatgctctgaggcaaactgcaagtgtcactctgcaggctattgcagctcagaatgctgcggtccaggctgtcaatgcacactccaacatattgaaagccgccatggacaattctgaggtgagcccaatgaatgattagaagtgttctggctgtcatgacttggaggacaaaaagaaaaatcgagggtggagagaagtgtaatatttaacagactgctttcttccgtatgatatcggctttctctcactaggggaagatagtctggaataattaatctttttttgttattgttttgagacggagtcttgctctgtcgcccgggctggagtccagtggtgcgatctcggctcattgcaacctccacctcccaggttcaagcgattctcctgcctcagcctcccgagtagctgggattacaggctcccgccaccatacccggctaatttttgtacttttagtagagacagggtttgccattttggccaggctggactggaactcttgacctcaagtgatttgcctgcctcggcctcccaaaatgttgggattacaggcgtgagccactgtgcttggccttagagtaattatgtttaaaaaacaaactgaaaaaagcctttaagttttttagaatgaattttatacattgtgctttactatatcttacaacaccgatgcagcgcaagaattagttcagatttgctttcatattttaatagcacttaaatatttttgttgtttgctttaaaattgctatttccataggtaaactttttaagatacttctcaaacttcacatgcagttttaagaaataatacagagagctctcatgttccctgaaacacctgctattttaaatgtttatgattatttatgcgaaacacttcaaagaatgaagtaataacattgatttttcaaaatttaatactgggacttaatacattattttataattacattaagttattcagtatgtataaatgtatctctattccaagtcatttaaggagtaaattaaagtaaaatgcataaattattaatcttaaggatcaggatcatacatggtcagtaaagttactttgccatcataattgtagttttaaaaaaaattttacacacactttacattgtttcagtcgtatgtacttatattacaaaagagtttaattagacctctgatgttagtagcaagaaactacaacctttgaaattttaaggaaaattccattttattcaaagtccaagaaaaatacttaaatatcagagttcagtcagcaaagtggaaaccacccaggaaatttaatttgctggttaccgatatgggaaggctagaagttgcgtgatgtaagggtgttgggttcaaacccaagtagaccagtatccctcagaaggacacggattggaagctttaaatgccatgttactacttgggtataagggtacacaaggtggtatttcatcttcctaacgcacataatgtgtagcacatggtgattagacagtgtaaaatctattgcagtcaagattttacaatctaatggtagcagttaacagatgagagtattagctaatgtacaaaataattggaaaaatgtatgaacacattttggaatgt

SEQ ID NO: 95185 - DNA, 1054 bp, Homo sapiens
gtggctcacacctgtaatcccagcactttgggaggccgaggagggaggatcacttgagcctagcagtttgagaccagcctgggcaagagaggggagaccctgtctctacaaaaaaatgtaaaaatcagccaggtgtggtggtatacacgtatagtcccagctgtgtgccagaggctgaggtgggagtattgcttgttcctgggaggtcgaggttgcagtgagccatgatagtgccactattctccagcctgggcaacagagtgagaccttgtctcaaaaaaaaaaaaaaaaaaaaaaaatatactacacacacaaaaaattgattgagtgattgatagagatgggatcttgctgtgttggccaggttggtcttggcctcccaaagtgtgcaaaaaatatatatatatatatgtattttaactcagttctgttcttgatcactgtgacctttcatctttttgtttaaaactgtaatctttttcctgctcacacgtcttctaccactcttcaaagcaattaaaaaatattctttgtttagttgctttcttttgtctgtcttcatcattaacaggctttttcctttgttactctttttccatgtgtaaatgtccccttcttgtgtgttaatattattattataagccttgcctggaataatgatggttaaaatgcaggtggatgcagacaagacttctttcttttgttcgttcccaaccattgtccattttgtgtgagtttatgtatgcagtggacagtgcccctgtttgtgtgttattcaaacatgtggcagtacaaatatttgtgtctctaaggagtcagatgtgaagtgggtggtgatggtggtagtaaatttctgtgtgtttctctgttaacccaggaaagtataaataccatgagtaacatatatttatagcacctacagaagcggctcaaattatttctgcagcaggtgataccctgtcggtcccagcccctgcagttcagcctgaggaatctttaaaaactgatcaccctgaaattggtgaaggaaaacccacacctgcactttcaggta

SEQ ID NO: 95186 - DNA, 1142 bp, Homo sapiens
atttttagttattcatacttttatttatttatttatttattttttgagacaaggtcttgttctgttgctccaggctggagtgcaatggcatgatcatggctcacagcagccttcatctcccagtcttaagcattcctcctacctcggcctcttgagtagctggggcacgtgctactacacctggctaatttttttggcagggtgtggtgggtagagatggggccttactgtggtgcctagggtggttttgaactcctgggctcaagcaacccttccacctaggcctcctaaaatgaataaatactatttttggtggcaacatgttataaacaaatcaggaaaaggtgatgtgcagacatggtggtaaacttggctgctatgatctgaattagtggtagataagtagaggctagaggtcttcgagatggttacattggtataggaaaataggtgtaggagagccaagaaatataaatgtatttcctgtttctttcacttaggttgactactggcaaaattgctggagctggccttttgtttgttggtggaggtattggtggcactatcctatatgccaaatgggattcccatttccgggaaagtgtagagaaaaccataccttactcagacaaactcttcgagatggttcttggtcctgcagcttataatgttccattgccaaagaaatcggtaagagttttaaacaatatttcagtttatccaatgaaatactttaaaagcaagttgttttcatgttgaaaatacagttgtcttttggtattcttgaaggagaggttcaggacctcctgtggatacaaaaatcccatggatgctcaagtctcagatataaaatgttacagtgtttgcatataacctatgtataccctcccatatactttaaatcatctctagattagatgtaatatctaatacattgtaaatgctgtctaaattttcattatactgtgttatttagggaatgatgacaagaaagaaaagtctgtccatgtttagtacagatgcagtttgtttttgtttgtttttgtttttgtttttgttttgagacagagtttcacccttgttaaccaggctggagtatagtggtatgatctcgcctcaccgcaacctccgcctccgggttc

SEQ ID NO: 95187 - DNA, 1244 bp, Homo sapiens
tttctggatcagttagctgaggttagatctgtcccttgagtgtgtatcctgtaacgccatgtttttagctagactttgtgggtgatttttcagatgtctaaactaagcttttaaagtaaaaatagatttttttttttgccaattaagaaaacatatagcaaataccaattgtattcaagaaataattaacatacttaagacttatttaaaggtgctaattgatcatagtctgataatttttttttaatattaaaagtaattttatgtgagccttggggtgtaagaagcatcactgcttttaggaatctataaatatggttcatgataaattgacttctgaaaaaaagtaattttttgtttaatgaagacatttttaataaaagtattatttctgtattaccaaccctaaaagcttaccagtttcctttaactgtattggttgtgatgtgttttccttctttagagttgtctctgtgggaagtttgtcctccgtccattgcgaccatgccgcagatactctacttcaggcagctctgggtatgtattatgtctccctataaccaggcttttcactgtgtgctgcttagggagtgtgtgttttccttgaatatgggaatagctgtctaaacctttttttaaaaaggggtacatacaccgaagctttgctgtaacattattggggtaccttctggagcattgtttgtaggtaaaaatttgttaataatgcaccttttggctctttggtaattggatggcatccgaggcatagccctccttgtatgtgcaatcttccattctatggcaaatagatttatatccagaactcagcatgttgtaacttaaataagtgttaaatttatttggcattttattagcttttcatattgtgacttaagcaagtgttaaatttatttggcattttattatctatttttttttcttttttttaaagacagagtctcgctctgttgcccaggctggagtgcagtggctggatcttggctcactgcaacctccacctcccaggttcaagcgatttttctgcctcagcctcccctgtagctgggactacaggtgcatgtcaccatgcccaactaatttttgtatttttagtagagacggggtttcaccatgttggccaggctggttttgaactcctgacctcaggtgatccatccgcctcggcctctcgaagtgctggcattacaggtgtgagccaccatggctggctggtattttattat

SEQ ID NO: 95188 - DNA, 1266 bp, Homo sapiens
gataagtatctgccatttctataactaaagagcacgtgttctcctagaatagaatatgtttatactgaaatgtaatgctgcttcaatgtaaaattgtaatgtaaaatgtaaaatttcaatgtaaaaacttactggatttttttgtgggatatactttttaaccttaatgcatgattcttataaactattttaaattaacagtagaaaaagttaatttgttgtatatcaatctatatttcaaatgtagaactgcccattaacttatgggtgcctttttcgtttgtgtgggaggagtccttatgtatgacaagatccacaaaaacgttatcagttgacagcaaccagcagtctgtggaggaaacctggaacctctagttagagttcacatgaggcagctcatactacaggctccatgtccaggttgtcatgctagattgtggtttctttatgtcttcactttagtttggtagagctaaggaacagatggtctgtgtaacagcattaatcatggggcggaacacttgaggtcaggagttcaagaccagcctggccaatatggtgaaaccccgtctctactaaaaatacaaaaattagccgggtgtggtggcaggtgcctgtaatcccagctgcccgggaggctgaggcaggagaatctcttaaacccaggagatggaggttgcagtgagccgagatcacaccattgcactccagcctgggtgtcacagcgagactccatctcaaaaaaaaaaagaacattacatgggaattatatgtttcctcttttttttaatatcacgtttctgcgggttagaagcagcaaggctaaccttataacatatgtctagacagattgctttgaaacagtgttgtcctttctatgtcataggtccttattaataaaaaggaattccaggacaaaaaagtagccaatattttgtgtgttaatgtaggatatttagtttatgttaatagtttagtacttaagagagctctggagacagaccttatgtttggcaatggtttcttaactataacaccaaaagcacaagcaacaagagaaactaaagataaattggacttcattaaaattttaaatttttgtgcatcagagggatacttgagagtgaaaaggatgaaagtattctaatggatactagatattttggatactagaccctcatatctgatgaggtgtttctttttaggtaaggaactcctgcaactcagtaacaaaaaagactacccaaataaaaatacaggcaaagg

SEQ ID NO: 95189 - DNA, 1039 bp, Homo sapiens
gtatccagaatatctcacttgtcaagatcctttccactttattaaaccccatctttctttttttttttttggatacggagtctcactttgtcacccaggctggagtgcagtggcacagtcatggctcactgcagccttgacctcctgagcgcaagcaatcctcttacctcagcctcctgagtagctgggaccacaggcatgtgccaccatccctggctaattttttaaaaaatttttgtagagacggagtctctctgtgttggccaggctggtctcgaactcctgggctcaaatgatcctcccacttctgcctcccaaaatgctgggaatataggcacgagccaccgtgcccagccaaccccatcttcttaaatgtcttactgcttttactgttccctcctagagtccattctttactctaggagggaatagtaaaagcagtaagacatttagtaaaaggctttttaaaaggcaaacatgaggtcatgctctttggagacatcgcatcacattcaaaataaaatctaaactgcttaccatgggcccttgatctgactcttctcatatttcatttttctactgcctcactcagattctcctggtaatctccagcatgtgcctcactgccttttcatcaggtgtttcttttgccctgaactcttctcacaggtttgcttaacttattcccttcagttaatttctcaaatgtcaccttcccttcagagagggcatcctgatccaaaatagaattctgactactcttgccttccttgtatcactatatctttaccccatcctactttgttatactttgtagctcctagcactacctgatgttataatgtgtatttattacacagtttccacctttaaaaagtaagctccacaatggaactgtgtccatatttactgctgtatttccagtattaacaatagtccctggctccaagtagatgctcagtgaatgtttatgacatatataaatgaaagaatgaatgtgttcatgaatttttttttaatttaaaaagattttttagag

SEQ ID NO: 95190 - DNA, 1051 bp, Homo sapiens
tgaggacttcttgactgagagatagcagaagtaaaggcgactaaattaagttgccgtgacgttaagtactttttgcaaaaagttaaaaatcatccaaataccataggatgctcagtaagttactttcacacaaaatatattgttaggataacattttgtgggagaatatacgagatcagtcaagaaaatgcagcgatgtaaattttaccgttagagaaaagctttttttatgtggagtattttttgtgttcgcgaaatataatacatatgaagaaaattttatatagtatgcatgaatgatttaacagttctaaagcaaacacctgtttaacactcaggtcaaaacagtgcactaccagaagcctcctctcccctatgtatcaaaattctctacttcccccccagatataaacactgttctcatttttatagttactattaggttgcctatttttcctatagtagttttagcatccatatgtgcatctcaagaacatagttttgcctggttttgaacttcacatgaattggttcatacagtatatacgctttagtatcttcttttacattgtgagattcattcattcattttgcgtagctgtaatgctttctcattgctatataattctttttttttttttgagacggagtttctctcttgttgcccaggctggagtgcaatggcacgatctgggctcactgcaacctcctcctcccaggtttaagtgattcccttggagtagctgggattacaggcatgcgccaccacgcccagctaattttgtatttttagtagagttggggtttctccatgttggtcaggctagtctggaactcctgacctcaggtgatccgcccgcctcgacctcccaaagtgctgggattacgggtgtgagccaccctgcccggcctgctgtataatattatatgactgtgccacaattctccatttccagtttggggcaattatgtacaaagctgattgatctcatcctggcgcatgagtccaattgtttctgaggatgtgggtatgtgtgaaaatcgctgtgga

SEQ ID NO: 95191 - DNA, 1030 bp, Homo sapiens
tccatccccctccccgccaccctcccttcccccggccattgagaatcacatctttccaagaaatagtccagcccctatggaagtctggtttttgttcttattgggtctataaaccttgagttgtgaagatacctgttgtttcatacatagtatgatgttttacatttctttgtaatatctgacaggctggctataagaaaaaattatggaaaaagacacctgcaaggaagaagcgattgagggaatttgtattctgcaataaaacccagagtaaactcttagataaaatgacgacgtccttctggaagaggcgaaactggtacgttgatgatccttatcagaagtatcatgatcgaacaaacctgaaagtatagatcagaagtttcacttgtttctcagttattggatatgtatctttgtgtacatatctttgcaaaaatggataagtacaaaacttgatgtaaattgtaccaatgaatacgtaaacatacagtgacaacattaaacttagaaaagttttaaaacttaatggatcagactttgccagatttggttagggaaacagaaatttagaatggtgcattatttttaacaaatggtattggcttaactagttgtttcagttatgctcttttagttgcaaggaatctcaagtgggacaaacataaaaagactcaaaagctacaagttagctcaagcaatgtgacattatttcaaggatatgtgccagggaattcaggaaccacctcaccaaccccatctcccactcagaaatcacctcccagcctcaggaagagtagaaattgggtggtgctcctcagcaggggaaggtggatgtttaggcttgggctctgcatgcatgtgacttgcttctttttgcattgttaactccattctctctattcaccaacttctctacacagcttttgcatacttacagtttctgttcctttgtaataactttaacttgcacctttgaggttcttttctacatgatgaccttcagctcctgctgctagtctccaattgc

SEQ ID NO: 95192 - DNA, 1009 bp, Homo sapiens
aaaaaaaaaaaaaaaaaaaaaaagcttacacagcttcttagcaatttttttttttttgccgaaacaataaattgcctttagcagcagtttaaaatcctatcgtgaacaacctatattttcgccattttacaatggagagttgtgacaagtacaggttatcaagtttgcacttaactatgccaaaaaaagtttgaagcgctctattctcagacatgctgtattattacttctcattcaagattgaaaaatataaaggtatccaaactctgtcttaatgtaaatgtaactatttttccttcaagtgttgactagggagtcggtttctctcttaaagacactcactgtacaactgaaagcagctgtcatatttctggcaaaatgtgtttacgtatctgacaagttgtacatttgtgtatgaactgacataaaatgtgaaagcctgtaagtgtacatgtagtggtgtggtgttctgtctagaggatacaactgaatgtttttaatttgctgacttacagacacaggctgtttacaaaatgctagctggaaagtctgtaatgttcatgtcataacttttagttaattgccattgagcacctgttctgaggaggtgagatgtggacttgtgcttataaactggagagtttagtcataatccctcctggctttgtgtgaatagcttgctcactttgctggcctttgaaatgtgttctccgtgataagctatccatgtgtttgtgataagagtgcttgtcaaccatgaccatctttgagccttcctagtcctccacctggcacagtatttgaaatggcaaaggatgtgcttcatcctctaacagtgtacactcccagagctgatattctggattttgactgtgcacatttcctctagttcatgtctgtagtccctatagaatgatctgtaataaaatagtatactggactgtgcatcaaagggatgtaaaattacagtattccaaaggttgaagttctgctgttttgttataatgcc

SEQ ID NO: 95193 - DNA, 1011 bp, Homo sapiens
ttcccagagcccctgaagctcatctgtgcgtcccaggttaagaatttctaacttatccaaccccactggaaacaagaaaataatagaatttctaacttacttggcacttaggcctgggagaaacagaagagggcaggggagagagggagagagtgcttctctgcagtttcctagggtgcactgggagagtcgcctaaatgcagtggacaggtggagagactacctgagcaagcgggtggactcactcacgatcatgtggcccagcagatccaggggaaggaacccaggtcctagaataagttgagtggtccagacatggaggtcagtaatgtgccaagccataacaactgaagtggaggaggtttgaaataaacaccagtctgtgggatgttgtggtgtgagcattacttctttctctattctctccagcccttttcaaaactgtgtttcttcctagcatcttctcatatcaccctcttgttgtcgtcaatttgtcattatttacgtagatctgaaaagttaaattggtcagatatttcctctcatgtgaaatcagcagatcatcctagtgttccccagggacaagcccttccccaacaaccatgtgtggagtagggacctacattcggctggtggtggagggaaggcagttatgctgatgattggaaagacacagtggttgggaggtgagttgtattagcataaggaagtttgtcccttgtggtgatgtgagggttttggggaaggaggcgatggggcttaaaaggtttgcaagaagatgattagtacagatcttggtgctctatgaacattgtgcggatggcaggatggagggtgctgagagccagtttcaagagactgagctgggttttccttgccctgaaccaaagagaagcacattaggatcatttctggaagagactcagcacactgggccgggtagttgcttgaaaagtacctttcaggaagccaaggaattctgcagacaaagcctggacaagagggaagggg

SEQ ID NO: 95194 - DNA, 1040 bp, Homo sapiens
atttgcacacagtgaaattcaccctttttactgtatagttttgtgagctttgacaagtgcatacagtcatgtaatcacaaccacagtgtaaatatagaacaggttcattgcctccaaaacttcctccatgcccctttgtagtcatcatcttcttctaccccactgccagcctctggcagctcatctgttttctatctccgtagttttgcccatcatcatttgtctttccttccatacttagcacacgcagctttgcctgccacctttcttgttctgatacacctggcaccccggccatgttgtgacttccctgaagataaaacctctgactttgaggtatcaagttggattagaagagcagagtttgaagccagatagagcatttgaatccagctcattcagttagcagctctgtgaccttgtgttggcctcagaatctgacacagagtagggactgaataaatgtctgttggatgaacgaacaaacaaatgaatgaatgaatgaatgaatgaatgaatttaacctcttaatgtcccaggtccctcctgtgtaagagggaatggatagtagttgcctcacctgacttctgtggggatcagtgccttgtacagtgcctggtgggcattagtaaaggtttgtcctgttcccatggccttccccagggcttttgataccctctgccagaccgacacatgcactcaaagttggctgggccctggcagaggacatcagtacctgctgtgtgagagcgaggagggcaccagctgagcagacaagtccccagaaaaccccacagatacccgctgaccacctgccagtcaatctcaaagagctcctcactctttccccccacccctttttcatggtgcacataggaaggcccagcagtccttttctcagcctaaatatataccatgtagggggctttagatgaagcccaccagaaggagaaaaccataacccttcagcacagaaccctctggctgggggtcaggtctctggctctgaggtctggggaggggagcataagctgggaaat

SEQ ID NO: 95195 - DNA, 1049 bp, Homo sapiens
gggggccaatggtgatgatctgtttcccccggagcctcgcccagctcctgtgtttcagccaatgagcggcggaagcggctccgaggggggcgggtccgggaggctgtgcgtgtcttgtgagagctcttgaaccaagtcagcgctggagtcggctaggcggctggaaacggcggctgccgccggtgactcagggaggcgggaggcggggtaagagcgccgcggcctcggctgcggggagaggggagagaaaggtgaaagcgccgagcgcgcggccccgtcgcccgttggcagcggcgcaggcccgggagacgggcgcccggggttcggggccggggagctgggcgccggggcggggcggcggggcaagtgcggaatcgcgggctcgcccaccctcccccgtggggccgcccggggcggggacccagccgcccgggaccggctctctgcaccaggggccttttcttttcggggctgggggctgagcactttcaaatccactcgagccgcagataatttttccctcactccctctgcggttgcgtttgagctgttagaaaagccaaacttgggagagcgagggtcacgcggcgctggggcccgggtgtgtggcgggggagggcggcggggggcgggagggcgcaggaggggggctcggtgcgggtccgcccggggccgcgtcctcgcgcgggttcggcgccctccgcccgccctccctgctgtctccgcccggccccctcccaccggccgcccccgtcgcattttgtttttgtgtttttgcagggaggagctcttcctgcaggcgtggaaaccatggtgctcacgctcggagaaagttggccggtattggtggggaggaggtttctcagtctgtccgcagccgacggcagcgatggcagccacgacagctgggacgtggagcgcgtcgccgagtggccctggctctccgggaccattcgagctgtttcccacaccgacgttaccaagaaggatctgaaggtacaggcggctccgggcctctgccaccggacgtttcgcagttaccgtggtaa

SEQ ID NO: 95196 - DNA, 2061 bp, Homo sapiens
aactgggaattcatgtcaaaaacaattttggctaggttggatttttgccttacttgtacacatcacaactcaaccctcatgtaagatgccaatcttctgtctcttttctagtcatgatttatcactgcattccttagttgagtagcagatgttaagtttgggggccatgttgcattaaaaaaaaccaggattttattttaccttgattttagagttggggggtcttgttgcccaggctggtctggaactcctgggctcaaaacaccaaaaccaatttgtgcttggtgagatggaggcaggaaccaagtaactaagaccatgcttacactagggtttaggggcattaagtttttggggggtgagatgggggtggggcgaggggctgagatgaatgtcaataaataacattcaagtaatatgtaaccattcttctattattaggacaaatacaagtctgtctagactggcttgtttagatagttatggatgatattaatgaggccaaggcttgttaactttgtttcacctagagagactttataacaaaaccacttacttagatgacaaaaagagaatatgtctagtagttggttacagagaagttaaggtgaagacataataacagtggataactatgattaaatggttacatcaggatttagcaaagaaaaaataatcattaaatggatattatgtggcgattacttcatttaatcctcacaaatatcctagatggtaaactacatttttagtgtcaaaaactgaggcttaaagaagttaaataacttgagtttgtctccagaccttaaacactaggctttaatattcaggtagagcgaggttagagcattttattttgctagcctctatatccctagcaccgagaacactgcttggcatgtagtgtgtgctcagctatttgaatggataagtgaaggaatcataaaattattacctctcctatggagaaacagtttagaaagaatctactgatgaggcagtagcattctcttcatctggaataacaacagatcttaattagatgtggctataaagactgctttaatcttatttttatcctgctctttctacttgagtatgaaatgagttgcttcctagctgattttgttcacataattatgcgtggtgggaatgccctgcttccttaacttgtccttttttctttgaagcctacctttttcttgagtctaatgccctgcttccttaacttgtccttttttctttgaagcctacctgtttcttgcgtctaatgccccttcttagtccttacaggtgtccttagcaggcaattagtccttgccatctgtatgtaccatttcctgctattgtcagcaatttggtgccttgactaatgcctagcctttcatttttgcacaccattgaaactttaatgttagtgcaatctgctgccagtcaagccatgtaaaatgaaaaaacttctagcacggtataaaaactgtttaccccttttaattgaatgctggaccttgggatcttcgacaaacatttaggcataagaagacataagtggaagcacaaggaattaatttctttgtggagtagtgaattaagtggtatcctgcattgtagtgcaaggcataaaatagacatgtaattaaaaatttgtctaaaaaccatatcattctgtgctcctgcttttaaacttggaaacattttcattggtgtttctgatggcctttataatcatatagtcaggtgagatgagagtatggtaagagtgggagattttgatattagtttattagatacaatattaattcatatatcagaaagattttctgttggggaaacattggcttgaaaaatctgaaatatcgagcatttggtcaaggtgtttcataggtactaataaggtacacatttgcaaaatacccattaaaagaagagcagatttcacaattataggtagtgaatcatagttgactctggcctttgaagccacacagtgtaagtcacatctcattgtgggccaaaggagcatgggtgaaataacacaatttagaatagaaactagctgca

SEQ ID NO: 95197 - DNA, 1129 bp, Homo sapiens
gagtccctaggtttgtctaatgttacttggcaaaagaaatacatttttccagcacagcttctctaacagactagttatccttcccagtgggaaaaatggatgacccattcttggtcattatccatttcacagtggcagaaaagcataaagccctgatattggaagggcttctgtgttgagcactgttttttctttgccctgctagaattcggtttggcaagttattcctattgacagtttctgtattacatttatcataactgggtgtgcacacaaagccagaagactgtggaatagtgccaagaatggagctgctgccaagaattgaatgtttcagaactggcttactctgacgccttaggctattcattcagattttctgtttgtccccccacctccctttttgtaaaaaagaatgcattttgtaatactagttaggttaaatgaatctgtgtgaaatgagttgttaaaaacagcagtttcttaccaggaagggagctgaagcttggtcagctttaaggggccttagaaaatagggttttggcctaggtaaccaggctgagatgtggttcaaaattttccctaaaattgccatcatgggtgcatgcttgctcatccccagggtggccactgggcacagccatgggtttactaatgggaatatggaaaaaagggctgcccattatcagtggactttggtggaaagagatatgtgtacctctggagttaatctttacaatgtgtcaaaaggtttggagaacattgatcaaggaaacatttttctgattgatgaataaactaactctcagttatggtcatctacccctgctagtaggttacacagtgtattatatagtacatgcagtgtgttatataaaataaaaaaaaaacccagacagtaattgcaatgaatcgaccatatacatctgtctcttgtgtgtcatatctgtgttttttgtcccttggatttggattgtgatttccccatccccagtatttaggatacagagtgttttttacttggattgaccagctgtttgtttgcttacttttttcccattgccaaagttagtcatttttaaaattatgctttgagttcctcttaatatttctcatgcttctagcttgg

SEQ ID NO: 95198 - DNA, 1056 bp, Homo sapiens
taaggcattaatttgatactccttaccttcccatttgtgttactgagtttctacaatcatacattttttttctgtgttttttagattatcagacatagtatttttgttggggttcctgaatttgattcctctaaaactacacaggacagtgagtgaggtcttgatgaattgtctaatactactttggtccgatacaaaataaaaagtttaaattttctcatagcttttctgaaatgtcagtcatcttatgtttgtagtgattcttttaatgtttacttttgcgtttttttaaaaaagacttaggaaaagattgtcctggatgatgttgctattgggagataatgcaaattgctctaagattttttttttttttttttttttaaggtgacaaaaacttagttggttcagaagtaaaaatttatagcttggacccatctactcagtggttttcagcaaccgttataaatggaaacccagcatcaaaaactcttcaagtcaactgtgaggaggtaaagacaacaataactctttgtaagataactcgacaaagcatgataactatacaaagcatttatgattttctaggcactaaatacctttattattttatagggtagaaataattacagttgttttaaaaagaaattattcataagaagctcctattgttatgttaatgaacctgattttcagtatgttcttgagcattttttattttccggtatctttgtttcatttatttttaagattccagcactgaaaattgttgatccgtcactgattcatgttgaagttgtacacgataaccttgtgacatgtggtaagatatgttattaaaatctttcttctccttcctcctttcctccgttcttctcacattaagagaaacagggaagccaacttaacctatttttaaatattttaggtaattctgcaagaattggagctgtaaaacgcaagtcttctgagaataatggaaccctggtttccaaacaagcaaaatcttgctctgaggtaacctttatttatgtcacttgtgtaaagctttccttaact

SEQ ID NO: 95199 - DNA, 2530 bp, Homo sapiens
tgtttaggaaagaatgaagagttaagtatggaaattagtcttactacctttcatttttgccttaaagtttacaaggtaatttcaagtacatccatccaagaaaccatagttactgtattaagtactcactgtgtggtggatacttggtcctggagattgaaaggtatctggagttcctgtctcagattccataggatagtgagggagacagacttccagagggctcccacaagtgcagggagagtgctctggtcaggagctctgcaggtgcctcaagaagcagcctgggcagagcctctcagacagggaggacgtgtcttgtttggtgaagggcaaatgtttcattgtggcaggggcacaggaggcatggaaaaagagaagcagggtcagagataggaagtttgggttttatgctgcagatgaagagggggtgtctggggtgttcaggggttttaagttcaggagattgacttaagctctgtagatgatggatgagggaaggacatgagaatagaaatgagggcactgatgaggttagttgtattgcacatcataaataggcttgaggtgaggcggtagctaagggggtggagagctatttaggagacagcagtagttggatttggtggaagactaggtgttaggactgaagaagcacaggaatctagctaatgaagtaggtagaacaaatggaatgtctgcctcaaagaacatgacagttctagcttaggaagcccaagtgacatggtcaggcaattatttatgatactatatagtctcccagtatagaaaggggctgagctgctgaggaataggggtccctggtctagaagggaacagatagtaaggctctgggtaattaatgtggccaggactacacagaggatgtcaagctcagagacaatattgtcaagtaatccatagtattagaagctgagagataaacaggatataataataatttctttatgtcaggttttaacgttagagaaattgttggcagtctagagttagaagtagtaaatatcagtttggagaagttggttgtgtgttgcctgtcatggggaatgtgtcagtgtaaattgggagtatgatgaagaggagagctgagctgtgagacttgctgaggaagaagggttgggaataggaatgacgtatcctgttggatggtggagcgatcaatctggggtgcaagcagaactgaggtcagtgggaacctcccttgggggaaggtgccttcagaatgttgagtgtgtcagcaatgagaaaggtgtttgagcaagtaaatttctaaccttcaaggaggtacttgtaaaatgtgggcatatagacatatatgatatgatcctgtctccttgattcaaattcttgcaaggccagaagcattacttttttatctttctcagcatgttgcccatactatgtgtgctattgagctgattgttgggcacattagaagctattaaaaaaataagcctgcacttcagcctggagataagtttcttaacttctgcatctaatatgataaactaaattaagtgttttaaaaatgtacattgcagctcttgagctctatgctagtcacgtcattctaaaggaagtcgaaggtggatttttacctgggtttcagaagttcttgaaaatatttttttgattgtgaagctcatctcatttgaaaatttttggttaacctagaaaagtatagtaaagaatagaatcatcacttgtaatcatacttctcagagactctctgtttacattttgaaatacttcaaatgtaatgtaaggaaatactttccttctgtctcttctccccctgtatttatcacagagacctgattttttttgttagttttttaaaactaaaaaccatactcttgtagcctccttgattcccttgcaatgtattataactattattccatatcggtaaatgtctttcgttctgggtgattcttgtagtcagacaagttttggatacactggcctggcctagatttcaggagggctggagagataaagggagcagtggggaaagaaagtttttgaaaatgtatgagtgaaaggtgagtacagtaatgcactcagcacgattctcactgtgtttgcacttcccagatgtgttggactggcacttttagggtggtctttagaagacaggcatttgggactagtaggcaagactcttgactgtcttgatgaatacttttggttaagataaacctgtttgccagtgatacctggctccttgaaggtcttctctgcctagcagactattcctcagagttacgacgttgcctggttagttgggaaagagtctgctgaggaatgtgagccggcagtgtcctttttagaattctatcatacactcaattatattatctccgtctgctggcagggaggaactattgccatgactggtatagaagaccttcagggaaaactcttcaggtaagaagaaactttgaccctttgttgagtcagaggccagtgcggaggtgcactcgtgaacatgggtttgggaattgga

SEQ ID NO: 95200 - DNA, 1021 bp, Homo sapiens
gctcttgggagagtgaggaaaggtattagtgcatcaattctaaacatattcagaataaggaaggtgaccaatatgaggaaagataattggtaaaattgagccttgaataagcatttcaaaatgatttagcattaaactttgggagactaacctcagattaacagggaattgcaaactattacaagcaaaagggactttaggaataaacaaatttcctcatttaaaggattaggaaactcaaaaaacacccaaaaccaaccatcacaccttctggagaacattaaggtactatttaaccaaaattgagttgactgaaatagtgtaatatatgatcagataatttagtgcctaaaaatagttgaaactatgccaaaactttgccagtgattaaattcttatttttcagatatatctgtatatgctagctagtcttttcaaggctgtcaagtaaatttctgagaaaagcattcatgagtagagtacatataaatatattcgaaattgtcaggttttaaaaacctgctggccaggcacagtggctcatgcctgtaatcccagcactttaggaggccaaggcaggcagattacttgaggccaagagttggacaccagccttaacatagcaaaatcctgtctctactaaaaacacgaaaaactagccgagcatggtggtacatgcctgtaatcccagctactcgggaggctgagccctgagaattgctagaaccctggaggcagaggttgcaatgaaccaagatggcgctgctgcactctagcctgggtgataatagtgagactgtctcaaaaacaaaaaacaaaacagaaaacctattagtggaagttgtaatcaaactttagaagttaatgactagaagatgaagaaactttggagattcttcaagtttagatttggtggtaaggcaagacgattgagaaaggtatatgacttaaaaatttaaggtatataacttaaaaatttaagcacatgtgaggagcctggtgaaatgggtgaattggtttc

SEQ ID NO: 95201 - DNA, 1463 bp, Homo sapiens
agagcaagaactgtcctcaacttttattgcattgcaaaggcttatctgggtaccaaataggcatccctgcctacaagagtcctatgtggtctggtctcctgccaaactatgcagtaagtgcgtggtgggcactcaagtcatgccaaagtgaatgcatgtgaagctgccaccatttaaaactgtcacttaaaagttcacctctgcgttgcattagtaaagtaattgccacctgactgttttcctggcacagtggttcagaggtctgaaaaagataagcttgtgatcctttgtaggaagacataagttttgtgaaaagctggagtgattacttacagtcttaaagccctgaattgtatagtttatcacttgtttcactttcctgtttctttttatttggcaatggtattatgtttgtttagtattaagcaaatgatcttaaatttggtagcattttattatttcctaactagggacttccttttaatatctgttggtttggtatcttctaggcctctcccagtatgtgtcctgtgcagtctgtacctacaacagtttttaaggagatactgcttggctgtactgcggcaactccacctagtaaggacccaagacagcaaagtactccccaggctgccaactctccacctaaccttggagcaaaaattcctcaagggtgagtagtgatttgttaaagatgtttaattataataataaaaaattattttagtcatggctcattgtttttatccctggttgtccagggaggtttttcgttagagtttctgagaaaagatggatagatgcttttgaaggtgaaaagtatagaaggcacacagagcaacatagaaaatggtatagaagtgaaagggggcatgagaaaagagactgtcttgatacagtgtgaaggagcaattgaaatagtacctttgtaaaacaggtgtcttcttttaaggaaaagggaacagattggttgtacatggaagactgaggtcagtgggagtgtgaagaagcagtgagacatggttacagtgagagattctccgcagcctcgacatgaattgacccaagtatagttgagaaatttggcagtagagaggactctaagaataatagaaatgaggaagcaatatctgtaggtggtaactgttactaacttgtagaggaagaaaatgagtacgaaatgtaaagtttcactagaaagtttaaagtaggtacaaggttgacagagcaagtagtttcaagggaaggatctcttctgggaagtggtggtggcctgcgtaggcaggcagttgatacagccttaagatgtaggtcagagagactgtggtatagaaaagtaggtttggaaggtgggagagtggctgagcacactggttcactgggaaaaagtagtcagtctgggatagagcttggaggatggccatgtggcagtcagacaggaggaggagcagtcttcaaaatag

SEQ ID NO: 95202 - DNA, 1434 bp, Homo sapiens
gtttctctgaaatttacacacaaaaaaaaaaaaaaaaaaagaagaaagaaaactttcggaattgcccctacacagacttctggttttgatacttataaaccagcttatctgctgagtatattctttggtttcatacaatattttgttttgagggaaagctaaggttcattgtgctgtgagaagtagaactaacgtaagaagttaaagatttctgagaacgtgcagacataatttagggttgtatttttctgagtgtttatgatttttgcagaaccattgactgatgacttttaactctagctcacagaaatctatcctaaattctgtaacatatgagaaattttcttttttctttcatactcgttaccttagggaaccaaacagtttgtttggggaagataatggagagataaaaagaggcctggatgctagctttctatattatatttttcagatgtcataaacaaagtttaccagaggaaatttcttcctgtctaaatacaaagtctgaagctctgagaacaaaaccagatgtctgcaaagcagggttgctctcaaagtcctctcagattggaactggagacttgaaaattctgactgagccaaaaggcagctgtactcagcctaagacaaacactgatcaggaaaacagattggagtctgttccacaagcattgactggccttcctaaggagtgcttacctacaaaggcttcttctaaggcagaattggaaattgccaatcctcctgaactgcagaagcacctagaacatgcaccttccccatcggatgtttcaaatgcaccagaagtgaaagcaggtgtcaatagtgatagccctaataactgttcaggaaaaaaggtagaaccttcagctttagcttgccgatcacagaatttaaaggaatcttcagtaaaagtagataatgaaagctgttgttcaagaagcaacaataaaatccagaatggtgagtgtttctcaatatctttattggtagaaggtaagaaatggtagatatatatatctctttcttgtcctatgagaaactatgtgaaaatgactttgtagaaatagtttatacagtcagaaaagttgaaagaaggtataattcccaaatctcagaaacgattactgttaatattttggtgtacctggtttcatgtatatagaaatacagataaactgtattacacaaatgggttcatgccaataattttaccctgtgaattagtgtaggtgtctattagtattttaaagcaaggattccattatgttcatttaccataggatttaactggttcctattaggtgggtaattaggtggttcccaattcttaggttaagaaaattttgaaacaaaatctaaagtaatctggtgtttactttatttcagcttgtcactgatctttctgttacatccaggttggagtaggaa

SEQ ID NO: 95203 - DNA, 1048 bp, Homo sapiens
actagttccccagaagctgttggtttttgactttcgtttgtttgcctaaaaacccacttccctcttctcagctctctgggaccctaagaaaaggtcttttctgttttctatgaaatactccttaaggctcttgacatacaaatggattccttactttgttattttctctgacacggtgattgctctttcctgatacatgtctaccttgtctttagaaaccatgttaacatttcaaattctccggcctattacaagttaaaacataaaatctgcatttacttagaatgataatcctgtctgtagccagtgctcttaatcctgcttggaccacatgtgtgaaagaaggggagacatgtcaggagtcaagtgacaggcatttagaagatgctctaactccatagacccaggggctacgtaggaaagtgattcgtttattgttatttttagaatggttagcttttgcattgtacttttaaaaacacaccttaaaccagtcttttttgaatttggaaagtgacagaatggacatctactaagtcaggcctctgcagaagtgagcctcgagatcgagtttgaattaaatgtctgatttgaaaacatcctaaaatgtagagttgtgaatagaagtatacattaactttgaattgtgagtctggctgtttaatttggggttttatgttgccaaatggattgagcaaataagaattgttttataaagagagtaaaactttcccagttattctgatagttgtcttctgttgagccatttttagaaattacaattgaaccaggaattgagaagggagttctctttaagggaatattgggtttttgaatagaattcagtcatatatgaatgtgatttttaaaaatttgaggtcctgtctccttaatcttttgttttcctagccccatccaggaagtcggttttgacagacccagctaaactcaaaaagctgcaacagagtggcgaggccttcgtacaggatgattcttgtgtgaacatcgtggcacagttgcctaaatgccgagagtgtcgcttggacag

SEQ ID NO: 95204 - DNA, 1719 bp, Homo sapiens
tcaagaccagcctggccaacatagcgaaaccccatttctactaaaaatacaaaaattaggcgggagtggtggcaggcgcctgtaatcccagctacgggggaagctgaggcagggagagttgcttgaatttgggaggcagaggttgcagtgagccgagatggcaccactgcactccagcctgggtgacagagcgagactccatcccaaaaaaaaaaaaaaagtaattacaagttgtaaataagttgtgtgtgtgtgtgtgtgtgtgtgtgtgtgtgtgtgtgtgtacattacatctttttttcccctgcttcccctaggttacaattcaacaaacatggtgtgttgcgggtagaaggcttcttaacaccaaacaagtatgacaatgaagcaattggcttgtggttacctttaaccaaaaacgttgtggggattgatttggacacagcaaagtacatcttggccaacattggagaccacttctgtcaaatggtgatttctgaaaaggaagctatgtcaactattgagccacacagtaagagcatctcttagggggtaggattttcgagcccaatttgatttttgttcctaagtgacacctaagtcctaattgcttgggttttttttcacccagaagtttagataactttggtataatgaggttgcatttttccttttgcaacaggtttgatcagagttagccacctatctttggggtttattttgggccaattaacagaggagtggaactccttttttgttaggaaaggtgaagtgagggtggaatttgcacagcctcaccagcagtgcaggcacactaaaaggggatgaggtctcagattggtttattttaaaacaaaggttcttaatcatgaatacatttcgaggaaaataagaatgggaaggctgactctcagacctaccgagttagagtctgcagggctgggtcccagacttgagaatgagaacaggttcagaatggaaatgattgttagagtcaaggtttgaagggaatacttggaggttctagatgtgcatgtgcttgtgtcttcccctctttgggagcactgttacactgatctggcagccattaagccacaggaatcagggtaggtggcacattagagccagacctccttcatgacatctcaagctaggatgtttggaggacggtgcagcgtcttcctatccatgtccctctgtggaaatgagttatccagccagaagcaccatggggcatctgtcttgtaagcctcatattttcttccatcattttatctttaccagtggttgaagttaaaagtgaagcctttctattcctctggtgtgtctctttttagactttgcttaaccaagtatgtttgaatacaagcatccatgccagtcttaagaattttgatttattaccagcaactaacaacctagcttaagcacaaaaataacttattgaatatatgtggatactgtctcagagtccaaggaacaggactaggtcattcccagctctaggaatccagagctgcctgggagaaagggaattgcgagtgcctgggacaaccagagctattctttagaattacttcattctgctggggtagtggagactctaagtcaagagtcttattatacttttccccctgtagtctgtttaagacaagcaatattagttttccattttcaatagagatacaaagtttctttattaaatatatttaagtaaaa

SEQ ID NO: 95205 - DNA, 1045 bp, Homo sapiens
atgagttaaccccaaactggattaggaaaaagatgttctccatagaacaggagtgcagcagctttgatccagtgttgttcaggagagagagagactgactgccaggagtctcctagtcaggagaccttgggcttttctgtgacccacagaaatgtcctccctttgctcatacttctgaaagcttgctgataacctggtttggttccctgatttggcactcctccatctaggggaagggttcaatggcccatccagttttggaaggcctctccctccagttattaggtcttggccactggaacagaaaatgctgctttgtggaatccccggtcgtgccttaatctgctggatgtttggttagtgtgagttagtcctgggtgcctgcatcattcctggcactggctaaatcgaatttctgactgactggtgaagaaactgatcttggaccattgtgcctgcacaaagttaatgtgcaactccctccaggccccctgagaaccttggagtttttaatgggcagtctgagtggatgtagggtatctgaataacctgatactcagtgcagattactgggtttgtggatctgagtaaatttttcttttttcctttggagaaagcctggaacatgctgcctttaaattctgaaagggactcatgactcagaggttaagaaccactgttgtgtgataacctgtgtctgagctccaacttgtgtaactactgctgcacagtctgaatagggattctgcttggagttcattctcctagagggaggtgagactgtgcctgaatacataaagtgagaagaggcatgaatctgaagtacaaattcaagttactaggagtgctgaggggatccaggaacacttcatggggtggaggacagcatttgcaatgaagcctgaacaaagttaatttgaagtctagtcacagggaggaatgacaataacccctacctttcgtttttggtttcagaagccctctccttccaaagactaagtgatttactgatttttgcaggacaggttgcttggaagcgagctgt

SEQ ID NO: 95206 - DNA, 1008 bp, Homo sapiens
ctccaacacttttcgagtcaagttttgtgggatagttttgtagtagaaaagaaaatgcattttggggaaggcctctggagcaggatgaaaaggagggagtgggaaaagtaatcctgtggggaatgccagcttctgctctgtaatgttgaggttgaaagttcctaatatccttgttcagatgtttgcctctgccctttctttagcactctatgatgttggagacattgttcattctgtaagagcgaaatggggaataaaggcaaactgcccttgttcaaacaggcaattcaaactcttttcaaagccagcctcaaaggaagacctaaaacaggtatttactgcttatgttaaattcaacatctcttgtaattgtcatttgtctgtttttcaaataacccaaggatttctatcagtgcatttgaaaggaacctggggatagctatcaagtggaaagagagagagaaagaattcatacagttcatgtgacagttcagagacccgttctgacttttcacattactttcgtagactctactgtggcctcttgtagtaggttttacatttttgtttcttgaagaagcacaaagttctaaagtagtctacctaataagtagctgtcgaatttgtaaagggtttaaaaaaattttttgtgtattttgcagaattaaaattattaagataagctttaacatttttaaaattactaaatatattttgcctgtgtttatgcagagttgaaggaaatgatgaaatgaacctttagttgcccatcacacaatgtaaaaaatgttaattttctcagtcctcatatgtctctccttggtggcatccctctcctccccaccatcacatgtacgtcttgctgtcccttctccccctcgttccagtaatcagtatgccgcattgtgtttaataatcagaaatttacatttctataaagctgtggtgtcataaggcaggatgggagagcagaagacttgtaatatttggagtcagaactgaatttga

SEQ ID NO: 95207 - DNA, 1342 bp, Homo sapiens
tgacacccgtaagcaacaacaattctggtttcctccggaatctcttgaattcttctacaggaaaggtatgtgtttgtttgttggtattccatgttttaaagttgaagacagaacaggaagagagtagagaagttggaactgaaagtagaaaggagactgaatcacatacttacctttgtgggttcagaaggctgagtcactggaggatgggttttatgggactatagttctgagctgggccactttctcctgttacctcacttctatgagttgtcaagtggggacaggggacgtacctttttgcctgggggtcctggcttggaatcttctggatatgtaatctatactcattatgggaatggagtttcttgatggtaagggaatgacatatttgagacttttgttctttctccaattcagacagaaaatggactcaagaatacaccaaaaatccttgatgacatctttgcctctttggtgcaaaataagacgacttctgatttatctaagaggcctcaaggactaaccatcaagcccagcattctgggctttgacactcctcactattggctttgtgataatcgcttgctgtgcttgcaagaccccaacaataagagcaactggaatgtgtttagggagtgctggaaacaagggcaggtaatgtaggcctcccatcctcctgccctattcagaacccccttctcagttcctttagcagacttctgacaaccccaccccaggctttccccctccttcacctcctgttttattctttattgtttcaggtgaatataatcaggtcaggatgtggccatgggtcttactttttaaagcagatggtcctaagctggacttttccagtcaggtttttgttgcttcctaccagtccctgttgggtttttgacgagggcatccaggcttggtgattcctatggtaaacttcagcagaggaagtgagggtgtgactacaggctgatgggatttgggagatcagacaaaatgtgctacaaaatcatgcacccctcttacctgaatgaaaagcctgtgctgaaggcagttctaggtgggctagggccgcgtggtgtcacatagtccccaggtgcctgcttcaaagggcagtgttgttggatcttaagtgccggttaatatctttaggagaatttctaggcctgcttctgtgctttcttgttttggttctgttttctggatctctggcttctctgtttggccagatagggtctttgctaaaggaacactctgctcttggacaagaatttgggagaattgccaaacagaaagatgtgagtgtttaaccaaaaataaatttccaaaatgtttttct

SEQ ID NO: 95208 - DNA, 2285 bp, Homo sapiens
aacaggctcaagtacggtggggtcagtcaccctgtttcactggtgactggtgtcactggacactccttccagcgcttgtcttcttcacagtccgtcttgctgtaagtaatgagatcttactaggagaggtgatcctttctcctagatgcttacccatgtagtttgagagcaagggtgtgtagcagatgaatggtgaaggttggaggtgctttgggagctcagagaactaagccgaaactgtcacatcaccatctgagacggagcaccagctccatggaaatataccaatagcagtgtgaagagggactgccttcgggagtggggacagagctggcagagttcagactaaagttttccttctcttcatttagccagtgatggtgtctggagtgcatcataaattgaactctgaactttggaaacctgaatccttcaggaaagagtttggtgagcaggaagtagacctagttaattgtaggaccaatgaaatcatcacaggagccacagtaggagacttctgggatggatttgaagatgttccaagtatgtatgaaagatcttttaagggggttggggatgtgaaaggaggggacacaggaatggcaggagtctgagacccatcagtggcagccgcagcattttccaggattttggagtttaaaattaacgtctctcctccccttccttgttacaatgtttatgcttttaaacactgaggcattattacctgttctgttggtctttgttgtccctggacagaacatcagatagggtcagtctctctctctgagcagaataagtaatttctgttgcatgctggcctcagaaaaatgggtttactaaacacctgtgacccttgatggttgacgtgcattgctgttggttagttgggatgctgctcacttcttctggaacactgtagaggaggagcagattggatcgatgacagctgttgaaataccacctacatgcagtgggcaaaagggagcggctgaatctcccaagaatgagtagcagcttaataagcttctaggaaagacaaggccctgacacagatccattagttggtgatctttattttgctgcaccttgctgcctcctgggtacaaatggatttttttacactgcagaaataaaatggtggatagttggtaggaggggaaaattaaggaaaagtaatatttgtatactaaatttatcaggttatgaaaattttgcagagacatattttatttgtattgttgaggcataaaatgctaatttgtcatttattttggtctgtttctgaattataaatagtaatagttcattctgtttacctttcagatcgtttgaaaaatgaaaaagaaccaatggtgttgaaacttaaggactggccaccaggagaagattttagagatatgatgccttccaggtatgattatgaaggtggggagagatgattctgtccttcacttggtaggataaattcttttttgaggtagtgagaaaacagttttcaagaaaataacaaaagttctgtaattatactgccactgatttttcatttctagtctgtagtcattggaggcatgtttatttttagatgagatgaagaagtgattggcttttaggcctggctgactaatggaacaccacagattttccatggtaggccctgctagagaagaggctcactttttcttacaaggctgatttggaggcagttgtggaatctgacctgtcagggtcaggacaatgtagtcacagcactgagttagacaagaagacatctactgggtagatctattttcctgactgagcttgaaactttgaaaagggtgtcacaactaatcaatgatatatctctaagaataactttttgtctagaatttattgctgagatcttttgtctgaacggttacagctgattttgacacattggtgtgttgtaggagagagagaagacatctttgtaactgctgtacttctcatcttaaatatttgatggctgtcagtctgcatgatcacagatggatttgttccttttggtgtagaaggaacaaaacaggttacacaataatgaattagaaaagcaatctaactttgcaaattcctggttctgttgttctaggtttgatgatctgatggccaacattccactgcccgagtacacaaggcgagatggcaaactgaatttggcctctaggctgccaaactactttgttcggccagatctgggccccaagatgtataatgcttatggtaaggaggagatggctaactttaaaatggaaataaaacaa

SEQ ID NO: 95209 - DNA, 1021 bp, Homo sapiens
tttaattgtagcagatgttaagacagctagaatgccagcagattgacctaaatgtccgaacactgaaatcactaataaaagtacattctctcaatgatgtatcacacaccattaaaagtcatctaaagactattaagtaacatgtaaagattttacaatgtaaaattaggtacagtaaagggaaaaacacaaaattgcatatgccctacaactgcaactatgaaaagaaacacacaaacatgtggccagggaacgaaaggaaatatgtaaaaatgaaagctgtggctgtattacgcattaggattatgggtgttttccacctctccctcccacaaaatcaattttccaaacattttgaattgttttatttccattttaaagttagccatctcctccttaccataagcattatacatcttggggcccagatctggccgaacaaagtagtttggcagcctagaggccaaattcagtttgccatctcgccttgtgtactcgggcagtggaatgttggccatcagatcatcaaacctagaacaacagaaccaggaatttgcaaagttagattgcttttctaattcattattgtgtaacctgttttgttccttctacaccaaaaggaacaaatccatctgtgatcatgcagactgacagccatcaaatatttaagatgagaagtacagcagttacaaagatgtcttctctctctcctacaacacaccaatgtgtcaaaatcagctgtaaccgttcagacaaaagatctcagcaataaattctagacaaaaagttattcttagagatatatcattgattagttgtgacacccttttcaaagtttcaagctcagtcaggaaaatagatctacccagtagatgtcttcttgtctaactcagtgctgtgactacattgtcctgaccctgacaggtcagattccacaactgcctccaaatcagccttgtaagaaaaagtgagcctcttctctagcagggcctaccatggaaaatctgtggtgttccattag

SEQ ID NO: 95210 - DNA, 1021 bp, Homo sapiens; identical to SEQ ID NO: 95209

SEQ ID NO: 95211 - DNA, 1021 bp, Homo sapiens; identical to SEQ ID NO: 95209

SEQ ID NO: 95212 - DNA, 1048 bp, Homo sapiens
cttttcttgccagctccatcctcttcctattgcccttagtctaaccaccatcttcaagtttgtgtttatcgtttgcttatatttacaattttaacatatatatttgtattcctgcacaatattctttcagtttttagcctgcttttgaacttcatataaatagaatcagattttttatattcatccatgctgtcatatatcatccatgtgttcatttcattcattttatttctattacattaattgcttttttctgaaattttgctttttactatggaactatttttcaaatacagtgaaaacttgagagtctggtagtgactccatataactcatcacccagttatataacagcttttaactttttgccataatcgtttcattgtcttctctctttatgttttttcatcatcctctcaactatcctatgatttcaccctaataccaaacgctttacctactcccaggactgatatttcagcaagctggaaagaaaggaaagtacaacagggctctgggggccctggtcccaagctggagtgaagaaatgtgccctctcaaaagtatagcccctctaaaaccaaagccccaggcaagccagagataaagccttcctccaaaacagtattatggggcgttttcagaggctggcaggttagaaaacagccgctgcttgctcactacaagctgtgcttctccctactgcccagtctaagaagcagagtcctggtgttacaatgggttgcccaaagtgactgcagggtaagcttcaggatgattgttgagcaaggtgagctttctcctgtgagcaaggaattagccacagactgaacactgtgggggacctgtctttctggctcactcctcacccctcctcttttacagttgagagaaccaaggaatgcgttgggcagtattccttcttatactcatgatagccatttgacgttccaggtttatgtgtgtgtgtgggtgggtgctttcccttggactccccatctcgagtggtccttgggctttgtctcttgccccagaactcctaggctgt

SEQ ID NO: 95213 - DNA, 1519 bp, Homo sapiens
gggaaaaatgataaaagctgtaccttggaacttgcctctccctgtactcactgtgagtaggtctacgtggtatcaaaacctctaaaagggggaaaatgagttcttgaaatcatgggtttaaaatgtatgtgaaatactggtctgaaggagcccagggaccttttgcaatgttgacatttcatacgaatattgaattttaaattctgagagaaggtaataaaattagtaggaggaagcttattcttagtgacaggttttagatttaaatgtaaaatgcccatattttctcctactatttttaggtgaagaatgttatctaccatgcagtgaaagatgcagttgctatgctgaaagccagtgaatccagttttggcaaaccttaatctccctgcacattggaaatgaattacaggcagctgttcaaactcttcaggcaggattcctgtggactttgagattcatgttacctcatcttcttttttaaactgtacccaacttgtgagggtactctgtctaatgtatatttctagtgtttacagacagtaaatgtgtatatgtagtaactatttacagaacatgcatccttaaactgtgacttctcacctagtgcagaacttttaccaggctgtaaaagcaaaacctcgtatcagctctggaacaatacctgcagttattcttcagctgtttggacaacttagattgggtttataactattaggaatcactgcacagtttatttgggttgtgttttgtgtctgagtcccctccctcatcccttagggtccagaagagcaatggaggaagtgacagctaatgttgcagttcttattgtatggcataggactggcattatatagcagaaatcaactactgtacaatttcttggggttaaccatctttagttaaatggaattttaatttaaatgacgctttgctaattttaagtgttaagcattttgcattaaaatattcatataatattttggctcagtttattggcattatcctctcattgtggtttcaacacaactttcttcaaatgcaggtgtaatggattgctccaagaactcttcttaaaagcaaagaaatcagatgctatagtgattttcttagtgattattacaaagctaacatggaaatttctgctcagccaggtagaaaccctgtcacactttgtcaaggaaacaccaccaattaattaaatttagaaacaggaattaaccaagaaaccaaatagtgccaggctaaatggttctaaaaaggtaagtaatgaaacactttgttttatggcccttcataatgttaagtttatgaaggaaaatgaaattataagttctaggacagtactacctaaaatattcatctctgtgaaggaaaaaaattcacaaagaagcgcctttctttagcccactgattctcctaggccactctttcatttaatttctttaaaaaaaggaattaaacatagaaatcagatagtacatagacaaagcctagaacctgagttttaatttgtgag

SEQ ID NO: 95214 - DNA, 1073 bp, Homo sapiens
aatttagattaggagcttcagaaccgagattcttaaaatccttacaattattatgactttggtatcattacaggtagctatttgcacatttcccagagtgagtaaacccccccaaaaacagcttgctgtactgtctcatttttgtatctggtcagattggtccaggaatgaaaggcagggaagattgaggggctgcttccttaagccaatgtggtgttcatctttgctctttcttttcaggggccttgggcaaagcacccagtaaagtgactgatgcccttccagagccagaacctccaggagcgatggctgcctcagaggatgaggaggaggaggaagaggctctggaggccatgcagtcccggctggccacactccgcagctaggggctgcctaccccgctgggtgtgcacacactcctctcaagagctgccattttatgtgtctcttgcactacacctctgttgtgaggactaccattttggagaaggttctgtttgtctcttttcattctctgcccaggttttgggatcgcaaagggattgttcttataaaagtggcataaataaatgcatcatttttaggagtatagacagatatatcttattgtggggaggggaaagaaatccatctgctcatgaagcacttctgaaaatataggtgattgcctgaatgtcgaagactctacttttgtctataaaacactatataaatgaattttaataaatttttgctttagcacttggccccattgtagattgccctgtgcagtaaactttcaaggtgtcggctgccccagattgcttcatttgctgggtgtggaaagagttgctatggccaggcatatgggatttggaagctcagcagaagtgacttctgctctgtggttgctgctccccggctttcacagacatggtatggcagccattcttttatctatttaaccaagaggatgctggggaattgtgctgcttgtcctgttggctggtggctgcattatgtcctggggtgtgcatgtgggtctatttagagcttctgtcccttccttcccattgcaagttgcacccagatga

SEQ ID NO: 95215 - DNA, 1003 bp, Homo sapiens
atattccaacccctgcgttcacggattatatttgcagtgttaggacagatgcttcccaaaacagcgctggaaatacactcatctgtcagtgagctgtttctcaggtgctgccattatattaagtctgggttactttaggaagctctgctgacagccagtagtagcactccccacccctagggtgttaaatttagagagccgtttccctttggggcttttgcatttctgcagagaggacaacatccagtgtttcctttggccagctgtctcgtgtgtcagctcttgaaaggatagactggacttaggctagagctcggtctaggtgatgtgtagggtgtctgatgggaacagatttaacagttgaccgaagtgacatatttattctgtttaggctgggatcatagaggagatgttagaggacacttttgaaagcatggacgatcaggaagaaatggaggaagaagcagaaatggaaattgacagaattctctttgaaattacagcaggtatgaccgtgagatccatcctttctcctctctttttatggccattcttccttcattcactaaattagctagtagctttttctttaggcattaactcccttctacatttttaacgttttacactgtgcagcttatttcttgaaaagtaagcacaatatctataaccatcttttaaaaaacacaattcttaaaatttttagagtttgcatgattttaaaggaagatactgctctcatatactgctgttgggattttaaactggtgtagactttcttgaaagcaatttggccatagccattcaaaagcccttgccttcgccaagtgcgatggctcacgcctgttatcccagcactttgggaggctcaggtgggggatcgcttgagcccaggagtttgagaccagcctgggcaaccatagcaagaccgcatctcaaaaaaatatatattaaaaaaaaaaatttgacctaatagattgacttctgggagtttaatgaaata

SEQ ID NO: 95216 - DNA, 1489 bp, Homo sapiens
cagaaactgagcttttgggtcatcaggtagtttccctaaggtcaccttggttgtaagtgaagatatagagttggggcactgcagtctgaccttatcacgtgagttgtcacagaggaaatgaggatgggaggtccctcacacagatgctgtttcatgcttcagacctgtggctgacaaccaagagtgtacacctcaaattcttgtatagaggctgtgcatagaaatcacctcccttcctctcagggaatttcatttatgaacttgaattatgtacagggtttagggcatgggagagaggggctggaaaagaaaattgcagaaaaatgacatagaaagcccagggcccaggttgtttgaatgagaactccttgggcagtagcagtaaggaaggaactgggtcaggagggtatgtcctttacaaatagcatgtaggtgtcttgcccccaagttggtgatcactgttcatctagaaccagataagaagatcattcttggagtgccttcaggcttgctcattttaactcagccaccaggatctgagagggaagcctttttcagaatctgggatctttttcataatggtttctgaatactgggagtaatacagatttggaggaaggcttgcgtgtagtacattctgaaggccccagtaggggctcagctcctcaagggcaagaacacatcttagtcattctgtttatcccaggcctattgtgtggcacagagcaggactttgatgaatcgttgctgattgaatgaataaataaatgacaacttctacctccagagtgtgaagggctattacaattaggattctggtggactctttttaaccaattagcaagcatttattgcacttcttttatggtagcccccagtactaagatgatcccattcaggaaggccctagggtttcacctgggtgaacatgaatatgaatttatttgttcattttggttgggaagaacggatctgaggatgggcagaatagggtgctagttagattcaggcaggcaggatagagggttgctttaaatctgaacccttcagcatagtcactgagaattgtaccctggctgagtacaagggagccagggccggagctgctacatgtgaccttctgctccttgaatcaccaaaacatcaaggtacaaagcaagggacttagttttttcaggtggcaagacaaccaggattttctttttctagcaacttctcagaaacctgaacccatgccctccaccacagccactcagcacccccagtacctgttctgcccagggatgtcagcagccctcttgttgactttggaggttgctgttccgaccctttgcttcagtaacaaagaacattcagtagggccctatctgggagttgaggaactgctgagcacaaagactgcagggctaggttgggttgggccagtgttaaagccatttgcttgtgtcctgcagtggtgccatgctgccttgagaacagaggaggctga

SEQ ID NO: 95217 - DNA, 1489 bp, Homo sapiens; identical to SEQ ID NO: 95216

SEQ ID NO: 95218 - DNA, 1489 bp, Homo sapiens; identical to SEQ ID NO: 95216

SEQ ID NO: 95219 - DNA, 1489 bp, Homo sapiens; identical to SEQ ID NO: 95216

SEQ ID NO: 95220 - DNA, 1489 bp, Homo sapiens; identical to SEQ ID NO: 95216

SEQ ID NO: 95221 - DNA, 1054 bp, Homo sapiens
cccatttcagtgttaagagaaatgaagtgttctctgcaactagcaaactcccttactcctttagaaaaatcacagtgctatgaatgtcagacaggcatttctctggtcactcttgttttcccttagatgtgaaagcttcctagggtctggattccaccagaagtaaacctgtagtgactcctggtttagccaggaggaaggaagtctgtgtgccggttttagggaacagcttgtatatgacagctctcagaacttcaagtctcatgaaattccaaaacaggtttagatggttgccaactctttgacatgttaaagacattgagggtggggcaatgatcttttgatactaccgtgatttcttataaagaagattgtagtaggcatacaatctcagactacagaaggtttttctctagtaaggaaccacctcacattgacacacatacacatattcactgtatctgtcctagtttctctcatttttctgaggaccaatgataagctggctccatactgaacagatactgtccataggctggtgtgtggggagctctgctcgggtcctgaagccttctctttcctagtgtggcctttacaaggtctggagctctttctcccatttgtgattttcctgggtgtcacagttactccaagctggcttcctttcctaaaagtcaagagtggcttcaggccactctccagattggtcatgtggtgtgcatgctcattgaattcacatcagtagtaacccagatagcatacaatttaggaaagtcaatctcttggtcaactagcacagtaattaatttaaaggcacacaaataacttcgggagtccatctgctactgctgtcatttattggaatggctcataatttggctgtctctctctattccatcctgttgaacaatcctgactgtacacattctctttcagcggtcttgcgagtggctggttccctgcagaagagcacagaagtgatgaaggccatgcaaagtcttgtgaagattccagagattcaggccaccatgagggagttgtccaaagaaatgat

SEQ ID NO: 95222 - DNA, 1054 bp, Homo sapiens
tgggcactggggttaaaatcgtgaatattacaggcgcaatcactgccctctaggtatggggtaaattgcagatgattgaagaaatataataaaaaataaaaataataaatttaataatcaaatggatatttataattgcttactgtgatatgcactaggagaacgtgaaagagaaatgtagagtcaggaatggctcctttcaggcactgatgaatcctgaaagaagatgaactattaagtttgtgggggtgtgggaagtggtgtgccaacttggatggctagcatgtgtgaaggccctggggccaaaaagaactgtgcattcccaacacggaaggaaggtctgggaggttgggtaccgagcaagtgggagggatagctggagaggatgggcaaggaggtgaagatgacaatttttacagctgttaggagagcaatgcttctccaagacaagttcaaaataagacgtgctgtagcaatgcagataaagtgcaatgggagttaagaggaaaagtattttggggagaatcagggcagcgtctgagtgtagagggattaggtatacaaaggcacagttgaaatatttcaggctatgttcaggaaacagtttgacaggaatgcatgaaggggagcagtgggaggtgagactggaaaggtaagttggagtcagagttctgagatatcaggctgaggaatttaaattattctgtagacatttgaaagctttagcacattataagcacagagcacaggtgcagggagggacagtgcagtgtgattggaggcagtgggacctaagaggtaatggagtggagtaggggaatggaataggttagtctagtgagaatggagtagaagacagaagaacaggtgcagagtgaaggtataaacaaggctgagatgctctgagcctttgagcctggaaagagactgcagggccattaacagacactggaaacacagggagaggaacaggtctaagagaggaatcttcacttgggctgaccagactagccccaggaaatcagtggctatttggttcacctggcttctgcag

SEQ ID NO: 95223 - DNA, 1054 bp, Homo sapiens; identical to SEQ ID NO: 95222

SEQ ID NO: 95224 - DNA, 1054 bp, Homo sapiens; identical to SEQ ID NO: 95222

SEQ ID NO: 95225 - DNA, 1054 bp, Homo sapiens; identical to SEQ ID NO: 95222

SEQ ID NO: 95226 - DNA, 1054 bp, Homo sapiens; identical to SEQ ID NO: 95222

SEQ ID NO: 95227 - DNA, 1250 bp, Homo sapiens
ggtgccatctcggctcactgcaacctcagtagtcttaatggagaaaagcgggaaaggagtcaccagacagatagatgagaacagtatatatatgcatagttatcaagtattttacctgtagcgtaacccacattataagtggtgttttagttcagcaaagtatcacatgaaatttacgttgttaatgtgaattttattgattttgaagttttttgtatttaattttgtttttgaaatagttttataattgtacaattataggcattgggaatttttacccaattagtaaaatacacataattaaagccaacaacagaaagttattggtaacaggggaactgctaacattttatttttcttcagtggaggactgaatcagtaaattatgatttatttaggtttcagcatagtattcagctacagaaagatgttaatgatgcatcatttaataagaaagcaagttgcagaacagtatatatagcatgatagcactctgtaaataagtagaggatgtgtttgtgtagttgtgtaaataaatgataaatggataaacagaggtctgaaaaaggttcacttctgaggagagaagttggattgtttgaatcatcctgtattgttttctctttaacttcttattatggaaatattaagcatatacaaaagcagagtgaatacccaaatgaatctctatgtacctatcacccagcttaaacaattgtcaactcttggctgattttactgaatttatattcatcccacctagtccctatattttcctctgggaatccatatacatttatccctcggtgtccacaggggattggttccaggatccccacagataccaaaatttgtggatgttcaagtcccttatataaaatgaggtagtatttgcatataacctacacatatcttcctgtatactttaacctctagattaattatataatacctaatacaatgcaaatgctatgtaaataatagttatactatattgtttagggaataatgacaaaaagcttatacgtgtttggtacagacacagcctttcattttcgttgttgttgaatatttttgatattgaatattttgttgtctttggttggttgaatttacaaacactgaacccacagatatggaggaccaactgtaatttcatctataagtatttacatatggatttctaaaagaaaagtgttgtatccttctattccttggtgcatcctttcagtcctggggacttgtatcct

SEQ ID NO: 95228 - DNA, 1250 bp, Homo sapiens; identical to SEQ ID NO: 95227

SEQ ID NO: 95229 - DNA, 1250 bp, Homo sapiens; identical to SEQ ID NO: 95227

SEQ ID NO: 95230 - DNA, 1250 bp, Homo sapiens; identical to SEQ ID NO: 95227

SEQ ID NO: 95231 - DNA, 1250 bp, Homo sapiens; identical to SEQ ID NO: 95227

SEQ ID NO: 95232 - DNA, 1049 bp, Homo sapiens
cgagtatcagagagaatggaaatactcagagaaagaacttcaaatgtctccataggatccattggagtctttggctgaatactaagctgtgcatgcttagagtgaaatttcaagagactgggcaaagaacaattactaggaacagaacaactaccaggaagctgtaagctgaataattcttagagctaataaaggattgagaagtggttgagctctgatcagacacagaaaagagactttgttgaacctctgggatgttcaatagagacctcagaagagtcacaccttaataataaggatcaggtaggtagtcctagaaaaaaggctaccacaagcccataccaaccaaccaacaagacttaaaagacttcacggctgatttgcaggtaatttgactgcctgccaaagtaaagattaacactgtttaagggaagactacaaaatgcaggcacccaacaatgaaacatatacagtggccagcatccaataagatactattatgaagaagcaggaaaatgtgaccccaaaacaggagaaaagccaggtaatagaaatagatttaaaaaaaaaaaacacccaaaacccccacaaaaaaagatgattgaatttgcagtcaaggatttttaagcagctattataaatatgttgagattaaaggataacttaaacataatgaggagataaatacaaaatacagaaaacaacaaaatggaatttctagagttgaaagatctgaaatgaagtgaaattaaatgaagaatcactgaatgggtttaacagcaaattagacactacagaaaacaagatcagtgaaattgaagatatacaaaatccaaaatgttcaaatgaacatttcctttgagtatcctgtcagcaacccaaatatttcagattttggatttcggattttctgattagggatacacaactggtatgatgcatggtatgatgcaaacattccaaaatctaaagcctgaaagacatttggtcccaagcatgttggataagagatattcaacctgtaatacaaattatccaaactgtagtac

SEQ ID NO: 95233 - DNA, 1049 bp, Homo sapiens; identical to SEQ ID NO: 95232

SEQ ID NO: 95234 - DNA, 1049 bp, Homo sapiens; identical to SEQ ID NO: 95232

SEQ ID NO: 95235 - DNA, 1049 bp, Homo sapiens; identical to SEQ ID NO: 95232

SEQ ID NO: 95236 - DNA, 1049 bp, Homo sapiens; identical to SEQ ID NO: 95232

SEQ ID NO: 95237 - DNA, 1056 bp, Homo sapiens
tcctctaacctgaaatcataaatgtattctcctatactgtcttcttaaaacaccacagttttgcattccatatgtcttcagtccacctagaatgaatttcagtgaaggatggaacaggaattcaatcattttgttttctatttgtcttaagctgtctctcagcattgttcatggaaaataacctcttaatggtgttagtttcctttgcctagtttcgcatataatagacctctgtgaatgaatttgaataaaggataatattttggtagtgtgaaactctttctataggttccttgtggttttcaaatatattgtctaatttactagttgattttttattctgtacacgttatgttctgttttacttaattataagggcctcatttactactgaaatcctattggcactaaataaatatttgtcaaattttctttacatctgttttaaatttccttttattgtagtagtctttacagttatgagacttgcttgatacattttcttgagctctttgtcttagactgtgtttcttaactctaacataacattatagtcacctgaagagattttaaatgctacctgtcatttgggctctacctctggcccagttaaattagtatttttaaagtttcccagttgacttttgtgtagttcaggttgagaagcactggtcggagacatgactggatacttttggttcttcagatttctcttaggtaagtttttcttttttgcaaagccccttttgattttacaagtttagaaggaatttctctttttgacagattttatgaaacttttactctttgacatttaaaaacatacatagaaagtttctgaagattgttacataagtgttatttatggctgaaattttttgtcccatcacatcttgtattccgtgcaatcaaattcaacagatatttattatcctttgtgccaggcattatgcaagggcttggtgaataagagaaggtctttgactttctggagcttatagtctatatttgtaagtaatcataagtataatgagctctccaaaagaggtgggggta

SEQ ID NO: 95238 - DNA, 1056 bp, Homo sapiens; identical to SEQ ID NO: 95237

SEQ ID NO: 95239 - DNA, 1056 bp, Homo sapiens; identical to SEQ ID NO: 95237

SEQ ID NO: 95240 - DNA, 1056 bp, Homo sapiens; identical to SEQ ID NO: 95237

SEQ ID NO: 95241 - DNA, 1056 bp, Homo sapiens; identical to SEQ ID NO: 95237

SEQ ID NO: 95242 - DNA, 1096 bp, Homo sapiens
tgtgagctcttttcattggggaagttgctttgagaatgctgtctatttattgacaaaacagagtcttgggccacgtttccacatgcgtaacttggttttgtgaggtcctttcacaaagatgaagtagtagggtttcaggcacagcaaaaggaaaattagaacttcttgatattttcagggtagcttttatttttatggtttaagtgctcttcatttattttcacttaatttctgagccaagtggctaaaacagtaggtttctggaacagaattcctcaagctgactcctagctttgttgccagaggcttaggtaagagatacctctcaaaatgtcaaacatggcaatgtcttggaattttaaaaccatcttgttaaaattacttattagttttgaatgtggtggacttggtgaccaatcttgacgtatattgctttgctttaaaagcacctaggtttgtttagtgaggaaaaaaaagaatgtgattcttacagtttttctgtttaaaataatagaatctgagtgtcagaagcaaatgtgaaggtcatttagtacaattttctctatgaatttagatcttttatgtcccggttacaaattggcacacttatcatctgacaaaaggcatgctacatttgcaaaaatctataaacattccacctgccaggatccacagaaaagcgagcagtgagctggcaacgcagcaagagcaagtgctgaaagcccagatctggacactttgttggacacttcccagtcatcatctttgggaggcaggatgagtcaggagtttatcttttttaaaaagctagttctaatagaacctacttgctctgaaatatatttccattattcatcaaaatggctcatagttaaccaggatttttatttagagagaaacctgtgaatgtaaggtagtaaagatcatcctcatgagttcagcactgaactcattttactaccctgaacatctccaaaaaagggaacaggaggcaagagagcagctttcttctgcttcagccaagcatactctctgctgttactgaacaagggcagatttacacagactttgctatatttctgtggctatgggaagg

SEQ ID NO: 95243 - DNA, 2342 bp, Homo sapiens
agaatacaaaaatatatggggcttgctgttgctcttttcttggttggcttttgtgcagattactttgtagcagtcaggcattgtggtagttgttaattaaatgggtaagcatgactcctaccctcaaggagcttgcaccaaaccagtgactcagccttaggataatctgttttcttctcttttctccacccatctggattctaaccatccttcaagacctagttcaattcctaaaccattcatgaaatctgcaccagcccaaactttgaacttcttttgcattatttagcaacagaatatatacagttttatctctattttgtctcattaataggattttaaattccttctgaacatgaattattttcttgtcttctggatcttagcacataacgcagttgtaggtacatgagagatgctgaagtatttgctgattcctttgactcagaggcttttcaagatacactttatttaataaaaaaaaaagaaacacagaaatacaaaacaaactagaaaaacagagcttgtttttcacagctgccaagtagtggtaccactttttgattatttggaaattatttggctttggggtgaggtgctaaagaaatttgtcagggaagataaattgtttgcattacagcctagctgtttatttacagtttcctctcttgtagatattgcaggagaagaggctgggtccgatccacactcattatgtctgttccacaaacaagtacttcaaaagggaaagtcatgcttaaagaatacagtggacgcaagattgaagtagagcacatttttaaatggataactgctcatgcagcttctcggatcaaaaccatttataatgctgaacacttgaaagaagaatggaataaaagtgatcagtattggttaaaaatatacctatttgcaaaccttgaccagcccccagctttcttctctgcactaagtataaagtttactggaagagttgagtttatttttgttaatgtagaaaattgggacaacaagagttatatgacagatattggcatatataatatgccatcatacatacttagaactcctgaaggaatttacaggtatggaaaccacacaggcgaatttatatcccttcaggccatggattcatttttgcgctcattacaacccgaggtaaatgatctgtttgttttgagcttggttctagttaatcttatggcttggatggacttatttattacacaaggagctaccataaagcgatttgtggttctcataagcactttagggacatataattctctattaattatttcctggctacctgtgttgggctttttacagctaccttacttagatagcttttatgaatatagcttaaaattgttgagatattccaatacaaccacactggcttcatgggtaagggcagactggatgttttactcttcacacccagccctgtttctcagtacataccttggtcatggtttactaattgattactttgagaagaagagaaggcgcaacaacaacaatgatgaagtcaatgccaataacttagaatggttatcaagtctgtgggactggtacaccagctacctcttccacccgattgcttcttttcagaactttcctgtagaatctgattgggacgaagaccctgacttattcttggagcgcttagctttccctgacctttggcttcaccctctgataccaactgattatattaaaaacttaccaatgtggcgatttaaatgtcttggagtccagtctgaagaggaaatgtcggaggggtctcaagatactgaaaatgactcggaaagtgagaacacagacactttgagtagtgagaaggaagtatttgaagataagcaaagcgtacttcacaattctccaggaacagcaagtcactgtgatgctgaggcttgttcatgtgccaataaatattgtcagaccagcccatgtgaaaggaaggggaggtcatatggatcatataacactaatgaagatatggaacctgattggttaacttggcctgctgatatgctgcactgtactgaatgtgttgtttgcctagagaattttgaaaatggatgtttgctaatggggttgccttgtggtcatgtgtttcatcagaattgcattgtgatgtggttggctgggggccgacattgttgccctgtttgccggtggccttcttataaaaaaaagcagccatatgcacaacaccagcccttgtcaaatgatgtcccatcttaaccatgtgcaatttgtcctttataagctttgagtatcttacagcttgcctttttaatgttagtcacaatgtttttgtggtttgaagtttagtt

SEQ ID NO: 95244 - DNA, 1048 bp, Homo sapiens
caaatcctatatagtctatgttttttcctatacatacatacctgtgataaagtttaatgtgtaagttaggcacagtaacaacaacaactaataaaaatagaacaattataacagtatactgaaataacatttatgtaaatgtggtgtctctctctccgaatatctaattgtatgtagtattttcggactgcagttgactgcagaaagtgaaactgagggtaaggggagaccactgtattttagaagaagctgactaatttgttctctgtcatttgttttaagtctatgaggagtgttttcataaatgaagatgcacagatggcagccagttcaatcctcttcatatttttaagcttttccaggtccatgttacgtatagtctctgtaatgtgaacagaatttattttagttttcaaggtagcaacatacatatgacatctttaccaatgacacactatgaaatacatgtagaaccaagtgctcttttttctaagttattcctaacattgtttttctcctttgtccctaacccaagctcatatctttcattagctattcatttaacagttttgtggattctttggccccagtcttcatagcattacaaatagaagatggttacttttctttcaaaagacccttggtcagagaggcagatggcacagtggataggcttctgaagtggagaagttagcataatttatgggttttatggatttatcctcctcctaacatttctgtttctccgttttgacttttgtcatagttcaaagaaggacatatttgttccctactggctgtgttacatcatatggaatttaaagtcactggaattgaggtagcagtgagaagcatcatatgatttaaaataaagctttgggtcaatatttactgaagtattacatcaatatatttcctgtttggctgacaagagttaatagctgattttaaacttgtttatctttgctcctagacaaaagttttgttcgaggagattctaaattacgtatttctttcttgatactgctatggaggtgaagcacatagc

SEQ ID NO: 95245 - DNA, 1007 bp, Homo sapiens
atttagtgatttgcactgtttctcttagtttttattatctccagtttttaattcagtggcctgagtaatttttatatataagtaagaaccctaaagtaaaagtaaaggaatcattgtattagggaaatagccaactttgtgactatagaggagctgttgtggaaaatggtgggggtgctcattacgtaactcaggatgatgagattataatttttaacccttgtttttatgatagcaaaactgtgagacttaattagcatattagaattttagagctatgatggaccttaaaaatattttatgctttccaagatgtaatttatggtgagtgggcatgcattatcatttacatattttaatgtaaattagaaaaattatattaacataaatttcataaattttgcttaggacaggactaaagttatttacattttaaaactgtacattcaaagtgacatatcaagtaaattaacagcgtgaatgtggctaaaattattaatgtagtctgtgaatggctgaagcttggaaattatatcagactaaccctttctgagactctgagaggtgaagtagcttgcccaaggtcatggaactagttggtagtattgaaccaggatgaaacccaggtcttctgatttcttgactggtactcttatcatttcacactggagtgggcaaagtttgattcagggcatgaaaattaaaacagtttcttcatatttctttctgagagtaaagactgcaaaatatggtaggaaaagctatgagttcagagacattagttgcaggtctggtactgtcgctgttacaggtctggtactgtcactgactagcagtatgattgtaaataggtatatttttctgttgcacgtggcctcaaataaatacatatacatctaaaaaggataaaatggtactgtagtccactgtgctaaagggttgaggtttgggaattcttccagagatttacattgttcatccatggcctttctttattgtatccttcc

SEQ ID NO: 95246 - DNA, 1007 bp, Homo sapiens; identical to SEQ ID NO: 95245

SEQ ID NO: 95247 - DNA, 1007 bp, Homo sapiens; identical to SEQ ID NO: 95245

SEQ ID NO: 95248 - DNA, 1015 bp, Homo sapiens
aatccaaggttttaaacatgaatgatgggtagatcattatggaaccaggtagaaaataggaagtttaggagaggggaaggtggaaatctgagtttgatttttttttgtttttgtttttgtttttttggggggtgggggagggggggtctcattctgttgcccagactggattgcagtgtctcggcttaccacaatctctgcctcctgggttcaagtgtttcttctgcctcagcctcctgaatagctgggattacaggcatgcgccactaccgcctggctaatttttgtagttttagtagagatggggtttcaccatgttggccaggctggtcttgaactcctgaactcaaatgatccacccacctcggcctcccagagtgctgggattataggcgtgagccactgcacctggcctgagtttgatttttaaatatgaaatccagattccaatgctacaggaaacctaatgtggttccaccattcatttcagagataaatgagatgcctagagattaagtctttatatttggaatttgaagggagtgaataggttctctaaaatgtgactgtcacagacatatgtttaaaatcttgtgcctgtatcttttttcttctctctgcaattcttgcctcatatactttgaagcctttcctgtcttctctatgatagtcattgatactgttctttgctccaggagcactattagtctgtaccatgtaatttcactctaaatattaactttatttcgtttttttcccctcatgtttggtttgcagcacactgtgcctctaatttgatgcacagtctttaataatctctctggatcagaacacgtgtctgtcagtctactgttctctgaaaggtcaggagttgaacaccaaataccatactttcttttactttgcagatttaccagctactaatatactggaaaaattttgttttcagtgtttacctcctccagaaaaaaatgaatgtgttctatttgtgccttttctctttcctctaagcagc

SEQ ID NO: 95249 - DNA, 1015 bp, Homo sapiens
ctcttgaggaaatttagtaacaaccagaacgttttgagaatgacttgaacagtgtaactgggtttaataagtgagtttattcacttagacatattttctcaaaaataatactgccttgacagtattattcacagcctgtgctggttgttgtaatgataaaaatgattcctttcacagtaaaattttcttatttccaaaaataaaaaaattatatctttctgagtatccatttgaaaaatcacatctatgaatgtgaccatcagcttcaaagcagatactggtttttcttcacttttcttccatctttcatggtccaaaaggcccattagaaacttgccatctttgggtttgcttaagtgagtaaccaatccttcctttgtttttttataggccaagatgctgaattatcagggacactttcacttgttttgacacagtgctgtaaaagaataaaggatactgttcaaaaattggcctccgaccacaaagacatccacagcagtgtttctcgggttggaaaagccattgataaggtatggtattgaaagaagtgttttgtattttttagcatcattctttttcttctgtcagtgctttgataatactagctttcacaaattactttatgctattcctgtcatgtttgcttttgatgacttttacaggtctagttttactatgttattcttactaaagttccttgttgctattatttaaaaaataaaagcaaaattaaaaccctctgcttttatagctttgttgtttatccatttgcatatatgactagagctcctagggtcatgataaataaagttccaaagaaattttaacccagtatgtgggagtttgtttaccagaagtaacttttcctaattcctgaataattccctagctgtgactctgtctctgttatgggatgattagaataacagccttgtatcagtctcccctgcatcatcctaactgttttcttcctatgggcgtcccagctacctttcaattttgccttctgtgt

SEQ ID NO: 95250 - DNA, 1028 bp, Homo sapiens
ttcttgtgacattttttgagtaagccatctttgacctggtggttgacttataagcagttaccatttttagtaccagctgattttattcatggagttcatagtcctattggcacctaagagaagtagttcaaggttactgtgtgatacctctgactacttcagacattggggagattgtgactggttggggcatttctcttcacacatcgtaaatgtctgggagggtaggaagaactttcgaggagtgccctttgtagcaaaggcatcttctaaacagtcttatgagttaacttagtctgtactcacaagagtgatagttgtaacagaggtaatagaagctcattgaatctggagagtggttcgtgtaactcatgggtagacccaactgttagaaattatcctgtgaaaaggctaggcttgacgctgcttgagtcagaactatatgcttataaggcaatactgttcactggtaggtgtggtatgacaagactgtgagtggcatgggctcagaggacttgttttggtagttgtggcttacagaagtgttagtggcctttcagaaagttctcactactcccatagtggtgtgaggggtttgacttggccagagagtcggagggtggttttggcagcagcagggttccagccacgttgttatgtcagtgatggcagtcaccagcaaagtctgggaaggcagactctggggagattgtgactggggagattgtggggagattgagactttggggagattgtgaaatggctttgaggttgtgaagcctgtttggtaactccaagagagtgaacacagttttagaagtgggtttggcatcaaccctctctggtactatgatatttgaagtcttcagttggttcctggagtggttgttggtgtgtatgagcttaagaactgtgggagtggtggtgggacactttattttcttccagcagctgtatccttctagaatgtgatggggcactttagagatggtcttcatttgtgggtgaagaaccctcagttcctctag

SEQ ID NO: 95251 - DNA, 1019 bp, Homo sapiens
gagaatcgcttgaacctgggaggcggaggttgcagtgagtcgagattgcaccactgcactccagtctgggcaacagagcgagactccatctcaaaaaaaaaaaaaaaatacatacatacatactatattatttagctgacactgaatagtgtttgtggtactgtagtctgccaccacagaggaaagcctggatcttttagctcagttccctagtatctttcagtacacactctccccgtatttttggcatctacttggcctcagctgaagaggaagctgtttccccaatagaagtacctagacgttgtgaatgggcttctcacatacatcaggaattccgtgtaggctgtttcacataagactgcattgacttgttaagtcctccaggagctcttttaatttgaacctggtagttgtgtaagctctgggcagcctgttgtaaaggctgggtggacctgattggtggtgaccaaacaggataaagctgaatccagtgtggcataaggcttttaagaaccatgccaaacagacctgagtaataaactggaatgtccatcagcctgtgagtaccactttatggacacatgctcccacccttacaggatgaggacaaagaagccagtggctcctgtatgagcaggctggttttgagtgagaaacattagtaaattttagtcatgctcagtggtatttttccttttatattttaatacttatgttttaaagttccctacctatcatgtctctgaaaatataagcagaatagaagtttctggtggtggtagccaagatattgtttggcttttaattattatgaacagagtctcgctctgttgcctaggctggagtgcagtgacaccatcacagctcactacagccttgacctccctgggctcgagtggtcctcccacctcagcatccaagtcccagacaagtagctgggcctacatgcgcttgctaccatgcccagttaatttttttcatttttgcgtagagatgtggtcttgcagtgttgccca

SEQ ID NO: 95252 - DNA, 1573 bp, Homo sapiens
ctgttttcacatctagagatagggtagatagctgtttatagggagaaaaatgtgcttaattttggagaaaagcactcctgcattgtgattgtaaatagtgggttgtttgcagttgctgttgctggttacttactacctgttcttgtacatcatgtaaaataatcccatattggttggactgtatatttaagcagtggttgactaggattgcaattttagttaaatctaaatggccttgtctagttaagtttatatatttttaaaaagaaatgcaaaacatttattagggagcaatgcctatgaaagataaagggtgctgaagtggaattaggctgggaaagctttcacactgtgatgtacgtttgctcttctttcactcttgatgtttcatgttccttctggtgtcattttcttctgtctgaagactttagcaatacttttagagcaagtctgatggcagtaaattcagtttccctccgtctgagaatgtctttatttcatcttcattcctgaaggatattttcactggatatagaattctaggatgacagttattttctttcagtacttgacaaatgtcatgccacttctttctggcctccatagtttctgttgagaaatctgtagtcatttgaatcatggttcccctgtaagtaacatgtcacttttctctggctgcctgcaagattttttgctttatctttagttttaacagtttgaatgtgagatgtttgggtcagatttctttgaatttgtccatgttggagttcactgaccttctagaatctgagatttatgtcttttgctaaacttgggaaatactcttcaactatttttttctgtaccatactgtttctcttctcctagtattccgatgacacacacgttagagcttttgtaattttcccacaggtccctgaggctctgttttttttttttttttaaactggtgttcagattggatgaattctattgattttcactgactttttgcactgccactttgcttctgctgttgaaaaattcatccaatgaattttttattttggttactctatcagctttttccttgctaagtctctccctttgtttcaagattgtttgtatttttataataactgccctaaagttttggatggttccagcatctctgtcatgttggcattggtgtctgttgatcatctttttccatgtgagttgagattttcttggttctttgtatgccaagtaattttgcagtatcttgaacattttgaatatgtattatagtactctgggtcttgtttaagttctgtggagagtgttggtatttttgttttagcaggcaatcaaccttgttggattcaggccacaagttctaaccagtcttttctgggttgtagtttcagtgttagttttgtttctaaagccattacagttatttagatttgtcctgtgtgtgtaacacctggtagccaatatgggacctaggaattaggtctattccctagttcagttttcaaaatctgtagtatgctgtttagagtcaggaccatgcatgtatagctcaaaggcaaacccagaggtgtagata

SEQ ID NO: 95253 - DNA, 1020 bp, Homo sapiens
ttttcccctcccattatagacagtgctgcagtgggcatgcttttacaggtcatcattgcattcctctaaaaatattgctgcatataatgcctagaaatcagttcattcgcttgattttattttattcatggacaccattattaaatctactttaaaaaaacattatctaaaaatatacctatttactcttctagcatgacaagttttagaaaggagcagtggaaaaattccttcctttgggacgctataaattgcagttgggttcttattggggtatctcagactgaaacaaagaccatttttttcctgttaagtggggtgaaaataatctatttatgattccctttctctttcttttccccagaattttgattctgacattagcagtgtgggaatagatggctgctggcaggcagacagccaaaggcttctcaatgaggtgatggtggagcacttctttcgacaaggaatgctggatgtggctgaggagctctgtcaggtaacagtgtgccaactgggaggatatgaaaaagaaacaagggaactccttggagtttatagtatttgcagggtggggttttgagtcttcctctagctatagatagatttttaatatttaaattatcagagatgacctcattttactaggagtattttggggaattttttaagtggcaaaaattatagttctagaacttgttatccagatcatttttttcttgttcctgtcccagaaggttagtcccagttcatgaatcaaagggcgcaaaagcgatattctttcttcatgtccatttttgatatagaaggttagtatagcagacaagaggaaagggacaaaaacattgatgtttgttcttctgttctagcccagcttaaacgattttatcaaatgaatttccagctaaaattttttacttcgcattagcagcatttgtcttttatttctatcacacatgagttagaactctacaacagtttaccaataccatgtagtcataatagtagtagctgccatat

SEQ ID NO: 95254 - DNA, 1059 bp, Homo sapiens
tgggtttcaaatagtttttaagacaccttgcttatgcttttgattcttaaagtcttttttgccttttctttaggtgggcagtgtcaaaccgggaaatgcttatagctcaaaacagctccttggaatttaagctacacagactgtattttattagcttgttaatgggtggaaccacaaatcagcgagaggcattacaatatgctaaaaattttcagccatttgccctaaatcatcaaaaaggtgagtctagagtcagatgttattaatgtttgaaacagggctatagccaccactgtaacttaacagttcttaactagagctaatacctgtttgccagtaaacagttgtagttgataatcacttacaggaaaagttctgactggctctagacaaaaacaaaaatattaaagcctcttagaagtcagagatgttgcagattttggaattccatattaaacttagaggagatgtgagaaagagcaaggtgtgcacttgctcttttccacccccacctggctgtatgctgctgctcttgccacagcaaagtgtcagagagccaaggtggcaactgtcaaccccacgaaactgtgtaggaaacattaactctgcagtcagagataatgtgatgacataattgttacttctctaggtaatggtaattatactatgctgtagagaagaatttaaattataagttcagtattttcactgctttccttttcttcccttttctctccatgctgtttaatttaggatgaaggaagaaaccaagcttaaggaccagaattttaaaagacctgttaatacattattttaggctgtatcagtatgggtgggggtattcttgcttttcgcagcttattactgcaagcaaactaatgctttcttgctggtgctttttttagacattcaggttttgatgggaagccttgtgtacctgagacaagggattgagaactcaccatatgttcacctacttgatgcaaaccagtgggctgatatctgtgacatctttacacgggatgcttgtgccctcctggggctctccgtggagtcccc

SEQ ID NO: 95255 - DNA, 1072 bp, Homo sapiens
tcctcaccaccacacacttgcagtttaagaaatgctagttttacttaaccacgtctgtaatctcagcattttaggaggcctaggagggtggatcacgagatcaggagtttgagaccagcctggccaacatagtgaaacccgcctctactaaaaacacaaaaaattagctggacgtggtggcgggtacctttaatcccagctagtcgggaagccgaggcagaagaatcgcttgaacccaggaggcggaggttgctgtgagccaagattgcaccattgcactccagcccgtgcaacaatgcgagactgtctcaaaaaaaaaaaaaaaaaaaaagaaaagaaaaaaagaatattcttggcctggtgtggtggctcacatctgtaattccagcactttgggaggctgaggtggggggaatctcttgaggccaggaattcaagacccacccgggtaacacagctagactccatttctacagaaaacttttttaaaaaaggatgttcttggtgaaacattaaaattattagttttattaaatcttgacctttcagtacacatcatcttaataatttgtatgacaaaataggaaatccacataaagcacttcagtttcatgtcaaagtatggtaattgtcttgagaaaaagtatgttgttttgagttatgagctagctggtcactttttttcatggaatacttgttttgtttgttacttgtttttttcttgcttttttgagatggagtctccctctgtcccctggctggagtgtagtggcgcaatctcagctcactgcagcctccacctcttgggttcaagcgattctcctgcctcagcctctggagtagctgggattacaggcgcctgccaccacgcccagctaatttttgtatttttagtagagacaaggtttcatcatgttggccatgctggtctcgaattcctgacctcaggcgatccactgccttggcctcccaaggtgctgggtttataggcgtgagccaccgcaccagccttggaatagtttttacttggaagaatcattaacatagttacgcacactcaggtttttggcag

SEQ ID NO: 95256 - DNA, 1029 bp, Homo sapiens
gaacttgagccttcacttgttttgtggaggcaggtgcctggcatctggcagtttcccatttatgttgtaagcatctctgacatgcactaagagcagactgaaatctgaattcacctaaagactgtgtgtcaagccagtaaagccattagaggtggtgatcaggtcattgtttgtcagacttgtttttacactttgtcagctttcttgaaaataatcttgaaggctaatttaacactttgaatcactaagactgtccatctgagttagaagagtgctatagaaagttacattcaggtgaatagatctgatcaatgttctttgctgcacagtgtatattaccatgtggatggttttgtgaaatatgacttcagcttttttacttttttttttttttttaacagattgaagtggaccttggtaaaaagtgctggtatcactctatatttgcctgccccattcttcgtcagcaaacaacagataacaatccacccatgaaattggtctgtggtcatattatatcaagagatgccctgaataaaatgtttaatggtagcaagtaagtgtctgacttttaaaaaatgttagcaaataaattttgttttggaacttggtaggaggataagaagtgatgaggattaaaaaaatgtagctagatttagaactaaataaatttcttaactattcatttggcaaagttggtggtatctgatttgagtatttttaatgtgtctatggatttggtgattagatttataagcatgtctttaacttaacttttggggtaggtgatagattttccccttttttatacaaatggtcgcatactaaaaaatgttctgtactttgctgttttcacttagtgatgtattttggagatctttttctgtgctgcagaaacagccctcattatttttttgttaaagctgcagtatattctactgtatagaaatatgattgggtagccagttccctattgatgaacatttgtttctctaaacagtgctaagtgaaggccaggtgtggtggctt

SEQ ID NO: 95257 - DNA, 2198 bp, Homo sapiens
tgcattttagctctgcatgcagccccagcaggctgcgtgtttaagaatttcattgtttaactggctggtgtgagaagtcttccgttagcatagagtggaaggagtactattgtttggttgggtttttgtttgtttgttttttgtttttgcttttattgccaagaggtgcttgttttaaaagtatgtttaataaaatgaaattctaaagttagaagtgttcttaagttgatatttactctcttggtcttggtagccctattatatcattgcagacacagtgttgtgcatgtgtgtattgtatatgtgcaccagcatcaaacattgtgtatctggaaggaaagcagcatgttccagttctaaaatgcagttaccagacccatcactttaaatccttaaagttagaagctagcaaattttctgtagtgcagaacgtttattgctgtttttgtgtttgaatagtataatgtttgatgcctctcttctgcaaagcgtatcatctcattgactgtgaatctgtatattattctgatggatacagataatgatcttttctcttgtgaggtatcttcatttatgcactgtccaaaaatagccatgtgtaagagtctttctgtatgacgaactacatggaaaagacttctgtggacataattctgaccgaaacccatgaagttacttcagtataagaagaacgttacacggaaatcaccaaatattttgcaactttatttcttctgacatggagtgaacatcaataggaatactttcaaagaaaatgaaaacacagaagcaaagagaaatgtggcacttcacattttaaactacagatggacttggtttgagggagggggaatcacagatttggtgctaagttaattagaaactggcagcgttttacagtagtacaccagcctggatgttttttctaaaatgtttacctgggagagctggggtttgtttgtgaggagaaagagtactgtggaaaacctctgcttgagtaccatgtggccaggcctatgtggatggctactccgtgctgtgcggcttcaccagcggttgggattggcccagcttggagtgcttgtgtggtccaacctcagtctggccccatagcgacttttgccccatgattctgcttcactgttggaatcctctttgaagttccccctctctttgctaaagcagtgaaggaagagaacagagacaaactctttggactgtgaaagagaaggtagagaattccaggcaacagtctgaccaagggtgtaaaccagtttattatatatatatttttcctttgaattaaaacctagagtgttgtatttttctttctttctttttttttttttttttttttaccctttttctccttaggccaagtttagcttattcttatctttccacccaaacacctacacaacgtttaggcttcctgtaaggtttgaatgagacagatgtactctgaaggctggtggtaaatgtgtttgatgaccagactcttcatacagtcggcttgggccactttaaaggacaaaagccagagctcagctttatccctctcccagtgctgggagccaaaaaactgttgacggttttttgtgcagctcaagaaaactttgaaaagaacatgctttaactgaagcattggactctgcagctttctgtgtaaggcccgtgtactcccactgggcagggtgaggaccaaaaatctgaaactcttatgaatctgacatattatatggaaattatatcttgtgaccgtcttcaagtgcatggacttaaaattcatgagagactaaatgtgagggagaggtggatttaaagaggccagaccttaaccaaagatgctgagatacagcattctgtcccccctgccctagaaactccataaatgctgtcacaaccctatcatcgctgatgctttctgcatgtcagcagtccaggaggatgctttttgtctctctttgcctccactttacaaaagataatatgatagaggcaacgtttataacagtcacatttaattataatgtacatcaaaggcagaatttcagaatggtttcttaaatttccttgggaaccgtttccacatatcagttatagacaaaggccatgggactatgctaaaccaataaaaccttattagcaaatctttagattctgacttagccagagcatctgagtgttcaagtacagtt

SEQ ID NO: 95258 - DNA, 1174 bp, Homo sapiens
actaggatgtataaggtgacgacacaaaccaaatacctttctttcatcacttaactatacgtactttatctctggtaacactagaatgctgtggtcttgagggaatgttagcaaggaacacatagaagatttggtgtttcataagcctgtctaggtgtggcaggttttgtgtggtacactgatgtttaccataagcaggtacaagcttcatgaaccgttcttaatgaactataattgaatagataccaaaaatagaatgacaaatgtattttaatagcagatgaggcagttttaggatgaattttccactgttgattttacttcaagacatagcaagagaaacaaaattttgttttcaagacatttccactgcagtttcaagctgtagtgggcatatgcttcatttacttccaaagaggcaaaagcagctggaattggcttacagcacatgctttgtttcatgttatgggtgaggacctacatacactcttactttagcagtcacttaaccttctccagcaaggcagttgtggggttcactaggatttagtgcctgatcttttttttgggaaggggcgggaatgaatgtgttggggctgggagggaagcagaagaaaatgggagtgtgagtgagtgtgcatgtgtctgaagttcaccattgcccccacctgcacctagcaaggaacaggtgtttgatgtattttgctcatgactgcagtatgcatgtatttttttccttctctgtgttttctaaacttacactaaaggattcatcaaatcatcttgttcagatggctcaggattgtatttattttgcttaccccgtgctcttgggttctatagtatttctataattatgtaacgagaatagtgttgcactgtaatctatcatatagagctatatgtatggaaaattttgatcaattttttaagaaatgtatcctgtttgcaaaggcacagtaaagttgcatcttatagactataggcaataaagctaacaataaaccttatttaacacaaaccacatccatatcctctgttcatttgattttggaaaaagtagcatatccagtagtttcagggaattcattttaactttaagaattctgatatatttaatttataaatttcggactgatataatagagttttggaaaactataagaaatgcttt

SEQ ID NO: 95259 - DNA, 1868 bp, Homo sapiens
cccaagagcaaccccactgcactctagtctgggcgacagggcgagacgccatctcaagaaaaaaaaaaaaaaaaaaaagagcaaaggaaatgctcaggacaagatgatctggtaagaattttctcccttttttgcagaaaatcccgttttgtcaacctaatgaagcattcaaagaagacatatgactcttttcaagatgaacttgaagattatattaaagtacagaaagccagaggcttagagccaaagacttgtttcagaaagatgaaaggggactatttggaaacctgtgggtacaaaggagaggttaattccagacccacgtatagaatgtttgaccagagactcccatctgaaaccatccagacctacccaagatcatgcaatattccacaaacagtggaaaatcggttgcctcagtggttaccagcccatgacagcagattgagactagactctctgagctactgtcagttcacgagggactgtttctcagaaaaaccagtacccctgaactttaatcaacaagaatatatttgtggctcacatggtgtagaacatagagtttacaagcacttctcctcagataacagtaccagtactcatcaagccagtcacaaacagatacatcagaagaggaaaaggcacccagaggaaggcagagaaaaatcagaggaggagcggtctaagcataagagaaaaaaaagctgcgaggaaattgacttagacaaacacaagagcatccaaagaaagaaaacagaggtggaaatagaaaccgtacatgtcagtacagaaaagcttaagaatcgaaaggagaaaaaaagccgagatgtagtctctaagaaagaggaacgtaagcgtacaaaaaagaaaaaggaacaaggccaagaaaggacagaggaggaaatgctttgggaccagtctattcttggattttgaagctttcaaagttggttctcccaaagttaaattgaaaaaataggtgagagcttggttttatgatatccgtgttcataccacttttcttatgtgaataggttctttaacttctaacaaaggcctagtaaacaaagtgtttagcatgcttgctctccaacacagaaattgcttttcctcattttctaaaagcattattacattttttgaacatatagtgtaatttcctttaatgaaagtgactctgcttttattcatcaaattgctttgatggtggaaatattttctgttgggaggttatttattttaaattggaggattaatgacctttgcacaatctgtttcttgattgggtttgttatagttttgagttgggtattttatgttcattggtttttctctgtgaagcaatttttttctcctttattagatctaacttgcagtgtattttctaggctggaaagtggaaaatgaaatatattataatcttaggttacataaagtttctaaagtttcaaagagtcttgatacaaaatcagtttatattctgaaaatatttataataaagtattctaatttctacatgttgttgtgtgtcagtctgttcctatttaacaatgatttttctcttgggaggaggagagaataacttggcagttcatcatacttaacaggcaagatcttttgggtaggtcacactttgaagctgtaaaaattccttatctatcataccttgcttgctcacatttgaacctggtttttaaggtagaaatctatgactgactgttacaggaccccaccacttacccaaagttagcctttgggtcgggggtttcctcactatagtcccttcactggtcgccagaatgatgttataggaaaaggggtccgaatctagaccccaagagagggttcttggatctcacgcaaga

SEQ ID NO: 95260 - DNA, 1474 bp, Homo sapiens
tttagcagaaacaagccttgtttctgagagctgaagaaatgttcagttctacatgggatatatgccctcctaattttttgagataaactgtatcaccaaaaatatatagggcaggtgggacacagtggctcacacctgtaatcccagcactttgggaggccgaggcaggcagatcacctgaggtcaggagttggagaccagcctggccaacatggtgaaaccgcatctctactaaaaatacaaaaattagccaggcgtggtggtgtgcacctgtagtcttaactactcaggaggctgaggcaggagaatcacttgaaccctggaggcggaggttgcagtgagacgagatcgtgccattgaactccagcctgggtgatagggcaagactccatctcaaaaaaaaaaatatatatatatatatttttttatatatatataatattataatttcatagtaagtacattttctgctatatttgtatttattcaggatttgaggtgaggaaaagaatcaggaacagtcttgcccttccccccaaaaaagaatcaagcaaacaaaaatggtgtatctactgcaagtttcttctgaaactcttctccaaatcagtcctatcccttttcagttttcacccctgtttcttcccttattcctctcaccagtactttaagagagaacaaaccagaagacattctagaatgcttttttcaccaatcagaagtagtggaatgaaatccaagcctacacagaagatacagaactctgtgctttcatcttccctcatacctgatacctaaaagtagttttcatcttataactgaatttctgattttcagcattcccaatcaattttataaacatccttttattgttaagtcttacagtactctcgtcaggtgagtacgtttattttatcttgagtaaactgaagattttaaaaatcaaattctgtatctgtggttcctttacttctcttagaaactaatatacaggaaaccaattcatgagaacttcagaaattaattgaacattaatatcagccacccaccgtggttgtgtggttcctatccacacatccctgcttatctcacattttagccctatgacagcaacatgtgtatcggttcctttctgccctcttcgtctcacttctgagaagggtaaagttactggtacgtgacctgggaggtatctgaccatcctgatgctaccctttggcatataatgtcaagatactcagcttttatgctgaaataggttgtaatttgtttgagctgctttgtttttcaaagctctttttaagagcaaaggaggccaggtgcagtggctcatgcctgtaatcctggcactttgggaggctgaggtggatggatcacttgtggccaggagtttgagaccagcctggtcaacatggtgataccccatctctactaaaaatacaaaaattagctgggcgtggtggcacacacctgtaat

SEQ ID NO: 95261 - DNA, 1220 bp, Homo sapiens
gccgggcgcgccccgagtgtgcgaaatggccgaccagggcgcggcccgagtcccgcgcacccctcaccggccgccgcccccggaaagagacgccagggcttccgagtggagtgcggagggaaggggcgctcggcttgcggaggaagccgaggtcggagtgggaaactaggggcgaccaagaggaaatctagacccggaggaaatctagacccggagcgtcagggaaagggaagtggggtgaggaaactcgaaaattgaggggacagggataaatagagaaaagcccaaacgtggaagagagtaagcttccgtttggtgaagttcagcatcctggaaagtagagactttgacgtaggacgcttagggagaggtggatttaggaatcggggaaagcaggaagtagcggggcccttgggggaagagaagaggggatgaggtttagggggggatcactttggagttatcctaggcttttgaggatatggccctataagacaagcttctaagatttataggcccgtcttgatagtgatctggggttttatgtgtgtgtgcttttaatcctctaatttagagacggaggtctcgctgtgcccaggctggagtgcagtggcgcgatcatagctcgctgcagcctccagctcctgggcttaagcgatccttctgcctcagcctccggagtagctgggactacgggcgcgagctaccgcgcccagctgagttttaatatgtacctaccaatgtcagagatacacgaagctggacgttaaagcgttgaaaaaggattttattccgcaactcctgacagaggggaaagactgagctccattcctattttcaccgagatgactgcgagttttaaagggagatgaagggagtagggagtgggaagagagggctcaagtagagtcagggaggtgaaaaattacaaagtgctgatcattgtaaaaacgcaagtaggccagctgtgtctcctatctgggaattatctaagataaaatactatcctcccacagagactgggagtcaggcccagtccttcctggttacatttcagagcgatggctttcaggtccttgagaaagacactcctgagttgtaagaggtacaaacacatctcaaaggaacagaggaggattcgtagttgtgagccctttttagtaaatgccttttaaaagggaagtcagggagctgttattaggtgttggctagaacaaaca

SEQ ID NO: 95262 - DNA, 1031 bp, Homo sapiens
gtttcctggggagctgttcatagtagtcctttcctccatgcagggaattgtgctggcattctacatggcactggacatttattctctgaagtatttccaccaggctcttccatgtcattccaagagatgctaaaaggtaagagacctgttccagtccttcctctgatctagggtatgaatctgtgtgtgcactgggaaagaaggagggattatctttgcagatgtgcaggataggaaggggaagtgtggacgcctgtcacaaatcaccttttcctcttactgtaaagtaataaaaacaaacagcatcctaacctctctgccagggagtggggctgctgtttacagataaacagagacctgctgcctgttaggatcctggtaacaaaattcagtgagaagactgaaaacacaattgtgtttacagatcagcagcgacatgccaatgtcatgttggcggtggaaggcaaaggtcatgtttactgcaagcagaggtgcctgagctgccacaggggctgctggcgggggattttgaggaggaggaggagggctgcagcagcagtggatctgcagtcgcctgacgtgggtagcctcaaacctaaaaccacatgacacaggatcacaaaagcaaagccccgatcccattgtgcattatagcactgcagcaccatgtggtctgaaatgggcccagtgagctggctctgatttattccaatccccagaaactttgcttctggctagggaagaagactcctctcagaaaaataggttgggcagcagaggaacacaaatcccataaaaagggcatccatcttatatacatataactgtggtcacagcaagacataagctcgcatccccaaggacaggtactgtccatccagtgaatcagtcctttttgaaggcagaatggcatgatagttacacatgctctgaggtcaaaaagacttgagacctggctctgccacatgcttttatttttcattttattttatttttttctttgagacagggtctcactctgtcacccaggc

SEQ ID NO: 95263 - DNA, 1015 bp, Homo sapiens
gaaaagcacctgacaaacccctatggaagctggagaatgcatggcaagatcgttcccccatgggcacccgctaagcaccatccttaagatggttatgatccctggccctcagctgaaaccaggggaagaatatgaagaggcacaaggagaggcccagaagcctcagctagcctgatggcaagaataacttctggggtgaagcctgggtgatgaggcttctggaagctttaaagtcttccatctccatcatgctatagaaagaaatacctttgttctctcccgtcctgctcgggtcttttcagcagtctcaccgtcaacaaccatggctgatggctggccccaggcaggtggcaggtataacacggccttggatcctcttcttttttaaattgtgtatctagcttctgagtctagatgaaaggcagtatgtttcagagaatgtcggataccagtttttcccacagcaggggctgtgggagataaccagcagtattctgtttgtaatcacagggcagggatcagagtttaaaataaaacactgtcagagtgtgtgggggcgaggggggtgggcagaacagaacataaaattcacaatttaactttttttttttttttttgagatggagtctcactctgtcgcccaggctggagtgcagtggcaccatctcagctcactgcaacctctgcctcctgggttcaagcgattctcctgcttcagcctcccaagtagctgggatgatagatgtgcatcaccacgcccagctaatttttgtatttttattagagacggggtttcaacattttgaccaggctggtctcgaactcctgacctcaggtgatccgccctcttcagccttccaaagtgctgggattacaggtgtgagtcaccacgcccggcccaatttaatcacttttaagtatacaattaagagtacattgtatacaatgtatacaattaagtatacattgagtacatccacattgttgggtaaccttcaccaccatctatttccag

SEQ ID NO: 95264 - DNA, 1080 bp, Homo sapiens
gtccaaaattgcagacttgaaaagtttgttcttcgctcaatttttttgtggactactttttttatatcaaatttaagctggatttgggggcataacctaatttgagccaactcctgagttttgctatacttaaggaaagggctatctttgttctttgttagtctcttgaaactggctgctggccaagctttatagccctcaccatttgcctaaggaggtagcagcaatccctaatatatatatatagtgagaactaaaatggatatatttttataatgcagaagaaggaaagtccccctgtgtggtaactgtattgttctagaaatatgctttctagagatatgatgattttgaaactgatttctagaaaaagctgactccatttttgtccctggcgggtaaattaggaatctgcactattttggaggacaagtagcacaaactgtataacggtttatgtccgtagttttatagtcctatttgtagcattcaatagctttattccttagatggttctagggtgggtttacagctttttgtacttttacctccaataaagggaaaatgaagctttttatgtaaattggttgaaaggtctagttttgggaggaaaaaagccgtagtaagaaatggatcatatatattacaactaacttcttcaactatggactttttaagcctaatgaaatcttaagtgtcttatatgtaatcctgtaggttggtacttcccccaaactgattataggtaacagtttaatcatctcacttgctaacatgtttttatttttcactgtaaatatgtttatgttttatttataaaaattctgaaatcaatccatttgggttggtggtgtacagaacacacttaagtgtgttaacttgtgacttctttcaagtctaaatgatttaataaaactttttttaaattaagtatgttgactcttattttgaggagttagtcccaaaatggtagattttctaatttataaaatgggatcatagatctaggaagagtcataaacctatcctcaaaaaaacttcttcctaacccatttcagacaggtatctttttcatcattt

SEQ ID NO: 95265 - DNA, 1016 bp, Homo sapiens
ggctaactacagttgattagtggtttggagtaatgaagattttctcataaaaatgggttaggactaagatgattagaaatgaaagatttgctttagatagcgttccctttgaaaaacctcacctcaggggtagtcgagcagattttgctggctcccacaaacttttttagcatggcaagtctccaggtttccgaggggcctgttttactgatgcatatctcagagctatacctgggctttccttctgtaatgctgagtagtttaattactcttggtgtagtagtgaagaaaagagacttgggagattaactctttgctaacatttttacacatgtacttgcatttaaaccaagaagtgactaagtaaactttgggattcaataatgctgtaatatcaactgtactgtctctgtgttaatttttaaattttctttatgtgggatttcagattcatggaaacagctattctcataaagtggacatcttttctttaggcctgattctatttgaattgctgtatccattcagcactcagatggagagagtcagggtaagtaccctccctactcaaaaaaaaagtttcaaacagaaaataatctaacatttacaaaagagttttttaaagacttagttcttcttaataccagcagattggttaactaaaagtgaaagaggtgatgtgagtaacacagagaggagttctagactatttgcttccatttaaagctcagtcttcaaaaacttgtttggttagattgtttgttcttagtttttgcttaaattcatcataatttaacaatgttttgcactcagtaagtttgttataagtaaaaatctaggggaaccacaaggtaatgggggccacacactcatatatttaaaagctggcagattaagcataattaggtttctttcctctcaaaataaaccatgaccacagcctttaaagcagatagtactgaaagtcttttttttttctcaaggcaaggtcttgctctgtcgctcaggctggagtg

SEQ ID NO: 95266 - DNA, 1044 bp, Homo sapiens
tctgtaaaatggggttagtactcatctaatggggttgtagtacatgagttagtagtagtaaactgctttgaacagtgcctagcacattgcaagttctatttatgaactagttattattagttataattattaaggctttaagtcataagtgtagagatgcttgcctgggaagaatatatagaataataagattgaggattaagtaccatgatccctagggaatgtgcacctcaaagggtttaagtagatgttcaataaatactagcactctttgctacccttcccttttctttactagcagtacttgtctggcacagaaaaattgtcactattttcctgttagcccattttaaaaagaaatatgcttgaaaatatctagtttgttgtattttttctttgtagtcttttaaataattctctttactttttcgcctccatgcacacccactgtacttttgtctgttgtattctttccagccatccaacatattctttacaatggatgatgtggtcaaggttggagactttgggttagtgactgcaatggaccaggatgaggaagagcagacggttctgaccccaatgccagcttatgccagacacacaggacaagtagggaccaaactgtatatgagcccagagcaggtgagtttttcagacctttacttactagcacagcagcagatgtacctgatgaatctcttctcatgttttcattaaaatacccagtaatctaaaacccagtaagtctgaaaattatgaaaactggcagtagtgttccagtagtggaatagtgacacagctaagatgtagtttctacaacctgaattggggctggattaagaaaaatacaacacataaaatgcactcaccccctgaacaagcacctgacagcaaccaggaatttggaaagagactttgaatgccaccctcccaaacttaactcgtttgccttgtgtagactgtgttggaactgttttcagagccagctagacccagaggtactatactgagctgccctttgtggtcactcataggcaactt

SEQ ID NO: 95267 - DNA, 1039 bp, Homo sapiens
gatgttaataatgaatttttattttcatttagagcatcatttcttggaagcagcagttgcttctaaaaaatgttaatcaaatatttctctatacaacttagaaaaactcttaatcattccctgaccatgccaaagtaacatttagcgcttaacatacttatattaagactgtttaggcaaaagttatctggttagcacatcatattctttgagactgaacgaatagaaatcaaatactgtgcacctacttctttcattatctttctaaaccttgtacgtgttttttactacatatgtcatgtcatattttaattgtttgtttaaacaactcagattctctgtaaaactgtgcttttcaaaggcaagagctctgggccatttgtttaacttatatgtttgaattgaattatggttgaatatcagtttattcaattaagcacgtgcatttttattcaagtcataacagttcagacttaagaaatattattattaagaaaataataattttcttttagattctccttccagaactcctgtcttggtaggatctgatgaatttgacaaatgtctcagtaatgataagttttctcatgaagaatatagtaatggtgcactttcaatcttgcagtatccatatggtaagtgaaaatactgagttttatttattttattttttaatttgaaattaatagaattcaaatgaagaaaagtcgattagagtatagacaataaaacatcttgggagacaatttcatgaatgattactaagcatacaagctccaaagttaggttgccagggttcagatcccatttttgccacatgctaggttgggcacatctaactcccctgtgtctcaatttctttatctgtaaaattagaataataatcctaatatctatgtattgagttgttgtgaggcctaaatgagataacgcaggcaaagtctcagttaacatcatacgtggcacatagtgtcagtaaacattggttctcgttattagctcttatttatcagactatattatgtaggctgtatag

SEQ ID NO: 95268 - DNA, 2940 bp, Homo sapiens
ttctttctactttggactatgaatagggctttgcatttacagacaacttgaccttctttatcctgactggattttgtttttttaagtgtttgagtgcttactgggagctcagccaccatagcagcagatgtccaacttaacagatttttgagttaccagaataggaaggatctgggtttctaagatccatgattctttaaaatataattatttccataaatgtcagaattcttaactatgccattttatatctaagtgaaaagacacaatactctcagtagttgagtgatttttctatttactaattatagaggaaacattattactgccactttaggataagactgctgaaacttacttaggaaagggtaaatgacttgccacatcttgttcagtggagatccaagattggggctgaggtatcctggatcacattgcctttttgaggccatgttttagtatgaatttaagactggtgcattcatcttgacttttacactggtttgttagggcatattaattttgctgcacttaatgaaatgtatcctgcctttaattaagaggtaaggcagactgtgtgctacctcattttaaggtgacattgatgtgtttggggaaaatcactctgatgtagaagtacaaacatttgtaagtttttgagagaaaatctgtcccttagctgttgtaagggacacatcaagtcagtccacaaccctcaaaaccattgtgtctgaagggtcaggacaaagttcttgtgggccctcttgtggcataaatcagtagagcactcttttccagaaggttatgttgttagttttctcatcacataattttagtatttgcttcttcaatctagaagagttctatattattttgtccctttctttaaatgtaaatttctaaaacacacctttgtaaatttaaggtggaatttcagtgttggccactttgaacttcggtatattccagacatggaaacgagagccggatttattgaaagcacctttaagcccaatgagaacacagaagagtctaaaattatttcagatgtggaagaacaggaagctgccataatggacatagtgataaaggtttcggttgctgactggaaagttatggcattcagtaagaagggaggacatctggaatgggagtaccaggtacctaacaccactgaggatttaaaatacggttcttcctctcccagtctgaccaaacttattgattgggtggaacgaaattactactacttggggctctcagcttgttctctgtgcttttataaatttgtgattttaaatggtattttatgggttggaactatataactactgcttgaattatttaagaccttttttccatttttgtttagttttgtactccaattgcatctgcctggttacttaaggatgggaaagtcattcccatcagtctttttgatgatacaagttatacatctaatgatgatgttttagaagatgaagaagacattgtagaagctgccagaggagccacagaaaacagtgtttacttgggtgagtaaatgtatcttatctaacgatagtacacattgacatctagattttcttcttacattgttccttcctacttcaggagtgcctgtagtagttttaaatcctaatatcatctctgatgtacgttgcccttgagatttatacttcgatttccattcctgctacttttccatttgtccaattctgaaaatttttttgttgttgttggagatggagtttcactcttgtcgcccaggctagagtgtgatggcatgatctctgctcactgcaacctccgcctcctgggttcaagcgattctcctgcctcagcctcctaagtagctgggattactggcacctgccaccatgcccagctaatttttgtatttttagtagagatgggatttcaccacattggccagaatatagtgcacctgacctcaggtgatccacccacctcggcctcccaaagtgctgggattacaggcatgagccaccacgcccagcccaattctgaaatttttaattactgtcgcatattctttttctctgaggtctatattagaaaggcttagaaatattctcattatataacatgatttcaaattactcattagccaagaatggtggcacgcacctgtaatcctagctactccagaggctgagatgggaggatcgcttgaccccaggagttagagcctaccccaaactataatcatgtcactgcactcctgcctgggtgacaggacaacactctgtctgtttatatatatataattatttataagtaattacatatatgtattacatatataattatttatatgtaattacatataaaatatatagttaggtatatatcctcaaagtctataattttctgtatttgtatttgcatccatattagtttgtgaccctcccctctttaagattagatttctttcttttttatcagtgcatctgtacaactgatctaaaaaataaaactctggtgtgcttctgggcaattgaaagcctttaatattataaattttgaaaactcttggatctaatttgaactagtctgcatcatcaaatactcataaaattctataagctctgacaatgtgccatccacctgttggtttgaatgaaaagcaagaatttgaaggaataacatgtcatttgtgttatgatagtatttaactgaattgttagcaatatttctagaattataggtgtttaggtaaactttcttgagaaagttacttagtgtaagctatttgttttgtgagagtacagtgacttatctttgaatttttctactggaacaattttcctgtattactgaaaatgtgctattattcagtgagaaatatcatatggaccttttgtgtaactttccctccctgtttttgttgaataaacattgagtttatctttgagt

SEQ ID NO: 95269 - DNA, 1085 bp, Homo sapiens
acagtaattggccttgataaaaatagccctagaaaatactgcatatattatctatttacacattaaatattcatattacacatattacacataatcatgttacacattaacatactaattgctataagagctcctatagtaacctcttcttgaactcacttgatcataaaactctcttttggtaactcacctaccattatgggacccttttggcccatggtaaactgagtttgagaaaaatcttactagagtactatgtgtagggcctgggagtgattggcagttcttttaaattacttttggttgatggactgcactgcttcatgtgctactcagaaggaggctggagtacatcaggatcaagactccagctcttaattactattattcttttaaaggtatgatgcttctatttttctgggagaaataagaaaaaaataataattaatgttatggcccttttaaaaagttagcttctgttttaggtatttgggaataagatgatcattccttccctggatggagccctcttccagtgggaccaagaccgtgaaagcatggaaacagttcctttcacagttgaatcacttcttgaatcttcttataaatttggagatgatgttgttttggttggaggaaaatctctgactacatatggactcagtgcatatagtggaaaggtaagtgaaaatgctgaatttactttggggaaatcagagtaaattagggtagaaaaagtaatttattaaactacacttattattagttgagttttattgtaattttcccctgaggttgtcatttgttttaataagagaactgtgaggtaggaaggggaaactaataacagaataaatggcagagccaggaatagcaggaggaagagaattcataaatatggtctactgtgtctcaggtgtttttttttttttttttttttttgagacagagtctcactctgttgcccaggctgatctcagctcatggcaatccccacccccaccccattccacaccccctcaggttcaagtgggttcaagcgattcttgtgcctcagcctcctgagtagctaggattacaggcac

SEQ ID NO: 95270 - DNA, 1118 bp, Homo sapiens
gcagtggtgcaatcttagcttactgcaacctccgcctcccaggttcaagtgattctcctgtctcagcctctcccaattagctgggattacaggtgcatgccatcacacccggcttacttttgtatttttagtagagatagggtttcaccatgttggccgggttggtcttgaactcctgatctcaggtgatccatccgccttggcctcccaaagtgctgggattacaggggtgagtcaccgtgcccagccagaaaagatttaagagaagcttcagaaatagaattaagagtacatggctgttgtttaaatgtagaggatgagggagcacaaagagttgatgtctgatttaaatgttaggtaataggatggatggctacccttttaagtggcaggaatagattgtgggaaagaagtttcctgagcctgttatggtgataacaagtagatcctgctgaagatgcagaactaggataggggagagatggtgaactataaatcctgtacaggtttgggggctgtcatactatagatggaggtgaagctgtagacattgaccatctaggtagaacatgtagtacaaacaggaaaatgcctgctctatagatagaaaactataaggatgataggtgaggccgggcacggtggctcacgcctataatcccagcactttaggaggctgaagcgggcagatcacctgaggtcaggagctcgagaccagcctggccaacatggtgaacccccacctctactaaaaaatacaaaaattagctgggcatggtggtgggcacctgtaatcccagctacttgggaggctgaggcaggagaatcgcttgaacctgggaggcggaggttgccattgagcagagatcgtaccattgggcgacagagcaagactccgtccccccaaaaaaaaaaaaaaagaatgatagatgaggacccaggagggactggtcctgtagaaaccaggaaagaaaaatgtccagaatgaggagctggccacaacggtggcttttgtgaagacaggcctgatgaggggagtgaatctggcagttaggaaaccattgaaaatctttcttgagagtggcttccaaggattggatcatgggtgagagttcagg

SEQ ID NO: 95271 - DNA, 1013 bp, Homo sapiens
tctaacaaaagtatttctaaatttgacattaatctctggtgcttcttcaatttgtgcatctgcaaactgatttttttattaaatgagataacatgaaaatatttgcaaatataagatgatataatttctctttttttcctctgtcgttttacaaagtgatctgatgtgaaacaaaggtacagaaatctagtcttcctcagactttcagatttataatcatttttttgtttgtttttttaactactaggacccttgaatagtagcatatcagaataccatgttgaaaggaagctcagtcatatagtcctattcctattcactcacccaactccagacttttaaagttaactaacagtcacctttaaggaagaatttacacagaactttcaaagcaagtaataagccaaaataaatatacttcaggcaagtaatgaactatcctttgtgtctgcaattgtctttagcttaattgatgccaggactgtgcttagactatgtggacagggatgggagattgctttttatctgatctcaggtccctgcattcataggcatcttccagattgcagagaggacctgtctttatcagttgctgtgagctgtagcttcagcgtgtctctttactccctaaacattgcctgataactccatttgcttttctccttttttgtaagaggggaacttcttatacatttttattacaaattgttttaaaatacaaaggagaaaacttgtaagttgcagagctaaatgtgaggggaggagataaatttgtgtgtttaattccattctatttgtaaatgaccattttgattaaaagtctttcatagggccgggcgtggtggctcacgcctgtaatcacagcactttgggaggccaaggcaggcggatcacctgaggtcaggagttcaagaccagcctggccaacattgtgaaaccctgtctctactaaaaatacaaaaattagccaggcatggtggcacacgtctgtagtcccagctactcaggaggct

SEQ ID NO: 95272 - DNA, 1035 bp, Homo sapiens
ttgaattcctcagcatcaagaataccatcaattcagctttctttctgaggaatcctttgacttaacctgaatctcaagagacagcatcaggtggcagttcagacgacggacactgtgtgtgccaggccactgcactctcagagcccggtgctggggagcccaccctcccagctacctgcccagatggcttcccctctctctggaaactggccaagtgccagccaggggcagcttctccttcctacaagacacaacagtctgtgccccactagaacctccttccaccaaaagaaaacacggtgcacaagttttcattcactcattgtgaagctcatcagcgtgttcctgggcagtctgctttgttcccattgtgtggataatacattattttagaatttcctcgggccactccataggagagaaaggagaggaaattacagagtgaaaggaagtacggtgacaaggggtgaatgccatgtttcaagtctgagatgtctgggttgaaaggagatgggatgattaggaaggaggcactgagttaggaatctggaaagcccagctctgttatgaaacgctcccttatcccatggctccgagaagttagtgccattccagagatgggacgctggaagaggtgcttgaagacccgtgagcttcctgccatggaggtgtgtggtagagcatctgcaacctcttgctggcagccatggggacaaagattcaagcttcaggctgtaacggtgtcatgtacctgtggtcccagctactcaggaggttgaggtgggagcatcacttgagcccaggagtttgaggttgcagtgagctgtgatggtgttactgcactccagcctgggcagcagagcaagaccctgtctctaaaataaaatgataaaataaaataaaaataaaattcaagcctcaagtggtgagtttagttgacattttactgctcttcaacttggagagtctacaactaaattggtctattcaggaggtcctttgttaatccaggataactggtaccagaaaccagcc

SEQ ID NO: 95273 - DNA, 1048 bp, Homo sapiens
agaaggtcatggttgcttctcagaaagggcatttaccacagaccaagcagaatttcccagctgggcgcctggggactggggatcgtgctgttgagcacaggggcatctgagagcattcggacactgctggccttcacctcacacagcctcaggtgtccggtgtgctctcctctccagatggccatatggccagggcttcttgtgtccttgggctgcgcaggagtgaaatctcctttcctgcccgcaggaagccacgtgggcttcagtggccgttttgatttgcgcctatgaatcagacgctggccagatcaccctccatagcccctgcccacgcctagggaaggacaatggggtcagccatgcggttggccaggtattgagggcttgttcatggtgtctttgtgggcctgacagaagcctttgaggccattaacacccaaacccttccactcaatgttgggcaggctgagaactcttctaagaatctaagagtcagcctgaagtatcgggtggggtggggcttcactaggatggcagccacggtgccctcaccctcaccccaggcagttccatggtcaaaaggctcactctgtcccaggccctcctctctaacgttgccctccctgtcacagactgggatgactcaagtcctggactgcccccgggccagctgtcacccgagtggggtgggagtggggtgactgcctgcccagcggtcagggcagcagccacccagctgctcattaactcagaggcagccactggcttcagggaggccctctccccaggacttcccagcctgtccatgcttgaagagctctgtttaatatacatatattttaaatttgcacattggtcctctacccaatacgcatgttaatagtaggtacacttctagtaactgtcgatggagatataagtttgtaaaaagctgctctgaggttagcggtgtttttaacgtaggcaccatgagcacaggtatacattttggaaaacaacactggagggtataaggggcttggactgcttatgaatgcacaaagctagt

SEQ ID NO: 95274 - DNA, 1048 bp, Homo sapiens
tccgggagggagggaggtactgctggccgagggctcagcactctgcactgattgtgtggttttttttttcactgtttttgttttttgagacggtttttcgctcttgtcgcccaggctggagtgcaatggcgcaatctcggctcactgcaacctccgcctcccgggttcaagcctcagcctccccagtagttgggattacaggggcccgccaccacgcccggctaatttttgtatatttcgtagagacggggtttcaccatgttggccaggctagtctctaactcctgacctcaggtgatccacccgcctcggcctcccaaagtgctgggattacaggcgtgagccaccgctcccgaccgattgtggttatttaaacaacccgaagtagaaaaaaacccgtgagctttactttcaagcataaagtaggatacagggattgggtggcactggaaagcttcagaacgttctttcttggatgcatggcgcaatgagagacccaacagaccaagggtcaggaagaaaaaacaatttactattcaaataatgagatatgggtccaacctctgcagtgtagtcagtgaatgaataataaaaagagggttgtgtggcctggggctgctcttgcttcctctgggtcctcagtttccccatctgtaaaacaaagggacagaccagaccgcatgatccttaactggggctgaggctacagccttaggtttccagggtgcagatcttgatattccctgggcacagcgcctgagcacagattcctctgtggggagatggactcacatccctgggaaccctgctggaagtatctgcccaagcaagcagctctgagcccttacctgaaggttcatctttggcaatgggattccttggaaagaaagctgccccttaaccccgggggctgccgtggggtgcccacatagcagggctgtaatatttttttcttatctctggagagcagctcaattcatgtccagtaaacacaaacccggaggccctttcttgatgaacactgcagatataatgaaaaactggctca

SEQ ID NO: 95275 - DNA, 1033 bp, Homo sapiens
acatttttattaaaagtgtttttggaatccttgaaaagatgtaaatttcaacaatagagttaagaaaaacattttcctttcaggcaaagaacagagcagttcaccatttgcattatatagaacgatatgaagaccatacaagtgagtgataatctatttttttttttttaatttgcaggattacatttgttaaagtctgtgtgacaatgtatctctataggtatctttgtgtttctctcttattacattcttacaaatatatgaagtgtgaaaacaaatctcctaagaaggttactaaaatgaatgaaatcagagcttaccatttatctttggtcaatatgtgctggctgttgaggctagtatacattgctttgtgatatttgcaaaggcttattaaagccacacacctaatcctcttgtgtttatgtttttaccctccagtattccatgatatttcattaagatttaaaaggacgcatatcaagatgaagaaacaacccaaaggtaactttaaaactcttaccatttgttgatgataaagcagagaaattataacagttctatcctctcctctatttttgttcatctttagttgaactcatcttggaaacaccaaaatgtaaaaggcttatgttagatttaagaacgatgaggctcttggagaaataagaatagtcaaggcacacaggctactgtgagcacaggcctgttccaggaataatttacggtggggagagcacattggaaacgggaaatagcacctgagtgagtagtagggtttggaggagtgggaacattagttcctcatagggaattcattgatgcatttaggtgtttcagttctgactcaggtccaggtgtttagtgctcatcaaattctgattgaatgccttctgtgagctgggtgctatgctaagcactagggatgatgcagagatggtctttcctgttttgtggacaagcaggcaggcaggcagagttcagggtcatgggctagggcagtcatgcctagtggtctctgagtgtaggattc

SEQ ID NO: 95276 - DNA, 1013 bp, Homo sapiens
taattcatttaaagcatatttagttttttttaaattgagtgtattttatctagatatttttaaaaggcagcatctaaccttggattttataaatacatctaaatttgttatttccagaatgcttcaaaacagatctctgtagcctcgtgctttgttattgttaggttttttttttttgttttgagacagggtcttgctctatctggagtgcagtggcacagtcatagctcactgtaccctcaaactcctaaactcaagtaatcctcccatctcagcctcctgagtagttgggaccacagtcatgcaccagcatgcctggctaattttttaaattttgttcttaatagagacagagtcttgctgtgttgttcaggctggtctcaaactcctgggctcaagcgatcctcccacctcagcctcctaaagtgctgagattacggatgtgaatcattacacccagcctattaatggttttgtatagcaagtcttttgtgggtggtggaaagatgaagtgctgtgaaatattgtaggagcagaaacttgaaatgtggcaaaaaccacatgggcaaaatttctgtctcttttcttatttttgcttttttgtttaaaggtttttctattgggaaagctactgatcggatggatgctttcaggaaagtatgtacattttttttctttgttgacactcagtaaaagattagtaagttatatgccagacacagtgggaaccacaaaacaataataatttgtcccagaaccttcccatgaggcttgctgtcaagggttaattagctcataaaaatcagtttcagaagtacttatattcctttgcaccattttttatcagatttgtaattgtctagccaagttatgagacaattgtggaagtttgaacactgacagaatgtttgaagatactaaggaattgttactttttttttttttttttgagacgttgtctcactcttgtcacccaggctggagtgcagtggcacgatctcggctcactgcaa

SEQ ID NO: 95277 - DNA, 1166 bp, Homo sapiens
taattataaaaaactgtacagttcgtttatgtgtaatttgttttacttctgcaagtatatcaataggggaaacttcttgcagtaaaattgctgccccaaggttatatgtattttaagtgctgataaatattcctagattgcctccccacaaaaggttgcatcaatgtctgtgtttctctacaccatctcacccttgccaacttcgggtttcatcagaccttactgattgtcagtatgatctgtgaaacaaatctctcagttttgatttgcattttttaaattatgagagcttgaacaccattttacatgtttattggctgttgttatttcctttttgagatctgttcgttatatgctttgcccgtttttctgttgggtggttattatttttcttattgaatggtataagctctttgtaagttaaggacattagcccttagtcagatattttgacttaggttttaatttttttccacacagaagttttaagctctgtggcaaatttatcagtcttatatcactacagggttataaatattagttatcacttcgggtttgtgtcttgcttagaaagcctcatttgaagattgtaaatgttagtaagtttccccatattttcctctaggacttccatggtttaatttgttttgtttaaactaggaattggcattcacatcctcttttgtcccaggtctcagaggtcccttgtatcttatagagcagtattgttttatgttattttcccatgtataatttaaaaacaaaatacgttgttcaaaacaaaatacagtggcagcagataatggcagtatctctgtaactgctggtaaactgtatttcatagtgaagtgttcataaactaaagagtcattgatttggtttcctggctaattaaaatctgaattccatttgaagttccattgaaatcatggttttactctatagcagtggatgttttttcccaacctttctgatatttttttccttcctgagacagggtcttgctctgtcacctgggatggagtgtagttgcaccatcaaggcttactgcagtctcaactctctgagctcaagtgatcctgccacctcagcctcttgagtagcaaggattacaggcacctaccactatgcctggctaatttttatattttttgtagagatggatt

SEQ ID NO: 95278 - DNA, 1002 bp, Homo sapiens
cattgcctgacattttaacacttgaaaaatgagtactttaacaaaattattatttatatttttaaaccttcagggcgttatggttttctatggcccggactgaatgtccctcttatgaaaaatggagcagtgcagaccattgcccaaagaagcaaggaagagcaggagaaggtggaggcagacatgatccagcagagagaagagtgggaccgaaagaagaagatgaaggttaaacgggagcgaggatggagtggaaactcatggggaggcatcagtcttggcccccctgaccctggtccctgtggaggtagcaaactcctggttttgtttgcctttgtgacagagagtacttgtagtttagaatttccttgaaatggtgttattacttgtctgtttatactacctttttccaaaaaagatttgaacatctttgaaataacatatcacatcaatatcccaactgtattttgtggagtgcagaagtattccactaacaggatagaaagcactgggttcctggtatttatcatgtaccttctcagatccttaaacgtggggatgtgcactgtggacctacaggagctgcctataggatacactgtttccaaaacacaggtggccacagggacacctgtggagcagcatggcttgggaatgctgtttctgtactagaaatcagcaaagcagatagttgtcatgttaaccctataaaaacacaaatgaagcaaaaattgaaaatacttaggccaaatttgaaaacaaagtttcccccagccctccgtgagtatgtaaagcagtaaaaatcatccaagagatgtgttcttgtcaatgagtgggagaagaggaaataggtaagagtttcgctgctttcttaagaagtttggcttaaagaggagggaagaggttgaaactggaggggagagattccaaagaacatgcttagaactgatcaaaatgcttcagtcaggaggatgaaggtatggaagggagagaacaaaatcc

SEQ ID NO: 95279 - DNA, 1050 bp, Homo sapiens
attgaaatgttgattcttgtttggactagaaaacttatacttaggaaggatagttattagttatcttagtggttataatggaggcaagaggacagggaagacgcctatatcatggttgataaaatgtcagggaaacgaacctattggtaagtaactgagatttgaatgctggcttttaagcagttagagggaaaaataaaatatttagtgagagttttgtggaggaaagtaatagaattgtctcttcttgggctttccaagtgtaaccgtctgatgtgtgcaaaggatgatttaattttgctttcattacctcagtgatgcatgggtaaagctgtaagctgacctccacttctcttattattcaataggagatcatagaccattgcttgaaaactacagaattaagaaaagaaaccctgtttcgttacagtgactgcagatgagctgtggaaaggcgctttagcagagactggtgctggagcaaaaaaaggaagaggcaaaagaactaaaaagaagaaaagaaaggatctgaacaggggtcagatcattggtgaaggtaaacttatttataaaaatagctaaagtgctttgtaagtttcttaccccagattttatagatattttacaaactagaagcatcaaaacatttcttatgaagggcactacgatctatggttttagaattcaaccagttgacttactcattgccccaggattctgggggaggaaaatcccatagaaatggatttattcattcagcaagcattaaatgtccctaggtgtcatctcctataatagtgcctgccctcaaataggttataattagtgataaaatagagactaaatggagagttggcgaatattccctgcaaagggaagatagtaaatgtttctggcattgtgagttacatagtctgttttgcaactgctcaactctactgttgtagcacagaaacagccacagataacacacagtcgaataggcatcgttatgttccagtacaatttcatttacaaaaacaagtcacgaactgagttggcctgtgggcc

SEQ ID NO: 95280 - DNA, 1042 bp, Homo sapiens
attaaagaaaaaaatttgtagagacagggtctcgcaatgttgaccaggctggttttgaactcctgggctcaagcagtcctcccgccttagtctcccaaagtgctgagattacaggcatgagcctccttacctggccagcccagtggatgtgaagtggtatcagtttgtggttttgatttgcatttccctcatgaataagaagcatattatcatgtgctaatggccatttgtatatgttttcttttgtttttgtttttgtttttgtgaaatagctattcaaatatgttgcccacttttatattgggttgtctttattgttgaattgtaggtgttctttatgttttttaggtacaagacccttatatcatatatatgatttgcaaaattgttgtcccattctgtgtgtcttttcactttcttgatagtatttttgaagccacaagttttaaattttgatgaagtctcatttgtctattttttttctttttgttgctgtgcttttggtgtctcatctaagaagccattgcaaaatccaaggtcatgatgatttatccctatgttttcttctaagtttcatcgttttagctcttacctataagtctttggtgcattttgaattaatttttatatatggtgtgaggtagggtgccaacttcattcttttacatgttgatatccagttgtcccagcaccacttgttgaaaacatgattctttcctcattgaatggtctcaacacccttgtcaaaaatcacttgcccataaatgctgtgtcagagcctgttctggagtaccacactgtgtgagagggtacacagtacagtcagcgtggtgctgcagggattccagagggaagggggaacattgtaggatcagggaggcttcactaagaggtgatgtttcagacaaacagagaaccttgcagagacacagaagtatgcgagagcacagtaggttcaagactgactacaagtctggcatggccagagggaagatggaggagagaaaggtggggcagcaggctggtgtggaagcttggggcc

SEQ ID NO: 95281 - DNA, 1056 bp, Homo sapiens
atgttggctttgggacctggaccctgtagggctgggctgggggtggggtctgcatctgaagggctatggtgcctgacactccatgtttaacacagtggggtcccagtccagaaggtccataaagctcctgaaattatgggcaagattatgtgtttggtgcttcttcctggagtgctgaaatacggttctcaaggggatctgcgttcccaaagtgttcaaaggctcgcccctgtggctctccctggagccttgctggtggagggtgttggtgggccccggcaggcagcattcctgatgtgctggtgacataaaggtcctccttgtccctctgtgtctcctggctcctagcacattccttgtaggagcagagactcccttacacacttgatttttctccacagccttgtcactcccttaagatactgggtatctcagtttctttatcattagtttgtggtttgtctcccccagctgcgggtcacatgagggcagggactttgtcttggtcacgttagcaccctgtgcctagaacagtgcctggcaccaggcagcagctcggggaggatttgttaaattcatgagggaacctgctgaccaagagggagaactggagccttctcctgtcccctctgctccacctcctgctggcgaacctgaggccaggtcctgtgagagctactgcctggatgggcaccgagcagggggcccggagcagcaggggtgggggctgctgcagagagcacagaggctggaggtggggtgtgctcggtgtcatcagggtaagtgggtggagccgagtgagtgaggagtggtggcagtggaggtggggggccagtgggctctttacccagctgtacattatcattgtaatcacctgggaactttaaaaaatacccgctgtgcccaccctggggcatcgaactctaaatctctgggtgaaacccaggcactgggatttttaggagtttcttgggggactctctgtcctgggtcccccatcagtgcctttctctgggtgacttcatgggggagtcactgcagccacttctcctgagc

SEQ ID NO: 95282 - DNA, 1016 bp, Homo sapiens
tgtttggctttgctttcctctctgaaagtttataggatcctctgcacccaatttgctgaaatttcaccatgatctatgcttgcagctaaactgcaggctgttttcatgcattgtgccaagccttggtggacactggaaatctctgcttccattctgggaaatcgtctttcctgattgctcctacccactttcctctgttttctcccgttcttcccgaactgcctgtgtcccagcattggcccctctggagtgcaactctcattatcctctgttctcccctatattccagctatttgccttctcattccacttcatggaagattccatttgctctcccaacctttctttttaagtctgtcattttgctttcttatttttaatttccaagagctctttcttttttccagttacctcttttttgggacatcctattcttattttagtgatggaagatttgtaatctctgaacctaatagttgttgtcaaatttttttctcctgggataatttttgttcttccaaatcgctttcctctgtctctgtctctctcatggtacagacttcttccagtcccgaaaatctaacacttgaggggcctcggggccttggtgcatggccctgtcccttgcactctgaccgtcctctgtcccacttcgctggtacagcccctttctcacccctttctttcagagtagcctgggaggaccccagggtgcagggagggtttcacctttaaaccttccaagaggtagggggaaaacctgctttctaccaactgctgtaacaaaacagttgaagttgtcacatggaaaccatttaaacagccatattctgtcatattagtagtaaagtttcccatgccaaaggcgatggccacacacagcatgtcatgactcaagagttgagcaccaggtttgggcgaggtggccctgggattacacctgtaatcccagcacttctgaagcccaaggtaggaggattacttggggccaggagttggagaccagcctggacaac

SEQ ID NO: 95283 - DNA, 1006 bp, Homo sapiens
aaatgattatccaccttcagacacaaaagaagaaatatgtcctcagagttaaccattgtgctattcttccttatccaggagttgttacagactcccagagcccagtcacaagagttgtccacatccagctcccagtagtgtttcccaaaggagaagaccctggctccccatgcagcaaaatagtcagatctgtcagaattcaaaggtccacgtctaaacatccaacttctcacatcctcaaagagcctgatattgtgattggttacttcaaaatggaaggaaatttccactgtagaaaaaagagaatgttccagtgaaaatcagtttgtaaattcttatgttcagataagaaagagattctcactagaaaacacaggtcaagattagaaagaaacttctgtctggaaaaatgttggaatcaaagggtgttaggagatctgcacaagtaaatggctaaactaggatgatcacaatttccataaactcaaaaagtataaaggggaggaaggtcatgtctatgtctcgttagcgacctttcataacaactgaaaaactggaagctcctccactgcagccaagtccatagccataaaattaaccttcattgtctcgtctctgtcagggcagagcaggaggctttggacaggagatgaggtggggagctattcttagtcccaaataaaaaagttatcactttccagaaatattatgatctgccacttaacctagcaaattcatacttaaagagaaaacctgaatctgccttctgaaaagtgctgattccttgcaaaaattatctgactttcatgccagattcaggcacagacttcttttattctgctggatttgtcatgatctatcctggagttctatctaagacctcatcaaccaccaaatcatgttcctattgttgacagattctcagtttttgcattgttatataagttactcatgtatgctttagttgattaaaaacatgattaaaattataaatgctatgaaacat

SEQ ID NO: 95284 - DNA, 1097 bp, Homo sapiens
acacagtaaggttacatattgctaggggatattacttcgtatttatcctttgttaaaagtatccagagtgacttttaaactcagtgccctggacacgtgttgctcttctgcagtcaatggtgtggggacctgtgcctgcatcccatgatgctgtctgccactgcccaaaatgtatgggtctacaagtcacacctcccttgtcgttcactgggctctggttcgtggtgatggcaaacatgggatggcagccaagccatactgacagagatccacagcgtacagcctctgagcatagttaatgggccccaaagccactgcggctcactattcctctcccaccctacaggaggtagattgggaagtggagctggccgtggtcattggaaagaaaggcaagcacatcaaggtgaagtggaaaaggtgggctcccaggccagagtgcagcagagtccccagctcctgcctctcctagttctgacctcgctcaccaacacatggtgccagctgtccctgacactaggaagcagtcagcctccttgctccctgacactgcctttcccttcacccacctttggctggctctggctactaacatgggataacagctttgagatcccttgccacaggtgttggtgtcacccatgatctatcctcctgtatggccaaatcccctgcccccataggccacagatgccatggcccacgtggccggcttcactgtggctcatgacgtgagtgctcgtgactggctaacaagatgcaatgggaaacagtggctgctgggaaaaaccttcgacaccttctgccctctgggccctgccttggtgaccaaggacagtgtagcaggtaggttcctgatccctgcccccttgtacctaccattgcacagatgaacagccctccagggaggagcacgggttcaggtacatgtggcacctgccctccctggctgccctttcactgctgactccatacagggaaagtcttttatcctcagccacgagttctcccatgggcttccttcccaagccccctagagggaacacaactgcagaggatgtgaaactgcatgcgtgaagtaaattacaaagaacact

SEQ ID NO: 95285 - DNA, 1880 bp, Homo sapiens
ggctcctgcacaggccctgcacataggatgagggcatctgctcccactcagcctagcccagggaaaggcccagtgacaggtgtggacaggtgccagccctgcaagccgcctcttctcggtagaagggagaaggacagagctctcttcaataaattcgtcgggtcaaagcagcagcttggcttctgctgtttgtcttcgtttgggctttgtttcatgggacaagttagggcattttgtgggactggggaagaagagagcaaatacacacacatacaccaaaaagatgctgctgggctggggaaaagacaactcgtctcgtccccttgtttatcacatcaaagaagggaaaaagcaagagatggcaagggacaatcaagcctcaatgattatatttatagagcagctaagggtttgcagcctcctctccatcttctggctctaggacacagctgtgttctggggctgagaagtctcagcacaggctcctcctcacagttctagctacaaatgaactgccggatgaactgttctagtttttcctgattgtccaggctggcaaaagtaggggacaggtggagcctggggcctgcagggctcggcgtctgctgcagaacctgggccatggaagataagccgtgagtgcgctcaccacagggactgtgtacacatggcccaggggccaggcctgtcccccagaaacctgccttgagacctctggccccttagacctcaatgtttgcgtgcaaatgctgccgcaaagcagtcccaataccccacctagaaagatgagccagtgatttgggagaccaagaggcaggaaaccatcccaccttctccaacccatcaccaaatctgttgctggaagacaccaagtaaatcccagggtcttaatgaggcaccatcaggccagccctgtggagtgatggggacatagctgggtttccctgagctactctattggggtgggagcagggggacagaagatggtgacagtggctcctctcacccctaggtctctgaaggtccagacagcactgatggcgagctttgggtccgcacactctggaaagaagagagaagtgaaggctctaggtagggagaacagagagccactgggcacaggcttctctcctcttgtttaaagaagcccagggagggatagagctctgactggacagaagactgtactctgcagcctgccttcctagagttgggttgtcactgtcctgcagggggcagcagccaccagcaaacaccactgcctgcaggagcctgggctgactggttgggactcaccgaagatcccttcttcctgggcggtggcctgcaggaactggaacagctgctctgtgtagcccaactctgcagaagagagaagacctagacctggcacccagcacagacacagcctgcctcgaggactgcaagggaacaagggcctcaccagtatcgggcagctggccctggcggaggaaggcggcagcctgtgcaaaggccttgagcagcgggctgagcaggcggcagaggaaaagaaagaaatctgggcagtgtgactgctggctgagctggaggggacaggccggggtgagtgcagctccccaccgcctccctaccacctccctccaggggcagctttttgaaacacaccctgaagtaccggccgtcagcctctccgaagtcatcactgtcactatcagtaaagtccccactcggtttccacagcagctttctgctcaatcgctgtcgccctgtgtcacaggctggccgggagcctggggtctaggggccgtggagccattgttctctgacaagctggccagggatcaaccctacacccccagaccaggtacatgcaggtgaaaccagtaaaagcagaccta

SEQ ID NO: 95286 - DNA, 1248 bp, Homo sapiens
tcagccagcagtcacactgcccagatttctttcttttcctctgccgcctgctcagcccgctgctcaaggcctttgcacaggctgccgccttcctccgccagggccagctgcccgatactggtgaggcccttgttcccttgcagtcctcgaggcaggctgtgtctgtgctgggtgccaggtctaggtcttctctcttctgcagagttgggctacacagagcagctgttccagttcctgcaggccaccgcccaggaagaagggatcttcggtgagtcccaaccagtcagcccaggctcctgcaggcagtggtgtttgctggtggctgctgccccctgcaggacagtgacaacccaactctaggaaggcaggctgcagagtacagtcttctgtccagtcagagctctatccctccctgggcttctttaaacaagaggagagaagcctgtgcccagtggctctctgttctccctacctagagccttcacttctctcttctttccagagtgtgcggacccaaagctcgccatcagtgctgtctggaccttcagagacctaggggtgagaggagccactgtcaccatcttctgtccccctgctcccaccccaatagagtagctcagggaaacccagctatgtccccatcactccacagggctggcctgatggtgcctcattaagaccctgggatttacttggtgtcttccagcaacagatttggtgatgggttggagaaggtgggatggtttcctgcctcttggtctcccaaatcactggctcatctttctaggtggggtattgggactgctttgcggcagcatttgcacgcaaacattgaggtctaaggggccagaggtctcaaggcaggtttctgggggacaggcctggcccctgggccatgtgtacacagtccctgtggtgagcgcactcacggcttatcttccatggcccaggttctgcagcagacgccgagccctgcaggccccaggctccacctgtcccctacttttgccagcctggacaatcaggaaaaactagaacagttcatccggcagttcatttgtagctagaactgtgaggaggagcctgtgctgagacttctcagccccagaacacagctgtgtcctagagccagaagatggagaggaggctgcaaacccttagctgctctataaatataatcattgaggcttgattgtcccttgccatctcttgctttttcccttctttgatgtgataaacaaggggacg

SEQ ID NO: 95287 - DNA, 1026 bp, Homo sapiens
gtagggggtgcaatgtggtggggacctgggcggtggggggggtggcgatgtgtggccctgctgcctagccctgctctgcccacccagggtgtgttcctgtcgcagctcctgggggagttctcctggctgacggaggagatactgttgcgtggctttgatgtaggcttctctgggcagctgcggagcctgctgcagcactcactgagcctgctgcgggcgcacgtggccctgctgcgcatccgtcagggtgacttgctggtggtgccgcagcctggcccaggcctcacacacctggcacaactgagtgctgagctgctgcccgtcttcctgagcgaggctgtgggcggtgagtcttgaggtgcacggggtaggtgggatgtgtgtgcagtggtgaagggaacggctccttcttcataatggaccctccgcccccagcctgtgcagtgcgggggctgctggcaggcagagtgccgccccaggggccctgggagctgcagggcatattgctgctgagccagaatgagctgtaccgccagatcctgctgctgatgcacctgctgccgcaagacctgctgctgctaaaggtcaggcctcccctacggcccacttggtcctaggccttcccctcttggtggtaggaatggcccatccctgcccatgctctacctctgaaacctcctgggtagtaggtgtggccttgcccggtctttggctaggcccctgcccatgtgcctggctctcctgaggccacatgggtgcctttttctcccagccctgccagtcttcctactgctactgtcaggaggtgctggaccggctcatccaatgcgggctcctggttgctgaggaggtaggcagggcagttggagacaagatccttgcctggagcctggcctcctccagcctcccaccctgagtgccagctgccccaggctcctcctctgccccgtgtgtgctgtgggggtgggcagcccctggccttgcagcggggaagcctagctcgcacctctgctccctgtgccttgg

SEQ ID NO: 95288 - DNA, 1135 bp, Homo sapiens
gctggactctcctcctgggttgctggatagtgtttaccagagtgggctgcagcctgccttcaccaccgcctcccatccccacattttgccagcacaggttggagcctatgttagatgcagcacactgttccagggaaacggagggtaaacgagatatgcgcggctgcaaggaggaaggaacagggctgagacagaataccaggaaggggacaaagagcctgtaagccagagccaagaggaagaaaaggcgaacaagaatgaggcgaacagtcttgctagagggaatagcctgagctttggccctgggcaggaaaggactaggtttgctccagaagctgacgtggttggaagccagcaagtgaggggtcgagagctgtgggaggtgaaatcgagaggcagaagggatcaaatcatgtaaggccgtgcaagtttggactggatctccaagtgcagtgaaaaccagttgcaaggttttaagtgggaagtgacatcatgaattggggtcaagagtggagaccagaagggcatctggaaggctgttttgttaatccaggtgagagatcatggtggacagtagaggttgaaaagtggattgagaggtcgaggtgatattaacaggactcactgagggattggacagtgggaacaggggcagtgagggaagtaggagaagttacaggacagccccgtttctagcctactttctggtggtatggacagagaacaggctttgggagaagtgagttggcccaaaaaggtagtttggagagagagagttttggtacctgacatgcttgtggagacactgaggaggcagctgcatataggagcctggagctcagaagagaggttggggccagagacactgcgaggctttagcatacagatggtgtttaaagccaaggagatgaatgagtccctgagtacaggtgggcttgggggcagcatgtgtcaagctcagctgtcttgaatgtgctgagtggccaactgagcaaggacagaaagtagaggttgttggtgaccttgaccagccctctgctgttctagtctcttgatctgcctaccttgacatcagccatcagcctccctttctgtgtttccttccctccaagcctagctcagattgcaggctcgg

SEQ ID NO: 95289 - DNA, 1388 bp, Homo sapiens
cacattaacaaaggaaatgacactgggaggcctgacttgtttttcatgactgcaactgtctcttgatgatcttctctcctttctaatcgtccccagctcagaattttgctagagccgaaccccagcttggaggagcgtaagccctgggataacttctttaatcagaatctggcctgagtccctgctcgaagctcaagcacccggggcctcgcggccgcctgcagtactcccctcccaccgcgggccagggccgactggaaaacggagcaggccatccccagagcacgggtcccgtggccacgttgagtgtcgcagagtacgggacgcagggcggggcttctggaccagcgcgcatcccaattggctctcggggctgccttttagccggacgcgcggaggtgggcaatccgctccttcccttgagcagtccacgccttgtggcggctttgcggagctgctgctttggcgggagttggaagctggtgtgaggtgagaggcgcggtggtcgctccccggcgaggccaggtcagaaggggaccgggatcatccaggggctttcctgcttcaagagcctggtctgagcggcctgttggggactgggcggaagtcgaaagggagggagtgccggccatgcgggtcttgtggcgggaatgagtccttgtggggcgtggtgttgtggagagccccgctttgcctcttcctcggcatcccgttcccctacatccagagagggcatccaggacctgatgtcgggcaggtgcccttcgcacatcttggggtagctcggggagcgcctgtcacgggtctgacgaggaagctgaggcctgaggggccctgggcgggggctgtggggcgccgaggccatgtttgagcagagccgggaaggtgaagttctcttgcggctctctgtagggcacaagcattccaaacgtgggggcaggtttagagttttacccttgatcaagggctgaacgctcagatgtgcacaggctcaggcgtcagtgataatcaaggtggaggcaaacgggagggctcctgctgtcgggctaaagggacagtggcggccagctgagccctgtggggtgtgtgctcagagatgccagagctcagctttttccattacagccgcgactggaaaccttgattttcaaaaaatgtatatgtaacaagccctctgctgttcaacgttggttttacatcataaggttttagcacgttgtgtagtcaaagaagtgtgtgtgtgtgtatatatatgtatatatgtattatatgtatatatgtgtgtgtatatatgtatatatgtattatatatgtatatatgtgtgtgtatatatatgtatatatgtattatatatgtatatatgtgtgtgtatatatatgtgtctatg

SEQ ID NO: 95290 - DNA, 2028 bp, Homo sapiens
cctggacagcacaggcctagtgactgtacttttggttgtaagggtggcagtggctggcatgaaccagaacaggggtttgtttgtgacaatgacaaggagaccgctaacccctgctgatctgtgtgtccagttttatttctcttttttctaatttttttatttccatacataccctgcttgtatatcaagctcttttctaatcagggatcctcaaatgacaggagttgacctctgattgtgtttgtgcatttcaaagcccagagctgtgacctcagccacggtgggcaggatgggtgctggagaagggcattaaggctcccagctttgtgggggaaatggcatcttcttgagtgagtggggaagtgcaaatagaatatgcacaagctaggaaggacatttttaaagcctgtgcttcgaacattcttcctctaaaggatcaggtgagctggctcagagcagggagccaaccgccgagccagggtgagagggctttgtatttggagagtgaaaagaatacggttgtttaggctttggactcagagcatcagaaactcaggagaaatgagatcagctgaaaaagaaatgggtttgatgttgtagaccaaacatgaacagtggggaacaggctgaaaaacgaggggggaacagtcagcagcttccacggcttctcccaaatggagggaagtggggccagctcaggggacaggctggaggcttatgacggaaagatggtggggtccaggtgtggcaggacaggaggcaaagctgggggctgctatgggacagagggggcagagggaaagttgtgctgctaatggggtcacaagagtcacttatggcctggggccttcaagaaccaagggaagccctcccagagcccagcaccaccacaagcaatgctcacggctccagccagcaagacttggggtagcagcccccagcctctctccccatattggggacaaaagagaactggagaagccagagagagggagctggccaagcatttccggagggcacagcccaggcctccaccatcctctccccatgtgtgctcaacccttaaacactttgctaagcattacaggtcaggcccctcccctgtgtgttcaaccctttaacactttgctaagcattacaggagttcttctgctagaagtggccaatcaaatgtccctgggcttggctcttggtccatggcaacattccttgcttttggagagggtgtggggtccaggagctaagtgtacccttcagccaagtcatatatcctctcactcaacctcacaataatcattccaggtggtatcattcttacccattttacaaaggtgaggttgaccctgtgtaatagtcagggtaggcttggttacgctgctgtaacacacagctctaaacatctcataacttaacacagtagtttacctctcactcccactcatgggggctggcgagggaatctgctccatgcaggtcgctcagggattcaggctgattgaggctctgctgtctggaacagtggcctctgccaactccctggcaggggaagacacagatggaggtgcgtactggcttctttagaatttggcatgatcctgcctaactagaaaggtgctgagtagtctgaggaacatctgggctgtctgaggatcccctagtcccctagattgggaagtgggagcgaggcttaactgaagcgtgtctaatgtcaaagtccttgctgtcagccccgccttatgcagcttcccccctaaaccactgtgaaaacgtgtgagctctgtggtaatgtgccaattccaggggtgtcaacaccatgacccccagatattctcatacactgcctccttagcccatcccaggcaaagagggctctgcaaaccagggaccctgcgaggccaggggacagtgggattatactgccccatcccctctggcctgcctcccgcccttccagcctgctcactgtgtccctgctgagtcccatgactctcagctgccctcaggatcctgcctccgaagagtcctttc

SEQ ID NO: 95291 - DNA, 1293 bp, Homo sapiens
ttcagaaggctaaagtcagaggaatgggggctgggccactcccttggagctctcagatctacagacaagctgtgtgaatgcatagatgtaatcttgtctcaaatactaatacagtggagatttggtttatgttaccattaagttcctctaaaaagtttttcttcctctcttcagagccaaaataaaagtgaactacactgttcagataaggtcacaatctgatgctgtcagtttgaccgagctggttttgcttatggtcatgctgcaatttgttagaataatagggatcaagttttaaatcctcctccttcccttttttctggagtcttgagggccagagtttttgtttttgtttttgtttttgttttcctgcttgctactgttttgtggtgttgaaaagtggtttaaacctgagactaacttaaacacttccttgaccttcttgttgcctgttcatttttgtgccaaggaagtagctgccccagtgtatgtcttgccttctccgcgtcattgttggaagaggagagatgcatcgagcagtcccagctgcttttcatttattacttcttctttccaggacctgacagaagtcagggaagagtccctgggttatgtccaaacttagcacctgcaattgttgggatgtggatggatgtgtgcataagagagagagagaatatgtgtgtgtgtgtgtgcgtctgcgagcgcacacacatgcacaagtgcgaaggagttgcggttgctccatgttctgacttagggcaatttgattctgcacttggggtctgtctgtacagttactcatgtcattgtaatgatttcactcctaactgtgacatttttatcaaatgtgtgaataaatacataaagattggtacaaaaaaaagtgtttgtctttggacaaatggtggtggaaaaatcttgcatattggacttaccatttctttctgatcacaaagttgaaaagaattttactctgagagttgggaggtggaagtggcagggcttgttcattcttggtagatagtggctgacacagtttgcctagaccacgagccctttccaagtgacctgcttggcaactgaaaataaaccacctatgtccacttccctagcttgatatactgacccatatcctttccctttaaaaaaagatcactttggagggagcagtgctagagcttagcagacggtagaaatcaggagggacagaagcaggcctgaggtctagggttgaggttgaggagagggtcaagtcagcgctcttggcggaggggcagtcctgctggcatg

SEQ ID NO: 95292 - DNA, 1365 bp, Homo sapiens
tgtgtttgtagtagagacagggtttcaccatgttgatcaggctggttttgagctcctgacctcgtgatccaccctcttctgcctcccagtgttgagattacagtcgtgagccaccacgccctgcagcacttgacactttgtaatctttatagccaacctcgagataggtactattattatttccattttatagatttagaaataggaactggttaaataataatctagttagtgagtgttggactaagattcaaactcaggaactcagtttttattgactatactgtgtcctgtttatatactacatactgtggtttactgtataaccttcttgcacagacctttgtgtggacacttcatttcacagggctgactaaccacctcaccatggctctttttcccctttacagatctattaatgagatgaagcggttggaagaaatgtcaaatatgtttcagagctctggagtccagcaccaccctccagaaccaaaagcccaaacagaagggaatgaagattcagagggcaaagagcaacgttgggaaatggtgatggataagaaacactttaagctgtggcggcgcccaattacaggcacccacctttaccagtaccgaggtgagcccagtgtggctatcttttgggttccatagttgcacaggtgcatgggatttctgttcttcatacttctctaaactgttctggttgtttctcagaaaatttgccgtagttttttgtttattgtttttcttctcccagatgacaaatgtctcagtgttgtctttgcttacatcctctttgtctttctttgttgctctactaagacttctagtttctgaacctgcctttaagatctcttagtactttagatctgaaacgccgctaggtgaaagaaacaaggcgagtgactggagtatggccagcatcccttattctttcttttcattctagtttttggaacctacacagatgtgacacctcggcagttcttcaatgttcaggtgagttaatttttctctccagatttggagcctcctagcatatcaattgctactgtctacatgaatcatttatctgactcaggtgacattggcttaagtacatccatctatctacctgtcatccacattgcatagcatttaggtaaacatttgacttagaatttctttatctgtcccatggggatgagatcagttttaccctcccacaggactgttgggaatatcagatagaggaatggatatgaatactttaatgtattttatgaggctttattgtttttttccccaaacaacttaagagtaagttacatacatcatagtcctttactcctaaattcttccagtgtgtatttcctaaaacta

SEQ ID NO: 95293 - DNA, 1026 bp, Homo sapiens
ttagttattgttgaaggatgctttatagacctcaaaaatgctgtaatcgatgccctatggtgcctgattgttctctgagcaaatctagctatggttttgcttttgctcttcttctgcaacatctaaatgcctatcctaaggttccttctctgtttctctatggttttgcagctggtcagggttcttggttgtaacaaagaaactggtcttggttaatttaagccaaaaaggaattaatcaaaacggtattaggtcactcagtattgacaaggccagggtacaggttgaccaagacctgcagcaggaataatctacttagagcagtgttgctggcattctttcccccagattggttgtactcctggactcccagctccctcaagatcctgtgcctttgtgttatcttcaagatgcaaagccccttctagaagtctctaacctcacttaaattaggagctgtgctttaactgcttgtgggcgggaggggggctgcattcacctatttgggttctttccaaatagaaagggatttcaggcagtcaaaatgacaaatattcccctatataaatattttcatccaagtccaaagcttaaaattcagcaaattcaattttagaactaataggacttcaagaaataacgtcctcactttaaaggtaaaataaaataagatcacacagctggtcagctgtagagccaggactagaacacaaatctttagacttaccattattttgaattgctctaaacttttaatcttggattgacactatacctttgaatttttggcttttgcagcaatatattaatgcaatatatatatatttttgagacagtttcactctcacccaggctggagtgcagtggcacgatctcaactcactgcaacctccatctcctgggttcaacagattcttgtgcctcagcctgctgagtagctgggattacaggcgcaggccaccatgcctggctaatttttttttgtagtgctgggattacaggtgtgagccgttgcacctggccaat

SEQ ID NO: 95294 - DNA, 3125 bp, Homo sapiens
tttgaattgtggtgtgcctactccagctcccaagctgcatgaccctatttgctccttaagacagatggaatctgactggcctagatcaggtcagactgctgtccccaacctcaggccaggaatcccatggtcaagagagctcctccttgcagagtctggggccaggcaggttctctgagaatggggtttgggtagagaggctgtgattgggtcctcaagcatcctagctgtggagtgctcactaattccccttctgtgctgtccctctgtctcctagttctgcagtgtgccaccgtcattggcttttcttattgggcttctgaactcatcttggcccagcagcagcagcataagaagtaccatggatcccaggtctatgtcaccttcgccgttagcttctacctggtggcaggagctggtggagcctcaatcctggccacggcagccaacctcctgcgccactaccccacagaggaagaggagcaggcgctggagctgctctcagagatggaagagaacgagccctacccggcggaatatgaggtcatcaaccagttccagccaccccctgcttacacaccctaatgccagccctgggctctcttcctcggcagcccctccctcaactctgcagctcctctcgcacccagaggagctcctttccccagcaggcctcactggtaggatcctgaccatcttctccaaaccttccccaggagagactctgcctttagggtcatccaagtatccctgctctcagaaccggaggtccactggttttctataatgtactctttccctcctgccacatcctgcccccttcacattcacgagtcattaccagccagggaaggtcatccaagtttcctccagcatgggcgatatctttgggaccgagactttccttggagagctgctgagagcggacagtcccaaaaacaagtgtcaaagggcccaagggaaaggggactgtgccctggaggctcacttcacagggatcagtgtttgctccacagctgtagctctgggctgacgccccccagaccccttccttctcggagtgacccgcccccaggccacctgctccggggagttctgtgcactttactctttggacttctcctcacgtgtgccctggttttatggggagagggaatcgctgttgggaaggcagagcagttgcaaccctctctgcccttgcttcatgtggctggagcccaggcaaggagagcaggagccagcgtgagactgaggccccctggtgcctatcaaggaccagagtgaaggggactacatctcccagcccttcaccttttaaatatgagtggttttaaaaggaaaaaaatgaaaccaggcaacagcaacaatattctgtttttaaaatagggacaagactgttgtcactttttagacatgtatcccattccttttggctctgcaatatttggggctgtagctccttccaagcccatggtagtccctccccgagtctctcccagtagaatgcagcctcccttccctggccccttccctctcagtgacggtgactccctggggccttctcgtggaacccagaggggctgaggactgtggcctggctggcgggccagcgtggtgctcctcaggactgcagcactgagatggaacctggcctcagtttaggaacaggggccacaacagggcaggaacccaccaccctccacataggaatacaaccagtggggccacatcatgtgaggcatcagacccacactgtcagcccagcaggccgggctgtgtccttcagacccagtgctgccctagactctgactcgggactccagcttgccacgtgccctctcccctcttgaatgtactctggtcttgcagtgtgctgctgggactttcttgctcagccatcactctggtcaccttgtttgctctgggtctggctgaattttctgccctgagatctgggcataaagtggatgaaacttgaaagaccttcagtgtagatccagatggccaacctgtccttgttaagttacttgcttcttgggaatcagtgtcccctgctgagctgaaaaggaaatggattccaatctcttccaacctttaaggtgatagatagtttgagcaagactggagaatggacaacactatgaagctgtggctagaaagggactgtcatgtcccatcctttggccagattgactggggatgtccggacagatgcctgcatgggtggtgagggccacatctgcacacgagccagtggctgcttgcagttcactgctgtgatgccagagtgtgttcaaaggtgactctcctgctcttctggactcttctctcaggcaagaaaggctgcaggctgcctgctatgtgatgcctgagcacaaagccaaggaactgaactaagtctttctgttaagtcctgagtttgtcattggcaggtttacttgtggccagctctctctgcccttgggtgtctgagcaggcagaccagaagaccaggcactggacctgcatgccaaagggactggtcatctcctgaggacctgtaaatgaccctgtggactgttccgcacgatccggaacccactttttattcactccccatgtctttggccttcctcttctttctctttccctctgccatcctgacactgatagtttgtcatataaattccccgggttgtgtttttttttctagaaaaaaattaaaagggaaaacaaaaccaaaaaaaccagaaaccacgaataagaatggaaatgacaatggctgcctgtcatttttctgtcacgattttcctgatttggtttgttccctttgtctcagagaagcaggagatgttgatgaggctgtatttttttttctttttcttgtttttgagacaagagtctcgctctgtcacccgggctggagtgtaacgtggcatgatctcagctcactgcaacctctgcctcctgggttcaagcgattatcctgcctcagcctcctgagtagctgggattacaggcatgcgccactatgcccagataatttttttgtatttttagtagagacagggtttcaccatgttggccaggctggtctggaactcctaacctcaggttatccacccaccttggcctcccaaagtgct

SEQ ID NO: 95295 - DNA, 1053 bp, Homo sapiens
aatcatggcctggtttctttttggttcagcctttattctaccctatgcttctgggagcttttgcagtttgcatagttatcaaaggagacagacagtatcatctagttttttgtttttttgttttgttttttgtttttgagatggagtctcgctctgtcgccaggctggagtgcagtgacacgatgtcggctcactgcaacctccgtctccagggttcaagcgattctcctgcctcagccccccgagtagctgggactacaggcgcgcgccaccacggccggctaatttttgtatttttagtagagacggggtttcaccatgttggccacgctgatgtcgaactcctgacctcaggtgatccacccgcctcggcctcccaaagtgccaggattataggcgtgagccactgtgcctggtagtgtcgtctagttgaaatgtttttttaaagaatggctaaagtactggagggaaatacaagttgctgtgtgtctgctgcgtggttgttgtcatgggctctccctgcaccatgacccccaggaaccccttgagtgctgtgtcttttctttcagcctcttccttttccttcatttatgcccttgacgtgtgcacgttggcactgtccaaggcttctggggcttttgtggtataaatgtggtggcttcctagcttttcctgttgatggcttgtccccagctctgccgagtctgctgagtcccttttaggtaggtctatttccctttactttccagtttttggaaccttgttttatacctccctttctttttgtgtgggttgccttttaaaagaattcttttgttctcgtagagttcagggagggagctaaactaaatgtgatatagtctaccaactttcctaatctatgtaatactttcttgtagctgcacatttctctaaactgccgcaacttccttcttcctcttttctttattttacttttttttaaaattgtggtaaaatatacataacataaaacttagcattttaactttttttttttttttttttgagacagagtttctctcttgttgccca

SEQ ID NO: 95296 - DNA, 1976 bp, Homo sapiens
ccggcgggcgccggcggaggagcccgggaggcagcgctctgcccaagcagccggagcgtagcctggcctcggccctgcctggcgccctgtctatcacggcgctgtgcactgccctcgccgagcccgcctggttgcacatccacggaggcacctgttcgcgccaggagctgggggtctccgacgtgttgggctatgtgcacccggacctgctgaaaggtgagggtgctgcgcgctggcccttaaagcctcggtgggggacagaatgtgttctggctgaagcagagatagccagggaccagacacttggttgaaggaaacggccccataactgcctggtgttcatgcccaccaggtggctctgtttggggtccggcccctcattaattctgatgttattcagctaagcacctactcctcacagccatgttaatccggactgctgctattttaggattctgctggaggaaggacgctgtgtatcgagaaaagataagggtgctaggtatcacagttagctggcctcttctaaggatcctgtgaaatacggaaaagcttctttggggcagactgattaatggagaaaaaggaacttttaatatgactaggttttaaaagatatcttagagttctatggtaatcggatgcgtattagagaagaagggaatctgtggcattttaggtaatcggaagaccgttccattgccacccgcagtacaacagtcggaatgtggctcttggaaccattataggtgtgcctgacagaggcaaggttgctttgttcatcatcatgctttccggccagatagacagcagacgatgggagggtcctatgggccccatagtttatcctgcccattcttgtctccagtaaaaattgtgaagtgtgaggacaggactggactgtatcacctgctttttaccctaacaatgatcaatgtaccccaaacagtccttagtaacagcatagttcatcaaccccaaggtcttttgagccatcttgaaggtcttatatcctctctgtgctatcctgtctgtgctattccctggctgtgatgcattccagatgtttactgcaccgcctatcagaagcacttcctgttagatatctgcgtgttacctcctgaagaattcaggcactgggatttggtgaaaaggtccaagttccccgctgtgcatcggaccatactctgcttctgcaggtctaggctgaaaagcctcatccttgtggccaaatgttgcctttctctgagtgttctcttactgttttgcatctctcttgagttttagaagctgtagggtgattttgtagaaggttggggacaactggttgtttccagatttcaccttaatggtactctttgctgggttggctcattaaagccaaagttatgcacacgacagaggccttatatgcagccttttctctgtcatgttgctaatggcacaaagagcattaagcttgagtgagtcttggtggtttttcttttagcacattgccctgtacttgctttctttgaagcacacataccaccttcccaccactagacccatcagatctagaaagctagatctccgaaatctagcactgcatggggtgtgcttagctgtggctcagaaaaatgaaggatctccccaaggctacccagtttagggtggcagagctgggactaccccacctctgttgatgccaatataaaatgatgccgtgtcatttatagtttttatcctttgttttacttcagctgtcataaggagcaatctcataattatttcactttggtgtgcatccttgtcgaaggcatgttaaaaataaaagtaaatttttgagccgggcgtggtggcaggcatctgtaattccagctacttgggaggctgaagcaggagaatcgcttgaacttgggaggccgaggttgcagtgagctgagatcgcgccattgcgctccagcctgggcaacaagagcgaaactccatctcaa

SEQ ID NO: 95297 - DNA, 1962 bp, Homo sapiens
gcttggcctttgacccgagtggccagcgcctggcgtcttgtagtgatgaccgtactgtgcgtatctggcgtcagtatctaccaggcaatgaacaaggtgaggtccattagtagagctaaagaagacccatctctcaaggggttcacagtctgctaagacacgtacatgagtcagagcaaatgggggtaaaaggtaagatgtgctacaagagggctctggatagagtgctggaagaatcaggaaagttttgtagaatgggttgtttcatctgaatttaaaagggtatgtaggattttaacatgagaatttcacgtgagaattcaagtgaaaactcaacagtgtgagtaaagataacaatggcgggaatgcttagactgaggggtggtaatgcatttaaatggggcataggacgtctggggtttggagaggaataaagtgggttgggtcggctggtgggtggccttcacaggcacgcaaagtagttacatacagtctgcaacagaacagggatgtttcctcggaattctgcttgagaaacgccagtctggctatagtgtgtaaggcagataagcagggatggggacacgaacggagacacagactcataatcagttgaagatgagggtgagggaaggtaagttaggttctcctttgaggtgcccaggacataggaacgtttaagggcaagagaagtctgtcttgcaggggtggcatgcagcggctctgaccccagttggaaatgtatctgtactttgtccggcttccactcaaggaccatttatgacattgcttggtaagactccatccccccaccccatcccatccccataaatcagggattttagagaaggcataccctatgcagtcctctgcaaccctgggggagtgcttgggaattgagggcagccacccccattccttatcaggcctgactctaccatgctggtttacagctggctgggctggcattcacaggagcagagaacagtcccaggctgtgagggtagcaccagcgctagaggttcgcacagctcgtgctgtccagaagttattattgaatctgcattcgtggctgagggtttttttttgtttttttgttttttgagacagagtctcactctgcagcccaggctggagtgcggtggcgtgatctcatctcactgcaagctccgtctcccgggttcacaccattctcctgcctcagcctcccaagtagctgggattacaggcgcccgccaccatgcctggctaattttttatttttagtagagacggggtttcaccgcgttagccaggatggtctcgatctcctgacctcatgatccgcccaccttggcctcccaaagtgctgggattacaggcatgagccaccgcacctggcagtggctggggtttttataggtaacactgactctggccttgtggaagctggaaaagctgcaccattcatataggagagtaggttagagggtagttctggccctgagaattgatccctaggaaatccaaaacagtgaaaaaaactgagcacttaagcttgctttatattagcaaacatttgggaatcacctattcaacaaaagtgaacttaagtaaattatggtagaactcagcttgttgtatcactgtttaaagaaaggggttaagaatactttatgatggggccaggcgctgtggctcacgcctgtaatcccaacactttgggaggccaaggtgagtgaatcatgaggtcaggagttcaagaccagcctgaccaacatggtgaaaccccgtctctactaaaaatacaaaaattagctgggcgtgttggcacgcacccaatcccagctactcagaggctgaggcaggagaatcgcttgaacccgggaggcggaggttgcagtgagccgagattgcgccactgcactccagcctggtgatggagcaagactccatctaaagaaaaaaaaaaaaaactttatg

SEQ ID NO: 95298 - DNA, 1019 bp, Homo sapiens
atttggtcttaggacctctttacactactaaaaactaagaaactcaggtttttgtttttttttttttctttttaaataacaaatttatttttcacagttctggaggttgccccaaaaagcttttattatctagattaaggttaatgcacttttaaatcataatgttaacattttttttcttaatagagacagagtttagccatgttgcccaggctgaccttgaattcctgagctcaagtgatccgcccacctcagcctcccagagtgctgggattacaggcatgagccaccatgcccagcccacgttaacattttttatgaagaataacttccaaaacaatccaaggagaagggtggcattttacagtctctttagtatcttgttataataaacagttgaattcttacagctgcttctacatccaaacttttttgttgaagtaagttgacttcacacagatacgcagttggaaaagtttttaaaatagccttttcagctaattgtggctattctttgataccacaccaagactacaagtgattttttttttttttttttttttttgaaatggagtctcgctctgtcacccaggctggagtccagtggcacgatctcgactcactgcaacctccacctcccgggttcaagctattctcctgcctcagcctcccgagtagctgggactacaagggatctgccaccacgcccggctaatttttgtaattttagtagagacggactttcaccatattggccaggctggtcttgaactcctgaccttgtgatccacccaccttggcctcccaaagtgttgggattacaggcgtgagccaccgcgcccggcttactacaagtcatagtttcttaaaggcaatgtagactccgaaaacttaatgcactcttatattgttaatacattaaaatccactggcctgtcttacacttttgaatcaatctttgagccatgcatgattttgtaacatcacgtactggtcacttggaaaaatggttcattgaa

SEQ ID NO: 95299 - DNA, 1042 bp, Homo sapiens
aggaaatgagccagaaccaacaaatgaattcatctacttaaaaaattaagtctgtttgagacaacttttgatagtattaaaatgttaaatctaattgtatttcgggaagaaactttggaaagctatctgatttttgttctctcttttgtaactgtaccattttcatggttgcctatggtcatcaagttttacatgctgaaattcttggttttggatcactgcagaaacgtgaagagggctggtgggtggtgattggagatgccaagtccaatagcctcatctccatcaagaggctgaccttgcagcagaaggccaaggtgagtgtgtccactggccctagcatttgttctggcatgggggaagggtgagaatgcttcctgtgtccatgctcatcttgatttctgcctgctctttctaggtgaagttggactttgtggccccagccactggtgcccacaactacactctgtacttcatgagtgacgcttacatgggatgtgaccaggagtacaaattcagcgtggatgtgaaagaagctgagacagacagtgattcagattgagtcctgaggcatttacttttgggtaaaggagagttgagcctgaattaggaatgtgtacattgtaggaatcctggttgtggggaccaggtctgtgggcctcaggtctggccagccagggctggtgctgtccccgcctacctccacttcctttcccttgctcactctggatccagtgacagcaggtgtcatgggtcaagcataaatcatatatagcattttcaggcatgttcctggtagttcttttgagtctgacattctaataaaataatttgtagaaaccatttgtctttgtagtgattccaaattaaaagttttctttctccaacctgagggcacggccaaaaagatctggttattttttagccaggaacgtgcttgttaatgagtatgtctggaggacagacctgctcattaggtgtgctgtcccctgtagcctcgtgagtcagcccagaggagggtacatgcgactgtggcctggcc

SEQ ID NO: 95300 - DNA, 1680 bp, Homo sapiens
atccacccacctcagcctcccaaagtgctgggattacaggtgtgagttatagtgcctggcccaacgcttaataactttttcctgaaatgcagattagtttgaaatgaattttatttacgggttcatttttaatgtttgaacctgcttctaggtagggttaaagttgggtgacttgatgactcacgaaatacacaactatgaagtttggaaagtgtggtggtatgcacctgtagtcccacctgctctggaggctaaagtgagaggatcacttgagcctaggaggtaaaggctgcagtgagccgtggctgtgccactgcactccagtatggacagcagagcaagaccctgtatcaaaaaacaaataaaaacaataataattttttttaattaaaggagaaaagtttgggaagtttgacttacatatttgatcctcgaatagggagttattttggttttggcattagatagttttgtagcttggttcatggcacttgagcagcaaattcatggcccttacactgaatactaaaatgttatacaggccagccagtgaagctagttgtaagtgcagagattcataaacagagtcgtcccgtgatttgtccgtgtctccccgtattaacattttactcttacttggcgaagggagttgggcttcctgagcatggtctccgtgttgaggtggcttttccttctttccctgcttctgtcaccagctatgtggattaccccatctatgacgtgcttcagatggtgggccacgccaaccgccctttgcaggacgatgaggggcgctgtgtcatcatgtgtcagggctccaagaaggtcagtcctagactcatggagcctcttggatccgtagcctcagaatggattctttaatctttcttttgatagatgtcttcagtaactttagtctcttaacttctgcctctcttatttacacaattcttttgtgacgagcctgccacccacatggaattttgctgccttttgcttttgctgctgccgttggctccacgtgttgaggtcttcaccctctacttggttctctccttcctccttgggctgctcactgctctgccctcgtgacttgctgtacctctgttcccactgcgtattgtcaccagtgatgcactttctaaatgtgtggcttcttccattttggtattagttaggtctcacacagggaccatgccctgttgatttgcccttggccctctgtgaccgtgttgtcactaattctttattactccttctccctctccaacccacaggatttcttcaagaagttcttatatgagccattgccagtagaatctcacctggaccactgtatgcatgaccacttcaatgctgagatcgtcaccaagaccattgagaacaagcaggatgctgtggactacctcacctggacctttctgtaccgccgcatgacacagaaccccaattactacaacctgcagggtcagtgggcttgggagcacacgtgatcctttggtggttctcacagtctttgctgggcatcttcttgaggctccccactcacctctcgcctccataggcatctcccatcgtcacttgtcggaccacttgtcagagctggtggagcagaccctgagtgacctggagcagtccaagtgcatcagcatcgaggacgagatggacgtggcgcctctg

SEQ ID NO: 95301 - DNA, 1573 bp, Homo sapiens
aaccagatctcgtgagaactcattcactagacagtaccaagggtgggtggtgctaaaccattcatgagaactctgcctccattagccagtcatctcccaccaggcccttcctccaacactggagactacaggtcgacgagatttggtggagacacagatccaaaccgtctcaccaagatagttagactttagagattagcacagaggagagctctgattctcccttgagctcactcttgctggccactgtctcttgttgccctgtggcattttgtgcaaagatttacgttttaatactgtttattggagcctcattggagattcttctgccagaatcacttcctgtcactctttggcccttgaatctgcctgtttggggcatgcttagagtgatctctgttttgctggcatggctgagccagcccgtggctgcatgagtgttagcactttctggtcagaggagcagtccatcagctgtagttttgccttggtgttcctgggctttgggttctgttctatgatgacttgttttctcctggatagtcccagagcaaggcaccagcagcgtggagctacctcatagcaatgtgttagctctcattcatgttagaccttgttcctagccagccttgctgtgagttctgaaacatagcacagggtaagccacggcctgcccatgaggcagtgagcctacttcacccggagacccctgccctcagccttcctctcccctctactgctcaggggctatccaggtggtggtggcttctcggagtctctgctggggcatgaacgtggctgcccacctggtaatcatcatggatacccagtactacaatggcaagatccacgcgtgagtacaactggtgctctgtgttagcacagacctccttcctaaaatgaatgtgaatctgcagatacacagaaagtaagctaggatgaagaaaaggtgttagggaagttaacagctgagatgccaccagagccaagtgtttgagagttttgtgtctcaatacctaggctcacatttgctttttagtcattgtgcttccttattcagcagctgggagaggtaggaaattagagccaggaggaatgtttgacgttacgtcattaatctcagacatcttgtagattaggaaaagtgacttggtcgaggtcatacacctatatagtgacaagtaagaagctagaggagtgccgagcgcagtggctcatgcctgtaatcccagcactttgggaggctgaggcgggcggatcacttgaggtcaggagttcaagaccagtgtggctaacatagtgaaacccccgtctctactaaaaataacaaaaattagctgagtgtggtggcaggcgcctgtaatcccagctacttgggaagctgaggcaggagaatcagttaaacctgggaggcagaggctacagtgagctgagatcccaccattgcactctagcctgggcaacagagtgagactccaactcaaaaaaaaaaaaaaaaaaaaagcctgggtgtggtggctcacacctgtaatcccagcactttgggagggcaaggtgggcagatcacctgatg

SEQ ID NO: 95302 - DNA, 2328 bp, Homo sapiens
gcgctgtgtcatgtgaatttcccaagaagcatttcatctgtgattccgtatgaaggctttctaagccctgaaatttgcagggtcatttcctcagtttgtgtattaaagaaaagctgccccagccaagcgtggtggctcacgcctgtaatcccagcactttgggaggccgaggcgggcagatctccggagatcaggagttcgagaccagcctggccaacatggtgaaaccctgtctctactaaaaatacagaaattagctgggcgtggtggtgtgcgcctgtaatcccagctacttggaaggctgaggcaggagaatcgcttgaacccgggaggcggaggttgcagtgagccaagttcgcaccactgcactccagcctgggcaacaagagcgagacttcatctcaaaagaaaaaaaaaaaagaaaaagctgccccatcgcatcgcatagaggctgctatgggattagaacgtagcttgagatctgcaggtcaacaggtctgtttggcatctcaggttttcctcacataagtgaaagatgcctggtatggcctagtgttgttctgcctccctcctctgcccgccaggtatacatggactggtacgagaagttccaggacaggctcaacaagaaggtggtactcctgacaggcgagaccagcacagacctgaagctgctgggcaaagggaacattatcatcagcacccctgagaagtgggacatactttcccggcgatggaagcagcgcaagaacgtgcagaacatcaacctcttcgtggtggatgaggtccaccttatcgggggcgagaatggggtatggcgtgaccttgcagcacagatgagggactgggactgaccaagtggccttggcattggacctaatgtttgggtctgaggacggaggctcggggcttctccccagaggattctacctgctgccctattccaaagggacaatgttaacttttttggtagtactttaggaaaacagtattgtttagtggaggttggctgccgtggaggaggtagaaccaaacacatgagagctcctagttagaaggaagaatgaggtcattttgaggctgttgggctgttcacaaaggggacctccaggcagaggatgggagccttggcctgcagtgaccctccctccctccctctttccagcctgtcttagaagtgatctgctcccgaatgcgctacatctcctcccagattgagcggcccattcgcattgtggcactcagctcttcgctctccaatgccaaggatgtggcccactggctgggctgcagtgccacctccaccttcaacttccatcccaatgtgcgtcccgtccccttggagctgcacatccaggtaggacccactctcctcatccgtctgtggggtgtcacatagatcctgagtgacccaggtctgataaccttggtgtcttttcttctccccggtcgccagggcttcaacatcagccatacacaaacccgcctgctctccatggccaagcctgtgtaccatgctatcaccaagcactcgcccaagaagcctgtcattgtctttgtgccgtctcgcaagcagacccgcctcactgccattgacatcctcaccacctgtgcagcagacatccaacggcagaggtaggtggggcctggcgtctgggggttggggttaggttaagtgaggctggcctactccaagggtgtcctctttatgagggtggggttagcccatgttgcttggggccaggttctgcacagctggcaaagtgtctgccaggaattgaactactctgagctgagccagtgcctgtaccgcacaggttcttgcactgcaccgagaaggatctgattccgtacctggagaagctaagtgacagcacgctcaaggaaacgctgctaaatggggtgggctacctgcatgaggggctcagccccatggagcgacgcctggtggagcagctcttcagctcaggtaagtcaggccacggaaggggagcatagcaagggtatcaccaagtggtggtgttaaacttgaggggtgcgggtggcagtgttttctctacagcataccagagattttcaaaatactgtttaggactcttggctgttaactcatttgatcctcccaagaacctcgtgaggcaggtgagacaaacactatccctacttgccaggtgagaaaacaggcagacacatcaggttgtgctatttcagaacctggttttctagagtccaggacctttggccaccagaccgctgattctccgtggataccagactccccaagtgtattagtccgttcttgtattgctataaagaaatacctgatac

SEQ ID NO: 95303 - DNA, 1776 bp, Homo sapiens
ccagtttgcagtatagtaggcaggctgggctgcagcctcagtactctcatttccttgtaggggagcttatccgcatgccaaagatggggaagaccatccacaaatatgtccatctgtttcccaagttggagttgtcagtgcacctgcagcctatcacacgctccaccctgaaggtggagctgaccatcacgccagacttccagtgggatgaaaaggtgaggctttgctgggcagaggtgctggattggaggtgctcagtctacgttgctgggccgaggagatggattggaggcactcagtctacgttgactcacattccttttacccttgctcctgttggcaggtgcatggttcatccgaggctttttggattctggtggaggatgtggacagcgaggtgattctgcaccatgagtattttctcctcaaggccaagtacgcccaggacgagcacctcattacattcttcgtgcctgtctttgaaccgctgccccctcagtacttcatccgagtggtgtctgaccgctggctctgtgagtgtctcctctccagagtccccaggaacagtccctccaaggacagtagaagaatgtcttgcactttgtcccgggcttgcccttgctggggacagagtgatacatatgctgcctaggtttccagtgttcatggaggggatctagaggccagtgagggaaagagagcagtgcttatatccttcctgtttcttttctggcagcttgtgagacccagctgcctgtctccttccggcacctgatcttgccggagaagtacccccctccaaccgaacttttggacctgcagcccttgcccgtgtctgctctgagaaacagtgcctttgagagtctttaccaagataaatttcctttcttcaatcccatccagacccagggtaagtgtttccatccctcctctggaggcttttgaagtcaccgggagacagatgtgctctgtggcaggcaggggagtgggggtgctcaggcacttgggaggtctgggagctcctcagtgtgaccgctgggacccaccaggactttttcctttgtcagaagcctttggttgctttgctgctctgcatgtgtcactgtggaggggcaatagagcaaggccttacatggcatggtcatttctcgggcccaggaggcttagaggcctgcccctggcgctcaagtattgaaccagaaccatggggtggcactgaagcctcctcaccacatcatgataaataacggggacattcacagagcaggcactgtttcctcagtccatggctgagtacatcaccggtgttttctctcttattcctcccatcaagcctaaaaggaatctctattggagatactgccattagtgttccttttataggtgaggaactgaggcatagagggttccccagttgaaccaactgataaatagtagaacttggattttaattcagtcttgatgccagggataaggctcttactttctaccttaggctatttctaggaaacgcaggagagtgttgaaggggcagagaaagggatccagttcctttctgtcccgcatcctagtccctgagaagcaaagaagaatgtgtggcttcttttgctttgcttttgttgtcatcccacacatctccaggggacctgggctcttgatcttggcctcttcccctttaactgttaagtgggagcaggtaagggggtacagtagggctggcctggagttagaggcttggatgccttagctcctctgtctgcactccagaactgcctg

SEQ ID NO: 95304 - DNA, 1050 bp, Homo sapiens
gaggagaagctggagctgcagaagttgctggagagggtgcctatccctgtaaaggagagcattgaggaacccagtgctaaggtgagctcctctcctctttgctttgataaggatgaggattaagtggttttcataatcttctaaaagatgaaccttgaatttgggttcatgtgtggtttcctgctcagttctcctagtttttgcagccttctcgcatgttctttttatatgaaataacaattatttagtatttgtaaatcaagacctgtagcaaatctcacctggcctggatgctcagagcagaaatgtaattccctttcttggactgttcagtgattggtctcctgctggctgattttgcttctttacagatcaacgttcttctgcaagccttcatctcacagctgaaattggagggctttgcactgatggctgacatggtgtatgtcacacaggtgagagcggagttgtatggcagctgtgagaaggggcctgaacagttcaatccctgtgtgctgtgtgcatcctggggaaaggaggcccgaccctagtgagatgggaggagtgcttagttctgctcttgccgggtagttggttggtgcatgtgtggtacagccactctgtagtatacatcttgagcacgtgggaaaggtaagaccttaagagggaatgcttcgaggctccacgggccctcagagagacaggaagagccacagcacgcagtgtctgcttcccagcagcaaagtgatttcccactgttgctgcacagctcataaataaatccaaaaatggcacagggttttattagctgctcttcatctttacctctaagaacaggtcactggtaccctcaactcttcctagaactctaaatgctaaatgactcaaaagctttaaaatcatgcagtgaatgttaggttaaaatgttgtgcagtgaccttgagccgcagcactcttctaattgttccccatccggcaagcatctactatatggaacggagaaaggcgtaaagacagaggggactttgcctttgagttagggtgggtggt

SEQ ID NO: 95305 - DNA, 1085 bp, Homo sapiens
tcttgacatagcattcttggttcgctgtctctgatctagatgctgggacgtgccggaagaccccagtatgacaccaagggtgaaggcatactcatcacatctcatggggagctacagtactacctgtccctcctcaatcaacaacttcctattgaaagccagatggtttcaaagcttcctgacatgctcaatgcagaaatcgtgctaggaaatgtccagaatgccaaggtaggggaggactgcttgttgtgcttcatgctttccccgcagacaccaaggcaccaggagtgggtcggtccctattgtgctgcgggccagcagcgtccgaggccttccatccctgcacccacatcttgggtctggcagatagttccccttgttaccaagatcttagaagacgcttagatctttttaataatgaaatgctaaaaacattcagaatacgatgtaatatgcatccttgtagttgggaattaatttctaagcaattcatgggagcctgtcatttggacatcaagagtttctccatgctaagaaccatgagctgtgtcttgtaggatgcggtgaactggctgggctatgcctacctctatatccgaatgctgcgatccccaaccctctatggcatctctcatgatgacctcaagggagatcccctgctggaccagcgccgactagatctggttcatacagctgccctgatgctggacaagaacaatctggtcaagtacgacaagaagacgggcaacttccaggtgcgtggggtgagggttttgaggcaaaggtctcagcaaaagttgttggcccaggaaaaaatttttcagattgctctcttgatgtgagtactgcctatctaatcacctgttgcttagaacagcagaaaaatgggtagcttttcccataacttgaggtggataattcagctgtcttgtccgtgcagacatcatttcactatgggtcagcttattctgctgtttttcttcatgtgcctgggcctggcacttgtactgctgtgacttcatccagttgtcctattaggacaataatgacattgggtcatatactttaccaaaaaaaaagtacaa

SEQ ID NO: 95306 - DNA, 1030 bp, Homo sapiens
caaaactcagcccagatgaaatagataacatgaagagccctacaactattagagagttggagaattaaaaatccccccagcaagcaatccccagtcccagataattgttttgtgcattcgcattatccagggtccctccataaaagatttggggtcacttacactaaaaatgcaagacaataaaaagaggaaaatgaaaaactagagggcattttactagacagtgtgatagaatttttaaattgaaagtcgagttgagcaatgttaactaacaaaaaataaggaaaagtgactggttttgtatttctttttgtctgatgaaaagaagcatatgaatttatatgaagagacagatcttttcttggcactaaatactaggaagacttcattccctacaacagtgtactagtctcagacttatttcctaaatccttttataagtagtgtaatgttttagttgttattttgcagacacattttcatgcagctttgactcttgttaggtgcttgaacataaattctgagttgagaggcccgaatttgtagttgtagtctatttaaagttgctgttcaagataggatgttgaagttggtttaatttctcagctccaggactgtgaacttggtgggtgcattcccttaaaagtctttccagccgtgtttaggcttcctctgagcctgcacacattcctgcccttgcccctctccaggaccttggcttctggtggtgatggtgcaacttctgcttcctgctgcaggtgccctggggctgtgagtatctcgtgactgtagcaaactgtggcttctccttaggtgctggtgtttgtccactcccggaaggagactggaaagacagccagggccatccgggacatgtgcctagaaaaggacactctgggtctgtttctgagggagggctcagcctccacagaagtcctgcgaacagaagctgagcagtgcaaggtgaggaggggccagctgggttctctcattcctacctggcagctgtgtccatctcaggccccagaca

SEQ ID NO: 95307 - DNA, 2004 bp, Homo sapiens
agtgcgatctcttcattccggagtcaccacctgctttcccaggcatgcctctgtatagctcttttctccttagctgatcactgtttttgagtgttgattgtgtgtgtattagagagaggctatgatccagttgattgccattgtagcagcctaaggtgagaaatagaaagtagatatatctaataagtcgtgctaagcagtcattctatgtccactggaataaggctgaccttggttccaataggctctcggtttcaccccaaagccatttctctacccattgagctaatttagggtgacttgagggagaggttctgtggtgatgcaggatcagctccagatcatggttgagttggggtcatttccacaggaaggtgatgaagacgtatacggggaggttcgagaagaggcatctgatgatgacatggaaggggacgaggctgtcgtgcgctgcaccctctcggctaatgtaagttcagtttgctcttcctcattgctacaaggttacttctgggtgttagtgcttcttccccatgcctaggtcctgttacatttattgagccactttttgctggagtgaactataataaacacttagtgtctagagtttcttaaaatttctgtcggttttcttccttcccaaagatgtatgttgatgaaatcttagtctggtgtgcttctgaactcaatattccagagttttttcctctggaaagtcctcacaagaaggtgggctatggattgtcaagtagaacttggttgcagggtggtggcaaagtgatcgaggctggcagagacctggtgagctaaatgcctggttacttttatagctcgtagcctcaggtgaactgatgagttccaagaagaaggatttgcaccctcgggatattgatgcattttggctgcagcggcagctcagtcgtttctatgatgatgccatcgtgtcgcagaagaaggcagatgaagtattggagattttgaaggtatggccaagatgacaatagttgtatatttagtgtatcttagcacatggggacagcgtatgaagtggcagatggctttggccttaatggtggtgttacctgctctctgcagacggccagtgatgatcgggaatgtgaaaatcagctggttctgctgcttggtttcaacacctttgatttcattaaagtgttgcggcagcacaggatgatgagtgagtatatggtggggtcttcctgcagagtgagtacatatgtgtgcatgtgtgacatagagattctgttgttttcacagcctaagtgcttgtttcttttatttttcttctttctaccctgaggatggttttttgccttatttcctcctcctcacttcctttgttccttttgttgtgggtagttttatactgtaccttgctggccagtgcacaaagtgaagctgaaaaggaaaggattatgggaaagatggaagctgacccagagctatccaagttcctctaccagcttcatgaaaccgagaaggaggatctgatccgagtaaggactgggttggtttatctgtctgatttctgagctaacggtggctagaagattgcagcatgaagctaaattcatgttaaaagtggaagttgaaaaagtaatttcctaaattctttggggtttatcagtgcatacaggttagaatcaacacatccacattggtttggtcatgagaccagtgacctgctgctatctttcaccagcactgtggggacctttattgtttatttacacagtaaatccatggtgtttactaaaatagagtaacagaacacatgtacttgcttaatggaacccacccttcgacccctcaggggtagcccttggtacttaattatagaacgtgtatttgtggcatccttgtactgcgcattgcccctttaaaagtgtttgtttgctttgatcattctggtggtccccatgtaaagcactgtctttctgtttcacgacttactagtcagcacctgtgactcaagtattagctaag

SEQ ID NO: 95308 - DNA, 1057 bp, Homo sapiens
tagaatccatgttcctaaccattacacatgtgtgattagattggggaccattatgagtctgaggagctctgttgaggtgggtgctagaggaagtgaggacaaagaattacaaaagtgtggcaagctagaggaggtctgccaagtgactaccacctggagtgtggcaagctgttgtggaagctgtgtcctgctgcttgaggccacctagctaatctttttaaaaacagacaagtcttcctttagttgtggcatcagcattaatgagaaaggtcagagcctagtatgtggcaggttttgaagaggtgtggctcttcacatcctgccgccacatacacctggttgaagatgttttgcctgtcgtcgttctcaatattggttggttgtttcttgccaccagccacgtgatatcctttgtggggcagctgatgaagttctagctgttctaaagaatgaaaagctgcgggacaaggaaaggcgaaaggagattgacctgctgctgggtcaaacagatgataccagataccatgtgctagtgaacctgggcaaaaagatcacagactatggtggagataaggaaatccaaaatatgggtaagtgcgcgctttatgttctgatcatgttcattggttgttgttgacccctaaacatgcatcttctagcatcattcatttaaaaaccttaatgtcagtgagttcccataatctgttctgtgttttttgaagagttacaattgatggacaccagaatccctagattccagcagctgttccttactctgagacccttttattgtgtggaatatgagaaaatgtgggcagagccttgggggctcaagtggttgagcaagcagagctgggctgactccaaggctggcaggtggagaaggtcttggcaggagcagcataggtggctctctcatgttgatcatctaagtatctgtatgtgtccttagcacttagatctttcctgaggagaggtagtcggggaggacattggctccagagtgccttgttttactagccattcactgccctctttttctaatccttcattgttt

SEQ ID NO: 95309 - DNA, 1056 bp, Homo sapiens
gcaacctccacctcccgggttcaagcgattctcctgcctcagcctcctgagtagctgggattacaggcgctcgccactgtgcccggctaatttttgtatatttagtagatacagggtttctccatgttggccaggttggtcttgaactcctgacctcaggtgatccgcctgccttggcctcccaaaatgttgggattacaggcgtgaaccactgcacctggccaaagggttgtattttttaaatgagaaacatctcattgtaatgtttagtgcatctagtgagaagatgatagggaatttttctttttgtcactgtgtcccataaagaaatactcctgcaagtgattaaggccaaacggaatcatttgctgaggctcagatacctgttttcagatattaacttcttgccatgaagctgaggagaggagggtgggcttgatccagtcttcccttggggacgaaaggttctgccattcaatatcacattgcatgtccattaggcgaagaaagcgtgatgaggaccggcatgacatcaacaagatgaagggttatactctgctgtcggagggcattgatgagatggtgggcatcatctacaagcccaaaactaaagagactcgggagacctatgaggtgctactcagcttcatccaggctgctcttggggaccaggtgagtgtgatattgtgaaatatatattaggtctttatttcattttctggcatacagcttctaagatccttggaatcttcgaagtgctaagtatctttttgtatgctgatgagttgactgatggctggcagcacttaggtagttcagaatggaggctggtcatttaatcaatcatgcctacataatgaagcctccataaaaaccccaaaaggactaggtttagagagtttgtggatagctgcacacatggaggtttctggagggtggtgcgcctgagagggcctggtagcgccacacccattcccacatgcctgccctgtgtacctcttccatctgttgtcttttggtaggcatcttttgtaatatgccttatagtaaaaataa

SEQ ID NO: 95310 - DNA, 1693 bp, Homo sapiens
gaagagaaacccaaagcaaggcgccaatcattaaaacacacaaacacagacacacgcgcaagtcaccttgctcgctgggtactttagttacctcaaacggaaatggggttttcggcccctcttttcctgcctacctcatgggactgttgccaaagaggaaggaaccggaaggaaaggtcttgggacaggacaggggctaagcagccgtgcattcgttatgatgtgaggggtgccgggggctggagactgaggtcggggagagcacgggccctgggtccttagtgccagcgggcggccagaaccagagtgcgggggtctagggattcggggacccagacgcaccaggcccacatatcccgctcagaagggtgcggaaagccgcgcgcacacggcagggacacgccccagacacgccccgccccgcacttctggggcgcgacccggaagcggaagggaacccgtttcttttccttccccagtgcgtctttcctgcgtcgttccggcgcggcgggagcagagatctgcggccgtttgcagcttgcggtagggaggcgtggtggtctgaagcctccgagcagccgcggccatggcggatgtaaccgcccgtagtctgcaatacgagtacaaggcggtgcgtttggtcttggggaaggattccaggctcaggagtccaatggggagggggaggctgaaaaagggagtttcagtctgaaggcctacaggagagccacgaaaacgaaggggaaatggaatcggggtgaaggtgggggttatacgatgacgtgaataacctactggggtctggggagcgctaagatctctctaggaggagtttctcgagtaccttcaacgctaagccctcccccttccacacgtcactcccaacccactcactacttttcacaggtgtgggttatgatgggcgctgttaggaacaagaattgtttagctgattcgacagcgcataagacttattcagctgtacgcttctgcacagcgttatactatgcaattcttaaggaaaatatatttttattacgattagtgatgataagcaactagttactacgattttttccatcagctggggtaactatgatagtaggaattggccctgctcatgtcaaagcttcaataatgttttgatcttttcagaactcgaatcttgtgctccaagctgaccgttctctcattgaccggacccgccgggatgaacccacaggagaggtgctgtcccttgttgggaagctggagggcacccgtatgggagacaaggctcaacggaccaaaccgcagatgcaggaggaaagaagagccaagtgagtgccaaggggatactattttttccttcagatccaaagtctcttccctttaacattcgagcagcatttttgctggaatgcttggtgtaagatcagtggcattaaaacaattcagtgaaggtaaaaacagaccaggagagtttaaagattttttggccttaacaagtgcatctcaagtggaaaataacttgttggtacctttttcttacatgtgtgtttctggtccatagacagatcttaattttcttcagggtattttcaagacccttgctattcctatgtcccagtaattcgttttccttttttcccattactaacttcctacccctactttttccatttactcttgtccacgttctacctattttgtt

SEQ ID NO: 95311 - DNA, 1041 bp, Homo sapiens
gtcaagcttgaggaatttcctgctctttggggttgaatcccttggcacagagtttcctgagaaattgtcatgtgtagagctttcctctgtgtatttttagcatggccccctttagcctacttactacaatttccaaaataaatgatctccatggaaaactgttttctgcaaacatgtagttaatgggtacagaatcctgtttcatgttttacaaaatgtgcctgacaacaatgcagcttcctcctgtgctgcacaatataaacttccccctcactgtactatcgtgagagtcttggcccaggcaggcaggggatgggaaagggaagggtggctcaggggaaggaggaggctggaaactgaaatttaagggtgagaaggctgtccctccagtggtgatttggggtggttataggaatgagaattacagaaccctcttttgtccctccagtctgtgtcggccctggtagacaagtttaagaagaatgaccaggtatttgacatcaatgctgaagttgacgagagtgactgtggagacttccccgatgggtccctgggggatgactttgatgccaacgatgaacctgaccacaccgcagttggggatcatgaagagttcaggagctggaaggagccctgccaggttcagagctgccagtaaggctctcagagtccgaaagtgtttctataggagttttccattggttcttttttctttttcttttttttctaattaaaaaatttttctttctttttttttccccccccaaaaatagagacgggcatctcactgcattgcccaggctggtcttgaactcttggggctcaagcaatcctcctgctttggcctcccaaggtgccaggatttcaggtgtgagccaccatgcctgggcactatcagttcttaacagatttcctgctggggtgattgaatttgatgtctgattggctgggctggtgtgctgtgtcatacacatcagctgagcttttcagctgagcctttctgactcagaggaatcacacctggctttgaatgtcggctta

SEQ ID NO: 95312 - DNA, 1039 bp, Homo sapiens
gattgtgttctgcacccagggctgaaaaccactgtactctactgagaggtcttcggaggcctctggatgaaggtggggtggggcaatgctgagtgataaataccagtgttgtgtagatgcctcacgttattggtctctgcatggcagcacattgacaactgcaagcgtaaaaggtggagctctttgtgcacatgcattggtaaggactggtctgcaaaagtgcttgatgtctaagagtgagctccctctctgtgcagcagcaacagcagcccaagaacacttggagccaagtgttctctggccgacccttctgtagtaccagcatgcttacataaggcagttactgtggttaatgacctagtcggaggtcaaagcccagaacacagcctacttcacgcatgcgagaatgaaacattcggctgcatgctgcctgatgtgctgagccagctgggaggagaccttatcttgccagtgttaggacagtggattgaaccatggctaaattgaaggagggaccctgtgatattatggggaggggatagaagaaatacagagttttcctggagggactggagatgtttgaagtgggcagccttgaaaaatggatagactattttggactataggtggattcatttagttgttgagtggtgaaattgggactggtaggatgcctgcgacatagcattgtatgttgaaagaattattgaattactacagttcaaaaatcctgcagagcctctgtccagctccatcaccagaattgggaatgggagccactcttcctaatggaagaatatccatcagaatggagtggggatgctgttgaaacttcttccttctacctctggagttcacagcacagtgcatttgttacttaataacatgctaggtatcagattctgttacagcactaggccatacagactagaaatgtgatttttttattgtgtattttatttttttaaattaggttttaattacacaataaatgcacaaatgtagtctcctgtttttgttttttaaaattctgtatgta

SEQ ID NO: 95313 - DNA, 1324 bp, Homo sapiens
ctctccttgttgccatgtagggaacagtggtttccattcaggaatgagacaggctgttaattaaggtaatgggttttcctttttttttttaaagacagggtctcaggctggagtgcagtggtatgagtatggctcagtgcagcctcaacccctgggctcaaatgatcctcctgcctcagcctcctgagtagctgagaccacaggcacacagcaccatgccatctttttttgtagagatggggtctcactgtgttgcccaacgctagtctcaaaattcctaggctcaagcagttctcccacctcagcctctcaaaatgctgggattacaggtgtgagtcaccgtgcctggctggtaatgggttttctgtcaaaattgttcaagtgcaacaaggtgactttcagaaagctggagggtagattttccaacttttgtttttagtgaaggaaccctttttcaggtaaaactgtgcagaaggcctaattgccagtcacacagaaatagagctgctctggtttatttgggattggtagagatgctgagccctgctactccaggtttgcactgtatagtggaaaagtctgttagacttagatgacttgtgagggcccttctgactctaaaattgtataattctaggaggagattgggcataggaattaagatttacttctctaacctagttcagtagcttttaacaaaatagctttctgcatttattctttcctttagttacttaagatggcccagggccatagggtagagactgagcattatgaagaaattgaagactatgattacaacaaccctaacgacacctccaacttttgccctggattacaggtaaaggggggaaaggggctctgtcctctcttctaagccagggagtcgtttttctctgcttctcatgtccccattttatatggtgggagactgttggcaattttgaatccagtggaggttttctgggtaaagggtctgccttccacccagtgcagggagctgagcagagtcaaggaaacagcctcaccttggcctgccttacctcacatcctacatgcaggaagcaaatggccacactcaagtgaatgcgtcgacatgtggatgggtgtttagcctctgctacaaagtactaatcttggctgttgtgggatttcaaaggaatataaacactttgtcctcttatgagctaatattttggccaggtagacaaccagatcacaccatatgtgatctggtgtggcaaaaaataagtcttcggggtgtatctcagatgaccagatttctagctgtgaatgcagttctcatattgcaagcttgctgtga

SEQ ID NO: 95314 - DNA, 1050 bp, Homo sapiens
ggagagtcatttgaacccaggaggcagaggttgcagtaagctgagatcatgctattgcacttcagcctgggcaacaggtcgagactccgtctcaaaaaaaaaaaaaaaaaaaaaaaagagtttgagaccgcgtggccaaaatggtgaaataccatctctactaaaaatacaaaaattagccaggtgcctgtaatcccagctccatgggaggctgaggctggagaatcgcttgaacccaggaggcggaggttgcagtgagctgagattgcaccattgccatccagcctgggtgacaagagtgaaactctgtctcaaaacaaacaaacaaacaaacaaaacaagagagctctgtagctccttggttgaaactggattccttctttagttgaactccagacctttgtttttacagtgaattatggtaaaagtttctttattctgcttagttttactttgtcatatacctatttcaggtaaataaaattgaaattcactatgccaagactgccaaaaagatggacatgaagaaactgaagcagagcatgtggagtctgctgacagcgctctccggaaaggaggcagatgcagaggtcagatgctcttgcctgttctctaggtgcccagcatgcgggaggggagtggttgatgtctacagctgaagacacctcgatttgggcaatgcctccaatacagaaatgttcgttcaaaaatacaaggagctgggcatggtggctcacacgtgtaatcccagcattttgggaggctgaagtggaaggatcacttgagcccaggagtttgaggttacagtgagctatgatatgatcgtaccactacactccagtctgggcaacagagagagatcctgtatcttgaaaaagaaaacaaaaataaaaggaagacttcatgcttctaagagagaagtgaaccaagtatacaagtaggcaggtcacacagactgtgatacaaatagcaaactagtgtgtaagacgtgattcagccttgctggtaatcaaaaaagacaaatgaaacaatcttgatgctactttaaaa

SEQ ID NO: 95315 - DNA, 1606 bp, Homo sapiens
ctcttcacaacacttgtgtgcaaagatagttttagatttggtttagaagctatcctccagaacaggctcccatacttagaatgtttctagttaaggtaataaattaggcaacccaagtgtgactccactcaagtgtccttttctgtaggcaggaagggcccacaacatggcttaaaatgtagtccatggttctggcccacagtacagtgtgtatctataccaggtcacctgtgttcaatctgggagccttcctggccagtctgagtggcagccagaagggagctcatagtgtctaggagtctcaggcaaggtaggtcagggtactgtgggcaggggggatgtgtgtgataggagagggtaccctaaaccccataccttccctccctgacctgaaaagctgatctcaacagggattcacacagaattaggctgtgtttttgcattagctggtaggtgactttctcaaaattcttaaattcagaaagtatttagtaaacttgaggaaggtatgaaatctggaggaggcatccaggacccaggggtttgatagctttacaggtaggatcataccacaccaaaagagcagtggacaataagactatatgagctatatgaagcttttaggaatcatttaggacagacagagccctaaacaacccattcatgacttaagttgttggctcagtgtatgctggggacaaagaaaaactaacaagccgacctgcctttatgataaattctagtgtgcttacaagggatgacttcctgaggtgtgatctgtccaccttgaagaactccacaactgaagaaggggagctgtgagaacgtggattgttctacaacttgcacagggtaacagaggaagtggctgaggcctagagtcacgttttccagttcccttcgcaaactatatttcttggaacgcgaaaggaagctttacctatttcatagaagacctggaatccataacctcagaaggcaatattattgatagaaaatgtggaaggatcaggaagttcttagattcttggatgacagatgcatgttgatgccctatggagatgtccttgtgttttgaggtcactgaggtaggaagacctgtctactcttggtttcaccactagaacagtcttgggctggatgggttatagagctgagcggctgtgatggttctgtttttacattaacaaaaacaattaaaaacaccaaaaacaacatttggattgcttcagcttcttttcagttgacttctcatatgtattctggaaaccacccaatgaagtgggcaccaaaggtagagctaagatattgtaaggccagtgatcatcacctcaccaatgccaggtggtatgagggggtactgtaatttccttttttttttttcgagatggagtctcgcattgttatttgggctggagtgcaatggcgcgatcttggctaactgcaacttccgcctcctgtgttcaagcaattctcctgcctcagcctcccaagtagctgagattacaggcgcccgacaccacgcccagctaattttttgtgtttttagtagagacagggttccactatgttggccaagctggtctcaaactcctgaccttgtgat

SEQ ID NO: 95316 - DNA, 1045 bp, Homo sapiens
agtcctcctgcctggcctcccaaagtgttgggattataggcatgagccacctcgcctggccttccctcctttactacattctcagagacctcttaggagtttcccaagggggaaatttagaaaagtggggaaagcgttggtaaaaaaggccaccctctctacttgcttccttattcttaagctgcagggctcaacattgatggcatccccccacacctacatgtctaaggcctcaaaatcagaagtcacggaaatcttcccttctgttctgttgcccttaaaaactcacctatttccttttttctgcattccttttctgtcttcatgtgtaataatatgaggtgacctttgttgttgagcacagattaaactcaggagctttatgtggattatttcatttaatccttacggtgaccctggaaagtagatgctgtcatctacctcttacaggcgaggaaaaggaggctcagagaacataggcacttgccttaaaaagtggaaagttgagtctctcactctagagtccatgttctgttaaccacttggcagctagaacatgtgtccttgtgtatccaacttctttcctattgagaattaattctttaaaataaattctcaggagttgggataattgggatagagggtctgaatatgatgataacctgtcaaagctttgacccttcttcactacctctcctgccacagcgcctgcctccagcaccctgaagatgctgtgtgatatgtcctccttaccaagttggtgatggctgcctcatggtgggccctggacaggtgtgtggtcctgctgagctgtccacgtgtcggaagacctgtttaagacagtcatttttgcctctccgccaactgtcttcagagaaaccattaggttaggtgatacggtgccagcaagggaagcaccatcgtccaggatctgcaaatctggttcctgggaaccccagactcctcagcagatctggctgtacatggatcagaaccacttcttcccccgcttaagctgtggtttgacccaagggtcagcatatag

SEQ ID NO: 95317 - DNA, 1092 bp, Homo sapiens
ggccaggcatggtgactcacacctgtaatcccaacactttgggaggccgaggtgggtggatcacctgaggtcaggagtttgagaccagcctggccaatatggtgaaaccccgtttctactaaaaatacaaaaaattagccgggtgtggtggtgggcacctgtaatcccagctgcttggtaggctgaggcaggagaatcgcttgaacccaggaggtggaggttgcagtgagctgagattgtgccattgcgctccagcctgggcaacgagagcgaaactccgtctcaaaaaaaaataaaataaaataaacccttttcctttaagagaacctttcttattgctttgaggctacttccttactgctttgattgtgtgaggcgaagtgaaagttggatatttataattcttttggcttaaaaagttcttccctggaaagaaaggaacaaacttggatttctcaaaatggtctaaaatgtatgactgatggtttgcagcaggtgcagagcaagtccggggcagtgtctggcacagtacctttcctgtgtggcatccattgcgtgtgtgcctagttggggagagcttcctgccttctctctgaggacgggtgtccaagggcaagcaccactggtgttttagttggtggtgagggtggatggatgtggctgctctcgggatagtgcaagtgattgagtctctactgattcctgctatgtcctctcttaggggccacatcagccagcagcctcctccaaggcctcagcttcagcttgcaggatatcagcagcaagacctctggccttccagcaaatccctccccaggaccagccccacaggtgcacatctgccatctgctgggctgggcaggtgtagggaggaggcctcctcagcttagttggttttggcagggaaactaggtctggagtcagtggatcaaggacaaacagccttctagctacatagcagggaacttacaaaagttaaggtctatcatttactgtgtgaccttgggcaagtttcttgaccactctgtttttgtttctttgtctataaaatgaggtaataatagtacctccctcatagagttgttataagaa

SEQ ID NO: 95318 - DNA, 1379 bp, Homo sapiens
cctggggactaggttgtgacatgggccagtgttgccctgttacttttgggtgggagccgtgaggttgcctggttgaggtactctctctcctagtagctactcatagccagcttttagtcctggtgacactcctcttcattgcctccatttggcaagtggatcctcaactgtgggctcttagggcagggtgggactcttgagagcctttggaaaactctactttttagagaggactggatgacctgctcctccatgagttctcatagaatgtttgatgtctccaactgtgtgatgatgtggggagggcttcagacaggaagatgatcacattttttgagtctgagaaggactgtttactcattctgttgaatcctctatttttgttgttgttgccattggccttggctaggcagggtcaggatgtcttctgtcttttaattcctaccaactcagggccccttctcttccgattccagtgcaggatgagggatgagaagggtgccatcctctaagaagggcaaagtggggtcccccacggacagggcctgagtgaagtggtcctgaagcatgggcagtctcctttgaggggtggccctgtacgtagagtggttatcctgtgtgttctacattctacacatggctgtgttggtgctggtattgactgagtgtctgttgggattttttggattgtggaggatctcaactcagctccatgtcttagttcccatttcatcagaaccaccagaggaaggagagaaagaggatcttagggttcagctgaagcgacaccatccctcgagtccccttcctggcagtaagacctccaaacgaccgaagatcaaggtgtcccttatctcccaaggggacacagctggagggccttgtgctccttcccaaggaagtgctccagaaggtgagtttctcttggtacgttaaatgagaactgagctctctcaggtacacagcattgccctttggtggccattcaccagcatgtcagcctttgctttattttgagagatgcccggagcaaagaagacatgagtctgtacatgtgggtaaagttggcatgagtccatctgaatgaggaccaggcaggcagaatatgagaggaagctgtgccatcgttcaaagcatcctatattttgttctttttttgttggcttcaattaaaggtacagaatatttcaggaagtttagaaaatagaaggaaaaaataaccccaactctccctactctagcatagttcatcttttttcattttccagttttcgtccgtaatatcttgcatttagcctaagctgtggaacctggaaacatagaggccaaataggactgaccaggggccttggggttttctgttttgaagctgcaggtgg

SEQ ID NO: 95319 - DNA, 1050 bp, Homo sapiens
ttggttggctcctctctacactaggatgagattgtggactttctgactggagtgctcactcgtgctgagggtcacatgggctctgaacctcgggatcaggatgctgagaagaagaagaagccccgcgatgtggcccgcagagacttggcctttgaagtccctgagcggggcagtcgacctgcctccccagctgccaagctgcccgcctcaccctcaggctcagaggtagtgtgagcagggagggagcgcttttgctggggaatcagcaccacagagttggttccttaatttcctggggatgcctctgtcttattagtgccatgggcctgtgagttcctacaaggggaattccagagggacatgctgactcatggtcagatcctagtaacattgtctcatctcttgaccttctcaccttactcaggatctctccagtgtgtccagcagccccacctccagtcccaagaccaaagtgaccacagtgacctctgcccagaagtccagtcagattggaagttctcagctgctgaagagacatgtgcagcggacagaagctgtgctgacccacaaacaagctcaaggtataggcacttggccagtggctcctcttgggtctgtcttctgtagttcatgtcacatggcagttgcacagtattgatatctatggcttttttcagggggatgtgagaggcgccctttctcacatttctgtgcaggcaaaattcaaaattaattattgaaatgaatgccaaggcctctgagttagtggggctttgtgatcactagttatagctttgtcttgctgttctggggaggctaggctttatgaacatgtatattggcctaaacttttttctaccttgccagccactcctccagtcggggctctccaatcatatgtattgggtgattgattttattaatcagattctagggtaactcacctggcatcatgccctttctttgtttgacccttgaagcgttaagattctcacactgagactttcagtgaagtttatcagggttctctgcatacaggtttcagatgaa

SEQ ID NO: 95320 - DNA, 2432 bp, Homo sapiens
taaataaataaattcttgtaaatattcgaaaataatctttaatatccaattaggtagatagttgactaaactactcccttacatatgcacatatatattaaattgtttttactttattattattcatagttaatttgtctctgtgcataattgtccccatccttttgtgtgtgtttttgtttctgatacgttttctttggaaaggttctcagaagtagaaacatttggaaaagggatgggaatacatttaagtcccttgctgcatatccagactgctttccaaaggattgtacacattcacttttcatggtgggagcatacttttcacccgcttatttatatatattcttgatccttaggaggttttcagaggcttagttgaagtctgtctatggcttatagtggggctctgttcttctgcttgattgctggtggtggaaggtctcctgctttacactggagtcatctttgctctttcttctttgtagatcccaaccttgattgaccggatgcttgtgtcatccaacacaaagactggggctgcaggagctgaggccttgtctctcctactgaagaggccctgggaccctgctgtgggtgtgctttctcataacaaaccagtaagttggatggctcaggacttaacaatggtacataaaaattttagactcaagccttagaaccttggcaggaggataaatggcttctttaactatttattattattattattttttgagacagaatcttgctctgttacccaggctagagtgcagtggcacgatctcagcttactgcaacctccacctcctgggttcaggcaattctcctgcctcagactcctgaggagctgagattacaggcatgcaccaccatgcccagctaattttcagtagtgacaggatttcaccatgttggccaggctggtctcaaactcctaatctcaggtgatccacttgccttggcctcccaaagtgctgggattgcaggtgtgagccagcatgactggccagcttctttaactattattaataatttattttacatagtgcttaacataatttcacaagcaaaggagcattggttgggatgagaaaggtattgggatacttggaatttcatgaaaggacacttctcactcactggtttttgggtgggattcttcctctttagagcaaactccctggctctccgctgattctcatcgcctcctctggtccctccagctctgtgtttcccacttcacgccgccaccgcttctggcaatctcagctgtcctgcttgggcaaggtatgtgtgggggcaagaggaactccttcctggcagggaatatagtcttggaggattgaggagaagaatatgtgggaggaggtcaaaatgggtaacttgaatgtggagcctcctctaacccttctttcatgtggagcctcctctaatccttctttcatgtggaattccaaggttttgggtttaggttaggttaaacagaattgaaagatttgaaacttacctctgctggtgtgggggctacttctttccttcaggtcatccctgtagccacccatctgctgaacaatggcagtggggtaggagttctacagtgtctcgagcatatgattggggcagtgagaagcaaagtgctggaggtgagaatgcccgtatttcagtacattgtggcatacccagcattctggggttgttctgcacctatctttggcctcctgtcttactgtcttctttctcttcccatgaagattcacagccatttcccacacaaacccattatcttgattggctggaacacaggagctttggtggcctgtcatgtaagtaatttctatcttatttggaggttgtcctgggatggaataccactaatcatagctaccattgagtcctttactgtgtgtcaggctctgcgctagatactttacctatataattacattttaaactgtagaagacaaattttattaaaacaatttttaatttattttggaaaactttaagcagaaacaaaagcaggtgtagtataataaacccccggatcctcacccagctttaccagtgatcaactcttggctgggcttgtttcatctcaccctgctcattttctttctcccctagattgttttgaagaaaatcccaaatataatagcattttcacatacacacacacacacacacacacacacacacacacatatgggtatatatctgtggaaaaaaaaaaaagatccctttttttctctaaacataagtaccatactgttctcccacctaaaaaacaacagtaattgtagctggcaaatattaatagctctggaatttgatgctgtgttcatttcagtctttttccaagacatcaaggaatcttttcgtattttacatatatttgtatgtctgtcagtttgtgtaagtgtccctcatgt

SEQ ID NO: 95321 - DNA, 1041 bp, Homo sapiens
aggcctctcaaaaataaatttgctaattgtgtggcatatagaaaaaatacaaaaaatatatatggaaaagagagattagtgtggggtagaatattgaggagtggaagaatagcctctttattggttatatttctgctatatttttgttcttaagcctagtttaaatagaattcttacctcagtctgagattttagtacattaaaatgcttgctgatcctgtctgcctttttgtgtgaaatataaaacttatgaaattcaaatatgtcgtctgttcagtggtgctgtgcgtttatttatgattggaataattttagctactaagtaagtaattagctttgctagcctgaaagacttttttcatgactagtcttgacttgtactgtgtatattattgtgtgtatgtgtgtattattaatacaagtgtgtgctgtgacgatttgatttggtaggattgagaccagaagaatctaggtcttgtgttttaggtcagtggtcttagactaagctacttcgttttactgttccctagcagagacataaaactatggcataatcttctttatatggtgtacatacatggggagcgtccccagggtttgactataattcctcagagtttcccttataggactggctggacaatggcccagaacaagctattcaacaagatcctcaaagccctgcagtctgaccggcttgcccgcttggccaacgaaggggtaagacaccagcaatccgcccacagtgggctcttcgtagttcaggcctcactggctgactgacttgtccccctgcttgttaaccaggtagtcctcatgttttattacttccacttacatccttcaggcttgtaatgagccagtgctgcgccgtgttgctgtggacaagtgtgcaaggagagtgcggcaggctctggcaagtgtgagctgggataccaagctgatccagtggctgcacaccacccttgtggagaccttgagtctgcccatgctggcagcctacctggatgctttgcagacgctgaaggggaaggtaaggct

SEQ ID NO: 95322 - DNA, 1246 bp, Homo sapiens
aagtgatcctcctgcttcagcctcccaagtgctgggattacaggtgtgaatcactgtgtctggctgtatttgtcatttatttatttatttttgagaccaggtcttgctctgtcacccaggctggagtgcagtgatgcaatcatggctcactgcagccttgacttcccgggttccagcagtcctcccaccttagcctccttagtagctgggatcacaggtgtgtgccacatgcccagctaatttttgtatttttggtagagacagggtttcctcatgttgcccaggctggtcttgaactcctgagttcaagcaatccacctgcctcggcttcccaaagtggtggtattacaggtgtgagccagtgcacctggcccatatttatcttaaaaaaaaaatagatgtttatcattttttatatagactcattgaaaaaatgactttgtgttcttccagtacataccatcatgtctgagagggcagagatctagacaagtgtgggaaagatgactttggatcaaaattttcttgtgaatataatgtgcttatgcgtaatttaaagctgactgtattaaagatacattttttgtcaaccagatgattgttaaatacctgtgaagtatgtgtggcccggtcctatttcctcacctgtttacagtgaatcagacgtcccaatagatgtggagacggtcacatcaacgcctatgccactctatgacaatcagaaggcacgcagcgtgatgaatgagtgtgaacggcatgtcatctttgccaggactgatgcagatgcccctcctccaccagaggactgggaggagcatgtcaacaggtaggctgctcatcaggaggatgatcactgccctgtaattattttgtatcatcttcattgaaataacacttattaggaccttatttcatttgcagcaacacaagtcagagtgttctccaaagtctcacattataactctcagttcaccatgctgtgtgtgagctccttgagagtagggcttacatctcagccatctttgcatacttcacactaggacgttgtctggcacacagtaggcatataatgtttgttgaataaataagtgaattaaatttgatacatatgactagctctgtagtagcttctgttgtataagttatgatataggggttacccaaactgcaaaaaaatgaaatgtacatttgtaagatattgtgtttaaatggtttataactaggatgatggaagttgtgaagtcac

SEQ ID NO: 95323 - DNA, 1568 bp, Homo sapiens
aaagggcttccacggggatcattttgtcacaggctttgttgggggggcagttttcatttttatgtaaacaactctggaatattacgaagtacttaacagaacttttgtttcgcacaatacgagaggcttgaagaagtggagccctagctgggattcgcttttttgaggccggcgttgccctgccctttaggggtgcccacgctctagctgcggccccggctcccttcgcattgtcgttagaggatggtgtgaagcaacagagatccttagctttcaacgaattcatatttgtgatttcctgtttgtcaaaacccttcctgcccacctaggaagtggtgctggccaagcaagtttactgtctgtccacgcgaggtctttctgaaccttggggtcggtgagctctcccgttaggtaatttcagttcgctagaggttgagtatgggacaactcgtggcaccatagttttttttttctttttttttggtgttggtgtgggattccacgaaccgtccccaccagaggtctgccgtgaaatggatactcaataggaatgatagtaggttacaaaagtaagcatgttagatggtgtagattgggagaaatttaggatattggaattgacctaaactgaaacttttcactgcaggtgactagcatgcagatacccatgctctgactttctgcccctccactgacatggcccaccggggtggggagagggacttccagacttcagctcgacgcatgggcacctcgctgctcttccagctttcagtgcatgaacgggagctggacctggtttttctggatcatagctatgccaagccttggagtgcccacccagatgccagtagtgcccgccccacccgcatgctctttgtcactccccggcggcagcacgaaagtaccatgtgagttggggcttctaagggctgctggtaacctcactgggcagtgatcagatgggaatttagagaggattttctcaggattgactgggggagattgtatgaggcatttggatgttaaattcaggcatctcttaagcagcataaggatagcaggcttgaatgtggctatctctgtgagacagctaacaagagttaggaaagcaagacgtgcaaatgaaaagcagacaacctattccacttagatagtaggacgtgtggaaaggggaaaatcgtagagggttatttaactggtgaagaaaaagactgaaaagttgattttaaaagattacccacaggatacgactcttttatcacattagtccagtgctctgggttgcttgacagtggcaacaatagcctttttatagtaatgcattttgcttttcttggtttcacacacgaaggttaggagccaattcccaagacgttgctttttctcttcccttgttacagagctgctatccataggttaatctaaacccttcttatgtctaatgatattttcacccagcctatgttatagggtaaggaagtttcataaattgactacctgatgagtgatacagttacatttggtctaaataaacctgtttgccagttcttttgcactttaaggca

SEQ ID NO: 95324 - DNA, 1031 bp, Homo sapiens
ccactccccaggttgatggttctgtgggcagatgcctcagatcctactcctctaccattctaggccttcacctcctgggaccccactggggcctgcaggggtcccgggctgccctgttggtgatgggtgaggcccctgcaagtcagagccttgctcacttcacgtgctgttgatgaactaggagaaagctcggaataaacctgcatcagggagagggggaccaggccccggaggtcacttagtcgccccctttgtctccacacgtgtatggagcatcaacaagagaccagagctggcagtgtccgagattgctttaatctctgcctcctccagcagactatctcctagccctcagtttcggtcaggaattttttcttcctcttcagtgcagggctactgcagctacaccctcccttctcacgccaaatcccctgcagggaggccatctcttccctacgaggccaccctacccccacccccgcgtgcctgccctggccttgggctgccgctcaccactcaccatctcggcgtacaccgctgtgtcaccctggcggagcagctgcaggtccttgctgtctgtgacattgccaagccacatgcagacccggaggtgagctgggagcacatccttctgtccttcaccctctgggtactgagccagaggccgatcggtcccacaggggcactaaacaccctgaacgccaccccggccaccccccaagtgggctgtacctgccccttcccccctgagccctgggagcggggccctcactgagctgagtgctggagctgtaagtgaatggcatggagttctgttctgccctccagagtggggtggctccaccctgggagccatgaagcagagagggtgggagtgcctcacagagggagtagcagggatgttgacaatgggactgatggacattccttgtgtgcttgttatgggctggcactgtgccagttgcccagtgtgcatcatagtcctggatcctcacaccccaccatgagagggcatggtgattgccaggccc

SEQ ID NO: 95325 - DNA, 1070 bp, Homo sapiens
tcctctcgtggactatgtcctgggtggacaggcatctctgtctcctgatctagctcctcctgtaggagccaggagtggcccctccagtctcatacctggtcgatgcctggctggctgtggctgtacagtgtgcgggtctccacgtgctcaggtaccagcccctgggtgtgcaggaggtacagtgcaaggcgttccttcttgggtcccaaaccatgaacagtaggggttttgggctctggattggagggggatggaaggaggggattgcgaggtcattagccttcctatctcctaggtaggctcttaccctcccgaccgcagcctgggtaggagtgaaggggaaagggatgggctgctctttggctccagggagctctttccttgtcctcccctttctcccccaagtctgcagctcttccattctggagcctcacagcttccagaggcctgtgtctgtgctttctgctagtgttctgcgctgctcaccaaagctttgcagcttgaactttttcccattatagaaaacagcatcttcctcaggactgaacagaggcggaggtagccctttccgcttggcatagcgttctaggaggtagcttgggggcatctgatcccgccatctaaagggccctgacctgtgggggatgtgagaggaagaggtctggaggtttgggtcctgaagaacactgctgtgagctgcaggttgaccacgggtggaagcttgggtggagactgggcaggtctgggccctggttcccgcccaggatgcaggcttctcccaagggagctgtaggctcactcttccaccccacctgactcccttcccccagacgggcccactctcactggcagtaggatttggagagcccacaatgagctccaaagccagataggagtcggttttcaaggtcgatgactgtggttcctatcttatcatcaggtgaaaataggtcgaagtcatagagctggatctctaggtccttctccaggggtatgttgcaggtgagttcaaacatcctaggggtgaggtgttggagactgcagaggatgtgggcaatgtctctgtgccc

SEQ ID NO: 95326 - DNA, 1049 bp, Homo sapiens
catgggtgagggggaggctgagtgcagacagcaggagccgggtagttttaggacctcttcccgggatcaagaaaggaaaagggatttagctaggtccctagatgtctgttagagccaggacatgtggcatagcagccctaatcagtagacactccccagctcctaccgacaagcgccatttgccaccatcgaggacctggcaaggccaccagccagtcacagtcttcttcttaaagagggagaagtgcttgtattggatgaaatagggccacttggggtcggcgtccatcatcctgatggagcactgcttggcgtgccgagccgggaggggcatgtcagacaaatccagctccaggacccctgagcccagaaaaatgacatcagcaagaaggagctccctgtcctgtggtcacaagccctgtgtcaggacctcacctaggaagtcgtcgggggagaagatgtcattgtcccagacctggatgataagtcgggctgggaacttcatggacgtggcatccaggctccatatgtaatcctggggaaatggcggaagggcgtgttaccggcctgtctcctggacgtttcccttgcacccctcagtggccctccacccagcagtgatagactatcaaggaagagggtttccacctgaggacatgtttctgatgttctgggacagattgcaagcctctggaggggtggggggaggagctccaggagcctgggtctgtttgttgtggcctgttgcccctcacgccccaggcctgttaccttctggctctggacacacgtgcgctccgccgccaggtagtccatggtaaagatgaaccgccagttgaagtcggcctccccagtcagcgagtggtagtggatgtctgtcttctgcatgtccttctccagcccgtataaccacctggggccagagtcctatcacctgtggctcatgtgcattggccccatcccccagctggagccccatgggaagggctgcccagccgacgccaggcagagctggatggagaggtgtcccattcaggactgggccgtgc

SEQ ID NO: 95327 - DNA, 1043 bp, Homo sapiens
agcatcttgcatatattctagaagatagaaacaaagaactggtagccagcccaaggggagggctgttggtagcaggaggaaagccaggcagcatggactaattagtctcctggggctggaagttctgggaaaatatcactcaggtgatttgtgggtcctgggtggagtttccactcatggtctattgtaggctttaggtttggatcctgggtgggaaggatggaagagctggcgttgctggtgtttagtgaattgatgatattgaatattttaatgggaggatacagctgaagttgaggtttgatccagctcatggccaaatagtgctagagagaacagacaacagttagcctggggtggcaagctgaagacgctgtccccagagtcatcccgagaccacctttgtccttgcccccatggctgccactcaccggagctgaatagatgaagttaaacagcataagtgctataatcgatatgaccataaaggctatgagtttgaagcgatagcgtttccagaaaatatagcagaagttttgaactggtgaccgcagccacgtgaaagaggtgttggtgcgtctgtccaggagccagggagatgtcagagaatggcagggagaaccttcaggtcaagtaatctgatgcaaagagctttcttttttaaaaaagcaactactgggccaggcacagtgtctcacgcctgtaatcccagcattttgggaggccgaggtgagtggatcacctgaggtcaggagtttgagaccagcctggccaacatggtgaaaccgcgtctctactaaaaatacaaaaattagccgggcatggtggcatgtgcctgttatcccagctactcaggaggctgaggcaggagaatcgcttgaacccaggaggcagaggttgcagtgagcagagattgtgccaccacactccagcctgggtgacagagtgagacaattatctcaaaaaaaaaaaaaaaaaaaaaaaggcaacttttgcttactccaaccctcaccccaagtctgttctttgctgattgtaactga

SEQ ID NO: 95328 - DNA, 1011 bp, Homo sapiens
agaacacacctgcgtttcactggccttcattaggtggccctagggagatggctttctgctttggatcactgttccctagcatgggtcttgggtctattggcatgtccatggccttcccaatcaagtctcttcaggccctcagtgaagtttggctaaaggttggtgtaaaaatcaagagaagcctggaagacatcatggatgccatggattagctgtgcaactgaccagctccaggtttgatcaaaccaaaagcaacatttgtcatgtggtctgaccatgtggagatgtttctggacttgctagagcctgcttagctgcatgttttgtagttacgatttttggaatcccactttgagtgctgaaagtgtaaggaagctttcttcttacaccttgggcttggatattgcccagagaagaaatttggctttttttttcttaatggacaagagacagttgctgttctcatgttccaagtctgagagcaacagaccctcatcatctgtgcctggaagagttcactgtcattgagcagcacagcctgagtgctggcctctgtcaacccttattccactgccttatttgacaaggggttacatgctgctcaccttactgccctgggattaaatcagttacaggccagagtctccttggagggcctggaactctgagtcctcctatgaacctctgtagcctaaatgaaattcttaaaatcaccgatggaaccaaacatgagcttctgactgtgttctttcttctaggagtgggtttggggaaagttcaggcctttattctgagcaggccttttttttgagcttcaagcccatcaaccgttgttttgccttctcctgggttggaaaagccctcagctcagctcagaaggaaagggggtcaccttggctaggcagaggtctctgtctcttcaggctttctttccttcccatgcacttaaacagcacaggctatagtgctctcctgcaggtgggattcaggtggaggcatcttcctcccacc

SEQ ID NO: 95329 - DNA, 1227 bp, Homo sapiens
cttgttccccatccttatttttagttgcaaaatggagaggtttcaattattttttcaaggtcactgctggttagctgtggatcagaggcttgaactaagatactgacttcaagaaacatacctctttttcaagtggcacaagtcatccttcttccatttttcttcagataatcatgatgtcatttccttgaagttgtttgaactgacagtggagagaaccccagaagaggaaaagctccatcgagatgtgttcttgccctcagtggacaatatgaagctgcctgagagtgagcacaggggcccgcgggaaatggtcccatagttggggaggagcttgcagtgctgtacccatagctcacagggcggtctctgctctgtgttcttcttctgaagggtagggagcactttcatctgcctttccccttcaagttacagatgagcagcaggagggccgctttgtttctcagttggaaagagggggtctaagctctggcttcccagaagtaggtgtcagaaactgggggccggacagcctatagtttgatccttccctattgggtgggctccctgttttctgacttgcttctctcttgcttcctcagtgacagctccactgccgcccctgagtggcctggccctcttcctcatcgtctttttctccctggtgttttctgtatttgccatagtcattggtatcatactctacaacaaatggcaggaacagagccgaaagcgcttctactgagccctcctgctgccaccacttttgtgactgtcacccatgaggtatggaaggagcaggcactggcctgagcatgcagcctggagagtgttcttgtctctagcagctggttggggactatattctgtcactggagttttgaatgcagggaccccgcattcccatggttgtgcatggggacatctaactctggtctgggaagccacccaccccagggcaatgctgctgtgatgtgcctttccctgcagtccttccatgtgggagcagaggtgtgaagagaatttacgtggttgtgatgccaaaatcacagaacagaatttcatagcccaggctgccgtgttgtttgactcagaaggcccttctacttcagttttgaatccacaaagaattaaaaactggtaacaccacaggctttctgaccatccattcgttgggttttgcatttgacccaaccctctgcctacctgaggagctttctttggaaa

SEQ ID NO: 95330 - DNA, 1316 bp, Homo sapiens
tttctaaatctgtcattctgcaatgcctccatggagcttcttccttgcctatgtgtggtaggttagaatgacaatagttatttgggaatatatgaccataaggctcagttagagggtaagtgatccctttggattagagttagtttcatagtctctcaagtggcaagattttggtcttctgggcaggagctgtttcctgagatcctggatagtaaaggatgtcttgaatttggaagaatttagccctgttgtctcctctttccccttgctatagaaatacagtaggctgggtacagacaaacttgagactgactcccagagacataagtgcggcgtgcctggacagcgtactgctatgtgttttataaagtgccttccaaaagcttcaggaccctctatgggttagagcggtcttcctaggggacccctttgagaatctgatatagtaacagaccctctcctcagaaaaatgtacaagcacccgtgcatatggttttgcctatcatcttgagggtgcaaagacttcacggatgcccttcagggaccctaaaattctgtttggggatttaagttggtttgttcatccatcacagctgggtcatagctcttctgtggctgtgtctttctgacttggtctcctgtcttctgtgccctctcttgtttttatcataacctgctggaccctctcaggcccagaagaggcgatattctccaggagtccaggtactcagttcttggctcatcatgagcatccctcattcccatgtgtccatccaacatttgttgctgtttcaagtccatgtggttgtctcaggagtccccggtctctggtctcgactgcatctccatcttgcatgttaaccatttgggacaaagggacaaatactccccaaaggagtggcatgcctcatgttaccccttcaccacctcactaccctgcctttttgcactgccttggcattgggcttgttctggaatgattagttcgccatttctaaggaagaattgctcctacaactctactggggagagagggcccctgaaatagatgggaaaatgagtggcttatgggaaaacttgcaattttctccctgttaagggagaaccttgccctcttattattattcggagaagttacgtgtggaggaggcttaagtgggctggaaagtcttttgactaaggacagtcattgtggctggctgagcccatccagcaaccccgttccatgttctgagttctaatccatttagccttatatgcttatagaattttagaattgaaaagagctatcctgaatggaaagattcccctgctca

SEQ ID NO: 95331 - DNA, 1034 bp, Homo sapiens
ccaggaggtcaaggctgtagtgagctatgattgccactgcactgtagcctgggcgatggagcaagactgtctcaaaaaaaaaacaaagtaggagtaattgccaggcacagtggcttacacttgtaattctagcactttaggagaccaaggtgagtggatcacttgagcccaggacctcgaggttgcaatgagccttgatcacaccactgcactccagcctgggtgacatagcaagaccctgtctcaaaaaaaaaaaaaaaaaaaaaaaagactgaaagaaattaagtatcgatatgtgctccaacatggatgacccatgaaaacactatgctaagtggaagaagccagtcacaaaagacccacacattgtatgatcccatgcatatgaaatgtccagaataggcaaatctgtagagacagaaagtagattagtggttgtctagggctggggtaatgtggggtggagatgaggagagtgactactagtgggcatgagatttttttttggggtgatgaaaatgttttaaaattggttgtggtaatcataatcttaactctgaatatactaaatgccattgaattatatactttaagtgaattgtgtggactgtgaattatatctcagtgttgtagttatttattttatttattttttttgagactgagtctcaccctgtcgcccaggttggagtgcagtggcgtgatcttggctcactgcaacgtccatctcccaggttcaagtgattctcctgcctcagcattccgagtagctgggattacaggtgcctgccaccacgcctggctaatttttgtatttttagtagagacgaggtttcaccatgttgcccaggctggtctcgaactcctgaccttgtgatttgcccgcctcagcctcccaaagcactgggattacaggcgtgagtcaccgcgcctggctgtattgtagttattttttaatgttgattaaaagatcaccagtgggcaggcacagtagctcgtgcctataatcccagcactttgggaagccaaggcag

SEQ ID NO: 95332 - DNA, 1849 bp, Homo sapiens
ttccaactttggagttctgtcctgtttctgttgggaaatgttgaagataatcgggaggtttattcattttcatattaaatctctaaacagttgaatggttcaatccgtttaattttatgacatgaacacatagcaagtcttagatttaagttttaacccttagtctagtgttacctgcatttgtgttttccaagtctgttgattgctgatgtgggcttgaggggttttgcatttcatgctcctcattgattctaatgtctttctcactttagccatgtttcctgagagactgggagttgcaggtgcacttcaaaatccatggacaaggaaagaagaatctgcatggggatggcttggcaatctggtacacaaaggatcggatgcagccaggtattgggagcctgtgttactcttgtgtgggtgtgacagcctgatttttcatgtgccctctttttgaaaaggttccttccccacagtgccagctgttttccctctcccttaatgtatgtggatgaacactggcccttctagtctctagaacgggtctgagtcctcataagcagctgaatttgactcatcctgaggcagttgcttgcttgttacttctttctgagtttccttgtgaaactacctggcctgttggctggatgaaagcactggctctcctgaacgctgacgattgggtgagctgatttcttctgaacatttacagtgaatgatctcagcactgctgagtcaagagaagagttatctattttccttgtgttagagctattattgctccatgtagatggcaggctcaacctgatttgacctgatctcttttgcaacaagaaggagaactagggaattcagttctctcttgggggcatagtctttaccaattgtttgtaaagcagaattctgtaggggcaccttagcaaccagtttggatcaggaagctgcctgagtgctaaataaggttgcagtggccttctctctttcccttgcctccaacaacaaacaattacagatatttactgggcacttgttacaggccatgcactttgctgggtacttttaaacatgtgttttctcatcttgagagaggcttgggagtcatttgaattttactttttcctccatcatagtgatatattattcctttatcaactcttagctttatttcattgttcatcatctgttctctctctctagggcctgtgtttggaaacatggacaaatttgtggggctgggagtatttgtagacacctaccccaatgaggagaagcagcaagaggtaatggcaagtgtcagagcctaggtcagctacactgacatcacagttctttgcctcaggaatgttgtacaggagggaacaaaggagatagaaagtgaggggttcttcatctgttgaactttgaaagttaatgtccttgtcagtgtttttttctaaagggactatttaggagtgcacagtcttttgggaatagctgtcttgaacaggggctttttctttagtgataatcatgttctctcttgtgcctattagatagccactaaaattgagcatgtttggttgattggtgatttggctgctagaccagcaccagagcaagctgaatttacgtaactcagcctcccctgacttttaatccatcagtgctgtgctctcttctgcaacttgcacacacttttcagcttctttttcttcttcttcttctcagacctgaagaacagttctcctcgcctatagaaaaggctataattggccaggtgtggtggctaacacctgtaagcccagcactttgggaggccgaggtgggcagatcacctgaggtcaggagttcgagaccagctttgccaaca

SEQ ID NO: 95333 - DNA, 1976 bp, Homo sapiens
ctatggttactgtaacatgcataaagtgagagttctgatgtgctttggggtccttacctgataaaggccttgtgaaagctgtagagatggtaagattcatgactgagagaagataggagattgagtgacattaaagggggaaaaagatgatggctcagctttcagaggctctgtggtggctgctttctgaatggattggtgttgaaaagtatgaactgatctacttccttcctgtaggtgtgggcacaggcagttcctcactgtggaatctgatgggcaatgccatggtgatgacccagtatatccgccttaccccagatatgcaaagtaaacagggtgccttgtggaaccgggtggtaagaatctttctccctcctgtgttggtgacccagaaaggcctaaaaagttcagcagtggcatactgatttaattttactgtctatccccctggtattctatcttctgtggatatcaaggatctttatttttgagattattctgaccttgataataaataaatcaggtatttaggaaaatgctctctatttaattatagcaaataattcatttttttttcctgaaatgtcgttaattcctgattggcccaatagtactacttcttagggtttaataataacttaactcctgcttaaccactttgtaagaagattataagaagaccagagtgcagtggcacaatcatagctcactgcagcctcaaactcctgggcttaagggctcctcctgcctcagcctcctgagtagctgagactacaggcatgtgccactgcacctggctaatttttaaaacgttttttgtagagatggggtcttgctatgttgcccaggctggtctcaaactcttggtctcaaacaatcctcctgccttggcctcccaaaggtcagggattataggtgtgagccaccggtcctggttgagagtactcttaaattgatcccaaaccttatcccagcatccccatcttgttatttcaatttgaagagtctgatataaaattttattttcatgtgaaagccactctgagctgttggtcattttatttgtccttctctggaccttttctagctgcattgtcttccttgaggtatggcgacaagaagtgaatgcagtattcctggtgtggctgcactgtgattttgtacaagtgtaagatgatgctttcttttctgtttccagggctttctaaatcttttacgaccagtttacttttgggcatgactctggcatcctttgatactttctctggaattctcttaaactaagaacttacttttttacgtggcttttctcattagttgtagataagcgaatctcagaaaagagaacgatttcttttccctgttcaggagggcaagagaaatttctacattagctatctgcacaaactggccccttaacctagatcatagtgccgagctcatttttggacagagtacagagcattgtgttttcgtagcagagataaaggacagttgaaagactgggattctcggtccagctctgtcacagtcctcctgtgagccctaggcagattatttaacttcttagttctgtttctctatctgataaatgagcttcagaatacctgttttacttgcccactggggttgtcgtgagaataaaataggacaatagacatgaaaagactgtggcaagttaaaatggttatagaaatatgtgttatgttattacacttctacaggtttgttgatggggctcttgtgggttaccggatgattatgttcaaggcttgatactctgctgctgtcttgctggctgtctgtctctacataacttgtagcagcagttctagtatagcctctagttcttccctttttcgacttctgatacctgtattcgctgttatctggctatcaccatgactatgggcttgtttctgagttatttgaataggatgcatttgtttcagcagtggttctcaaatttggctatc

SEQ ID NO: 95334 - DNA, 1104 bp, Homo sapiens
cgaacccggatggcatcatcttcgtgtccgagggcagcaccgtgaacctgaggctgtacggctacagcctgggcaacatctccagcaacctgatctccttcaccgaggtggacgatgccgagaccctccacaagtccaccagctgcctcgagctcaccaaggacctggtcgtccagcagctggtcaacgtgagccgcgggaacacgtccggcgtgctggtggtgctcaccaagttcctccggaggagcgagagcatgaagctgtatgcactgtgcacccgggcccagcccgacgggccctggctgaagtggacggacaaggactcactgctcttcatggtggaggagcctgggaggttcctgcctctctggctgcacattctcctaattacggtgctgctggtgctgtcgggcatattttctggcctcaacctcgggcttatggccctggaccccatggagctgcgcatcgtgcagaactgtggcaccgagaaggagaggcgctatgcccgcaagattgagcccatccggcgcaagggcaactaccttctctgctcgttgctcctagggaacgtgctggtcaacacctccctcacaatccttctagacaacctcatcgggtccggcctcatggcggtggcctcctccaccattggcattgtcatctttggggagatcctacctcaggccctgtgctcccgacatgggctggctgtgggtgccaacaccatccttctcaccaaattctttatgctactcaccttccccctcagttttcccattagcaagctcctggacttttttctgggccaggagattcgcactgtttacaaccgggagaagctgatggagatgttgaaggtgacggagccctataatgacctcgtgaaagaggagctcaatatgatccagggtgccctggaactacggaccaaaactgtagaggatatcatgacccagctccaggactgcttcatgatccgcagcgatgccatcctggacttcaacaccatgtcggagataatggaaagcggctatactcgcatcccggtgttcgaagacgagcagtccaatattgtagatattctctacgtcaaagacttgg

SEQ ID NO: 95335 - DNA, 1027 bp, Homo sapiens
gtaaacaacgagggtgagggtgaccccttctacgaggtcctgggcctggtcaccctggaggacgtgatcgaggagatcatcaagtcggagatcctggacgagtccgacatgtacagtgagtccagccttccacagggcccaggacccctttcctgcttggatcgaaacttggtgtccctagctggaagggccatagtgcagggacacaggaggcctagcatccagaggcccagtggctgggtgccctgcactggccggggtgagcagggagcaggttgctgagagcagtgcccggaggctgccttcaccctcggcctttgtgcctcggcgtcagcccaggaccctgccagccagagcctgctgctcctgcgtgggactaggggctggagagcaggagctgcggggcgggttccagtctcttcctaagtcctcaggggtctgtgttctcaattccacgctcttcttccggcagctgacaaccgaagccggaagcgggtgtctgagaagaacaagcgtgacttctctgccttcaaggatgcggacaatgagctcaaagtgaaaatctccccgcagctcctcctggccgctcatcgcttcctagccacaggtagcatgaggaggaccttccggtcttggtggaaatacggtcacgggggagaagtcctgggtttccggctgctttccccccataggacgagggctgcagcaggtgaggggtgcagagacaacacagccacccctggaaggggccgggtatctgctccacccctggggatctccctgcgattcatttgccattaatgggcggctactgcaaacttctaggaagcatccaagttactatatttaatagtttgggaaataatgactaggcactatggcttatacctgtaatcccagcactttgggaggccgaggcaggaggattgcatgagcccaggagttcgagaccagcctgagcaacatggcgagaccccatctctacaaaaaatacaaaagccaggcatggtggtgccctcctgtagtc

SEQ ID NO: 95336 - DNA, 1025 bp, Homo sapiens
agtgtgagtggttccactctggtggctcagcagatgagaggtgaccttgagtccctgcagctgcccttgctctgtccctctgctgtcatctttggctgccatctagacccctcagacattcttcttgggattcagtcacacgaccactgttccaggggatcttccagggcctgctttcttctgttcgtgatagaatcatcccagtgtggcaggccatggagaattgtgtgccttgttctagagaagtttgaaagcaaaggagtgagtccctttctgtaggaaacctgccaaaggggctggcttcctgggagaagggagccgagatgaggcctctctgcgccgaggtggccatttagatcctgggctttggtgctggaatccaagacattaaccaaaaccacatgtcgcacttggccttcctggcctggcctggcctgacaggtttgtactctggtggggcagccgtggcccatgtagagacggcacccagcacaagcactgagggttagaaggtgtctagaaacgcggttcagcagggctgagtggcaatctccaggggccctagccttcctcccggaaagcggggagacgattcatgtggccatttccagctttttgtccagggcaatgcaagcatcctggagaactgtgctttatttaatcaagcccatgggatgtaaagtatgatccacacaacaacacaaacttgactgtttgatttcccaggagagtcttgaagcagataccccctcacaggcaggtccaggccagttacccctcagcgtttccactagtgacaaacgagggcctggttgaatgagttgctcccatccccctgtcctggacctgtgccgcccaggccggcagccccctccacctggggctgtgctacctaaaggtggagtctgagttgagatgtgctgtgagcataaaacacaccagattcagagagtgcaacatagacaaaatgtctatgaatattttttgtattgattacgtattgaaatgctattttgactatattg

SEQ ID NO: 95337 - DNA, 1025 bp, Homo sapiens
ttttcccttctttatatatatatatctatatataaataattttttttttttttgagatggagtcttactctgttgctctgttgcccaggctggagtacaatggtgtgatctcggctcactgcaacctccggctcctgggttcaagcagttctcctgtctcagactcctgagtagctgggaatacaggcgcccacgaccacgcctggccaatttttgtatttttagtagagatggggtttcaccatgttggccaggctggtcttgaactcctgacctcagatgatccgcctgcctcaccttcccaaagtgctgggattacaggcatgaaccactgtgcccaacccccttcttgctttttttttttttaattcattattcaacttgaacttcttgctgtctttaatagcatggatgacaccaaactatagactaactggtatttagagtagagtatagtaagtcggtatttctctcaaggacgtcttagaatggattgacttaatcagagatttgttgggaagtgggaataagttttagttcagacactcttttggccatttaagattaagtttaggtcactttgagtcagcagtggccctggcttagagggtgtgtggctggcagacaccatcctagacactagaagggcatttgtgaagagtttggtcagttcatactaatatttaagcgtggcccatccagtgctccactgcgagcaggaagattgtgttggaagaaattttgcaaatcgaactaaaggttgtgggatatggaaccccatccccacactgcaaggagggaggtgaaagagtctgaagtgtaggctgtgggtaggagtggtgaagggtttcttgttcttgtttttcaagaagatactttaattctgattgcgttcctaaggttggggtcagagatatgcctgaacttgagattcctggaagagctggtggggctgtggagggagctgcaggcttgcctcctcccacccccacctgccccaccacgaggaagacaagctgttatca

SEQ ID NO: 95338 - DNA, 2748 bp, Homo sapiens
aagccgagagcacccattttggctgggggttcagatcgatggccttgtccatgttgtcctttctggcttccctgatggtgtcatgtttcagcgcatgcgccccagcctttcccatgtgccaaaccagaagctccactgcccgtaggctgtccctgtagccctgctccctccctggaggctgctcttctgattctgagagctggcctagtggtgctgagggcccctttctgcttctctgcccacctgctgagttgccactcgcagtgttgtcagttcccgtgttctgagaagaggtcatgcctgggaggaagggatcgtcatgctgcatcgaatcctctctccgccgtgtggcccccaggagagtagctgcctgttgcacctgctccacacctccccacagcctccctgcaggtgctgtgtggccgtgatgtgcagagagcagtgagggagggttcatgaaccaggtggatcctctttaaaaaaaaaaaagtttttgttatatctctagaacatttcaagtcttttcctttttttctgttcctagctatggggttttagagaagtgggaacaggaaggcatttgtctttttcttctagtttactacattttccttccgtagttcttcagctgtgtggaaacgggcatcacaaggacataggatcatagattgggtagggagggaggaggatttctggaacttttctcaaaggaatttggacccttataaatgggactgaaggtcaaaacaacagtgatatccttgcttagaaattgtcctcaaggaataaactctgagagcaagcccgggttggaaacagatgctttaaaatcctctctccagaacagtggttttttgtttgtttatttgagatggagtctcactctgtcacccaggctggagtgcagtggtgagatcttggctcactgcaacctccacctcccaggttcaagccattctcctgtctcagccccctgagtagctgggattacaggtgcccaccaccacacccggctaatttttgtatttttagtagagatggggtttcaccatgttggccaggctgatcttgaactcctgacctcaggtgatctgcctgccttggcctcccaaagtgctgggattataggtgtgagctaagatcagggattcttaaccttggctgcacaccagaatcacctggcaaattaaaaatacgtggacctgccaccagagcttgtgatttaatcagagtcggcatcagagttttcaattttttatttatttattattattattattattattattattattgagacaagatcttgctctgtcgcccagactggagtgcagtggtgtgatcacggcttgctgcagcctcgacctccctggttcaggccatcctgccacctcagcctcctgagtagtagggactacaggtaggcaccaccacacccagctaatacttttaatttttttttgtagagatagggtctcattatgttgcctggggtagtctcgaactcctaggctcaagcgatcctcctgcctcggcctcccaaagtgttgagattataggcgtgagccaccgtgcccagattcacagaagtttcatacacctttcacccaggttcccctaatgttaacagcttacatataaccttggtacatttatcaaaactaaaggtgcaatcatactaatagctagagtttatttggattttaccatttttcccaatgtcccttttctgctgcagcagccaatccaggatgccatactgcacttagagctgttgctttcttttttcctaactttatattttgaaataatttcagatgataggaagttgtaaaggtaagggccccacgcacccttcatctagtttccctccatggttacatcttatatggttgtaatgcagtattccaacaaagactctgacactggtgcgatgtgggtggacagtccaaatcatttgtcacatgtacatctgtgtaactaccactgcaatcaggataaagaagtcccatccccacaaggatctccctccccaccttccctaactcctggtaaccactaatcgttcatctcttcttattttgtcatttcaagaatgttgtataaatgggagcatagtgtgtaagcattcgggattgtcttttttcactcggcgtcattctcgggagatcatccaggcattgcatgtgtcaacagtttgctcctttttattgctgagtggtattccgtggtgtatgcattggccccctgaaggacacctgggatgtttccagtttggggctattccaaataaagctgctacgactattcatgtacaggtttctgtgtcaggattagttttcgaggagtgtaaatgcttggtcatagggttgttgcatgtttcgttttttaaacaatcaaactttttttttttttttttgagacggagtctcactcttttgcccaggctggagtgcagtggcgcagtctcggctcactgcaagctctgcctcccgggttcatgccattctcctgcctcagcctccccatagctgggactacaggcgcccgccaccacgcccggctagttttttgtatttttagtagagacggggtttcaccatgttagccaggatggtctcgatctcctgacttcgtgatctgcccgcctcagcctcccaaagttctgggattacaggcgtgagccaccgcacctggccacaaactgtcaaactcatgtcctcaccggcaacctaggatgatcagttt

SEQ ID NO: 95339 - DNA, 1011 bp, Homo sapiens
tatacaacattcttgaaatgacaaaataagaagagatgaacgattagtggttaccaggagttagggaaggtggggagggagatccttgtggggatgggacttctttatcctgattgcagtggtagttacacagatgtacatgtgacaaatgatttggactgtccacccacatcgcaccagtgtcagagtctttgttggaatactgcattacaaccatataagatgtaaccatggagggaaactagatgaagggtgcgtggggcccttacctttacaacttcctatcatctgaaattatttcaaaatataaagttaggaaaaaagaaagcaacagctctaagtgcagtatggcatcctggattggctgctgcagcagaaaagggacattgggaaaaatggtaaaatccaaataaactctagctattagtatgattgcacctttagttttgataaatgtaccaaggttatatgtaagctgttaacattaggggaacctgggtgaaaggtgtatgaaacttctgtgaatctgggcacggtggctcacgcctataatctcaacactttgggaggccgaggcaggaggatcgcttgagcctaggagttcgagactaccccaggcaacataatgagaccctatctctacaaaaaaaaattaaaagtattagctgggtgtggtggtgcctacctgtagtccctactactcaggaggctgaggtggcaggatggcctgaaccagggaggtcgaggctgcagcaagccgtgatcacaccactgcactccagtctgggcgacagagcaagatcttgtctcaataataataataataataataataataataaataaataaaaaattgaaaactctgatgccgactctgattaaatcacaagctctggtggcaggtccacgtatttttaatttgccaggtgattctggtgtgcagccaaggttaagaatccctgatcttagctcacacctataatcccagcactttgggaggccaaggcagg

SEQ ID NO: 95340 - DNA, 1146 bp, Homo sapiens
acatcctcagtgactctgtttccaaataaggtcacattctgaggtacctggggttagtacttcatacgaatcttggggagatacaagtcaatccataacacacacgctcacacacacacagtctattcaatctcctggcgtgggattagaataagaaactgcattagtacgagccagcagtgttccttggtgggctgcatgggacccgtgggccagactggtgaagctgtgacatcttgggcacctgcggccttcgggagtgatttggtcttgtcttcaactgaaccagccgcagtcccaggcccaggtggagcctgtgggcctggagatgttcctgaaggcagctgctgagaaccaggagtacctgattgacaagtacttgacagacggaggggaccccaatgcccatgacaaggtagcacaggttgggtgagtcggctggcagcagctgcagctgcaggagcgctgccttcagtgtgttcaagtcctggcctaggaggctgcagggattttcactcttatgggcatgaatccagtggcacctgcagacggaggagagggagcggcccatcgcgtggtgggggaagtggcaattccattcagggacctggccctgggaaggggaccgcgtggggtctctaggggtggctgcactccctctgcctaatcttccatctctgccctcagctccaccgcaccgccttgcactgggcctgtctgaagggtcacagccagctggtgaacaagctgctggtggcaggtgccacagtggacgcgcgagacttggtgaggatggggaaaggcccagcctctggtcgacgcccagcttcacatcccagcagctgagtgcttgggtgcttttgttttgcagctggacaggacacctgtgttctgggcctgccgcggaggacatctggtcatcctcaaacagctgcttaaccagggagcccgggtcaatgcccgggacaaggtgaggggcacggtgctttgggggcctgtcgggaacacgggagcagacgctgttcctggagaagagagcacgtagtcccatgggttagggaggcctcaccaatccagacccagcactgacccccacttgctctcagatcgggagcacccccctgcacgtggcagtgcgcacccggc

SEQ ID NO: 95341 - DNA, 1009 bp, Homo sapiens
gcctggagggtgtgaggcccagcaagcccatctgtgggctgctggccccagcctggtgcagcctctggcgggaggcaaatggcagggaggtgttaggttgctagagttctttagaaggaatatggttctacctgactagaaagtcctaggatctgttaccctatcattccaccctgttctttccccacaacaggctgattcctcagtgctccccagctcctgaactcctgaggtggggcccggtgggaggaagcatgggtgtttgctacggaggctttgccccaggcacaggtcccaataactcataaccttcacaactcctttaggcaattgccttaagtgtttgagcttaaatgtagcttcaaaaggagccgagaactgaacccaggcatttagaattttaccccggggggacttctctgtccctctgagcttggagtcaggtggcagtcagtatgatctggtaggaatcttaacaacatgggggaagctaaggtgtcatctgccctgaggctacctgggcaaatgcccagcagtataaataggttgtggcctcatgtccccccagctgtgttcctgctgacaggagcagggtaggcggggatccgttgtccccctgggtgtcagctgatgacacagttgcggagcctgcagcacccacagggtgagggagcttgccagcactctggactgcaggagctttgaggccggctcccatcccgggcaccagccttgtgacatctgcccttataagacagctccctgctactccacagctctgttttctaagggttcctccaattttcccaactcagtactcatatcctgttcctacaggtaagtggagaaagagttgaagggaaagtgttgggatttggacatggagttcctgaccctggagcctggcctagtgactggaggaggggcccccaagaggctgtggcccgggagaagctgaaattggaagaagagaagaagaagaaagtgagagaggggcgggggccggggt

SEQ ID NO: 95342 - DNA, 1022 bp, Homo sapiens
atttttagtagagatggggtttcaccatgtcaggctggtcttgaactcttgaccttgtgatccgcctgccttggcctcccaaagtgctgagattacaggcgtgagccactgcgcccagagaggcctcttttttagaaggaagaaccactgaaagtggaacaagagagagcagagcccagtgggggggtatgccctttgattccagcctttctctccacaggctgctgagaggggtcacggggacatctgctccctcctcctgcaacacagcccagccctgaaggccatccgggaccgaaaggcacggctagcatgtgacctgctgccttgcaacagtgacctgcgggacctgctatccagctgagccgccaccctatctccagctgcctttaaagggtacacagaccagttctccaagcccctgccttggtcagcatccatgctgctgggcagggaactgaggccagaccacccaggaagagccccagtctggtcactgtggaagcgagggagtagatttggtgtggctaaaagtgtttaagactggacagatgatcatattctaaattagttcatatgagacatctatttatttggaaaaaaataaagttatatccttacctcatcccacacccaaagataaattgcaagattaaagatctaaatataaaaacacaaaactatgtaagtattagaagaaagtagggactatgtgagaagctgctttctagctgaatgcccttggtaaaagtcactttagctgtctgcccctccatttcctcttctgtaatgagagtggttatcatagggcccgcctcagagtcattgtgggaggaggtcagtgtgcactgggagagccctcgagagagtgcctggcacgtggcaagcagcctgagggaggcccgcttcccgagctcctcatcagcactttgcgcataccatgatttcattgattgcaacggtccgatgggagaaaagtgctgtttcatctgtttcgtttttcattgctggttactagtgag

SEQ ID NO: 95343 - DNA, 1434 bp, Homo sapiens
ccgtcggtgaccttggaggcccgggcccccctggaaaacctggggctggtgtggctggcggtggtggccctgggggctgtgtgcctggtgctgctgctgctggtgctgtcattgcgccggcggctgcgggaagagctggagaaaggggccaaggctactgagaggaccttggtgtaccccctggagctgcccaaggagcccaccagtccccccttccggccctgtcctgaaccagatgagaaactttgggatcctgtcggttactactattcagatggctcccttaagatagtacctgggcatgcccggtgccagcccggtggggggcccccttcgccacctccaggcatcccaggccagcctctgccttctccaactcggcttcacctggggggtgggcggaactcaaatgccaatggttacgtgcgcttacaactaggaggggaggaccggggagggctcgggcaccccctgcctgagctcgcggatgaactgagacgcaaactgcagcaacgccagccactgcccgactccaaccccgaggagtcatcagtatgaggggaacccccaccgcgtcggcgggaagcgtgggaggtgtagctcctacttttgcacaggcaccagctacctcagggacatggcacgggcacctgctctgtctgggacagatactgcccagcacccacccggccatgaggacctgctctgctcagcacgggcactgccacttggtgtggctcaccagggcaccagcctcgcagaaggcatcttcctcctctctgtgaatcacagacacgcgggaccccagccgccaaaacttttcaaggcagaagtttcaagatgtgtgtttgtctgtatttgcacatgtgtttgtgtgtgtgtgtatgtgtgtgtgcacgcgcgtgcgcgcttgtggcatagccttcctgtttctgtcaagtcttcccttggcctgggtcctcctggtgagtcattggagctatgaaggggaaggggtcgtatcactttgtctctcctacccccactgccccgagtgtcgggcagcgatgtacatatggaggtggggtggacagggtgctgtgccccttcagagggagtgcagggcttggggtgggcctagtcctgctcctagggctgtgaatgttttcagggtggggggagggagatggagcctcctgtgtgtttggggggaagggtgggtggggcctcccacttggccccggggttcagtggtattttatacttgccttcttcctgtacagggctgggaaaggctgtgtgaggggagagaagggagagggtgggcctgctgtggacaatggcatactctcttccagccctaggaggagggctcctaacagtgtaacttattgtgtccccgcgtatttatttgttgtaaatatttgagtatttttatattgacaaataaaatgg

SEQ ID NO: 95344 - DNA, 1035 bp, Homo sapiens
attttttttttttttttttgagatggagtcttgccctgtcgcccaggctggcgtgcaatggcacgatctgggcttactgcaacctccgcctcctgggttcaagggattctcctgcctcagcctccagagtagctgggattacaggcgcacaccaccgcgcccggctaatttttttaatctttggtagagacgggtttcaccatgttggccaggctggtctcctgaccttgtgatccgcccgcctcagtctcccaaagtgctgggattacaggcgtgagctaccacgcccagcctttggcactggattcttgataagaatgatgaaggcccctcaaggcgtccccacccttcccccacatgcccactccacccatatccctgccaggagctcagcagctgcagcgggggtggatgtgctggtggctctggccagccctgcctgaccacttcccgcccctcccaggtctgggggctagagggggcaccacctggggctggcagtgggtcagcagctcctgccaacggatgtaggtctgggtagccaggtccttgagcatggtgcggtgcatggcctgggggctctcccggatctgcgtgctgatgtggcggtccaactgcatgcacagcagctgcagctcgccctgtggaggcggagggaggccaagaagcgggtgtagcacaagccaggcacatccaaagccgggcaggaggagaacaaattcagagaaaggaaggggcacatttgagtgactgttcagaagttgaggaggaaaaggaggatggggccagcacaactgttggggctcgggtcagtgtcccttgggaatggctcagctggtgggacactgtggggaggaagaggccctggctctcccacgctggcttccctctcagcctcccactctctgcagttcctaacagtgggctgggcgccatcccagccaacccccgccgcttgggggagaagacacagctgggcacccccaccacagccctgccccttgggagactcacccactggtctggagtgatgtc

SEQ ID NO: 95345 - DNA, 1011 bp, Homo sapiens
ggggcagagtcaggcaccaggagcctggtccccatctccccagctgccctctgggcatgtcctcctcccagccagatgatgtccccagtggataacagctaaggggcagtctgtgggttctgcacctgttatggtccctgcgggggcaccacccagatcaaggcccccgactgagcgcgagtggctctagtcagctttctcgaggtgcacaccacttaaggtccccagctcatgctcctgaggcctggggatgtgtggcttgtttattggagaagtgcatttgtacagaatggagttgttggcggggagggggggtgtgctccagggattgggtgatgctctgggataaactcagcccagctgtgccaactccactgcgttcatgctcattctgagtagctctgctcatgttctgcagagggtgtggcctctgctgtgtgtttgtgcataagtgcgtgctgtgcacatctcctgtatatccttgtggtgtgccgcgtgtgttgatagagttggcaaacaagttttactgcttcgctcccgctgctgtaactgcagttgtctgtccctgtgctgggtgaccctgccaagggccgccttaatgggaggttgtggagaaaggcctggctctcactgcagggctaggcagggagggggccgctgccctctggcagctgtgtgcttgcctctgccctctcttgctggcatgctcaactccagcaatgggacatgtgttcccctgggcacaggccacttaccctctgtccccctgaaaggcaggtggagcctctttctccattctcgccatgctctctgccttcccacctggaagtgtctgtctcttccttactgccccactgggctggggaccttggtcaggccaaggtcaggagggctgggaggaaaccgactggttttgaggaacagaaaatggatattcagaacttgtgagttcctctcctgtctaatctgtggttggttctgtcttacttcctccaaagtacagaacatcag

SEQ ID NO: 95346 - DNA, 1201 bp, Homo sapiens
ttgccttttcgtttcccttcagtgccatggggaaactgaggccagagtagggttgacctgaggcggcccagcctggaggaaatgcctactttcccagcgttggggctgctgagctgagcctctgccttttgacgcctacccatcccccaggccctctcactcctgtctgggagatttcctgccctgtgcggctgggtcacagccctcctccagccctgcaaataaacacttctgcccagctccttccccacctcctctggctgcctcaggccttggcccagcctctccctctgggaagaggctgagagagctgctgttggtgtccagggcacaactttctctcctcactgatcccttggcaagtaaagttgtccctttgcttgccccctgtccagctagactgtgggcacatgcagtgtctctagcactgcgtcccacatttggcactaggtgaacgaatgaatccagttttaattcctttgtccttctctgaactcccttcttccattctgttctggcattcgctgttcgctctcctgcccccattctggaaacctgctgcctcctgtgtgccatctgaccagcctctgcatcgtggtccccttgtctcttaaggtctttgtatcattaaggccacaagagcttatagcctggccttctcctgcaggaggctctggactaaagaagtattacctgcatgtggcagaaccaatcccagcacatcgtttgtaattataagctagtgaggtcctgcctgggaaagcaccaagtacttcagcaaaggaagccatgagctcctgctgcagctgtgcatgggggtcaggaactggagtgaatcaggggcaacatagatgcctgcactggccgtgtgtcctggctttgaccacagtcctagctgagcaggcagagcttatatggactataagagcttctgtggactatcccgcttagtgagctgataacgtttttagcattttgaagagcttctggataaagaaaacaaagctgagccgcttttggttatctatggccctgtgcatgcctggtttgatctgggctttattctcagagaagagtaaacatctggtttggagtgatgcttgggggtctggtacagccatgtgagaggcagagggcttatttggctgacagtggtagagggtgttttcctgtgggagagttaacacaggagagtttaata

SEQ ID NO: 95347 - DNA, 1045 bp, Homo sapiens
tatcaatcgattcactgtaaaagggggcacaggggtttagaattgactggtgtaggagcagaggacctggggctggatctgggcacagcaatttgcagggcactgctgggcaggagtccctgatggccaagctgctgggctctgtatctcccacaagctgcagcggaggccccatggagcaggagcagaagcacacgttggagaactgaacttgaaggacaggacttacagcattgaggtcacacaggcaagtggaggctcagttagccagagcctcaaggctacggtgagggttttgacttctgcgcagaagtggggagcccctgcaaggatttgggcagagaagaaacaaaatctgatttatacaacgtttaaaaattactctgcctgctgtgttgagaagagattactgggagtggagaggaaggaggtgattgcagtaatcctggcaagagatgacagtggtttggcctggagaaacagcagcgtgggcggtgagaagtggtcaggttgtaggtgcatttcccaagtacagacagtgggatgtgcgatgcaagagaacagagacaaggactctaggtcagtgcaacaggcgggatggagacgccctttgcctaccctaggcaagacgcagctggagcaggtttggggaggaaatcaggagtttgcttcttatcctggggcacttcttgcaacacagtaaacctcttgtcaaagtgtgtcttccagtttgggatttggaaaacgtgggcttcgggtggctcaaatcggggataaaggtttgcatctactcagaaaatgttagctgcagtcttgactgttcatttattcattcaatcatttgttcatttgacagatacttactagacatgtaccatgtgccaggcacggtgctaggttctggggactctgcagtgaaaaaactgccctcagagagtttacattccagggagtgggggggaataggtgataaaaagcaagtaaattgcaaaggggccaagcgctgtggctcactcctctaatcccagcgctttgggaggccaag

SEQ ID NO: 95348 - DNA, 1062 bp, Homo sapiens
cagcccgaccaacatggtgaaaccccgtctctactaaaaaaacaaaaaattagccgggcatgctggcaggcgcctgtaatcccagctactcgggagactgagacaggagaattgcttgaacctgggaggcggaggttgcagtgagccgagatcgcgccactgcactccagcctgggcgacagggcaagactctaaaaaaaaaaaaaaaaaaagaaaaaagaattcagccttcctgtcctgttcctcttctctccaaaaagctctgactgcaggctcctggcagctcagaggacgtcacttcacggggtgatgaaggggtcactggcagcccaaggatggatggaagggaggttgagcgcgcccgcacctccgcagtaatcttcctggaatcctgggagaagagctgctgggtacaactgacccttccagctcagctacactaggggtgctctggctagaggctgtgcatctctagccactgaggcagcataaccccttgcccagagggctgagacaatgttccagcacatccctgggtgaggtggaccatatgtctgagtcccaggtgctgtgactgcaaggagggagttcagagaggtgaccggtggggttgggttgtctgagcggcttcggcctggcttttgcctcagatgcctcctttgccttgaatgcttcccccaggccttagtagaactggagcttcttgtcattcccactccagccaaaatgtcacctctgcaaggggccttcctgaccacccaatccagagtgccccagcactggctgtcatcttgtcctaagtcactcctggtggccaccccctgatcttttcctatttgtttgctcagcatctgtgttttccatcccctacccccaagcagaaaataagcccctgaagaacagggaacacgtagtttctggcccctgctgcccctcggcacctggcggtgcctggcacaccccgggaaggcagtgcacgcttgtggaagggacaggcacccaggtgggtcgtcggggtgcatggggagaacgtgccccagctgagaccttgggaggggcagt

SEQ ID NO: 95349 - DNA, 1055 bp, Homo sapiens
caggtatgagccaccccatgcccagccacctgttctcttgtttgtttggaagttgctggactcaggctgtatcccatgtgtagggaattacagaacaaccacacacccccgcctgaggatctgagtatcacaccaggaaggaatttccttgctcccagcctcagggagatgggaagcccccaggatggatgagcctgtttttggcacttcctgactcagcccccgctgcccccactctctggtgaaacccagacttcacagcctggttagtatccttgcagacacgtcccagtcccttgagtctcttcaagccgcttgtttggcccgttacctaatatccactcaggaacagcagggcatgcttttatgttcccacaaccctcagttttgtgtcatgagtgcccccgttgagccccgggctgacttgctcgtggacagtcatgatcatttgcctatgcctggtccctgcctgtggggaggagtgccacgtgatgcataaatagctctggtgggcggatggcgacttagcttaaggtcgtaaaagtgttatatatcgtcatcttgttctacaaattttagcacatccaaactctcttgagaacccttgaagaaggtgatttgagatggaacagagtgttttgaagcctggaggggctgttgtataggacttccccccatgcttcccgctgacaatccgtcagcgccaggaggtgccaggccccccttccctcgcctcggcgggcagatgttcctctgcatggaaagtgggagctctcctaagaacctgttccacgactgtgtttagcaattgtctgccaagccaaaccacactcagctctgctataaataccccacacatgtgccagcctgccgtgctcctgcccctttccctcccggagctcgcagctccatgtctggtgtaatgagccacttgcctcctcctggcacagagctgcaatcgcacaccgtcttggatgagcgggggagagaattacactcagaaagacaaatgaacgtctgaggcaggcaggggccgtggagtccagaagagccac

SEQ ID NO: 95350 - DNA, 1097 bp, Homo sapiens
agtagagacagggtttcgccatattggccaggctggtctccaactcctgacctcaagtgatccacccacctcagcctcccaggtgctgggattacaggtgtgagccaccacacccggcctgactttcttcttaactccatctcttcctctctgttatggacttctctggcatcacctgctcaaggaggcctgccctgcgggcgtgtgccgcctccttgcttctacgcttggctcccttttccactcgtggctttagtcatagttgatggtgggttctttgattaatattgtctctcccaatgggccgtgagctccaaagtacggggaccatgtttttgttttgcttttagttttagttatctgttgggttcctggcagctgtgtgagcagggacactgtaggacccaggtggtttttgttgaatgagtgggtgggtctccagaaacactgcgtctcccggtggacagcagcatcttttccagatagctgctctgatcctgtggccagtcagctgtggagctgggtgtaccagagaagctctgatgtgctctctggtcctccagcttcaagccctgaggtctgttggccctgtgggggcaggcatgcatgctttaccccagctcagcaggcatctccagagtctccctgcctgtggcgcactcagctcctgtccccaccactacattccaccacctatacaaggggaccctcaggtactgcgccattagtagctcgtgaggcccaggtgagttcgttcccttaggacagtacctgtcatcaggaatttttaaagctctcaggtgatttttatgtggagctggggctgagatgctccaggttttgagaactttggccaagtgcacagacctcttgcaggagaggtggccaggcaatagtgggggttttgcccaccactttagctcaggactctcaacccccacttttaaaatgaggtgcaaaataaatttaagtgacttaaactcggagagcacttttttgttgttgttgagacaaggtctcactctgtcacccaggctggagtgcagtggtggcatcagggctcactgcaaccatgaccttgacctctcgggctcagg

SEQ ID NO: 95351 - DNA, 1288 bp, Homo sapiens
acaatgtgttgtaattttcagtgtacatgtcttacatttctttggtcaaatttattcctaagtattttattcttttggtgctgttataagtagagatgttttcttaattccttttcaaattgttcattgctcatgtgtagaaatacagatttgtatatattaacctgctgaacttgtttattagctgtgatagtttttttgtggtagaatttggtttcgaaggcaaacatactcttgtgcaactagttgattaagagaaatgaaatgacctcaagtttctttaacaaaaatgttttagctgagctggtatatgactgtccgttaacctagtgccagtcttgaagcaatgtcttcggaaaaggagctctatcagcgagatcaaaacgctttagaaaggagtagagcttgcgtaggttcttttccatttgcttccaagacaattgtccatttttacctacccatttcattctctgttggcttctataatatttgtgtaggaggagggggatataataaaatagaatgaccctggccagtacattctttggatattttgaaagtgggcgagacgttcagctccaagaacagaattcatttcacgttcttgagcagggtcttaggacactttgttcttcctcacttgatcatgcttttccctttgttctcctcgagctctggcctcgtggccactggggccttgggtttccgtacaggcctcattttgtgggttactttcttttctgccgttgcctgttgcattctctttccttcatctctcccttcctttctttattcctccttcccactcctcctctcagaaagcattcataaagttgcttcttgtaaaaggaataaaatggaaacaagatggccagcaatcttaccacccaggtaacccctgttgttattttttaaactactctctgtaccaagtttagcaaatttaaataatagagaaagatgcaaaataaagagtgaaagtcttcttgccagccactccccacaaccacttcctcctcccaagtactcattagtacagtttcttgtgattatttcccggcacaaaatgaatacacaatacacatttcatctatatttgtatgtttatatgtttatctataccgtatttctttcgccacattagtatccatctgaaattacctccagtgccgattgctcttcccagagtttcccagttctccccactggtgtctggagaggccacagcctgcacaaggcaggtcaggtggggctttctagaccacaggtccgccgagtgagggtcctg

SEQ ID NO: 95352 - DNA, 1045 bp, Homo sapiens
actcacccttttaaaatgtaagattcagtagtttttagtatactcagagttgttgaatcatcaccactgtctacttccagaacattttcatctccccaaaaagaaacctcttaaaatgtgctatatccataaaatggaatactattcagccataaaaaaggaaggagtgacatatgctataacatgcatgaaccttgaaagcgctgataagaaaatggatacgaaaatttcatgcctattctgaaatgtccagaataggcaaatccatagagaccaaaagttgattaacagttgccaggagataggggaagaaggaatggggagtgactgctgatgggtaagaggtctcttttttaccagatatgtgatttgcaaatgttttctctcattttgtgggttttctttgtaatctcttgataatgtcctttgatgtacaaaattttaaaattttggtgaagtccaacatatctatttttttcttttgtggtgtcaaaattactgacatcattgtctaatctcaggtcatgaaaattttcacctatggtttcttctaagagttttatacttttagctcataaatttaggtctttgatccattttgagttcatttttgtatgtggtttgagacaggagtctagcttggttcttttgcctatggatatccagttgtctcagcaccatttgttgaaaagactgttctttccctattgaattctgttggcacccttgttgaaaatcatttgaccataaatgtaagggtttatttttgaactctcaattttattccattggtttatatgtctacccttatgctagtactctaaatttgttattactatagcttgtagtaagttttaaagttgggaagtatgagtcctctaactatactttttaaaaatttgttggccaggctcagtggctcatgcctgtaatcccagcactttgggaggccgaggcaggcggatcatgaggtcgggagatcaagaccatcctggctaacacagtgaaaccccgtctctactaaaaatacaaaaaaaaattagcc

SEQ ID NO: 95353 - DNA, 2218 bp, Homo sapiens
tagacactttggcaccaaaaaatatcatgtaaccagttgaaagttgcttaagcagacagtaagagggactcccaggtggtcagaccccgcctctgccccagctgtaggctgctcaccccagagcaagaaagcacatggccctgaaggccaaggccaaggatgtaccatgagcccccagccctttaagtttctgcttttgtgcctcttctgcttcaggagttggctgagctggagccatctgtcaaattagagcattccagactcctccgcccctgccctccatggagccctctaagcgaggtcttctgagtagcaccagtctcagtgccctctcccttttcgtaacctctgcccctgtagcccccgatgcactttggagccccaggggccgcctctgcggcatgcctgccctttaggggaacagaggcttcccttgtcctgctccctgcagtggtatgtgtctcctccgctgaggcagaggggatgccccactctcctttgcttcttgccacgttgtctctgatgcgctccccattaggaaggatcagaaacaagctcttgagtcccctgtcagcttagctctggctcttctaactccagagcatctcctgtggccactacctgagagcccagcctgggattgtgtttccctgcccaggggaccagggactggcctacagaattccatgcctggggtcgggatctcaactggtatggggaaagtgagaggcccggtccattagagaactgaatgcagggacttgagcagatagttgcgtacccaggttcttagcagcattgttcacaatagctaagaggtggaagcaacccaagtgtccacccgtgaatggataaaccaaatgtggtacatacatacagtggaatattacttggccttaaaaaaggaaggaaattctttgaatgtccatgatgtattattttaaaaaaagaggaaggaaattctgacacatgctacaagatggatgaacattgaaaacattacgctgagtgaaataacatacaaaagaacaaacacgtatatgagttacccagggtagtcaaattcatattccatgtatatgaggtacccagggtagtcaaattcatagagacagaaagtggaatggtggttaccgggggctaggggaaggagagagtggggagttactgtttaatgagtacagagtttcagttttgcaagaaaaaagagttcggagatggatggtagtggtgattgtactacagcgtgaatgtacttactaccactgaactgtgcacttagaaatggttaagatggtaaattttatgttatgtgtattttaccacaacttaaaaaaaagctaggtcaagagcaaaagggccaggtgcccagagagaatctgccaggagtcaggactaaagatcaactgccatttcaggaagcatttctaaggttaaattagatccaggattgatgcagaaggaagtcatttcctcagggtttcactaatagcctagggctctgagtgtctgagaggacagcaggcctctggggcacagagctcaggatagactggggctgcctcccttcacccgtatctatgatttgtgtgtgcgcgcgcacgtgtgtgtttgtgtgtgtgtgttcaagccgcttctcatatgtaaacaggagatttgtttgtgtgtaaacttccatcctttcctggagtttgtggtgaccagcagttcttcccagactatcctagggagattcttacgcacttgcctttatcccaacctgctgagtaaggaaagagttgaggggaccaggacttaagagcattgactattacgggtgtgctctagtgactggggctgagggcccgagtgtcccagggcactctagtgtgtgtgtggggggtggggcggtaacggagaattgtattcctggattgagaagcaacacgtgtacatgtcagctgtgcagagagctcagtgcactcagagaagggatactctggcacattgccatgcctcattgcagtgagcattcatttattcagcaaagacacattgagcacctccttcctcaagcacttcgctagatggcaaagagaggatcagggattaataaagtcctgttctcaggaggctaataggtgggaggggattaaatgagcagcgaccatcagagacagaaaggaggcaacgggaagaggaattacttgtagtcaggtaggtttgggatgtggggagg

SEQ ID NO: 95354 - DNA, 1048 bp, Homo sapiens
tagctgggattacaggtgccggctaccacgcccagctaatttttgtatttttagtagagacggggtttcaccatgttggccaggctggtcttgaactcccgacctcaggtgatccgcccacctcagcctcccatagtgctgagccaccgcacctggcctaggcttttaataatttgttcattttttcaaactaaaaaacaatttaagcaatagatacaaaactaatggcaaagacatgaaccaaacaggaaattgttttaccgtttgtgtggtggtttggtgagatgcttcctgaagcccgcagggtcagagtcctcccgggtctgcagcatcgttcccatttgttgtgccatttcattctcaggaccaccctgtgatgtgggtcagggccgtaccttgggtcacttggccagaaagtgagacaggttccatgtgctaggttggtgggctgcaggcgacgccacaccacacccagtgccagttgctcatgtccagatcctaagggggcccctgggctgttctgcccctgggtttgctgtcccaaacagtgggcctagccggaaaccagggaatgggccgtctcctgattagaggaagagaggcagtgtccagagcttgttttattttattgttcctgttgttaaatttgtgttatattgctataaaatgaagcagaacatagttatatgaagtaaagaggaagttgccctcttttcctctcccctccctctgattctgctccctgggatgaccctcagttgtagtgggatatgtcatatgctgggggtgggcgttgcacgtgtctgagcatgtctgtgtccgtgcatatgtgtgtaggcttgtgtgtgtgtacacacacacacacacacacacacacaccctctgctgctgttttcacccaagaacttgggctcagccacgttgccagtccttctttatgtagatttagctcattcttgggaaacatcttcgctgcctcccttttccccatcctcatttcaatgggtcattaagtcctgacagttttcacctctctccgatactgttg

SEQ ID NO: 95355 - DNA, 1686 bp, Homo sapiens
gagccaccgtgcccagcctgataatcatctcttgactaaatcaaggatcagcaaactttgtgaaaagtttgtaaatagcaaatattttaggccttgaggaccaggtggtctctgtcaactctgctgctgcagcaggaggctcctgcagatgctgggtgaatgaaggcgcatggctgtgctgcagtgagcccttgttgcagaaacaggccccacacaggactcggcctgcaggctgtactttgcctggcccaaattagaaggacccctgcctcctgactggtgccagtttttatggtgaaagtttaggaatgtgttgggatttgagcagccgtcccaggtggacaaagagagctcctcacacactgcccagagttccagggaaaggcagccggccatgacgtcccacatggactcccacgaggcaggtgctgcttcctgtctgatgttgcaggaagcatgtggatgggcatggtggggcatgtagactgaatttaattagcgtgtttagggccaaaggccttcctcggcaagagcactttggcagcattatatttgatgaaagcaactttctctctgagctgaggtgcatggatttggtttccaggttctccactcactagctacatagccatggaatcaaaccttttaaaacctttttaaaaatctctgcagcaagagtaattcttccagctctgtatctttctactgagtacctccagcattccggaagtcatggcttggatgttttgaaactcctcacagaaaggaagttatctgtgcaaccagcttaacgcagaaggtagtcctggctttgaaaacactggtaatttgctgggcgcatgacgttttctagtggtgctttgagaaagcctctttgacagcagccactttgaggtggtggttttgatgtgggatcatctggatgggactgttcagctttctgctttacaaaagtcattcaccagtgtacaaagccagcagcctcttcatccctgaatagggccagggaagggggtgcaggtcaggaagggatgcttagggtgggggctgaccactgcctgccagacaaggcgtcatctaattgccacaactgcccgtcacagaaaggacccctgacagtcccgagcaagcatctgtgcatgctctaacaatcggcttgcatcttgaatgggtgacatcctcaattctccatttcttaaagttaaaagaccttgcgtgtgtgctgagcctggggcagaggcagatatttaaaccacaacatcatcctttattctcagctctaggctgcacaggaaatccccaattagatgtataagagtcgcctcaggactcttaataatgcacatacattacagccagcatcacagaagtccctttaaaagatggttttagggacagggacaggacccctttgtagattagcctagttcttataggcttttttttctttctttctttctttctttttttttttttcttgagacgaagtcttgcactgttgccagggctggagtgcaatggcacagtcttggttcactgcaacctctacctcccaggttcaagcaattctcctgcctcagcctcccttttgtattttcttccctttgagatggagtcttgctctgtcacccaggcaggagtgcagcggtgcaatctcggcttaccgcaacatccacctcccagatt

SEQ ID NO: 95356 - DNA, 1055 bp, Homo sapiens
atgatgtcagatcattgagattgaaaagtgtgtggtgcaggatagagcctggtgcaggataagctgtgtggtgtggtgtgctggcgcctgtgatgtggtgttgtttgctgtctctgtgtgaagtgtctctgaaagcacatgaggaatgcctatcccatgggcacctgtggggagggaacaggtggctgggggtggggatgggggcagggagacattttaccctgcgcctttatactttttgattttttaatcctgtaaacatagtatcttttcagaaaagcaaacaaaataaataaagggcttaatttagttttttttcttttttctcctctatctttgtacttctctgtcgtcctcattcccatgtcctgtttctccagttttcctgggggggctcaggaagctacttcaacaacctggactacttactgcaggagaagaggtgagcacagggcgtggcctgtcatggggtgcttatttctgcagggttggcagcagtcccgggactcactgcagagtctggtcggagtacagcggcctcccacccagactcagcctgccctgtgtgctctgatcagtaacaggcaggtcgccagggcagggggtggcatcaccaaggcagagagcccccagactcccaccacgaacagagccctccttctgggtcccctctccaccttggctccattctgcccaactcctgccagtttgagggtgtctcctcccactcaagggttatgtgagagggaagtggaaaagcagactgttttgtggctgagggttacagcctggctgtggctggagggtcatgctgggcagacgggacttcctaacatttctgccgctgctttctaccccagtgtgcaggcacgcgttgcccattttcccatcctctctgagtttcacacctgccttctcccagcatattagcttctaactagctctctccctgtctgccataagtagtttccacggaccgctgaaggcaacagtcacgtctgatgagattggaaatccctagggaggtgcaggtggctggggacagacaggggtcg

SEQ ID NO: 95357 - DNA, 1050 bp, Homo sapiens
agagagcactcgacttccctgggactcctggctggtccaggccttgcaggtcagccccggtgcggccgccgggctactctggcgcttttcaggttcctgcgaccccgcgtggttcgggttccgacgtgagccgggccctcctctccacaggccactgcgcggccggccttggtggggtggaaccttagattggtttgagaactggtttatgttttggttgatgtggcatgttttgttttgatttttaatgttccccagggtgcaaagggtagctggtgttttctttccagaaaggctttctattcccagcccctgcccggtttgatggatgtggagtttatgatgctggagaccgttttctttgtgggtagaacgcatctcctttcatctttcaaattgtgagctcagtccttgctgacaggagccgctgctctcgccagcattcccaagctattaaatatttgtttaaaaggatggatataaaacatgatgttaggaataaggcgtcttgaaaaagcagtattcgcagaaacagcaccattgtaatattctgaattcatcttggctcttttgacatcagggcccaaagcacttgggattccgtaattatttggcctcatgctacactttaagacagattattttatttttcttgtagtcaggaaagtaaaagaacaaaaaaactgagatgacatgttgaaatctcactgcgaggacgcgagggaggatgagggaagcggggagggcggctgaacgctaaaggctggggctggggtttgcaggattcggggagacaagagcccaggcagagggatgtgctgggcagagggggcgccatccatgggctgcattgtagagtgagcatggccaagtcaaggagctgaacaagacgacttcagtcctgaacctggaaagaatgtgagatggaggagaaacaggtcctggctggcgggtattgggccccaggagggaaagagataacaaagttaagtttggagactaacgctgtctcctgtttgactggggggccttcatatcccctcccacgct

SEQ ID NO: 95358 - DNA, 1050 bp, Homo sapiens
tacaaaagttgttcctgaatgagatcattaagttggaatcacacacccacatatttccagaattccatccaataaattcacaaacacttgaaaatcacaatacgtattttaggtaatgggccataagggattattttaattgtaagaaaatgtacaaaaaatttgctttttacaaattttctatttaatagcaataaaatgaagtgacactaaagtacaaaaaagcctgaacagtatgatttctttgtatcaacagtgaagggctcccttgtatatggagttcccaaacagtaagttttcttaatcctgatcatctgtggccagtgtaaaagaaaggcctgacaggaaaagttaaggagccagctgggtaactccatatgagggaactcttggtgacattcaaaaaactcacacttccactttcaaaatcaagaaacacaccaacccggcccagaggtttctctatatagtgaggaaactctggggaggtggtcaagagactgaaatgattatccaccttcagacacaaaagaagaaatatgtcctcagagttaaccattgtgctattcttccttatccaggagtcgttacagactcccagagcccagtcacaagagttgtccacatccagctcccagtagtgtttcccaaaggagaagaccctggctccccatgcagcaaaatagtcagatctgtcagaattcaaaggtccacgtctaaacatccaacttctcacatcctcaaagagcctgatattgtgattggttacttcacaatggaaggaaatttccactgtagaaaaaagagaatattccagtgaaaagcagtttacaaattcttatgttcagataagaaagagattctcactagaaaacacaggtcaagattagaaagaaacttctgtctggaaaaatgttggaatcaaagggtgttaggagatctgcacaagtaaatggctaaactaggatgatcacaatttccataaactcaaaaagtataaaggggaggaaggtcatgtctatgtctcgttagcgacctttcataacaact

SEQ ID NO: 95359 - DNA, 1028 bp, Homo sapiens
tacttaatcagtctctttttgggtgcaagctccatgaaggaaggtagagttgcacattttattcaaaatgtcatcattggtacctagaacagcacctggcactcagtaaagaatggagtaatcaccgtgattctcatcatccttctaatctctttaactctgccaccctccagctttcaggtgatcacagagctatctcttacccggtgttcctcagctgcctcttcgatgggatagtgtttgtgagccccgtgctcctgagagttggagcacagcaagcagaggagactcttgtccatgtcacagaacatcttctttgtttgcctatgggtcccacatatttgtttctcagagctcaggaattgccagagactggcttttctggcaatggtcactaaattcttcagaagaatattggttttgaagtcctttttctgtgatggttccctgcatgcacggcagttggcaggactttgggcttcctcccaggaaaggcagagagggcctgcagaagctgtgcccacagcagatggtgacagggtctaccaggtagttcaaacagatgacacaggcgagttccttctggaaggcatgtgagaagtctgagtccattttcctaaggaaagaaaaccacaagaatttaatcttctaccctggagagacaaagatccaaacaaagtttgaatcggattgtgatagaataatatcctttctttctagagaagtataggctttaatttgcaatgacagaaataggaaaaatagaaaactaaggcacaaagagacatcaacctctagaaaaagtgactgttctccaattaacacatgaccagctttccaaactctactttcttgcatggaagaatgttggattttttgaggtgttagtatccaccaaattgcttgggcttcaagggtttcatcaacctgtaaactcaaggtttgagtcttgaatggtctgaaagtcagtaacactcttaattgccagtgattggtttagagaaggaaagctaactaagctcttctac

SEQ ID NO: 95360 - DNA, 1054 bp, Homo sapiens
aagggagcttcaggcaccagggaagaccctaatttagtcccctccatctccaacaagagaatagtaggctgcatctgtaagtacctcacctctattttttatccacttgcttaatatatcctacaatagtgtgtaagctgcctcaaatcttcagtgtgtgagtgcatgttggtaagtttgtctaagggtcttgacactctcaagcctcattatgcctgatagttcatccttactggaaagaagcgcagcacagcggtaagactggctcactgggagtgcggcatgaaggagtacccacccagcaaatatttattgttatactgcttctatgccaggcatcattttagacactagggatacataccagaacggaccctgctttgcgttctacataggcaagggaattgttagaatttacagtgaccttgatacaaggtcagtttactcataggtgaactcagagcctcaatttcttcatctgaagaatgggaggagggcttgaactgatctcttaagatatcaaccatagtcttacttgtgtatcagagatgtctgaggaaaagaaattcatgttgaaagtctccctttctaggttggatgaccataaaccaccttttttcccttttaggtgaagaggacaataccagcgtcgtctggttttggctgcacaaaggcgaggcccagcgatgcccccgctgtggagcccattacaagctggtgccccagcagctggcacactgagcacctgcactaaattactcaaaatgtgctgtaaagtttcttctttccagtaaagactagccattgcattggctccttctcccatagatggctggtcttatttcttacccgtattctttggtaggcatggaatatgcttattttgggaaaagctgtctgttaatgctagcttgccatccacttactgaaagtgtataaccagtgtatagtgcttagattaataataagaatagatcgacaacccgtaatgcaatgaatgggaccacctggtatgagagaaaggggcgggctgaggagtcaggctgacaggact

SEQ ID NO: 95361 - DNA, 1943 bp, Homo sapiens
ttccctgctccgactctcagggctgcctccctgagctccagggccagaatgcctggatgcctgggtagccagtttggggagtgggctgcaaggggcagccagcagctcccactggtgtgtcactgcatccattgccacctcctgttcgtgacctgacagggtgacacagcccctttcacactctgtcctcctatcttcctgggtagatgccctggtgtagggctgagtactgaatggtcttccatccccagcaagggggtgcagcccagggtcaggcccttcagagccagggcagaggatgcacggtggctagagccgctgcactatccttttcagagcacttcatccacttgctcctccctctaccctcggcaccctgggtgggaaagggttgatgctcatcatttattgaggggaagccacttaataaggagtcagacctaaaagggggtgggggacattttcttacctcacccaagaaagaggtcgtcacttttgctgtggccagggccccacctccctctctcagatatgtacaataatttaacacggttgcctgaaaaaaacttttgtaaatcattatagtaataattatggacaaggcccagtgtgtggctctgttttcttgtggctctctgtgctatcgtttgttcttccatccctggggactttcagagaaaggaccagagagaatgcagcaaggcactggctctagcttagcggcatgaaggtttcagtggttggcccgccaacgtggcacaaaaagcctcaggaggctgggctctcaccctgtagcataattccctcgcctgttacctcccctgctgcagtccaccaggggaagtagaaccaggctaccttctttgcccccggaccctggacaggcctatttgagcacctctgctcaccccattcagccagggctaaggctggtggacaccagcaatgatgcaagctcacgccttcagacaagtcaggatggggaaggcagggagaggcagagaggctgtgagcttagccaggccctagaggaataggcagaagagcagtgaggaattagggtttggagaatgtctgctctttactttcttaagtgtttgagaacctacagtgtttccaggatggtgccgtgtgtttggggccaatggtcaacaagttatatccttgccctaacaaatacacacgtcaagggagaaagacagatgagccattttagtacagagttgtgggggccgaggcgttagtcatctggcccgacaggtggggcaggccgacttgcaaggatccagaggttatccagggatggggaaggcattctatgcagatgtgagagcccaaagaagcacctgggaccagtgggtctggagaggaaggcagggacccaatgcccagtcagcagggaaaggtcagtggtctgtggtcattgtgtgagatgaacaaaaaaggtgggttgagctggcacatggaggattgttagctgtgtcctgggagatgggtggccagccatagaaagatggtgaccagagcagtgtgttgtaggcagttggggtttgtggggggtgagggcagccccaggactgaggagatgaggtaggagtgaggagagtactgaggcctgtctgccaaggcgttttgtgaggctttgtggtcacaaggcagttatgcttgcactggccctcaaagggaaagcagaatttgcacggagaactccatattagggcaccctccagaccagttcttcccacagtgctctgttcatggcaccactggctccctgcctcccaggttagagccttatccatcgacgctttcctcttccctgtctctcccactctgtcagtcaccaggttgtgtggttcttctgtagtacctttcccactggtccgttcttttccagcacagccactgccaccatagctatgaccacagctccattccctggc

SEQ ID NO: 95362 - DNA, 1046 bp, Homo sapiens
gccgcgacgtctcccgctacctccgactcctgctgcgcaaggaaggggttgacttccatacctcggctgagtttgaggttgtccggacaatcaaagaggtgacaaggggcgagagggtgtggacacgacctggggtgaggaaagggtggcaccaaggcacaggtgtcccaggtgcagccttctgagggctgtgtccctgtccccgcagcgagcgtgctacctgtccatcaacccacagaaggatgaggctctggagacggagaaggtgcagtacacgttgccagacggcagcacgcttgatgtaagtggccgggcctggcactggagtggcagccgatgcccagcctgggggaaggggtagcccgcttctccaggaagcctgtctgcctcaatcttgtacactaaaggtggggcctgcacgattccgggcccccgagctgctgttccagccggaccttgtcggggatgagagtgaggggctccatgaggtggtggccttcgccatacacaagtccgacatggacctgcgccggacgctgttcgccaacatcgtgctctcaggtggctcaacgcttttcaaaggtactgtggcttgagagttggtggtggtgagacgaggcccagggcagctggaccctcagagagtatacccctacccagagccatattctgttggctttttggtggtgctcaatgaacattttttttaacagaccaaaatttaaaattaaattttgtttactctgtgaatagaggagaagtttacacaagctctaaagtgtattgtgagagtcgagcaaggagcatgtgcggcttcatctcacgctgcctctgtgaggacgcagggcccgcaggcagccatggggctggatcatttctcagccttgcccttcatcctgggaagagctgctgatagaggaccagcagtagctgggggccctgaaggctgggtgcgggagctagcagcgaggaggccgggtgcagaccccaggctcagccagctttgtgttcacaggcttcggagaccgattactcagtgaagtgaa

SEQ ID NO: 95363 - DNA, 1071 bp, Homo sapiens
cttatcccttcgctgggtgggaggtttctaattgccccgttctttgggggatccttaagtccagcttccaggtgggggcagcgataggaccaagttctcctagtagtctctgggaagccacttgagggaagctgccggtcatcccatgcacccattggtcttctccagcaggccctgtaggtcgtccatgttccatgccttctgggttcttgggggagaaggaagctgttgaaaaaaaaaaaaaaagacccacacagaggggtttcttctagcttttgggagtagcatgtgctatggaatcctgctggagccaaccattagttgtgcagaggaaggtgcccttcgtggtttctctatctctatattattgacattctgggctagctccttgttggtagtgcaggctcgcctgtgcatcgtaggatgttgagcagcatccttggcctctgcccactagatgccaatagcatcccccactgcatgtcccctctccccagctgccagacattgccaaatgttgccagagcagggggatacaaaattgcccccaatcttgaaccataggtgtacttgtaaatgatcctggcagggtccctggcttcctccttggcctgccttgacggggcagccagctctctccattgcgggggactggcttcatctggtggtgcatgtgggcagctcaactttgtttttccttgcagggttcgggggtgattaaagctggctttgcaggagaccagattcccaaatactgtttcccaaactagtaagtgtggctcaggcagcagccttagtccttttgtttaccttctgtaagaacattggccttctgtcacagggctctttgaagacaatttgtgccctgacctgtatggaaaacaccaaatttgtgaggttgacactcttgagagagcactgaaagaacaagacaagcgttctagggttcccctttgtcttgggagtctctcgttttggtcttgttgagccagcaaggaggaaaagcaaccagcatttccctggggatggggtgtggtagcagcagcaagaataaagggagacatctccgag

SEQ ID NO: 95364 - DNA, 1039 bp, Homo sapiens
cttcttgctgcgtccccagggacatgtattcctgaccacagaaggaagagcagctccccacagcccttcagtcctgcctgacactgcactgaatgctcagcttgcccctagagcaatggggtggaggtgtgtgttgaggggaagtgtccatccccacccctacccaccctctgactccagaggtagcagtgtttgaatttccccacaagagtggcattgctttctctccatgccaaggctcctggaactggtgacttattcaggccacctcccccaacccccacctccagcatcctcttcctaccaaggctcatccattggacctgccattttccctccatgccccttgagatgccagcagaagtggtcagaactgtggcccctcccatagggaccagtcaaagttgtgggtggcctgagttagttaagagaaactggggggaagagagtatcccagaggctctgtgctgcccagaggcaaaaagaatttcacagatgacaaaccttactgatgggaagcagaatcctcacgctgggaagcgtcagcctccaccactgcccagcgagtagacagcaggactcctgtgcgctgagctgagcactgtggtttttgttattttgttttagatctcctctggcaaacacgacatataatatttttataatggatggaaagacatggtggcacaattctgaagaaaaaaatttcacaaaacttgcaaaaaaacagaaacagttgaagagcagctcctgtgtctaagccaggtcgtggggccgtcaaaccaggacttgaaaccacaatgcgaggacattctccatctgcgcaccacagggaggcaattccatttctgcccgggaggtgtattctacaaaaacgtctgcttcccatcccaatttgaatggaccaagaaaaactgctttaccataggacacttgtggcaatatggcaccgatggctggcgtcggtgaacccgacagactatggatttatcatttaataaagcattgattcattttttcagtcattcattgaacagat

SEQ ID NO: 95365 - DNA, 1690 bp, Homo sapiens
cagctgtgttccaatacaactctctttacaaaagtaggcagagctggatttggtccacaagctgtcttttttaaaatatcacaactagccggcatgatggctagtgcctgtaatcccagcactttgggaggctgaggtgggaagatcacttgagcccaggagtttgaggctgcagtgaggcatgatcacaccactgcactccagcctgagtgatggagcaagaccctgtctcaaaaaaatcagaaacatctgctcaaatacatatatataacatttgttctaaagtaaacaaagtaagaggaatgcgtgccccagcctcatcttttctgtagccttacccccttacccacttgaccctctgcctgccgggctcagtgctggacgctttctgttttgtcgcagtcggtcctcggtaacaccagcggcctgtggtccaccactccattcagcagctccatttggtccagcaaccttagcagcgcccttcccttcaccactccagcaaacacgctggcaagcatcggcctcatgggcacagaaaactcccctgctcctcacgctccctccacctccagtccagctgacgacttgggacagacctacaacccgtggcggatatggagccccacgattggaagaagaagctcggacccttggtctaattcgcactttcctcacgagaattaaattaagcaaaaaacaaacaaacatagtgggccctcgtctagatcatgatgtgccagtttctgagacatctttttaaggctcttactgcagctcccctccccaccctcctcttctttgcaaaacagacccaagcagggcaggctcagaccactcgcttctttcagatctttcttgcaattatgataacatgagatttgctgttgtgcttttagagaaaagtctggactcagccacaaactctaataagacctgtacatctgagaacctttcccgttactgcgttttcaccacctgtcttccccatgctttatttatctgtatgaacacagatttgacattacagctaaggaaataatttgagttgattcagaaatcctggcatgtgacaattttgttaaattaccaagtttggtttttaataatttctcaatattatgcgccaagatctaattttaaaactgtatgaggactttgtgctgaaaatagagtatttttttaaagtaaggctgtcttggtttaaaagcagattacagaaatgtaagtcaacttaagaacggtgaatgaatgtaaaaacattcagttgagaccatatgcattttctgtgctgtttgtacttgaggtatgtaacatttgtatacctgaacttattttaaagatgaactgaaatgcacatagccaagtcttgagatacaagattgaatgtgtatttcttaaaaatacaactttgtgttgtactttgaaataaatgatgcttttttcaaaagccttgttttgtggttttttttacacacaaggtgtatttattaggattttctcacaccaaagtaaaccaccttatccttgccttactctgtggagctgacaggttaagacggggtttgccttctcattgctggaacttcctgcagtctaatggagttctgtgtgttcccatggcaatcatggagggtccttgatcgaaaacaacttgaaagcctgtttggattcatccagtaagcgtttt

SEQ ID NO: 95366 - DNA, 1018 bp, Homo sapiens
atttgagtacccccagttgaagcagtgtctcctgtttgtgaagctgtgcactatggatccgtttgcactaaccaccatacatttttgtgtgttgcgttttcctcttgtaacatttagctcgggtttgtggagtcccgtcagcaacccaagcagccctgacttcactcccctcaattcgttctccgcctttggaaactcttttaatctaactggtggtgagtgtttaacactagatgtgtaactaataagcctgtggacagaggaagggagaggaggtgtggttttgtgtgctggagaacacagcacagcagcactgtggaagaggccccgcaggaagctccctgggaagggtcccctcccctcttcctccctcatccacaccagcagcccagaggggcagtggaccaggctcgacacggtgtgcgcacaccagttggtgtgagttccatggcgggtattgaagggcttcacagaagggttctggtctgaaatgggacccctgagtgtgccaggggtcctcttcttgctgtccagaactagaggtcaccatggaagcttcccattagctatcatgtgagagtggggaaagtttgcatttggatgtcattggtggcatatcagctcgtgcactatgcgtttgagttctggaggacactcctgcccctacttcctctgggctgtggtgggctggtgaagtgggtgtggtggctccaggagcagtggttggaggtatgccattgagtgaagccccatatgctatagtgatcatggcaaaaccaaatatggacttgatgactgttgctttatttccagaagttttcagcaaactcggattatctcgatcgtgcaatcaggcctcacagaggagctggaacgagtttaatagtggcccttcatacctttgggagtcgccagcgacagatcccagtccttcctggccagccagttccggctccccgacccacacagccacagtgagtacttggggctggggctggggcctggacctggcccaccc

SEQ ID NO: 95367 - DNA, 1003 bp, Homo sapiens
ggatacagaaaagcaaaagggaaaacaagccatgcctgaaaaacatgaaagtgaaatgtctcaagtgaagcaaaaaagcaaaaaactcttaaatattaagaaagaaatcccaacagatgtgaaacccaggtgagagaaataagtgtacagagaaataaggtctataaagaagttgctggcgaaaaccaggtgctgttttgatttggccatttggctggctggttggcttttaggggagttgatagcaaaatccaggtgctacgtcacattcctcttgggatttttctgtcacctgatatgtactgttgttgactcggaatagccatatgcttctcaagtcagatatgcagagggcagagctcacgatctgttataaaaatttaggaggaaaatttctgttggtgattcagtcccaggctgagatccattttacttctgcacaaagatgaccttgacgattgaaccacaggtacaagcataactttcctccaaaagatctctgagtctgtcgaattgttaacccagttgggatctagagttccatgccataaaacttggaaaagtttattcttaccttaaaaatggttcagagcaggtgtcaccagtcagacggttctaccattaaataactccagttcctccccatggaatgggattcagtggcccccggggagggcttgtgcaggctgtttccccagggagatgagtgagttgaactgttgggttattaactgaagttacttcacattttcattaaaccttggctcagcatctacctgataattttagtgttggtgcatcagtaatacctttcctggttcattgtatagaactgtcatcagcacgggagctgctgtctacccgcttgtgggttgtgatcagtagaaagtgacagaggaagtcgaataaattaggtgtaaatttaaaaggaagacatggcttgtctgtcatcataagtgtgggccatagatttgtggaaggtctattcttactctgatcctgg

SEQ ID NO: 95368 - DNA, 2122 bp, Homo sapiens
gctcactgcaagctccgcctcccgggttcatgccattctcctgcctcagcctcccgactagctgggactacaggcgcccgccaccacggccggctaattttttgtatttttagtagagacggggtttcaccatgttagccaggatggtgtcgatctcctgacctcgtgatccacccgcctcggcctcccaaagtgctgggattataggcatgagctaccgtgcccagccaaaactgtgggttttgtctgttaaaagttgtcacagacaacttggttttctattacatcatattgtactttaccaagaaactctgcctttaacatcgaattttgttgcttgtctactaacaaatgaatcctgattttccaattttttttacccctgcagtgcactgtttcttttggtcattggaacagcctatttggaagctcaaggaatatgggagccatttcgaaggcggctatcctttgaggcctcgaacccgcccttcgatgtgggaaggccatttgatctcaggagaatcgttggtatttcatctgaaggaaagtatgttcacatgctggcaataaattccctagtgtacatagatttggctgataaaattacaataaaaaataagtttcttttcatctttgctcaggagaaaaaaaatcttaattctgattacttaataacaccctgtatggaactctgagtgacttagagctcatgctggatactgtgtttttattatattggtaagggttaaaatacttttagttagatcactgatggtaaattataaatgttcagatagaacagatgttagagagttgtagaaatttccctatttcttgctattttttccctagtgtagtttatatttatggtggctgtactgatgaagttgaagtttttttttaatattagattttgtaggttgctatttactgatctgcagttggtccctttttcagcttgaacacactcagctgtgaccccggtcacagtagggggttctgtggagcaggcggttcatcatcccgacccagtgccgggagtcataagcagtgtggcccatcggtccacccacacagcagtcacagcaatagaaactcagctgacgtggaaaacgtcagagccaaaaacagttcaagtacctctagtaggacttctgctcaagcagcttcttcacagtctgctaacaaaacaagcccccttgtcttagattcgaacacagtgactcaaggtcatacagcgggcagaaagtccaaaggggcaaagcagagccagcacggcagccagcaccatgcccacagcccgctggagcagcaccctcagcctcctctgccaccgccagtgcctcagccccaggagccgcagcctgaaaggctgtctcccgcccccctcgcacacccttcccacccagaacgtgccagcagcgcgaggcacagttccgaggactcggacatcaccagtctcatagaagccatggacaaagacttcgaccaccatgactccccagccctagaagtgtttacagagcagcctccatcgccattgccaaaaagcaaaggtaatcatctcccactgccggagatccgtgatgtgtgagggaaaagccagtgcgtgcttaaggagctattaagattatagttgtggtaaacaactaattcagtaggttcctctggctcagatttatctccagtgttggacttcaacttttccataaaaatgcaattagaggtatctgtcataaaagatatatttgtatttcttagattgtttaccaaaatcagaaattctgtggacatctgcttttcttttcagctgcctgagattgtgttattgtgatagatttagcttttgttttattgttaaaataattttgagcacaggagtaaaatggagatcatctgccttttaactccaaattaggatttctttactttagagcaggggttggcagactacagttagcgggccaaatcaccacctggttttataaataaagttttattggaatagaaccatgctcatttgttggtatatcctcagctttcatgcttctatggcacagttaagtaattgtgaccaaaacaatatggcccacagagctgaaaatatttgctatctggccct

SEQ ID NO: 95369 - DNA, 4576 bp, Homo sapiens
tggcatgtacagagacaaccgtatttacctcagaagcaagaattaaaagtaatgtgcttcataaagtctgttgactctgagttaatgtttgtggaatcatgctgaagcaagtagctagatctctatgtgtgaaacacacaccgatctatgccagggggagtagaaaacaatacaaaatgcaccctccttccatgatagcagaagccatgaagaactggtggatgtttatagccaagcgttgacaacccttccctcaaaaaagtttacacttaatgttgcttaaaaaccagaacggtatatccttatatgtgacctgtgactgtttttgtaataaaaaagcaaatgtttttcaaccttaactataactggctgtcaaaaagtcatattttgaatattaaactaagctatgctttaaactttaaatcattgggtgtttatgaaacagtaagcgtgtgtaaccttcaaaataagattcaaggagaaatgtataggaattggaaatctttttacatttaaacattcggtgcagcctgaagacccttcagctggtccccttcagaggggaggagtggcgtggcagtggcaggaggcctgaggtgttggccctggtccccttcagaggggagcagtggcgggaagcatcaggaggcctggggtgctggcattggttccacaagtgtttgctttgtgctaatgtgtctagctgatcatcttaggtttgtgtccttttctgtgtgtggaatatttcaaatttttaggttaaaaacaaaaaagatatgtatccaaaaacaaatgccttgtgcaaacattgaggactttatttggtgacctggggaagaaagcccctttttggacttaatgtagaatatgaatctcatcgttggttactctgtgctgctttccagctaacccatatctaaacatgacagataaaattgtttatgcatttaatcagtttgagaaactatactgggctctagatggggtgtaagcgaagaaacattcttccagagaatatattcatgactcctctctgtttacccaatgattcaaggctcatccactgcagagttcaacaggatttatggagggcctctctcgacatttaattttaaacctaattttaaaacctggagaaaagaaatctgtcaaagtaaagtttactccagttcacaacagaactgtttcttcacttatcatagtcaggtaggttctgtgatataggtgtgggttcatttttactacttacttagaagtcctcacttgttttaagatgaatttgcatgtctaacttatgaaatagtttgaattcactttgtccaaaacatgcacacactccatgcctgatgaaacatacctttgttatcaaatgcatagttcaaaaacatgaatggtgtcttaatgtgtgtctcttaaaaataaaaacttgctcttctctgtgtatttttgaattcttaaagtataaattctcaccattaaatttaatttctatgtggtgctctgtaaaataacagtagaaattgcaaatcaaaagattgtgcagatttaatgagagaaaaatctgtaattctcattcttgcatagaaataacctgactgtgatggatgctgtgatggtccaaggacaaggaacaactgagaacttgagggtggcaggcaagcttccaggtccaggaagctccttacgctttaaaatcacggaagcattgttaaaagattgtacagatagtaagtcttcctaacagtttcaaggacactaatttcagcatttgctttcaacagtaaataatttcaaaaacaacattatttctgtatgtgcacctgtgtatattagttatgaatgcttaagagcttaaggaaattccatgttgtgtttagagttgtttgatttggatcttaaaagatttaaagtgtttgcactcattgcataccttagctgatttactctcagtatgaaatgtgaagtatagtcaacttttgccatctaaaatgatttatcaaagtagattacctcatgatgaaatctgaggaacagctgatctctctgacatgcagggatggtttataacctgtgacatatagtaattcatgaataatgtatttatcatttggactgggagcacatgatggcaagatttagtcttattcctgattttttatcctttaggtttaaaactaagagaaccaaatttcacattgaaaagaacatttaaggtagagaatacaggacaacttcaaattcacatagaaaccattgaaatcagtggatactcatgtgaaggatatggctttaaagttgttaattgtcaagagtttactctaagtgccaatgcttctagagatataatcatattgtaagtattttattttaaggtgtaatgaatcactaactttcctcaaactctgtgcaaagatatgttttcatatttaccaaaggtctttatccacaaatgcattcatttgtttttttttcacttaatctttggctaaggtatttcttcatatcttagttttcaaagttgtaaattttttttcacttaatctttggttaaggcatttcttcatatctcagttttcaaaagttataaaactttatctccgaagtggatcagataatcttagaaatcaatttcaaaattattttcagggttacgttaaagcaaaagatgttgatgtaaattcacagtccctcagcaacagagatttgtttcatacatgtacagttttttcacgttttgcagtatacggatatgtaatattttggtcagaagacagttttaatacctatctcagtaatagctgcagcatattttaacaattaattgataacttgttctgttataaagtttatgcaataaaatgcaacttctgtcccttaattgaatatttaatttagtgatctttaatgaatatttacttaataagtagctacattattgcatataaggcataatgtttgacacctaaagatgcaatgaggaataagacacctttcctcaaggtacatacaattagcaaaaaataaaaatagaataattgcaacagtaatccatactgcaggagatgatggaaaaatcactaggccccagccagttggtttgtttttttaaaaaagacattattgggattgtagcctgggaaaagagcatggatttagataaagaagaaagaaggagagaaggacatgaagctcaggaccattttctgaattaataattatgagaatttgattattgttattttttagtgtaatttctctaattattcacagaatacagttgttcctattactgaccatgggacaatacttttttcatcttaaaatacggaagttgagtaaaagtatcaaacgcaaattctgtgttatatttcaaaggcttataggaccagtattatatgcagactgcttgtgagatatttttaaaacttagccttactaccatcattctgttttaggtttactcctgattttacagcttctagagttattcgggaactgaagtttataacaaccagtggctctgagtttgtatttatattgaatgcatcccttccttaccatatgttagcaacctgtgcagaagccctacccagacctaactgggaactggctctgtatatcatcatctcaggaataatgaggtattgtgtcttgtttcaaggttcatattcattcaacatttaacactgttgatcgagtgcccactgtgtgccagccactgttctgagtgctaggatatgccagcaaacaagacagaactctgcctttatcaatctcacagactggtgggaacagttaaaacagagcccttcttgggtggcatatataataaacagtgttctttacctctgaaatttgttatacaaattaagtacattttaacatctttttaaaatgctcagataaagttacttgacttgggcatatatataatatacttaacacaatagtacctaggccacttgaaactgattagaaatattttttaaattctcagtgtcttcatctgttctcaatatattactttgtgtttcaagagtcagataaattcacctctaaactaatttacatatttatatcacacatcctttagaggaaacgggttggagagttgaaactaaaattcttcttagtaaaagaaaaatcaaattccaggcatttcttctaatacacataattattgcctccatataaaacctccatgtgagatggcattctataaaaattcatgagcaggccgggcacggtggctcacacctgtattcccagcactttgggaggccgaggcgggcagatcacctgaggtcaggaattcaagaccagccttgccaacatggtgaaaccccgtctctactaaaaatacaaaaaattagccggatgtggtgatgcatccctataatcccagctactggggaggctgaggttgcagtgagctgagatcgccccattgcactccagcctgggcaataagagcgaaactttgtctcaggaaaaaaaagaaagaaagagaaaaactgatgtgcaaacttttatccataaaactgtgggttttttgttttttttttttttttttttt

SEQ ID NO: 95370 - DNA, 1100 bp, Homo sapiens
ttagacagtcttgtattccagcctcatgcgcggctctgggaatcttttcgtgctttgcttttcccatctgtaagatgccaaagtaacaaatgttattggaagttatctagaaggctcagtaaccagaacttcctttcattctgcttttctttttctttttttttttcttctgagacagtctggctctgtcacccaggctggagtgcaatggtgtaatctcagctcattgcaacctctgctgcccgggtttgtgcaattctcctgcctcagcctcccgagtagcgggattacaggcacgtgccaccacacctggctaatttttttttttttgtatttttagtagagccggggtttcaccatgttggccaggctagtttcaaactcctgacctcaggtgatccacccaccttggcctcctaaagtactgggattacaggcgtgagccacagtgcccggcccactctgcttttataatagggagaaatttcacataagtattaagtgagctaatatttaactttcttattttattaactacaagccatatttacaagatgtagaacactgaactaagcactgtgagagataggaaaataagtaagagtactctagacgtcagaaatgtattctaaataagaaattcaggaggaggtcctagagtgagcttagagtaaattctatctcaggcatctctacagtgctatagaatgtggttctcaaaatacttggtctcaggactcccttgcagtcttaaaattattaaggaccccagagaggtttctggtttacatccatcagtgttttgccatattagaaactgaaactgaggccgggcatggaagatctttaaaatagtgatttaatttgtttaaaataataataaacctattccattcaacataggtaacatcaaaaatgaaaactacctatattttaaaaaatcatttagcaaggagaatggattttttttaatttttacaactctctttaatggctggctccctgacttaatagacaggtagattctcatatctgcctctacattcagtctctcttgatatattgttttgatcgaagtatgtaatgaaaatctaacctgc

SEQ ID NO: 95371 - DNA, 2996 bp, Homo sapiens
ggtttacccccacctaggcacttggtacaagaccagagtgtctgttttcttattgtgaaaagaatacctccttccttttttttttttttttttttttgagacggagtctcactctgtcaccaagctggagtgcagtggcgtgattctcctgcatcagcctcccaagtagctgggaccacaggtacatgccaccatgcttggctaatttttgtatttttggtagagatagggtttcaccatgttggccaggatggtctccatctcttgacctcgtgatccacccacctcagcctcccaaagtgctgagattacaggcgtgacccactgtgcccagcccacccccttcctttctaagtgctgagctattcgggagcacacagggctccattcagacaggccccacagtgtttctttggcaggtaggaaatgtgcatctaatgacaaatcaatactgcacccagattcaaaaacaaaaaatgtattgatttggtagtatagaaatctgatcttttcatgtacttcagaaaagaatttgactagaataatgatagtatggcagctgatggaaactgctcttctcaagctgctaatttgaaatatatttgttagtatcaggatattcccatttaagagtactgtaaattctcaaaccattaataattggagggtttgtttatctgaactctctgctatgaaaagttttcttaaggcaaaagaaagtcgaatgtttactttaaaaagatggttaaaatgaatacaaaagagacttcctctaatggacttgctaagagaacactaattaaaactctcctttgtaccctgtatttccacagtggacattataaaggacaagcaagccccaaatgttaatgtccagttatgaacaaataacttacagtgttgtcctatgctcagctgctaaggggcctcttcacctcctacccacaaaaagcctgccctcctctctgtgtccccagcaccccattgctaagaccttggctccctgtctatcttgagtgcacagtagatgtgatattctccctgatcctgcctttgtgttactttgttatgtgtgtgttacagaggatttctgctactagtcatataaacttgtactcttaccagtattagagtatcataacactacaacaatagagttaggggttaaaatatgcttcagcgtttagtcccaggaatcttagctccatttataatattgtgtctttgggaatgtgttctgagttctaagcaactggcttatacacacttataagtagggagatattcagatgaggtcttgaatattgctgaaaactttacatgtgtctgcacaaaaccctcgtaggttttacctctgttgtcaactgatgtcttcattgaatctgaggactctgttttgtctttatatcaagggggaaaaaagccatatgccaagcaatgtactgccttctcattagtcctactgaaaatgtttttagcaccctgcttgtagatgtctagatctttcctctaggcacataagatcctttaggatctgcgtaacatcatgtattatctttatatgcctgccttttctaaataggttatctactataggccagcttttcttactgaatttatacttggaaaggtttttcgaaacttacgcgggattacattaatgccattggtattattcctaagatttatcatcctttctatattcagtacagaaacagaggatctgtgacagatattttggcaactctttgcaccaatatagagacatcatatagcattacaagcatagtaaaatattagaatgaataaatgtgttttttcagggccagcaaaaaatttctcaagtacataagcctaattgaatttcttatgttcagaagactcaaatatttcattttgatacagtgacttacaaattgtttttctagattgagtgctatatttgaagtaaatacagaccttcaaaaaaatataatatcaaaaatcactgctgagctctcctggccttccatacttagctcaccccggcacttgaaatttccacttactaatacaaactgctcctcagtaagtattcaaagtgacattggtttttggaaatacatactaggattataaagtatttactcttagctttaactatagaaatctttcatttaatgtttcattattttgtttaaggaagaagagattactttagaaaatcctgcagatgttcctgtctatgttcagtttattcctctggctttatattccaacccttcagtgtttgtagataagttagtatcaaggtaagtattgcttgggatcatcacagtgtttctatgtagtattgaattagtattttattcacttaaaaagccttatttgcagctcatacagattaatagatttgacgagaagttctggatctataaggttgagagaaggttttagggaggtttaggttgatactgtgcaaagcatccagaaaaactttcaatataaggcaagaaaaagtaatatggaactcccttctaaaaatgtgtaaagagaaagtagatgaaacctttcaaatattctagttttgaaaagtgaacaaaatattaattacaagttgtggcctttaattttcttaaggctataaatctggtcatattgatctcaaaacctgacagacaataatttgaaaataaagcacacacctgataatcactccataactcccttaactgtgatgttgcttatgaataaatatgtgtacattttttgttttaggtttaacttgagtaaggtggcaaagatagatttgagaacactagaatttcaagtcttcagaaacagtgtaagtattcaaacttcatactattccaaagaaattattttataatatgatcaatataaatatgaaagaaaattattggctactcttaaatttggctgaagggtaagttactgaagaagtcagagcagtccagtaattatttcagaggcaaaataaatcaggaagagtaggt

SEQ ID NO: 95372 - DNA, 1067 bp, Homo sapiens
gtttgtttgtttgtttgagatggagtctcactctgtcacccaggctggagtgccgtggtacgatctcggctcactgcagcctccgcttcccgagttcaagtgattctcctgcctcagcctccccagtagctgggactacaggtgtgtgccaccatgcctgctaatttttcgtgtgtatttttagcaggaacagggtttcaccatgttggcctggctggtctcgaactcctggcctcaagtgatccacccaccttagcctcccaaagtgctgggattacaggcatgagccactgtgcccagcttgtgtactgttttaataagatacttgacaacccataatttcaaaagatgtgtaatttctctttgatacaaatgacatatatttttcctaatgaagagactttcttttaaaaaaaattgtgattttgtcccctttggctttagattttagaattcagtgatttcagggcattcttgcctgggtgtaaacaaaccttgcttaccaaactgaaagtaaccattccctttatctaaagctatctctgtttgtacctttgttggcatcctcagtatcttaacatgaaagtgtgaatgttaacgtcaatcagttgtcacaagattgcaaagatttgtcctcctgatttttctgtaacatgccacagcaagaaaaaaaagttttttggtgaggttttttggctgttgattacaatttaaagattatcaattgatgaacattctaagatgtcttttgggctttggtttcctagaagtatgcttgtctactctgaaacttgtgatcttaagaaaatttaaccatatacaaatgagtttgttctttgctttcttccttcaggggaaaatagttcatcaaagtttaaatattatgaattccttctcacagaaggtaaaaatacagcaaatacgatctttgtcagaagatgtgcgattttactataaacgattacggggcaataaggaagacttggagccaggaaaaaaatcaaaggtttgaagatattatatttgagaattcccattggttaacattttgttttatgacctcctgt

SEQ ID NO: 95373 - DNA, 1084 bp, Homo sapiens
gtaacaatagagtgcctggaggccaacccgcagactggccagagtccatgtgaaaagtgccaaggggagtttgagcgcatggctgtggctgaggcagtaaagtcccttcatacctccaagcctttgttgtttctttgcctcgaatgcccttcctcctgtccttccttcaaagaactcctgcgtgtctttcaagattcaattccattgtcatctcctctctgaagatttcttgactcctctagacaatactggttgtttcatgtgtgatcctagaatactttgaaattacccctcttgctgcaagcctcgtattgtgctataaatatttccttataagttggcctccccagtgagagtctgagatcctctaggaaacggatgagagatcgtttcttcccaatagcaggcacttagtacataatgtatggatgaaggaacaaatgatggagagggaacataggcaagagacattgcaggtgaatcatttgaactgtgcttatatcctaaagaggtcatacaaactgaaacaagtatggggaggagggtgggtagaggaggcaggaatatggcttagagtttgagcctggagaacaaagacaaaacaaatgagaaaaccaggagaagatgctgccttttgcaagaagatggtgcagtccattcaggaataccagggcagatgtaaaagtgtctcacatcctagtggtaggagacagtagtgggttaagagaaacaagacattgcaaaatcttaatgctgtatgcaagttgagcatccctaacccaaaaatctgaaatccaaaatgttcccaaatctgaaacattttgagaccacaagtggaaaattctacacctgacctcttgtaacaggttccagtcaaaactttgcttcatgcacaaaattattttaaatgttgtataaaattaccttcaggctatgcatataaatgtatatgaaacataaatgaatttcatgtttagacttgggttctgtccccaagatatctcattatatatatgtaaatattccaaaaaaaaaatctaaaacacttctggccccaagcattttaaataagggatactcaacc

SEQ ID NO: 95374 - DNA, 2394 bp, Homo sapiens
tattaacattacagagtgacatccacagcttgaagcagagccagctgtgtatacaattgtggctccagtgtgcctgaaaggttggtggaaggctgtgtccctctgctccagcccctttggccatacaggtccatgggtaaagagtgaggagctttattagcaagaggaccacacccctccctctttcaggaaccagctttttcagtggcccatggaacaagtgtagtagagaaatatcaagggatggacactattttgagatatttgtacacagtgatatggtaattcagtgtcatactggtatatgttaggatttgttagtcattttatcgctacacccttcatgtccattttaataggaaacttcaactaacaaggctaatgaatgataccatttctactatctacaggtaacattagcttcaggctattttgcagtcttcagagtcaaacttactgcaaaaaaattagaggggattcatgatggagccatccagatcacaacagactatgaggtaaggactttatggggattcatggcagtggggtttttctgaataagtcagtcctttcttgtctttatgaaaccaaagaattaagtttactcagagttacagtttaccagtttcataccttaaaaactgagctttcgagaatagtttatagaatattgatgttcataggctcatagttttttgataaaacccaaccctcctaacctaaaaagcaacttcagaagaatgcctttagcacgtttagaattgctttgttagaaacctgcttaaacagatggttatatcattgcacagaccccagctgagtgtcctgagttagatacctctgattgttcctacaatcataaatagcagtcagggtctaacatttctgaaaaggaagataaaatcaggagatcatgtcctaatctgagtgctcacatttatattttcatgagtcattcaaagtcaagggactaaaggttactaagcttttaattaaaatattctgtgtggagcttattttgcattcagtaagattttgaatggatgtatttctgccagacctaaatgtttttaattgtatatctaaaagctcttaggaaagtcaagcactgttaaattcaacaacttaccacctttgccctcatagatgttttcagtggacacaactcccacgtggaaaaaaaatgtaattataaaataaacagaattggccatttaataataaatgatttgttgagagtatgtcaggtgaggaattcatggttatcactcatgacagaaataagtacatttcagaattcagataaatttttgttaatatgggtgaaaataagaattaagaaaaataccctagagaagtagctttgagagttactaacagtatgggatgggattctaactctagaatgttcagtgcatttttaaaaattaggttgatgtctatttctgtatcaaaaaaaaagctatataactctagatatgctggattttacatacattgttttaggagtacagtttgactttcttttttaaaataatctatttttatagattatttgtattttgaaatacaaaaatatttgtatttttaaaaaatctgtcttcattgcttccccgttgtttagtcttttttacgtgttttcaatgaatcactgagaaatctgtggaaatgtgttatatttcattacattttatggagtacattggacagattaaacagtatctatgggtgattttaatattggtatggagctggttattgtcaatattagtcccaaaattaggttaaccccaaaatataatgcaatagttatcaagatcaggctaagtcttaactacttatctatcatcatcttcttgacttcacagatcctgacaatccctgtgaaggctgtgattgcagtaggctcactgacctgcttccctaagcacgtggttcttccaccttcctttccagtaagaccattaatacacacatttttctattgctcgttttttgcctttgcctttagctctgtgttcctagaatcttagagtaaagtcagttattctttattagtcatttattttaaagacattataccaggttctttagaagatgtaaagagatacagtccttttcctcaaaaagttttctatctagaaagggaaatggacccacaattcagagctataaagcggaatgtagaagttgccctaagaggagtgaaaataaagtgctgtgagggaaatacacgtctcactgatgcaggggctatgggagccagcttagaatttcttccaacagagatggagaaggggtggcagagacgtgaatctagggccagggcgcaagctcaacagggatgcagaggcagtaaagtctgaagttggttcaggcaatagtgagttgtcc

SEQ ID NO: 95375 - DNA, 1770 bp, Homo sapiens
actattgtaataatggggaatatagaaaagaactaaatagaaaaatgataggtagaaaaagaataatacaaggaaggtgaagagggatatacgtagggaagagatgatcaaaaccaagaaatatcgggacaaagaagagaatcagatagtaaagaagaaaataaggtagtaaagacgcaaagttggaagattatatatgacacagaaggaaacaatgaaggtactcctggtacagaaaataagcagggggaaaaattccaaacaaagctatcttgagagtgatcaatgaaagaagcttagataagagagaaaactgttaggaaagataaaaagaaagctaggacatctagaaatgtagccctttaaatagttggcatcgattagaattttagagctggagggaccttcagtaatgtctcgctcctgcttcagttattttgtttcagtgatcattggtgatgcttgctgagaccacatgctttttgcccgatcccctagggttccactaaacctctcttagtagtttagcttcctgcctctttcatgtgccctcagaggaagaatagcaactcagcagaagccatggctgttttcatttctgattactcaaaagactttcgtcatacaaagccctcaactatgtcgtataaatgtgtggttttatgcatatatacaaaagcataggaaagcatagaactgtaattttttttttttttagatggagtctcgctgtgtttcccaagctggagtgcagtggtgcaatcttggcttgcgggttcaagcgattctcctgcctgagctcagccttccgagtagctgggattataggtgcacaccaccatgcccagctaattttggggggaactttaatacatctttaatatagttactttctcttcataatattgttagatcaatgtgacttttttttaatctggttcttttatatctttccagtactttgtattgccccccaaaatagaggaacgtttcatagattttggagtactgagtgctacagaagcaagtaatattttatttgcaattataaacagcaatccaattgaggtaaaaacctgtttttattctaaatcacatttaaggattttatgcttgtgttgtgataatcattttcatatctttttttaaagttggctataaaaagttggcatatcataggagacggtttatcaatagaacttgtagctgtggaaagaggcaatagaactacaataatttcaagcctgccagagtttgaaaaatcctctttatcagatcaatcatcggtaagtaaactttctattgtctccttaaagtaagatggatgtctaaactgcaagtggaagatcattgctatgctacatgtatcactattatttttatgcagttcataatagtgttggttacttgctattaaaaggaccttataggtaatgtaattcaaccccctatttttatgatgagggcactgaaacccaaaggggtttaattctgccttgtcataaaaagttctataacacacaaatttttaattatctttttgtaacacaagtgtcattacaggagagattcccatgggtactaaactaaccttgtgttcattgagtttactgggaaaaagagatggccctgaacattggtagaaaatattttcaattatgcaataatacgtctgtccagatactgcctcagtatcagtgaggcaaacattgtttgatcactgtgagtctgcccacatatttttacctgtctaataaacatgttacagtt

SEQ ID NO: 95376 - DNA, 1597 bp, Homo sapiens
atttggaagctcaactttttttttttttaagattttgtcaatttacataaattcactaattctctttggtagtaaaaggtaacagagattattttttatgcttcctttcagcatcgaaggcaaaaaagccatctcagttttctgggaaaataacagttaaagcaaaggaaaagagttattctaaacttgaaataccatatcaagcagaagttttagatgggtgagtttctttttaaaataaattctattactttttactaatcagtaaattatattttcctgctaaatgacctgcagaaatactagccacgttcacataaacttgatggaattattttttgaaagaacagccccaactataaaagagaaaacctcctatattttgtttatattttacttttttagaagaaaagggtaagtgggatgataggatttgggcttaaatgaagacttaatgattcaaaaatctgattttttaaatattatttaaatcatttgaaccatttcctttctgacatttgtttgtaatatgtaagtgattgtggcctattattaaagtattttgacactcgaaacagaattctttatattcctttataaattcataaacacttctagaattacaactttttataaatgggaagtgacatgttcattttctattgtactttaaccaatagtagtttaatactcaacttggcaaagattcattttagcaaagctccttgtaattcagtgataagcatgatttttttcaaagtaaagctttttttgttgatatgtctttgattctaattgtatgattcatataattcattagagaatggttgtttgtattaatttcagtattttgcaagctaaattttgttttaaatcatatagtcaatcactaaaatattatagttctaaatctttaatacaatccctaatgctaaatgtaaattattacttacaacagaagaacttggattttaaattaacacatggaaataaaaatgatttattttgttcttgttgttttttttaatagttatttgggatttgatcatgctgcaacattatttcacatccgagacagccctgctgatcctgtggaaaggccaatttaccttactaacactttcagttttgcgatcctcattcacgatgtgttgctaccagaagaagccaaaacaatgtttaaagtatgtccaggagccctcatacttttaattttcctggtctaccaactaggtgatgctgacactttgttttttttctcttctgtcatttctcaggttcacaacttcagcaaaccagtcttaattcttcctaatgaatcaggatacatttttaccctgctttttatgccttccacatcatccatgcacattgataacaacattttacttattaccaatgcttctaaatttcatttacccgtgcgggtatacacaggctttttagatgtaagtatattatccatctttaacatttaaactccctgcccacctttaatgttttcagatcttattaggcagtcgtgttacatacggtttgccattatttgtgctctgcaaattgatctaattctcctagtcagtttttacctttccag

SEQ ID NO: 95377 - DNA, 1012 bp, Homo sapiens
gccctgcaccaacccagggattcttgtttcattcctacctgttgatgcctagctattaaaacatcaatattggaaatttcattagtaaaacagagaaggaggttggaatcttttacgtcccttccaattgaaagggctttgtgtcagtgaggaaataaaaaataactgtaccttaaaatgtatttttaaaaagcatgctctccaagtacaaggttttcctgtttgttgttatttaagcattctggcttcaagctgaacatccctgtgggctgcctcagtgctcaatcccatagccagcagtatagccctctctctggatagcagcatgcctcactcgcagagccatgtctagagagaaagagaaaatgccattagaaatgaagtgtgcagaactaccttggcactgacacaccagcttccaagttcatgtttattcttcaccgtcatatggttcagatatttcctcagtattgtgaatttctttaagagggatccataagtctttttcatgtcgcctccactggtgtgtgaattaggcattcatttggaaaataagtaccttttttaaatgctttatgtactcacaccaaatgtaatagattcttacacttacaaatctgtcatgcttattctctggtcattttcttttataaagatattctgatgaaattaatttgaagttttccagtgtggcctactccatttaaagggacaacataagttaaacttttcaaatttagagtccactttacttttccagtatactttccagtataagtataaggcaactgaaccattagtctgaaataatgccatgtatgtatttttgttctctttgcagagtgttcgacctacaccacaaaatgatgctataacggtacactttaaaccaattacattaaaagcatcagaaagtaaatacaccaaggttgcaagcattagttttgatggcaagtattcaccattttctctctgatagagtgatgttattttgataaactagaaagcatct

SEQ ID NO: 95378 - DNA, 1648 bp, Homo sapiens
gagaaatcctttgagagtttgtggtagtaggataatgatgtagataaacctgctattctggttcctgtagcagtggccatctctaaccctataagtaggggtgttagttgtatggccctgtgctgagacacttgagctttgaggggcacagaccctatgtctgatttccataagattagaagttaggataatatatgttacactttttttttttcataattgagatttcattggttgaggatcgtacagacatttcaatttgtacacaaatcttaacatacataacgaaattctaaaaagccatgtattgtaattattttttaaagttattccagtgactttccagcttaaaatttggaagcaaattttccttaagaggctatcaagtaccagtatcttcacatgttggtcagctgttacatacagcccaccagttcacaactcaatagcacgtacactacatattcaaatttgtaatctttcacagcacagtaacaaagttattaggaaaacaggactaccacaaccaaagatgttacagagtgcacacaattctggcagagagagccatgatcaaagagtggttttctttaggaaacaattctactaaaaaacaacatggtaatagaagtaatttaaaatgttcaagacattaaatgcaggactgactccatattgccatttaatatgctttgtattataggatataaaaactaaccccccatctatggaatgttaagctgacacccgagacaatcagagcctcccataattcaatatcccacactattttctggttgtaccaaaaaataaacaaccagcaaatgatttcacctcttaaaaaaaagcatttacacttaaaaaatgggatgaggtgggattccctccttcttaaaaatgtttctagagctactaaaaaacttgcatttacaaaatagttgataaaaatattcctctggattgtacaagaagggagacagggaccactgataagacatggtatatggttattaatcagacttggcttctttctctcctgcttcatcagaggctggactctcctcagttttcgtttccccattttctgcaggtaaatcttctttagtttcttggttagccacttcggcctgttttccctttgctccccttttcccttttgtttgcacgtttttgtctgaagatttatccttcgctgctgcctttttcggctttgcttccacttttgcaggaggtttagctgacaaccgcgccgatctcctcttgggctcttccttggcagcggcttcagcggagctgaccttcctcttgggcatcctggcggcggggaaggcgcgtgccaggtgcctgcgggccgcggcgcgccaagagccttcacgaaactgggctgccttgccgctgccactcctccccaacactgttaacttttagcaaacttttgttgaaaaccttgtaagtttgggattttaaaatttttttttttttttttttttttgcttatcacttactgaatacccattgtgtctttttcccttaattgcttgggaggaaccatctatcgtcctgtcctgaagggagttcctcctaggtctggtcggacctttgtatagtaattagttaagatttagatcccctgttaggaaacctgctg

SEQ ID NO: 95379 - DNA, 1619 bp, Homo sapiens
ccagactggccaacatggcgaaaccctgtctctaccaaaaatacaaaaattagctgggcatggtggcatgtgcctgtagtaccagctactcaagctgaagcaggagaattgcctgaacctcagaggtggaggctgcagtgagccaagatcacgccgctgtgctccagcctgggcaacagaccgagactgtctcaaaaaaaaaaaaaaaaaaaaaaaaagaggtatgtgaaacatgaaagtatattatacagtgtcacttagcaatcacatctttatgaatatatcattttaattgcatagtctatttctgttaaaaacctatatatctgttaatataatacatctgtacctacatctgtacctacctatgtgtgtatcttttataatatccaaagcccaaactctgccagtgttttggtagttttctcttattcccgccttcattcacccattcaataaatatttaatgaacatcaactgtatgctagctgctatgctgactgagaatacagcagtgaatcagaccactggggttccctaccccatcaagctcactgtttatcagggctctctggaactctgggagatatttagattttattctaagtgtaatgggaaattattacaggattttaaacgagagtgacatcatctgatttatgtgttgtaaaaggtcactgtagctactttgtggagagtgaacttacagacatggaagggcagaaagcaaaggagaccacttgggatctgatttagcaatcagcctgagaaatgatggtggcttagatttcccaccttatcagctatggggcaagcccacctaccgtggaaactgagttttcagagctcttcttaaggttttccctgtgtgtttcagcattttctgcataattcaccaggcttagagactatagatatttagaaaggttcctgtctccttttgtttcacaaacatagaattttcaggatttgctaagcagtgctagaagctggagatcttttttttaaattccccttcagggaattcattctctttctaaatataggattactaaagcaagcaattccaaatagaagttcctcaactgctaacagacaggatgcgcaggtccaaactctcctaatatgtctataatgcaactttgagaaaatggctttcctcagcatttacaaaacattagtgctgtataaatgatggagtaagtttgcctgagatgccttcagaggaatgtttgcatgaggtttcccttggtaattaacaaatcggaatcataatatcagcttaacatatgctttagtgaactcatacacaaattattagaaatacaatgttaaatgctgaaagtgcttttttccttatttgctcaagtgcttttataagcagttttagaatgttccggaccgttgaatttcacttgagggttactgagcattagttgggtctgaatgttgtgagaaaagcctagaactatatttagaacatatgcaagcttgcgaactgcctttcctgggaaacttgcaatagttttatacttcttgattatctttgagttagcaatagtcactaacaggttgttgtataaatatgcttactacaaggtgttgattgtgtatgagtt

SEQ ID NO: 95380 - DNA, 1269 bp, Homo sapiens
gcaaaaaaagatatggtagttcttattcctacaaacctagactgagaaaaaagccaatgggctgtgacctcacctccagcctatttcggtgtataggtgaaaaccccagagaccaagtcaactccctagagctggggagtggatggtccatccctccaatcttaggagggtcccaatcacctgttttctactttgggactaaaaaagagagtagggataagtgaaggccactaagctgtagaacacaagaatctcctaaaatatgctgaaaggtttgtgcagagaagaaattcaggcagtcccagggagccatattgttctgaaaccaggaaagagattactcctcaaaattttttttccagtaagtcttccttttagtatataaatgttctctcattacgggactgaaaatgtatgctgtcttacatgaatgcagttggtaaactgtggatttacttgagaagctttgcattgttaagttttccatgaaagagcagtgtaagccctgctggttatcatttatgaaggttcttgtggacttctagaaaagtatttacctctgatggtgacatttctgttggttaaatttcaagactgagttatatacccaaacaccactaactagcatattaaaaaataactgattttgtagattagttttaccttttaatggtgattttgtaactgacaatttgttttcagatcatttgacttcttttgctttgcctaccttacatatcgtatttcatcaattctaaacagcacatttttcacattttaaagttctccagaaatggagtgtgtgttacatattggtttaattagcaatgcattttttttattaataggtatatagaatactcatctttcagtcagtgtcatccagttcaataaaaaatggtggttttgctacattacaaaagctgtgctacattatggtctgttaacttgtcaggaaattcctccttatgaaaccaagggagtgatgagagccagtttttcatctagagaagcagataatcacacagccttcataagaataaagactaatgcttcagacagcacagagtttatcattcttcctgttgaggttgaagttacaacaggttagtggaaaactgatgaaatcgaaagttgttttgttttcagtatagcttactctggcaaagtgaaaaataattgttgacttttcttttttccaagctcctggaatttattcctcaactgaaatgttagattttggtacactaagaacacaaggtaaaaaaa

SEQ ID NO: 95381 - DNA, 1048 bp, Homo sapiens
cagagggattttttttttaaatctttttattggtatccagtctgtctccaatactacgatgtaagtttcatgagacccagcacattatctgtttttttactgttgaattgttcactattgtatatgtgcctagcacctcatagacacttaataaatagcaatatattaataatatcatttgaattactggtttaccctgcttagtcaacctagggccatcccatgtgggaatgacctggggctgggcttggtatttgagaggttgtctgggccgtagatccatcttctgatggttggggtcaggaaatcttttgactccctattttcttcttttgtctattgcatggcttcttgaaggactgttattcaatttctaatatattaaagaaatcattctaaattcacatacatagtcaatcaaatatgtagccaaatcatgtacagaaacaacatttgtgggggttttttttaaataaagggattgttaattttttatacataaattagatttgccagtctccctagatcagtcagttataactaaaaatattaattataaaagcaactaaaattgcatttttttcctccactgaaacaggtatttggtgttggagttccaaatccatatcgattgaggccgttccttggggccagagtccctgtgaatagcagtttctcacctataataaacatccacaatcctcacagtgagcctttacaggtgagtttatgatggtaattttgaataagcttcattttggtgggaattaatgcttagcatgaaatctcagtttgttacagtttccaagactatttaaaataatagggttttatagtgtattgagaggggtattacttttagtacagcttgctgcagtctgaattttggaatacagcagtctgaattttggaatacagcagtctggattttgaattttttgaatcatttttaaaacgactgtgtcttctctggtgttatagtttaggcagctctgcatttaaagaagagtttttagctacacaaggctgctttttttcttgcctgtaa

SEQ ID NO: 95382 - DNA, 2296 bp, Homo sapiens
actgtcaaagaatgtgtccatttctcctagctgttaaatttgtgggcatggagttgcttgtaatactcctttatcattctttttgtgtgtaaagtgtatgcaatgatgtccacattttagttccttatatttttgacttctccctttttatcacagtcactctctgtagagttttatccattttatggactttttgaggcaccagcttcggttttattgatttttttttttttttgctactttctgttttctatttcattaatttttactctttattttccttccttttgcttactctgggtttaatttattctttttctagtgtctcaaaacagaaatgtagattattgatgtgaaacatttctgttcaaaataagcatgtaatgctataaattttcttccaagtattgctttacctgcagcctacagattttaatattgtgctttcatttccaatcaattcaaaatattttataatttctcttgttactactcatttcacccgtggcttattttagaagtatgttgttgaatttcagactttttgagggtttgccgggtatctttctgttgctaatttctggctcaggtgtgaatagcaccagtgtctacagcttccagggcttttgtgctcccgtgcaagttcacacagtcaacctctagcaatgtgtaaacatgttagctgcatttctagctgacactcctgtatgatagcctcatcttcttcccttctctgccatgggtgagccagtattcccattctatctgtccttggaggtgcttgtcttttctacgatttcaggctagttgataatctcactctgtgatgggttcaagaaaagttgtgaattattgtaattattcttttgttgcactacattaccgtaatataatgcaacaaaagaataattacaataattcacaacttgtaagttactcttttgttggtggtaatgtaggagacatactctcgctttcttcagactaaggtgaagccagagtcttactaccatgtattttgagctatcatttaggtagcattttagagttctagccatagaggcagaatgagagaggttgatggctttacatattaaaatgcactttaaggctttgtttcagggcagaaccgcaatttcagtctcttgaacatgggagtagccctattgttttgtggtaataacattttattttactaactatagtgacattcttaatctgcagaaagtaacaggagtgagttcctgcacatacattcacccctgccttctttcctatttaagttgctgggacattttgttccttgtgtggatggaaggcagatttcataaggttgaggcctgggcttattctttggactaaaacaagtcactgcttagtagtacagcagtatatctatatgaaaactcagcctcaacgcaactcctatctgattgtctcatcgtggaacagcctgtaattaggtacttcatgccagcctagtgattgttaaatgaacagaatccaggaaaccatctgttgtacaaggctgtggctggtaattgacaaagatatgtgactgtagacattcaatatggaagacatctttttaattattttccactgctaacttaaagcttaaacttttaaaggaaaaactagtttatggaagtgattctaagaaacttgtttaaggaacttgagctgtataattttttttcttgttacaaatttaactttattttctgtttcagaaaattcttccaggaggaaatacatcatttgatgtagtttttcttgcaagagtagtaggaaatgtagaaaatactttatttattaatacatctaatcatggggtatttacttaccaggtaagaaccagaattaaaacttattttatacaatataatcattacctctgccttatcatatgacagccttttaagaactcaggaactcaaaggataatagaaaatgtaggagtttagacttagagcatttttatacttacagtgaatatctctattcaatatctctattcaaatcagactgaacaggtgattttaaagcaacagctaaagtgttaatttaagattgacaaaagaatagtgaaaaaatattttcatgctgacttataaaattttgtttaatttttacttttacacacttatgaagcatacttgataatagtgtcaagattaaaacattcatgtctactttcctttagtaggtattttttgataaacttatttttacatagaattttggtttaggtcattaaagaaagttaatgtatataggagtcatatagtaaatc

SEQ ID NO: 95383 - DNA, 1481 bp, Homo sapiens
ttttggggggatctttgtggaaatatcccttttctaaattatttcttaaaatagctttcccttgagttattctttgttatctaaaagatatttccacactttttataaatgtgctattaataatagcctccaacaatataattctaatgctgtgagagacctgtgtatacacaggccgagctccagagaggcctgttccagtcatgcagtgagtgacaggtgccaaggtgaaggtgtcggtgttctattatcatccccagtgatttatatcatattacacttcagtgagtggcctgtacctaatagcttctatagagagatgtatttatgtgtaatgaaaccatccagctttcaggcattgtcagtatgcagagacaggttaggttaaagggcaaaattgtgaagtaaaaatggaatcagttaaaaaatagttcacaattgcactatacattttatttctaacttgttaactttttgctaagtcaagcaatattttgttgtttctgaacacttcaagcttcacctgtgttaaaggccagggtttttatttttttcattgctaccgtaatacagagactagaacaagagttgcaaacagattcttaaactgggctaggtaaacaatataaatgagggaagcaagccaagtgggatgtgggggtgtcctagagaacatgtgacccattcgaagagatcagcccccaccgggctccagcccagtggttaccatgttgggagtctaagcccatgtgcagttctgctgattcccaagaagagtcagaaataagaagtttcatgtatctgccagtctttacacattgaaaatcagttcaattttagaaagacagtatgggccaaacaacataggctaaaggctactaacttgacgtttctgaactagactctcccagggactatttctatatatgaatgttaggcaaagagaatagtttctctggaaattttttaaaagataaactaaatgtgtaggtaatcaaggaacaagttaaccaatctgttttgtgctgtcagatgatggaattaaacaataaaaataattacacctatcaaaatccacatttaaatagtcaagatttagctcaaaggagatagccaaaatctttactctctcctcttatccttttttcttcttcttgctttgcatctttttttccctacaataagacactgacttaagctcgagacgtagaggggagagatagaatgaactcttgggggaagaaataacctatttcctctccacttcagctttatgccaacaataagagccttggggaaagatgaatagagtttcttatgtcgaggagagcaaaatctttctgtatgtttactctaattgcctttgtcatgctcggaattcctggtcaggtcttatttctttgacaataaaacattgtctataactcagagtttttagttattaactgttatctgtacgttaaccaaaaagtaggaaatac

SEQ ID NO: 95384 - DNA, 2062 bp, Homo sapiens
tggagtggggtaggtgggaaagggtggcatcagcgattcaagattttcttccctaccctcttcattgcctctttcagtgatatgaagttaaaaccaaaccaagtactgtgagtgctcacctgatttttggttcttatgaaggtgatttttttggcatagagagttgttaaatttagtatttctgtggggagaagggacaatgaaggtggagccttctatttggccatcatgccctgcccttccacctgcattccattttcttaaactattgaaaattatcagctgttcactgtttatcaactttcccaagtcttgaattagaggtgagcaactaaattgaagaaaaggtagagacagaacttcttgaagaacaaaagcatggtggacagttgaacgaaatataaaatgaagttctggctctgcgttttcaactgcttgggatttgaggtttatatgcatactttaaatgtgaattacaaaatgtaaaatttcgaaaaccatggaccaaaatgattgcatgaggagaggaccttgtgaaagaagggtgtatatttgaattagaaatgagggtttggattggtataggaggatagggaaaaaaaacacagggcaggcagattagcagagccgtgggggacttgcccatggaactagcctggctcaggtggaaggtctggattgaaaacagggttacttgtttaggttgggtcatgtgagattaggaaggaacctagtaactagtgggtgtgtataggtagttagaaaaagcaaggaagctatagaagttaggaggcctgtaccaataagattagctacagaagtagtaagtggactatagaataaagtttcacttctaaggcaaaccatggcatggatgccaagggagtcattaaaatggatttgtggatttcagaccattgagtgtgtttaggtttgacaagaggcagttcagtactggcggttaaagcgcagactagacccagaagacttagattcacatccaggttccaagtgtgcctttgacaagttaattaacttttctgtgccccagtattctcatctatgaaatgagtatagtaaaagcccctaactcacaagatttcctcacacaactttgctactcagtttctgctcctaaaatgaagagcacgtatctgtggaatttgagaagaggacacaattggtaggaggccgggtggtggtacagaaagaaagaaaaggaactgaccattttgtgccccgtccgccgcctcactgggttctgagcctcagggatgaaacttgcttcactgtatcccagcacctggcactgtacgtgacataattggcactcaggaaatatttattgaaagactaaatgcatttttatgtgtaattttaaatataaattcagaaagcattttaatatatttagctatgtatttgtctaacaattttgattaattttttaacaactagaaataatcagaattatctgtgaaatatttgtgataattttctttttgttttacagaccagttggaatgccaaaaatggaaaaagtctacttacataatcctagttctgaagaaacgattactttagtatcaatatctgctacaacatcacattttcatgcatcattttttcaaaatagggtaagtttctctgctatacatgatctttcctgagtttgaagttgaaatgtctagatttttattgattaataacttgctgtgattagaattgggtttgaatatttcaaatctgttcctagatttgtttcacttcctaagaatgattacttctacccttaaccatattgtttttctcaacatgcaacagcttaacaaatcagcagtgaaccttaaatactctgaaaaaggtagcattcttacattcagtacattttattttccttcctaataataggtaattcctttgcattgtgttagttgtttcttgctacataataaattaccacaaacttgagacttgtggcaacagccacttagcacacagttctgtaaactgtaagcacactgggttgtttgttcagtgtatcaggctgaattaagatgtc

SEQ ID NO: 95385 - DNA, 1659 bp, Homo sapiens
atagactattgctaaaaatagatgtctttattgtcaagataaatttagtttatgaaaggcatttttctctgatgactttttggtattccaagaaaatcaaataggccccctaaagggatacttggtgcctcttagcttttcaattcctacctacccaatctttccataaaagattttacatcaactccccagctcagccttcaatctaaaatgtttttgaaaggaggatagtagtattttgcggtaattgagtggtacaaagtactgcatattgatttgacccgacttcctgcccaaaactatgcttaacagagtgctgtgtcactgtcattcataaggtctgcctcagggcagttgctaagccatttcttcagctgtttcctggcactgcagtgtcatctttctgtggtgtaggaaacttgcccttgaccacaaaattgcagtttactttccaagctagtctctaattcatagctgctgctttctaattcttttgagcctcagactattcgaaaatatggacagttcgtagttctgctgcagcagcacagagaacagctgtatgcctgcttcagcttggtttataaatacctcacactgtcccttttggccctacttctgtctttggacagccagtaatggaaacaaacaggaccagcactggcaggcatttggaaatctttgttttatttttaaattttacctgttcagccaagtagtcatatatcctgcttatgataggcagaattctaagatagaccagaattctaaaaatttctggcctctaatgtacctgtacatacattctcccaattattcaatcaaacaccaatctaggtgttgctatagaggattttgaaactgtaactaaggccccaaatcaattgacctttgagatagattttttttgggtgagcctgacctaatccacgaacctttaaaatctggctttagcaatcagaaacagaaatgtcaggtatttgaggtaagggagatattggatgcaagagagtttcttcgtgctgcttttgaaaatggtagggtcatatggcaaaagactgaaagcaacccgaattttatcaacaaccagaatgaacttaaaagaactttgagcttcagatgaggacacatcttgctgacacctgcatttccttgtgagacctcgagcagataaaccaggcattcttacagaattgtaagataatgaacgggcattgctttaagcctcaaagtttgtggtaatttgttacatagtatagaaaagcaacacattgtgagtttacaaatggtcatgtactttccatggtctagattctgctcatgtcaccaaaggaacggaggatggtgaggaggaaggcaagctgttcacagacctatgaggtctgtgagcaagtctgtccaaggagtgcccgctccctttgcttcctgtggtgtggactgcccagagctagaggcagcctgccctgtttgagcacgcaacgactaaaatagcctgctgatgtccttcctgacagcttccctctgttcttgttactccaagctactttgaacaacataagtagatgactcatctcctctgagcaagggttcattcatttctatgggatgtggcccatgcctttcctctttgatccctggaagaaagggcagggccagcct

SEQ ID NO: 95386 - DNA, 1021 bp, Homo sapiens
cctcaggttcagtccctgacagcttcctttgggtagaagagaaaattccctgaccccttgtgcttcacagatgaggtgatgccccaccctgcttcggctcgccctccgtgggctgtacccactgtctaaccagtcccagttggaaatgtagaagtcacccgccttctgcatccatctcgctgggagccgcagactggagctgttcctgttcggccatcttgccagcaattggtttttattgcggttggggagcaaggctggagtgggtttgcatgattggaacttctcactagctccgagagagaagggctttttgattggcttgcccaggtttggggctaaaggtaaaggggcatcattggggcttgaaaactatcaacagttgaatatcaaaaatggagttagagtctttctaactcatggcatcttctaaaaagtatcaggcccttcaggaagggtgcatctagaatttcccttgcttctttcttgaccccagtgctgactcctgtcattaccctgatcattcctactctcctgtagaatttgtttcacaataaacagatcaaattagctttctttgttttcagactttttgtttaaatttattctttaagcctacctgtattctctctgcccttcctccctttccctccccctcttttcttttccccctttctctcctcttctctccttgtaacaatcccatggggcaatctagacaccactggctcccctcccattctccactccccccccgaccccatttttatgccagtgctgttaaatgtttttctgtttccatagcaactcctataattacctgatggattcttcctgcctgctatacagacaaaaccagttcactgagaccatggtattgcaataaagagttttactaacatgaggccagccacacaggagatagagttattactcaaatcagtctccctgaaggcttggagattagggttttacaaggatagttttgtgggcagggggctagggaatgaggaatgttgat

SEQ ID NO: 95387 - DNA, 1744 bp, Homo sapiens
tattatctcaatataccatttttataacaatatattgtgcatacttcaaaaaattccattgaattttctgttattttataataaagaacatcaaaatttatgggtatattatatttgttaaattcacttatttttaattgttttaaactttttattttgtgatcagtgctgaaactgatgatttaaacacaaccatgactatttcctttcctcaagagagagtcctaatggaaggatatacagaatattaaagattttaattaacctttagcctagagaacagttcggtgtcatgaacaaggagcaacttaaagaaataaaagaatcagtctatgacaagtgaggaaataaatgggatttctcatagagactgttactagtcatagagaacctgaaatctcatgagctgagagaaattgtggaagatttgtggaagaagtgtgaatgggtagatgaactccagtacaagcaagggtcagttgacacagtaaagaaaatttatttgaagcatagcaaaggagtatagttatataagactgttccccaaagcagcggatttacatgctgctccaaaatagtggaaacagacaaacaaacttcgctatagtctgaatgtgtcctcccaaaattcatacattgaaacctaatctctgatgtgattgtgttcagaggtggagctttaggaggtgtttaggtcaggagcgcagacctaatctcacaaatgggattagtgaccttacaagagaggccccatagagctactgtcccctttctgccatgtgaggacccagctagaaggtgtcacctgtgacccagaaagaaggctccacaccagaacccaaccatgccgacaccccgatctcagatttcccagcctctagatctatgaaaaataaatttgtcatttattgtgctatagcagtccaaaaggactgagccaccattctactattatttaaaactttctggatcaagtcagagaacactgagcggagtttgttatatctcgcaagtgtagaagtggatctgtagaagtaggggttgcaggcaggtgtgaaccaacatgtgtaagggttcaatcagaggcagaaccagtcagattttaaatgaatgtatatgtatatatacacgcacatgggtttataataaggaattggcttatgcatttgagagagctggttaagcaagctcaaagcccacagggccagggagtcagtaagggaggatagcgggctggaaccccaagggcacagactgaagtttcttgtccacagataagtatccagggaagatcctgaggagaggagagaaattgcaggtctagctgctgtttgaagcctcttggctcagacagggcctaagctttctttgaaagtgcttcccagtgacaaagtcacagactcacctagaataatcgtttttattaacttgaaatcagcctattagggactttaattatgttggcaaaatctctcccagcagcacttaggttagtgtttgaataactgggaaaaggtatattatgctacaaaatagctgctgtctcacttttctcttctgtctctaaggagataatattacttttaactcaccctaaccagaaacatactagaaagggagttctggggactttagttcaagtcaagttgatatcacaaagctaccccatagatacaaacaaagaggttcctaaattttgaacttctgactctagaaaatgaagagagatatggttgaaagaatt

SEQ ID NO: 95388 - DNA, 2022 bp, Homo sapiens
atttttggtttggttaacataggattgtacctgtgtcaacttgtatcgtactcactcggatattaaactgttccttagatatagatctggtatggttttgaaaatatgcttttatttatgagggaatcatatttgatgtactgtttcttctatatcattctgtgagcactttgtaaatatcacagtaacagttgctggacatcacatctttgaagcattttacaggagatcttagcacaagacataaaaaataaaacttatctaaggatttgaaaggaagaatcaaattgttacttgcagatgatttgtctacagtgatcatccaagatagtgctcattttggcagcacatatagcagcagtggaaaatcatgagagaatctagacagactgttggaattaaactcaccaaggtgactaggtataagatcagtacgtgaaaattagtaactttttaatatgaacagtatccatgtatagttactttatgacatctccatctagataagacatctaaatttaaatgtctaaaacaatgctcttgaaaatctacctcttcccacttccaacccactcctcccatgtcatgactgtgtatccagtgaaaatcttagaatgagttatccttgatccctcaaaatcaatccatcagcacaacctgttttctcaagcttccaaatatattcagaaaccagccactgctcgctactctcccttgcagccaccctagattgtatctgccgtcaccagttgcctggagcactccaggacttccctgcttcccactgttgggctcctacaggaacttccttggtacttcacaaagtagccagaattaaccttatgatatgtgtcagatcatgctactccttgctcaaaaacactgtagtttgttacactttgaataatctatactcctacaaggagacctggctcttgtacctctgagctcagctcctacctcctactcctccctcactgcacagtggtcacttcagcctccttgttcaactcgccaaatacattactactttcttcccctagatctctgtcgttcaggtcttggcagcagtgtccctcctcagagaggcattttcggttctaaacacagccccgccgtgtttgatttttctttatacacacattttcacctaacatattcaacttttgttccccctactaggaggttagtgccatgagagcaggtgcttttctttattccccactgtagccccagccaatagacggtaactggcatatagtaaacattcatacatttgtattgaatggatggggtatatacttttttaccccacctggccactttagacatttccatttgtaatttgcagaacagcctcttggctctgtgagagaaaaacactgtatcttaatttcctttttctccaacatctaaacagtccatggaattaatatataggaattatatattatatataggaatatatattacattataggaatatatattatatataggaatataatattatataggaattaatgacatacagttatgccttatactttatttttccttgatttgattaagatttatgtaaatttgagtttcatactaatgaaactaatgagctgaggagcatctcttgttttaaaggcgccaaagaatgtttttgttacataacatctaagaaacagacagggcagaaagcaggaaggaatagatgccaacactgtgttgcaaggaattgtgccttcatgtcccggtgtctttagtttcatgctttagtaaaatataatcttacttttggtgcttgctttctttttttgtttgtcatcttttctgttcaacatatgcagagggattcttaagctacacaaaagaatgttctaaattggtagggctaaaaacatgtttggattttattaccttcagctaaattattccactactcagattatttaatctttatagaattgaattaaagccaaatttcctccatattatgaatgtccttgtctatttctaattatttcttgt

SEQ ID NO: 95389 - DNA, 1035 bp, Homo sapiens
agacaggccttccttcatgatgtgtttaagtatggcaactatttattcctgttcacagcaccttttcaatattttgataatcctatttcagtatataaatatgtatttttaaatgactatctccctcacacacaccacccactgtaccttgagttccatgacagtgggaatcattaccaccagcacctggcaagcagttagtgagcagggaacagtccgaggcacagcagcctcacaaagtgattgtcaaaggggctgttctcaggatgtgtcggtttggcacacttttaaaaatccatcgcattactttctgttacttcatgtgtgtttacaatttgatctagtcattgtatgtgatttggagaccaggtttaaccttaaaatccaaatgggtataaaatgaatgttgaaactaaaatagaatattttggatattccatatgtctgtaatataaatatttggcttcagttttttaatcattattttattccttttacagaccgagacaacacttggactcagttcatatcagcagaaaaggtaagtatatttaataagataattaacatactttcggttccttctgggggattcctgtggttctccctcctctttccccttgctcattttggtgaagaaggaatagcaaattgtaaatcacattatatgattatttctaagtgttgtgtgtgggaaaccaggtttaagtttgaatgtgcacatcatgcaattgtgtagcatgcctcccctgtcgtgtacgaagggctgttactcagctgaaactccccttgctttgtgagatgatcagctgtgtaactccttagaggcttctcttgtggctatccctgcttttgatgtactgaccactgctgcccccagttaccaggggtctgcccgcaggcccccagagaaggatctcagacctgcgaaacccagtcttgtgacttggagagaccgcttttaaatacagcttccctgtgataacagggggatggttttacctcaggtgttaaggaaaataggtacatgcatgt

SEQ ID NO: 95390 - DNA, 1026 bp, Homo sapiens
tagacttcatgtgagaccatagcttctcatgctctagaattctgtcataaccattattgatgtataaatgacatacaataaactgcatgtgtttaaattatgtaatttaaaaagttggcataattatgtacctgtgaaattattactacaatcaagataatggacatacgtgtcacccttaaaagtctacttgtgccccttggtaatccctttacgctccttatctttaggcaaccaccagtctgctttctgtcactgtcaggaagtttacattttaaaacactttatataaatggagtcatacagaatgtacttttttgagggtctgggttgttccactcagcataattattttgagattaatctgtgttgttttgtatatcaatagcttattctttttattgctgagtcgtattccattgtacggatataacacaactcatgtgtctgttcacctggatacgtggaagtttgggctggtggaaatttgggctgttccaatactgagctgtaacaaagctgctacgaacatttatgtacaagccattcattgtacggacaaatgcttttgtttctcttgggcatatatctaggagtggagtgatttggtcatatggtaggtgtatgtttaactttgtaagaaattggcttcaaactatactacaaggctatagtaaccaaaacaacatggtactggtaccaaaacaggtatgtagaccaatggaacagaacaaaggcctcagaaataatgacatttatgcagccaacaaacataagaaaaaaaaactcatcatcactggtcattagagaaatgcaaatcaaaaccacaatgagataccatctcacaccggttagaatggcaatcattaaaaagtcaggaaacgacagatgctggggaggatgtggagaaataggaacgcttttacattgttgtggcatgtgtcagaattttcttcctctttaagactggatcgtattcccttgtatgtataaatcacattttgtttatctgttcacctgtcaatg

SEQ ID NO: 95391 - DNA, 2111 bp, Homo sapiens
ggccatcttaaaatttgttagcaataatatagccaacttcagctcatgtaagctaaaagttggttttaggcatatgcagttctgtcaaggataggttattgtatgaatgcagtactagaccagatcgaaggatttgaattctaactcttaccatttgctaatttagaacatttagaggcttagtttctttatctgtaaaatgaattctgtatttatctccagtgtgttaagaactgcaaggaccactggaaatacaaacacagttaagacagtaacgcactttgaattaaaaggcaaggagatgttattacaaatgaacatctaaattattgatatctctataaaattgaggttgtagtacgatgttcagtcttggcctgtgtacgttttggaccagataattggttgtagggtagaagaaagagcgtcctgtgcattaccgggtgtttagcagcaggccggactctacacacttaatgttagtggccccctgatttgcgacaaacaaaaatgcctcttagttttttaactcttttagaatttgtccagcatgttttttggtgttaataaaaacccgcacacagagaaatgcttctggacgttgccaaattcccccagggaaacaaaattgccctcggttgagaaccactgagttacagggataaaattatcagatgtgttcgttttataaaagaatttaataatattttaaagcatatcacatatatttttgccgaggctggtctatttgattggaagaagagtccattttcctcccgcatatccccttttggagttgggagtgcattctgagagaagctgtgctcagattatttggaatctgcaccctagtgaggagcgaggttgaagctgaagtccttaagtatgacagaagcatgggtgggaaggtaccgaaagaccaaagaatttggggatggggaggtaggaaaggtgtctccaaactcacatgcatatacatattttccttaacacctgaggtgaaagaacacccctgttatatcttgtctgttctaaagagatgtggtgaagagaatttgcagtgagttaagaatcactaaagtttctgtgattcagtgaaattgcctttgaaacattgtaggagtgtcttatatttgatagaagattaaaaaaatgcatggcatgggcattttctagggctctgagtactcttaatagacccttatctctggatgtgaattcatgaggttcaaaggtccctgccagtcaaatggcaaactatggaatttccctgtcctctagagattgctttactgtctactgaggttgatcatctttttcatatggttattggccatttatttttctttagtgaattgtcttcttgccctttgcttacatttcagtcacaacattggttttcccatttccttttttccttttcactgtcgaattataacagtttttatgtatctttacattgtaaagttattaatgttgtaatccttatttgcctgtttttatccttattcagtgtttatttttgcccattctctgacctttgacatttctgcattttgtattaaattgttatagttaggttccagttgtttgatgcaatccttttgtctttatataaacagttgagtttatcttatttagtctcactgtagatgtgtttaatcttttccatctgctttttatgcattcatattggcttttgttttgtttttaatctcttgataatggggctcaattttcagatatacttttaagatatgtttatgcctttatttctcaaattgcttcagaaacaaaatagtgtctattgtgatcttccttattctcataacacttaaggatgtgttggcatgttctgagatttttattcttgtttattacagttaaatgattatttttctgttttgtggcatatacttcaaaaacaatatttattttctgattttctaactttatttccacagatcctttgcattgagtatctgcttatctttcacaagacagcttcctcatttgtgagtcttcgtatgagtaatttcagtggtcagattctgtcttcatgataatttttttctcctcaagaaagtgcacatgagtgatacacgtcctga

SEQ ID NO: 95392 - DNA, 1060 bp, Homo sapiens
tttattagcagtgtgagaacagactaatgcagatggttagcatcagaattgtactgcagttcactagtgggactgtacattgtctgtatttttcttgaggacatgctatgccagattgccttagatttttaggtcacagattttcttatgtagggacttaatgattctggaaataagatattgtggcattatttctgttgatctaagccagatgttggcaaactttttcggtaaaggaccagatattaactacttcagggtttgtgtcccgaatggtctctatcacaactattcaactttggtcatcgtagtgtgaaagctgccgtaacagtatgtgagaaatgggcataaaactttatttgcaaaagctggcagaagactggatttggctcatgggctaatagattaccaacttcttttctaaattgtcttggaaatgggctttaatgttctcccaggagaaaaggaaatggagaaggagctgtgattttgacttgtaaggaggcctagaagtactcatcttttgttttaaattaaaggacttctattataaaagaaatataagcttgtagaaaatttgaaaaatgtgaaaaaataataaatataagtcatatttattgggtgttgacaagtcaggtactcttctaaattcttaaatacatgagatggtattcattttatgatcattttacaggtgagcatattaaagtgcagggagtttaacctaaccaaataaatgattattaagtgataaagctagaattgaaaaccaagcatttgactctgaggcctaagtttttaaccgctctgcaataacaggggtcattacccttgtatcccactgcctaaatgtactacaaggtagtgctttttgttttttcagttatttttctctctgcaaacaaagctagattttctcactctacattatcagttttacaatattacaactaattttgtactcaaaacagccacttcatgtcatgtcaagttgattacctgtggctgaagagagaagtgggtgggacactagaaagccgtcatcagaggccaacagctc

SEQ ID NO: 95393 - DNA, 1296 bp, Homo sapiens
aatcttttgctattttccctgcccacttcctcaccaaatccctttgactgtggatcccaggtcatatcatcactacaaaaaagcagatgataccgaatttcagctgatcatttcttgggggaaatataatactgtagtgatcttttctatatgcttttgatattttcaattaatctatcagggaaaataattagttgcatcttgttgaatttgactattttgtgctttctcataatataacagtaatggatattttgaagttgatgcatatagcctgtaggttgttgaagttactttattatttgttttattttaaagtatttcttagtttgtaaaattctgaagtattagtcatatttttcttttcaaccatcaccattaagcagtccatttttagatataaaattatattaattaactttaaagtcaaagatgttatgaaaatcaaatttatgttcctgtaagtgatggtatgttttgttttcttcacagcattcgttcagtcagagagcataatagaagtactgcgttttgatgatggagggctactacaggtaatttttttttaagtagacaagttattgttaagccttgaataatatctggttattatttttcttttaaaaatgtaattggtttatctgaaatatatttatattttatgagctttgaagataggtcagtagagtctttagtaatataaaaacctctgtagttacgtgagttttcttttagattaaatatttctttaaaatgcaaactcattgtggtattaaaaccttgtaaataagtacattatcattcttatctttacgtaagaggtgttgagaaatgtaatagagagtggttgcatagtatttgcctagagtcagctttgtatgttttaaaactgaataaaaactgaacataatgagctctaattttataaagccttcctactaaaaaatgatcttaagtctcttttttctagttctttaatctgtttcaaggtgagaacttggagaacctatgggaacaaatgttttaaatatctccctttaggtggttgtttataggatctggatggcagacaaatcaggactgaatttctggaaaattccctaagtgtgtttgctctgtattgattgaggaaggatttgtgtctgttaggaactggacatctaggttgcaggttgataatccattctaaaaattctggagcatgatttgtatttttgctgagggaggctgctaatttgtatctagatggagttggctatggaaaagcttgtgaactgggatgtgattcactaatag

SEQ ID NO: 95394 - DNA, 4372 bp, Homo sapiens
aacattacatggtacatgactgcatttaaatactttgttttaacagtcagcctatttaggtttatcatataggtcctgactagggcctgctgttttgggctatagttccagtaatagcttagtttttagagcatttgcagtgcgagcttcagagttttagtgattttctgatactgaagctgctaagagtagttggtggttcttgagcattagttctacattttataactgaagtttacagatctttttagatgacttagattctttaggataaggtgaaaattaattatggtattttgtctttagctataaaattaattttgaaaaacctttctggctcatctttttagatgtatggtatatatcctgcacatctgaattacataggattatattttgagttttagtaaacaacatgggcattagcttctttaggaagttgatgatattgagtggtcttgataaaattaaaatatggtttatatgagttcccttgtacttctaatgtggcaagaagacaagtatatgttacatttttcagataataaaactaatgagggaagaaacaaagctttgatcataaaatgtctttaagctcgaagggacccatgtggacctagtccaggatgttttaaaattgctattgagccctttgttgaaacaaaatattgagcaagtgtaactgtaaaagagatattgatgtatttaacaatgttgaattctaaaatagcagtgtcttttttttttttttttttaagacagggtcttgttctgtcacccaagctggagtgcattggcactatctcagcccactgcaacctctgccccctgggctcaagcacaatgtcattatcctaaccagaatttcttatcttatgtttttcagacttgcttctaggcacagattattgacaagcaaaccaggaacttttacagattgtgataagaattaagatagggaatataatagaggataactgggctgctctgagaagccaaggagggccacactgtgagtggggtcaaggctgagacttgaaggaggagaagatgccagccataacaacagcatgctaggcaaggtgactctgtaacacagctttggggaccctcctgaggcctgcctgtgtggccctttcttctgttcctagtttttgtagaagaaagtttaaaaatcgctgatttgactagtccagccttctccttttgtgggtgaggagattgtgaaggctagaaggtaaagatatgcaatgacaacctaggttcctaatgcctgataccaccccccacaatatggcataaatttttctactagttatttacagcatttgtttttttcatgagttattttagatgtattaaaattgcaaattatatttattcatcagttgtaatattcagaaaaataccttcacctaaaagaaaaacaaaaacttagtagacaaagatttgtctttaaagtgaaagatatttttaatcttaactaaatgaaatagggaagtaaacagtttgtgaacttctgttttgaaagcaagtgttcctattttgaaacaactgacacattgacatttttacactgattataaatggctttgttactcacagacagcttagagatgtgggtcggtgtgaggagcttaaagtagatcttactgagcccagcttcagagtaaatatgagtagaatcgtaaaagccagaaatgtaaatccttttctttcctttgtaaatcttcctttcctcacttattgtcagaaatatatgcccaattaaaaaaatttggttgctaaaaggtgctgttagtcatgagcattctgtaaagtttattttgaaaataaatagggatgggtttagaagcacagattcacattgccagaattcatacttttctctagccactttcttgctaagtatatctctctgtgtgtatttctttaccttaaaatggatcataatgtctgtgtcatagggttagtttgaatattaacaacagtgatcagtaattattagtttatttttatttcaattacagttgtttgatgcttgaactagggaacatcaggaaagtttgggattcattaacagcataaaattaggggaaatatttttgggagaggaagctgttactagttctggttttgaatctggagatgtgataacttgactgacttttgttacattttatattttatagcttaataactgcatgtgaaatgattaagtctgtatctagtgttctgttttttgaggcatataattgaaaggtattataattggctgtttaaagcaaaatacgttaatttgttttatgccagagttgaatcctatttatctctacatcttttaaggaaagccagtgatgtgtaacatagtattttccttttgagactttataatcagctgctgttattaatttttttaactaacattcatatttttaacataactcatactttttaaaatatgaattcataattcataatagaatttttatatatttttaaagcttctgatttaaaaagcagtatacccaaactactgcctttatgtagttctcttcagttagatcagcatttcttctggctcaatggtgggaactcattcagtggtcgttctattggaactcttaatagcagccacctatagctcgtttccagttgtttcttgttggtttcctctgccaattagacataaagcttctaattagaggccttgactttatgtcttttacattgtgaacatctggctgttcagttatttcttgttagttcattgtgttcttatgttaataaatttgtcttcagtagggaataaccaaaaaattctctggatcctgtgaaatttcagtttgtgttaaaaagtggggggaacaggtgaggaatgggatgggtgagctgagcagagccttttatattcatagtcctttattgtaatgagtttatcactttacttagagacattctaagtatactgtgtcagtaattctgttggagccattagctctgatcttgatattgaaattccactataagccaggactagagataacataaccagaaaaaggtcatttgcatcagtaagtacaaatgccagtgcttattgtacctgagcaaaaaggtgggacatcattcatgctttcagtatttattgaatattctctatatgccacagactggttaggggatgaatagaagtggagcaggttggcactgtcattgaagagaaacacaggaaatggaggacaggagttttcccaaaataaaatcaggatgtgactgctagactaaggagaaaaggatgcttggcaggcagaaaaaacatccaacgaggtaatgtaatctaattaactagtatcttattctgctgcttgactgtccacttttgtcataccggaacagccaggtacatatgtgggacagtgagtgtcttccctgatttccaaaagaccaacaaatgggagtcagtgaattccatattaagccaaatgaaatatcacatagttgaaattctgcatgtgaaagttgtcccttttctcccatttattcagcaatttatagcaatatgggtttatggatatttattttatactttgggctacatctagtacttcttcattttgttgctcagattgtttcagctttggtcatttgggagctctttctgttgattcttaccttcctttctctatccccatcagtgtaggatttgggtggttttctctattttttactttccggcactataggatgctccattctcatctcgtgtatttcctgcccctgtcctcaaatcggccattgctccaggaagccctggtttcttttattggaaaataatattagaacacaagatctgagttccaggtgtgttctttgctattggcatgtcattgctttaggctcttagagctgacagagcaaggaaatacatgtatgtatactaacctatgaatatacacatctataaatattcttatatgtatgtaataatgtatatgtttcactaaacatgaattcttactgatatcactgactcttaaccattaccacctggatcattttggcctcccccgccttgtttctgtataaattgctcttccaacagtgagacacctggctcccagtatccaccatctgtgtacttaattgttcgatttcagtgtacatgtatagtggcatcagaatggttaacccaaactcccatgggaaaaagcattattaactagaatacattgcgtgtgtatggtttcttttgcctttagtcttacagattctattcatttccagaattacttaggtgagcactctcccctctccccccacttcagtaaggttgattcattcatttgtaatacagttaaattgttttgtcatt

SEQ ID NO: 95395 - DNA, 1053 bp, Homo sapiens
tttaatgttgatttttgcatattcattgttagtatatagaaatgtactggattttaggatttagaccttgtattctgcaactttgctatatgtacttattacctttaagaaggacttttctttttgagtccttggggtttttacatagacaagtatgtagcctgcaattagggagttttatttcctttccagtgtgttcgtcttttttttttccttgccttgttaaagtggccagaacttctagcacatgttgaatagagtgagagccacatccttgacatgttcccagtctcagggcctatatattcagtcttttactggtaagaaggatattacctagaggttgagattgaggtagttctacatttctcctatcttcttgagagtttttatcatgaagaggtgttcggttttgtcaaatactttttctgtgtcagttgatatgatcatgtgtttttcctctttagcctgttgatggggtgaattacaatgatcagtttttgaattttgggtgagtcttgcataccttgagtaaaagtcacttggtcgtgatgcataattttatacattgctgggttcaatttgtaattttttttttgtctaagttaatgagttttgtagtttttaaaataacatgtatgtagcataaaattcagcatttataactattttaagtgtacaattcagtagcattaatcacaatgttatacaaacaccaccattcttttttcattaccctagagactcagtaaccattaagccacaactcctcacttccccctaccctgttgcccagtaacctctaatctactttctgtccccgtgaatttgcttattctacatttttcatgtgagtagaagcacagtatttgcccttttttgtctagcttatttcacttactataatattttcaaggtccatccatgttgtagcatatatcagaatttcattcttttttgtggctgaataatatttcattatgtaactgccatgttgatccattcatctgtgatggacacttggtgtttctgtttggagactttgggtactat

SEQ ID NO: 95396 - DNA, 1317 bp, Homo sapiens
catacctcaaattcctttgcactgttgtgctttctggtaggaatgccctaccttaacctccgtgttcacctgactcttccttcagacgtaaccactccataaacccttgtggctgaatttggtggtttcagtgcacctggagcacccagtacttgatttattcgtctgtgtctcatctcagtgtatgagttccttgaggaggtccagccttagccgttagcactgtggttatgtgcagtagcttttagttaaaagttatctttttttttttggaataatcaaggcacctactatgacattagctaattgtatttcagaggcctagttttgaaactttcattatttgtcaacatacttggcagccatgccagcaggtataagctttcccgcatgttttcaaaacaggaaacttttgtcctttggaatagaagttctaacacttgagcacatttttttttttaaactaatgtcttgaagaggtaacttgtttctttttttaagtttaggtttgcctcatcccacaatgagatcatgaaataaccttgcctctccccatcctatgagttagctggtactttctgtttatagtcagtggtcagcaccaaaatagtatcccttgaatttcaaagcaagccaggacagactagaagtacattaaaatttgtgcctggttactagagggggaaaaataaaatatataatgttgtttcatatgtatgtagtcaaaagtaaaacatgtgactaaataaattttaaaaataataaactaaaattcatagtaatgctaaaatttagtttatgtaaatcattaagtaccaggcacaacaaaatttttgtttctttgctttttgtttttatgtaaacattattgtgcttagaagttgccaaatttggtgtctttcaatttttttccttttggaataaatgtgaacaaagtctcacatttattcaaacatttaacttcattttaaaaattattgctgtaggataacttttttttttttttttgagacggagtctcacgctgtcgcccagcctggagtgcagtggcgcgatctcggcttactgcaacctccgcctcccgggttcaagctattctcctgcctctgcctcctgaatagctgggactacaggcacatgccaccacaccggctaatttttgtatttttagtacagatggggtttcaccatgttggccaggctggtctcaaactcctgacctcaggtgattgcctgcctcggcctcccaaactgctgggattacagccgtgagccaccgtgcccagccgctgttggataattttttaacttaaaatt

SEQ ID NO: 95397 - DNA, 1366 bp, Homo sapiens
gtataaacatctgatttataagtgaagataaaattattctagcttatatataacaacaacaacaaagggaaattattctagcaatctcaaaaattcttattgtatttatttattttttgagatggagttttcactcttgtcacccaggctggaatgcagtggcgcgatctccgcttactgcaacctccgtctccctggttcaagcggttctcctgcctcagcctcctgagtagctgggattacaggtgcccaccactaagcacagctaatttttgtaattttagtagagacagggtttagccatgttggccaggctggtcacaaacttctgacctccagtgatctgctcacctcagcctcccaaaattctgggattacaggcatgagccaccatacctggcctgcaatctcaaaaattcttaaagctgactggttcctgagaccttaaggaaacaaaaaagctatcaaaaattagtaaagctccttttctcccacttttaacatacaagaaattaataaaagacagaaatgaggtgacatctatgtgccttcagggtattaagagcccagggtaataacctactttaaaacaatgctgtaaggttgaacatgactaaacttgtgccagctttctttttctttcctttatgttttagccaactctattgaggtataatttgcatacagtaatattcactagtttgaagtgtgcattttgattagtttcataaacatacagttgtgaaaatggcaccatcttaatgtaggacatttccatcatctcagaaagttcccctgtgcctgttagcaatcagtgccttttcctcatcactggtctcaggcaacaactattgctctgctttttgtcactttctgtagctgctgcgtggtctagaattgtaaataaatggaatcatactacatgcagtcttttgttttgacttgtttcagtttgcataatgcttttgaaattcacgttacatttatcatgtttgtttctttttattgctaagtaaactacaatttagttttttacctgttaatagatttctgggttgtttcaagtttagggctattatgattaaagcttttatgaaggtttaagtaaaagtttttttgtggacaaatattttcatttctcgcaagtaatacctgggagtagattgatgagttgtatggtaagattatgtttaacttcagaagaaactgtcaaaccattaccagcaggatgtgagagttccagttgattttacagtatgtctttccccaacacttgatgttgtcagtcatttcagtgggtacttagtggtatttcattatagtttttttttgagacggagtctcactctgttgcccaggctggagt

SEQ ID NO: 95398 - DNA, 1022 bp, Homo sapiens
tctctccccccactatcaaccctcttgaaaaattttccattgcaccgttcgaattagttgagtatacagttttttattataagcagtttgttacttattaaatttcttatttccatgtgatctttatactcttttttttttctctttcctttctgacaatttgtctgtacccagggaatttaaataaataaacatttcattttgtagtcacatatgaataaatttacacactgtactgttttatgttacacttcctgttttctgtcagtgtgcatctttcatgcaaccagtatatttttcagtacactgctgggtccttggatatgtttatgagtaagatagtaattagcttccaagaatttttttgttagagacaggcataaacaattacagtgtaagattaaaggtacatattaatatgtgtgtgccacaggagagagctaggttgactgtatacacagacctgtgtatcagtcagcttatgaaattagagaggacagttctaatggggcattaggtctggatctgagtaactcccttttatggtgagtcaaaacaatactccataagttccatctgactcaccgcccccatctaagaagtgtgccgtttgtttgtttgtttgtttgtttgttttaggtggtgggcaggtgtggttgaattcacacctgtgaacacccctggaacaagtttggtcaaagcaagggcttgtcttcgtaagtgattagtcttgtcatcttatatgagggacctgcctggctacctttctcagtggtgtagagagtaaacagactgctgacttggaatatgggcttgactgtgaccttgagcaagttaactagtcctcatgtgtcagcttcctaatttgtttaatggggataataggaatacctgtcttctagggttggtgtgagtattgaatcatctgtagggcttggtatgtagtaagtgctggattagtgctagctcttgttgcatattcatgttatgtttgactctggactacttgtgtaatcccaggt

SEQ ID NO: 95399 - DNA, 1224 bp, Homo sapiens
ggcggctggccttatgatatgtactgtgtacagggtaacttctcttttgtacaattgaagataaaaggcttaatttatacatgtctagtggtcataatacatcaacaaattgctcttaaatgagttagtttgtcagctgaattaactaacataaatgttgtcatatccttttcctttttttttttttgaaacagagtctgtctctgtcacccatactcaagtgcagtgagtggcacaattatggctcactgcagcctcgatctcctaggctcatgtgatcctcccatcttagcctcccaagtagctaagactagaggtgcgcctccaggcccagctaatttttttttttctttagtagagatgaggtttcactctgttgcccaggctggtctcgaactccagacctctaaccatcctcccactttggcctcccaaggtgctgggattacaggcaagaaccagtgcgcctgcccgatatccttattctgatgggaaggatgtgccttagcaaactggttcaaatgagaagttggggaaggagtataatcttctggataatgggagccaggaaacttgccaggtctcgtcttcactacgcacagatgagtgggagatgttgggagtcactcttgctttgtgcaggcttccctacaaacatgtcagcactgcttggcatacttcctgaaacttatgtttttgtctgaacattgcccctccaaagggagaactcattttccgagaccctactgcagggagataggagtgcccactgtgttgtctgaaatgtgtgtggtacacagcaagtgctcagtaagtctcaattcagttgaaagttgaattacacactgacaggcaggttcatgactattcccatgtttacgtccgaagttcatgttggtgtctcaaagtgttaacacttaaaatattaaaacaccacattgagatatacataatatataatatatatataataaaggaaacatagaccctctgcgcccttatctggtagtcactcctcggttcttatctggtcactaggctagacagaacaccagcaaattaattcgttaatttttattcagtaggtgccatgtcttaggctgggtgtagaaagataatgacacaattctggctttgcaagagctttcagtgtggtggagtgaacaggcctacagatggatgctgagttataagtggttgccaggataggtcgggtgctgggga

SEQ ID NO: 95400 - DNA, 2901 bp, Homo sapiens
aataggcactgtttctgaccttgtgtttctgtttctgaaatggcagatctcggctcactgcagccttcacctcccaggttcaagggattctcctgcctcagcctcccgagtagctgggattacaggcatgtggcaccactcccggctaatttttgtagttttagtagagatggggtttcaccatgttggccatgctggtctcaaactcctgacctcaagtgatccacccagcttggcctctcaaagtgctgggattataggtgtgagccactgtgcccgctcctttcttttgatgacagtgaagaattgtctatataggattttattttattttgcttatttttttaagacagggtcttgctctgtcacccaggctggaatgtagtggtgtgatggcagctcactgcagcctcgacctctggggctcaagcaatcctcctgcctcagccccctgagtagctgggactataggcatgcaccaccatgcccagctaattaggattttctttttaacctacacacagtaagacattattagaaacaatgagactacaaacctatactttaaaaatgtgttggttatatatagcctgtctgtcatacatagcatttagaagtagcttattttaatttcaggtatgattcagaaaactttatggattatttcacaaagttttgatttgagaatttctcagcccattgcatttggcaacgtatagaaactttcaagcttgggaaattgattgatagccacaaatgtaattttagatcagtatcaactgtcttatatttcagtattttttttcttttaaaattgaagaatggtatattttccccccttcctccacttatcacagctaatgccttatgttctttgttgcttttgtcacgtggaacacctccttgtgtgctattttcctgtcaggacttcagtgtgtcatcccccacattgtcagcaatttcagtgatctctgaaaaagcccaggattttctccctgacctttacccagtgccctttgtaaagggttatgtatacctgatttgatggaataatttatgtatagcagctctgagctgaagttagcacttttgcttccataactgtcttcatattgtatttgactcccatcttcttcatatgtttaaataattattgatagaattctaaagtagtagtttatttaagccagaagttaatgtgcaaggtgaataataattttaatcattctttatactccccccaccataggctacattaaaaacaaacccggcttttatttgtccaagaatggttgagtgtcagtaggtcagtagagccagttccagagcacatagtcaagccagcaggtatttgtaataccttctcttctgctgcgttctgcttgcttctacttgcacactcctgggtaaaagtgaatgagatatgtccagcatggcagaccaccagaagttggccatagcactcagcactttgtccttgcttcaggaataggcccagatggttactcttctctggccacaatcctgggaccagaagcccagtcagcagagcacctgctcttccaccaggctggtttgtgcctggagtgagtggtgaatagatgaggtcaaggctttgcaaatggatggcttttcttcacgtattggtttatcatttacttgttgtgtgtgtccttgggcaaattatttgtggacctttctcaactgtacagtgggcataaacatgcttaatagagttgctaggcactttgccataggtcttgaaatgttagttttcagatatgtttgcagattaggcgtgctatcttttgtctcctctctctgtactgtttcttttggcctatgtctctatttacctcctcccgcaccttgcctccagtgaaagaaaccaggcatggagcatttgtctcttggatcagccttgatacccttatgctccctactgagcagttccttggggccaaggggagtctaaggccatccccaaaagaggtagccatttctttaaggtactgtgttttatttattcaaattttgcattccgtttcagtatccatgctggttccagtagaaaaacagattttcccaagtggatacaccttaagatgtgtctcatgctttgtacttagggctcacaatagcacgtttctggaaacatttctgtgtttcagcagtactataacagtcattcttcatcaacaaggagaatggaatggaatggaatgttgccagggtcttggttcacagaggtagactaactttgaccttcctgggaccctgaacaactccacatcagacagatcgttgtgaaaggcactgagtaacatttagataagtggatgattttgcattttttacagtaacatcagaaagtccagtgttgtatgaaacactgcttattaataaagtaagagcatgtggttagatatcagctacttgtaggagaatatgcgtggctttcagtttcatagttctattcctgcagatttttattgcatcaacttgttttatttgagcagtttgtgtacagtgatgtatggaataatcttcaccaaatagtgtgtagatatgtttttgactcatagcagaataagtactctaaggccttagaatagtagcctgggaagacaaatgttagcacagaaagatacatcattcttagatagccaagaagacctgcaggtgtcattaattagcatctgaaaaggaaatattttggaaaacataaataatacaggcagttaggtgtctgcagccagagagttagagaaggaaagaagtaacagactaatggaggggagttgtcagggaaggaggtgttggggcagaagggcccaaacatggggagcttggtggagggcctggaagaaactggtgattaaagcaacaattgtctgtcta

SEQ ID NO: 95401 - DNA, 1036 bp, Homo sapiens
cccccttgccgccatgtgatctgcacactcctttgccttctaggagtggaagcagcctgaggccctcagcagaagcagatgttggtaccacacttcctgtacagcctgcagaaccatgagtcaagtaaacctcttttctttataaattacccagcctccagtactcctttaaagcaactcaaatggactgagacatcagtttgctgtcaattaatttgatatttaaaaaaaaaataccaagaaaacttcttatggaattaggaaagttgctgttaaattttctatgaaaaaatgaaaatgtagaaatactgggaaaattctggaaaagttatgaggaatgactagcacaagcagttattaaaacttgctcttaaactattatgtaattggtataattagaataagtactggtatataaatagacaaattaatggaatagaatagaaattctagtaatagacctaagtatatatggtttatgttaacctacttttcttctgggagtctggaactttggtatgtgttaggcagaggggtaccgtgtggctagccccaagtaaaaaccttgggactctgtgttagtttcctattgtgcctgtagctaattatcacaagttgagtgggttaaaacacaagtctattctcttatcattccaaagggcagaagtctaaagtcagggtgtgtggctgactgccacagttatggtttgagacaatcattacagcagttaactcctgttattgcttgagactgtcattactgcagttactactggagaccatcattacaagactgaacgaagggacgaacatagaaatgaaaaaagacaaaagaaactgttttaaggaaaggcaacatggggagaagaggagagctccctgcttctagtgatcaaaggcagcccccttgagcttctacagtcctttcgtatttattgggtaaagagcaaggaggaggaggtaaccattggtcagctgcttaattgatcacaggttcatgttgttactgacaggcttcagttatgcctaatcatga

SEQ ID NO: 95402 - DNA, 1007 bp, Homo sapiens
attctgttatgtactgggatctatttcttgattttttttttcccagggtatttttttttctcatgtatatgtctatgcatttgtacatttctgttttaactttattttaggtaatatagcttatttatacatttcattagctggcttggcaggtcatcccctctccctaaatgattattcttcaaaaagcagtttcttatctatcttgtttttattccctatgaatcctcaaatcattttgtaaagaaaatttaaagttgctatttgctttttggttacaattacattaaaacgttagataaatttggaatttgacatctttatagggttttccattttgtttgtctttctcctaagtctgtgtgtgtgtgtgtatatatatatatgtattaagtaaaactgtatgaaattataatttttgtcagtccaacataattaacaacttattcaatctaatattaatatgtatgtttttatgcattattgctttggctagagcttcagaacattgttaaataagagtgatgaaaaagcaggcatccttatgtttttctgtttttttaagagaaaaataccttaagtgtttcattgtgtagtatgattggggtagttggttgaagttagatgttcttaataataggaaatttcttatatttttaaagagttttagttttaagagttattagggacagctactacattttatcccatggagttattttatgacctttttaccttaagctgtaggagcagtcctcttagctgcactgaactctcttggtgaatttatacccatgtctgttttccctctagtaaactcgtccagggatacccattggacttgggctgcctgcagctgccaggctatactcacacacttccacatttgctccatttagttaatgtgcatatttttatattgtggttttgtttttaactaaaactctttttaaaaagctattatatcgatatgatccctcatgagtattgatgtatcaatatatagt

SEQ ID NO: 95403 - DNA, 5466 bp, Homo sapiens
attccatttaactctttagtaagctgttgaaagcctgtttacatttcttattttaaaatacgtgattcggtgcctttatctttgatgtgaaagcctttaaaaataaacgtgaagttgccagcttgcaagcatttatctataatttacagttaagggctggcccctattttaaaaatctcattagtattgtactgctgcaaaacgggtacttggacagggtcaaaaattattttgtaatcttgaagaccaaatcagtgtaatttcatctacactacctctttttgagccaagggacatgtgaatggtcacagagccttcatgaagaattgactaagtgaatagtttaaaaaaaaaacaaaccacgcaaaacttgttagtttagcattgcacatgaaactgcctgtacaagaaaacaatttcttgccacggtaattttagagttaacattctactttatgactaaagtcacttgctttttattgttgctgaaggtgaaagcaaatacaaaccaaattagtattaaagtgcaaatgtgcttcagtatactgtttcttttatttttgtccacattacattcccttatctaactctctaagcaaccttagtctgagttaacattggtggaaattattcaaagaattgtcgtctatagaaaggattaattgatggaagcaaaattatttccagaataaaatattgccgctttaggactagtcggtcctggggttgtcataatacatcattggccacagatctgcagttagttgagtgttctttcttatgtgtgatcgtggcacctagcattttggcctgtagtgggtgttcagtgaacccaaaatagtgcagtaatttaatggacattttttgggtgggacttcaagtagaccttggtgggtattgtgtccttgtttttctgttcctttgcttaccttgcacagtgccagacacactggcgcttagcctttgagtgaatgactgtcttcatgcgcccttagcacagggaattgaaataatggttgaatctagtaaagcattaagtttgtattttccttctactgctgctgatttttccaacagccattttatatgctaataaaaactttactctgggtaaagttaagtaaacaaaccttttgtttgagaactgtcagcctaaaatatatttgctaatttctcatttgcatagtttatacatgttagtgcacctctctaatacccataaatgtgtgtaaggattggatgaggagaatacttgccagggtgttaagtatgtattaaaggggtggttgaatcagccagtggcctgggtgaatcagatatcctttgtggcccatgcttttctgtatgaacaatttgtgtgtgcggttatccaagatattaatggagatgatgctgatatagaacataggcctctacccatcataaacagatctggttctaatcaaatattctgtgaaggtatctccagaaatggcttctcctttaaaactgatcatattccagtattgtttctgagtaagtaggggaaaagcaatttattttcttacgtgattgtgacactgtgagtctggcatctgatgaggcacaaatacagtatttgtcctaaaaggtactgttgagtttttcagcaagtttgggcagatttctgaagatggctgagttcagtttgatcattcacacccggaggaattttgtgtctattgaagtagcataaactagtttaaaatttcaaagttaagatttacctgcagttttaatgatgattctgcaggtattttgtatgtttgtatttcttttccttcattactgtataatttcactgcaaaatctttaaaagacaataaaactcattgtctcctgaagaaaagctgcagaaataaattacctaatgtagtttttcatgtttggacttgatgttgattttcttgagtcagaagcatggaccattccttgtcttaacatcctatatgacttaactgagctatgggagtgtgctatcactagtccagaggaaaggtacctttgagatggttttggctgtgatgtaaagtttgtaaggactttgaaagagtttccagagatagaagttgttataatcactacaaataactagttctagattggtggcaagattttgtcttgaggctaacatctagatactgagaatagcaaaaatgtgtgtgagttgtgaaaatatatttttaaaatatatagtgaaaatacatgtgtatgtgtatatattaaatgtatacttttagtagtcttttgaattataaagcagcccattatgactggcaaataagaccttttttaaaaaagcattatatatcatgtaatataatttcattgtgaagtgggtttttggaaggcatttattataaatgagaagctatagtttatgtatctagtaaatataaattcgaataagttttcaagaatgtttcaatttatgacaatttaaatttcattgtcacatgttttattaattggcaattaaatggcagggtaacgtttgacagcctttattaggactttaaaaattttttgccagtgtactatagtttcatgcacaaatttttgttttaagctgtatttgtgacataggtgcaaaacacagtacaaaagtatttacaaagcatatgagaaaagtgcataggactaaagaccacaagaaaacagataagaatctaatagttttctaagggtagccaaattgactaggagtgttatttactttttcttaaccaaactatttttaacctacttattactcgataatgttaaaatgtttttgaaagtgattttcttaagagtgagatgtgttaaccctttgtatggggtagagtgggtaccttttaatttagggccttgtaaatagaatgttatttaataagtgcttcactaatgaacgtttgtagcctgcttttactaaaggctgttgcctgatggagcattggagttttgtagttggaaaaagtgtgtccttttttcctcttgctaatgaccattttcctcctccttctaattcttacagtggaccctcatagacatctgccaacaagattgctttgggagtagatgtaaactcatctaattgttactatccagagtagcaataagccaaattactcttggaggaaaataaaatctttgctaggtgcttgatattttaggtgttctctctcttgcctatatgtgactcaagcgctctgattggccttgccagaccaagaggcccttttcctacagctgaattttcccctacggtctcttgtaagcagcatctggcattgtttcggtgactctgtacttctcggttctggttgtgccctagctgacagttgctgctctccaattgcctgttggttgtcttcctccctgtgtgtgtctagctgctggtgcacactgcatgtgtccagggcagaattatcttgcgccacctccagttttcagttttttattaatgctatgattattctgcctgccccactggattcagttttgacccttcaccaagtggcatcagtgcctgttacatcctcttttgatcactctcccactgccttcaccatggggcactgcagcagcctctctcctaccgcctttcgccatttctgttcagtcctgcatgctccctctgaatttgtggtctttgttaatcattcatcattcattttgacacctaattgtgtactgccttgttagctacttaaatgatttcaggggtgtcattcttcacctaggctggaatttctgtagggcagaacctttgtcaacatctgtagtacataaatagcaggcattcagttttgattgaaagtttgcctaaactttcattgtaatataatttcattgtgaagtgggtttttggaaggcatttaatttattataaatgagaagctatagtttatgtatctagtaaatataaattcgaataaattttcaagagtgtttcaacctatgacaatttaaatttcatagtcacatgttctatcaattggcaattaaatggcagagtaacgtttgacagcctttattaggacttttaaaattttttgccagtgtactatagtttcatgcacaaatttttgttttaagctgtatttgtgacgtaggtgcaaaacacagtacaaaactatttacaaagcatatgaaaaaagtgcataggactttttatacctgagaacctgagagtcagaagtacaggtaaaattcagttctggtgcagatgtcatgaggaagtctgctatagtaggacattgagtaacaccagttttttcttccccacatgttgcttttccttgtaactaaaaggagttgtatacacttatctaaaccatcacttttataactttttgattttaagattttcagattctcataaaaccctaatctagagatcatgaaactgaggcttagagaggttaagtaatatacccagcgtgatagggctggtaaatagtggagccaggattccgccctaagacatctgtcccttgagccaaactatgtaaccccaaatgagcacttcaggaattagattttgttatattgtaccaactgcaaaaagaacagacttgacagttcatgcaaaacccatgtattagtattcaagtaaaatgtactttttttttttttcaatcagccacaagctttcatatcactttctgttgacttgttaacagtttaagtaatcacaggccattctggatcatgaaggttcttaaaaggaaaccagtgagtggataatacagggaaatgaatatttggtattcgaagctactgtctctttgttcttgatgacttagatacctggttgtattgctaaggttaagcaatattgccttctgtagatactgcttagctccagattggtgtgatgagttagtctagacttgtggaatattctcagaagctggccctggactaacaggagctggagataatgcaagggctggtagtggcatttgcctcggcaggcagaaatctctcgcagacttccattagaggtccaagggctccagaagaagttcaaaggtgctttgttcttattagggcattttggaattaggtggtcattagttctcatctgtagttccaaatctgttttgttgttgttgttttttaattcccatgtgattacttttaaaaccacagatggagggtttctagaaagcctttgccatttgcctgattgattttgttgcatacaactctgccgttttagggcagaggtttgatgtttaagaggatcttttagatggtcagtcatgatagagtatgaaacctacgtttttatttattttcatttatttattttctagaaacttggtgaaaaaaacacataacaaaatacttaaccatttttatatgtacagttcagtggtgttaagtgtattcacgttgttgtgtagcagatcttcagaacttcttcatgtaaagctggaagtctatacccattaaaca

SEQ ID NO: 95404 - DNA, 1049 bp, Homo sapiens
gtatgcgcactcacacccctggaaggctctaccactgtaggacagagcacggaggattgcccaggcgccggagaagaggttagcgccccgcaactccgcccctgccccgcccacgcaacgcggcggctgcgcggcgaggccgccccgtctccacgtgattgccgacaccgcctccgcgaagcagaagccgccatcataagtcctggcagctggacctgggcctgcctccctccttctcctgcgccaggtagcggtaacgggctggggttgttctgtcctggttctgtctggccgtgaagccgcaggcctccgagagcgggacgaggaggtggggcccagggggctccggggcggacagactgaccgccggacagcccaggtgtcggcacagcgtgggcggtgcccagagccgcgccccgcccctcgcaggccagcgctcagggctcgcgggccgtgcccgtttccagtatggccgcccgccgcgcctgacccgcggcctctccgctccgactgcttgtaggcgatgcccaggcaaagaccgtgactgacactctcgctcacacgcacgcacggacccaggcccacgctcggagatcgagccccgggctcgcaaccgttgtcgctcccggcgccgcggccagagcccggaccacggcttccgcgccgccgccgcctcgccgagaagggccgcgccggacctcgagcgcggcggcccccggccggcagggatggggaagcgggcgggaggaggagcaaccggagccaccaccgccgccgtctccacgtccgccggggccgggctggaacctgcggccgcccgtagcgggggcccgcggagcgcggccgccggcctcctaggcgcgctgcacctggtgatgaccctcgtagtggctgcggcgcgggccgagaaggaaggtgggtgtcccccggcggcgtccctgcggcggggctgtcaccccgctctcgcggaggccgggagggctgggccgggaggaagggccgcggccggggctccggcgcaaagttgggcggtcgggtaccgtcccgag

SEQ ID NO: 95405 - DNA, 1015 bp, Homo sapiens
gaggggctagtgctatgttcccggctaaagatggctgtgtgtgtatgtgagaaagttcttttatcctctatttttcccagataccataagcagggtaagacagtttgcaccatgctgcctcaccatcagaatgccagcctagcttgtctgtgttttttctcactcagtcctgcctttcttagttgttcagactatggatttaaccagcctagggagtctccagtcacaaacctctagactgttcctattggtccaaaaaggggctgttggctttgctactcagggcatgtcccttactttgaggaactaggctttcctggtttgactgatggttccatctgtgggcatcctctctcattatcttcccacacgcctgcttgaccttcactgtatttggaagtccttcctcttctattttggttcagggttcagatgtctcttaatttctttcaagatagagttttgttcctgtttcttattctccttctcacttttgggtgatttctcagagaagagggaaatggtcctctttatgccacatttaaaaaccacaggcttaccctcagagtcttttgcattctgcattatttttagtttcagttctgtatcacatataatctttttatgtttttagagacagggtctcactctgtcgccaaggctggagtgcagtggcatgatcatagctcactgcagccttgaacttctgggctcaagtgaccctcccacctcagcctcccaagtagctgggactacaggaatgagccactgcatccagcctgcatcatacatactcttttaagagtcatttaagattaggattagggacctgaattcaagtttaaattcagtcttgcctggtgctaccaatgcaaatagctcaactgaagtgacagtcaaatcatctgatacggtcacacatggctaaacttgcatatgtgcaggcaatgacaaccccctcgcagtatacttctctgtctgactgctggtaagtgtcatttgacatgaatgtaag

SEQ ID NO: 95406 - DNA, 1109 bp, Homo sapiens
tcccagccctaaaccactctccttggcatgaacttcgattgattgaaagacataaatatctaaattaatggtgccatgtcattttaaaaaagtgttatagagtcaaacctatcccttaactgagacagtagaggtccagaaaaggagaccaggcaatcactattacattgggggaaatattatacctgtggtttcaaagaagcaggacaccttggctacatggcgaaaggattaggggttgttgctttcacaacattccattgcatttcccctcctcgcagcggtgaccctggcttgtgtgaggtgcttttgaatgtttttattcctatcttatttgggtattatcaataattcattttaaatattctggctgctacaaacatttactttagaaggatttattgtatcctaaagtctgcatttatgatttcttgagatgatatcacttccttggggatttcagttctgattctcagaaagagattagtgggggaagcggaatttgatgttcagaaatgttccagaaacttggctgcaatgcgtcaggcctgctaggcgggctgccacattcctgggcctgtctcagccggccgctcatgctgtgtctccccttttaggagctggagtcagagaggacgtgtttctcgtttggcaagagatggaggaagcctgcagcacgctggcccagatccagaggctggtggccgagcctcccaagcccgacgtggccactgtggactgcggttggtgctatttctggtcactggtgtaaaagattcataaatgttactagctggggaccaggggctgcttccatgttcctgaccagagaagctccagagcccagctgcgaggggctgctgaggagagcagccagagctgtgtggggtgaggggtggggagggggctgaacacacatgcatggacatgtgtgtgtgtgtgtgcccacgtgctcacatgtgtgcatatgtggagattgtcagtacccagagctggacagtaaagtggtaaaaacagatgcttgggccgggcgcggtggctcacacctgttaccccagcactttgggaggccgaggcgggtggatcacgaggtcaggagatcgagacca

SEQ ID NO: 95407 - DNA, 1046 bp, Homo sapiens
ttacccatgcattggtctgtagtgtaaattgcaaaggaatcttgcctgagagcccgctctgacaaatcaggatatgttctctgaaatgtggtccatttattagctctcagtcacagctggactgagacaagcgtgatccctttgcattttatgtaaaacccatatgtgaggaaaatatacaactgccacttccccttccacagaaatgagcatcttgctggctgaggagtggctggatgacaaatcgtcagaaaaggtgacgcgagaaggaagccaggtttatgaccacgagtgagttctttaatttgacaaagacagttctgttatgcttctgttggttaaccatcaagttgtaaattttaaaacaccacctccttgtgttcttagttcttcagatgtgtcttcagaaaactggctgaagacctatggcttggtcgccaagaaactcaccctcatggatgccttgtcagtggcagcagtcccgcacagctccacctatgttcccgtcctggacaagcatgtcgtgtctaaggtctttgatgaggtaaactgattgtctatacgtccctacttgaggccattttcattttctgctcaaataaaaagtagtccaatttcttgtgtggttgtaacagaaatgtattttagccactgggggaaaaagtatttgtaaaggcagtaaaagggagagagagaggcttttaagaatttgggcgcggtggcgcatgcctgtaaccccagcacttgggaaggctgtggtgggtggatcccttgaatccaggagtttgagaccagcctgggcaacatcgtgaaaccctgtttctacaaaaaatacaaaaattagccaggcatggtggcatgcacctgtagccccagctacttgagccactgaggtgggagaatcgcttgagcctgagacatcgaggctgcagtgagcggtgattgcgtcaccgcattccagcctgggtgacaaagcgagatcttgtctcaaaaacaacgaaaataagaattctctttttaagctgagagaaactgatcttggttgg

SEQ ID NO: 95408 - DNA, 2195 bp, Homo sapiens
acaggagaaatcttaagtctgaaattttaaattccctttgaaaactcccctccctagcacccctcatgttactgtgattgcagatttcaccctcactagccaatccagagccctcagagctgaacgataggggaagttgccggagggcatctgtgaattataattaatcctccctgggagcctggtctagggcagcccagctgtgctgtcctccaacattttctgaataaataaagattgttctccagggcaaatcctttggcccagaaagatcaaaaaggctctctcacccataaccttgactgctttggaaaatctggaggtagaaaatatttttaagctgaaagcagctctaaaggaggccgtggaaagttacccacaccactggctgcacacgtttccttctcaaagccgtgactggcaaggaagctggagcctatggccttcaggggtggggaattgagtgctctgctccgggagaaagagagcgttaggaaaatgcacacagggaggcaggcatgggcgaggctggatgaggtggaattaggagaaggaagagaagagatcatttgctgttgagaacattctgttgggttgtgactttgacactatacatgcaggaagatgttagctggggagacagaggaaagtgtctttcagttatcagttatgtaaaataaactcagaatatatacggctgttatctgtgtcccagatagtaaatgaaccaattgtcattcttcaattgtaacttttttttttttacagtccattaacgggaggtgtgaggcattacaccctaactgactagtcggcctttccaattccactagtaaaaactttagtctgttttgctgatattcaggtctgttgggaagactagctccctagtggctgtgaactgttctccagtggaacaagatctactgatgttgagacaggaaattttccctgaccccttcatgggacttgcaaagagggtggcttgtttactcagcccgtggctctcagcccctctcgggagagggagcacgcaggtgagtgggtgcaggggccaagatgagtacttctgggtgccggcaggagcagaactctgtgtggccccaaggcagcttctagaggagtacccacaacccctggagccccagagggcgtgtgttaccgtgctcctttagtgttgctgtccacagatggctaagtgtttaactccttggtgtgacagcccgctgtatccctagctcttgttcagcatgcaggaagaatcaggtcacacgaacaaattgaagatggtaaatacagggaattttattgctgatgaaagtgactctcagcaggatggagagctagaaaggggatggagtgggaaggtggtcttcccctggggttcagccatcactggccacactcttctctgaggtcccgccatcaagccatccccctgaagtcaagctgcttctcaacgacgtcaggctgctgcttctcttttctccatctctgctactccactgccagtggagcctggagtttttatgggtacaggatgggggggtggtgtgggccagagtggttttgaaaaaggcaacattcgagaaggaaaacaggaatgtgggtccaggcttgagagtggggccctcactggggactgctgccttctacccagtatttccctgcctcctgtccatatcagtgggcaggaagttaacaagtctggggtgtgcactggtgatgttaccatcacacagaagtgatgtgtgcacattcagaccatgccgtcctcagacagcactgcagtgatggtttagcatctggaagtgggacccctgatgggcctccagggcatgtggccagagtgaagctgaaatcccagaggcagtgagaggatgacaaagagaaaatgaagcccttcattactgtgccacgtttatctaggggttagatggggctttaaggagagaatcctgctcagaaacaccagtcactggaggaaactgaaagaagggggaaaatatccccaaactctattttctaagaagtcttctgtctcatgtcctgatgttcaggaatgggaaggtgggtgtcaactctggggatccctgaggtgacaaaaacttagaaccaggctgtcttttcattctgaagctaaaggcaccctcctcgctggagattcggctgggcagatgccagcactctcctgc

SEQ ID NO: 95409 - DNA, 1046 bp, Homo sapiens
gagtttccaggggcttttgggctgggagttgttccttcactggcttggtcaggacgggtccgtatactcaagttctccgtgccgtgggaggctcccaaacaccaaaggctcgtggaaatgaactgagtggacctaagcccagcctaaagcattgggttcacagcgctccagagactcctttccatgggaagagggacgtgggcaaggagctgagaagcagccgtggggatggcttggacatctctgtagaccccgcagccatcaaggcagggtaaccctgatctctctctgtctctagagaggatgtggaggcgaggaactctgctttcctcttctggccactgaaagaagcggacacgcaggattccagagagccaagacgagagaagcccaggaggaaaaagaggcccgccaagcagccactccagcaggcggcgccctcggactcggacggctcctcccacggcatcagctcccatgggtcctgccaggggacacaccccgagcccagggtttgggtgatggggggggaacacaacatcgcttatctcaggaacaccctgaaatccctttcaagaatagtacacctaacatcgtccttcagattctgggcctgtttaggctccagtgcagcaaagaccctaacatccttaagtaatgctgaactctgcttccccagacagcccacctccacttccccgcggccgggcgtctaggactcagcagccacgccatcattgccacacctccacctcgagcagccctgccctgtactctccaagccacccacagcagcaaagggctgaggagcgtccctgagacactttaaggccgtctggtggcagctatgtttaagagaccagcgtccttccaggctgttcagacctcagcgttgacactgaaactggcccctccgcggaggtaaggccgccctccgcgccgcctatgcctgccctgtctgtagcaaagactcctctcccctccatccctgctgcctcccctacccgtttgacgacttggttctggctttttctgactgttcttta

SEQ ID NO: 95410 - DNA, 1017 bp, Homo sapiens
tcaccatagcctgtctgggattggaaagccagggtcctgggtgcagtgtgcatgtctctttctggtctttgcacatacctttgtcatgccctatcaggctgtcaggcccaggcctgccagccagccagcccagctggcctctggtgtttgcccacagccctaacctggagcatgggtgagactgctggccttttaatatgaaacttgttcagtgaggctcacctggcgagggacttaggcacagtaagcagatgtatatggtgggggcagtggggggatcatgctctggtgaggtctattttctggaatagggtcaggaagacagggatgtcctctgatgtccaggaagaagggtggggacctctgaaagaggaaagtgtttacccgctgccagctccggtcctgggatcctcctagagcgctttccctgagacacctggtagttttcctgacctccggttgctgcagcgcccctctttttgcacctcactaggtggtattctgatgtctcctgaaaaccccctgcccctttcctgcccctcccatagccctcacgcaggtggtgtcagctgctgttatggaagctgtctattattaattcaccctagcatattgaacgcccttctttccctctctcatgttgcttgcatctctaaagggtgtattctcaaaccaattaatttgaattttcaagaaggatgacctaagtgtataaactctggaaatgtgaaggaagtatttaggcagatggttgtttctgggaaacagggctctactaggaaacaaggatgcccagttcaagcttctccctggattatggggtgtgtcagttgggatgcttttggttgccaacagtgacatttattatctcagagaactggagtctccatcagcatgtcagcagtttcatcaaggacctcgattctgctcctctgtccagccatcactgccggtttcatcctagggggttagtctcctcatgattctgagatggtcgttgggggcagtgggactgcg

SEQ ID NO: 95411 - DNA, 1006 bp, Homo sapiens
tctcaaaaacctccctgtacttaacttggtttgacaaatttgataacattttatgttttaataggcaaacattttcatggcttaaaaattgtaaaatatagcaggatatgtggtaaagcctgtttcctaccctatcctctagccatccatgtcccctcccttaagacaccaatgccatgtgcttgttgggtttttttctgaagttatgctgtgtatatgccagcaggcctgcatgtgcagacatgagacagttttccacatccctggtgccatgctgcgtgctcgctgtgtgcctcttctgacggtttcactggcccacaaggagttttgtgttccattgtccagctgcatgctggcctgctgccaggctgtgctgcagattcttcaaccagtgctctctggatgcctgttagcttctttccagcctgtgcttcacactaatacgttagttttgtgaaggaagctgcaccccccttgctctgaggtctgggcctaggctctggctggattgagcatcattctagctggaaaaagagggtggggttagacgacgtgtttaagcttctgcccgtttatttcaattatgacctggcctgtagggttttctttgggaaatgggcagttaatggttagatactatttgtaaggcacatgtctctaaaatattaccttctagtggccaggcgtggtggctcacgcctatgatcccagcactttggaaggccaaggtgggcggatcatgaggtcaggacatcgagaccatcctggctaacacagtgaaaccccatctctactaaaaatacaaaaaattagctgggcgtggtggcaggcgcctgtagtcctagctactcaggagtctgagataggagaatcgcttgaacccgggaggcagaggttgcagtgagccgagatcgtgccactgcactttagcctgggcaacagatggagactctgtctcaaaaataaataaataaatagataaaaataaaataaaatattaccttct

SEQ ID NO: 95412 - DNA, 1003 bp, Homo sapiens
gatgggaatagtgaaaaagagggtgacaaaagcagagagtctcaaagaggggacagaactcagtgactgaccagtttggttgatggttggaaagaggtgtcagatacatctgagctcccaagaatggtggtacctggaagggagagaaatcaggaggagccagttctgaagggaatgtggtctcgggtctcagtggataccaggagttcaggggcgggtgactgggtaacttggaaatacaggactgggccttaggagtgtcattagggccaggccaagaggggttttggcatcatctcctggatggccttagtggataaaactgacaaggctgcagagtggagggatatgccaacacccagccctggcttgaacctgtccctgtcccttgatgttgggaagcagagattccctgtcatgtcagatgactcagaggggccctaggatgctgaggcaccaagtgagggctgtcatttacacaccgtctgtcgataacattggtaccaagcagtatagggtcttttatcctggagattctgaacctctgtgatggacccctgaggtcccctctactatgacagtcccattctgaggggaatttggccttaatgcttcctctttggcatagcaaactctgcttcctcttcttctggagagggtgcacagaaatgttttctctagtctgtaactatggagaggtaatttgtttctgggagggagacgaagtagggcacctttaactatttgatctgagtttttgtccttgaatcatgtggaattacacatagggtttatatacccccccaccccccaccccatgcagctgcaagattctatctgccttttcttctccttccatatgggattgacatccctgtaggatccaagtgcttgtggagtgaggaggacactttagaagggcctagggtgatggagctaatgcagaactccttgtaacctcttaaggtgtagtggctggcactgaggttggggctgtgaccat

SEQ ID NO: 95413 - DNA, 1079 bp, Homo sapiens
ttagctttgcgttctgggccttgatgacttaaattgcagattctaattaaatgtccccaaataactatgaagtgcttctaaggtctttttgacctaaaagtttccgtgacctgtgaactctctcaagtgtaaaattagtctgtagatgtacccctttaagcatttctatctccagaaacctcatgatgcctaggatataaaccaccctcctaagggcagagcaggctggtggagtgggcagggaccctgcagggagaggtggaaaggggtaggcatgggtgagtttcggagcttccccagggctggcaggatgttggggtacagatgtgtccctctgttaggtggcctgtctccactgtcataagtgaagggggtgaccgacaccttcactaacaggctgagcagggcagcaaggcaggcaatggaatgctttagacacactgggaaaaggttcaaaagggaagagcctcttcttcaagctgaagtcatgcctggggtgctgccctgcctctggccagcatggggtgcaaatcttcagtgacacaagagtatggctgttagagaaggaggaagacagttccccatgatcacacccccagcatggctgtcatcttgatgcagccgcctgctggctgtcccctctgtacagtacctctttaaatggctgcaaacagagcaaaggtgggctatttctttaaaaacacatgatgcagaactcacgtaagttttttttttaatgctatgttgtcttgtatacactttgtattggggtataaaaatcacctgtgtacagctcagtgaatttcacacagtaaagtctgtgtgtaacccgcacccagatcatttccagagccccggaagccctctcaccctccccagtcagtacccaccccttcaggataccactctccatactctggatgccacagattcgtttggcctgtgcttgaacttcgtatgaatggatttgcctagaatggtcttaacttttccccttgacgttgtttctgagactcatcccattgtttcatctgttctactgttgacgaacatttaggttgtctcaggtatcttgctac

SEQ ID NO: 95414 - DNA, 1055 bp, Homo sapiens
ttaagtagagacggccagttttccagcgcgggtgactatttacgctctaccagtagtatcacttccagttactccacgtcctcatcaacacttggtactgttggtcttttgtcatttttgctattccagtgcttgtgcagaggtatctcatgggttcagtttgcatttccctgatgactaatggggttgaagaacttctcctgtgtctgttggctttattatgatcattttgatagccagataatagtgtgtcttatggatgttccagaacattcttttcttacctatagctgggcatttggattgctttattattataagtaatgctgcaataagcatttttacccagtagtcttttccatgttctatactattggcaagagttttgttatcatttacaaattttgataattaatgccagatggctttctgaatgtttgaactactctaagatggagtaacaatataggagagtcctagacagcttcccccaggtcctccagcaatgtgtattctcattgaagaacaaacaaaactcttttggaggacgaatttaggtgaaggaaagcatatttagcattgcgttacttaatgagtttggtcactttttcaaaatgtttaccatgtgtgttcctcatttataaattcctaccttttgccacttgcattttggtgagttttttgttaatgtgtacaaccattactgtaaaaagcagatattagtactgtaagcactttcctgttttaccagtcacattgcacattgcttcacttgtgtgccttttgacgttaaccagcaaatcttccccttggtgatttttattgtggctcccccaccaggccactgccgtgtctgcagagatgcccagactgaaggtccctgggcacccctagtgggagggataggagcatagcctgtgagagaaactgagtcagccctgggctaagcactctgctcttgcggtcatctgattccccgaccctggtgctttgagagggatggctcatgagctgagccctgccctgtggcctgccaaacagcccctgtggtgctg

SEQ ID NO: 95415 - DNA, 1045 bp, Homo sapiens
tcctgatagcctcctaggggagatgacgaggcaagcaggaggtggctcattgcgattactcacagcctgcagtcctctctgttccgggaggatcacacgttgttttgcccagactcaggtgggctgtggtttgagcctgtgcttgagggcacctgcaggtcgtcagggtaaagcttctccctagcagcctgtcttcttctccccacctccacttagtttcccttgaacattagactaaattcccgtgaaaagctactctggacacactgccacgtggtcagtggtctgcttttcatgtagctgtctgtcctctcctccaacccagttgccctttagacaggcagtgtaaccattgtcctggcctgccctgggcatccatgatacttcccctgcaaatgctgttgtcctgggtagacctcctgggcctctctggggaaaccagttagcccacagcctgatgcatctgtgtcttgctttcagagtgtgtgagctggaggagctgggagagctgtccccttgctgggagagcctccggcgccaaattgtcacccagtaccagaccatcatcctcacataccaggagaacctgaccgacctccatcagtacagaggtgggtgcacccccatgctgtcaccacacacgcgtgcgcacacacacacacacacactctcactctcactcagtcactccctctgctttcccagccagggatctggaacacagggtcacttacacattcccactgacagacactttaatggatttttaaaaataacttcttatgtaggtgtgaattctttcaaatatgggtttttctgatcttaattaaaaagacaaatctgtgaattgcagtgaagagtcctcctatggtgtcatctaccaaaacagccactgtggaatgaaatttaggggaggcgaaatcccgggctattactgcttcatgttgtttcttcatcttggactaatgtcagtataggatgtactaacagaaaggatgtaggccactcgccttgaaacaaagcagtttttcttgatttcccagtt

SEQ ID NO: 95416 - DNA, 2100 bp, Homo sapiens
ggtatgtatttgttgaagggtacacagccacctccttacacagaagtagatctacatacagcacattttatatatgtactctaaatattgggggcctgggaagaatcctttttttttttccactgtttttggagtcagggtcttgctctgtcacccaggctggagtgcactggcaccgtcataactcactacagcctcaaactcctgggctcagttgaccctcctgcctcagcctcctaagtagccagaaccacaagcacaagccaccatgcctagctaatttttaaatttttttaaaaggtggggtctcacgatgttgcccaggctgatcttgaactcccaggctcaagcaatccacccaccttggcctaccaaagtgctaggattataggccaccatgcttggctgaattgattttttaaaatcctattttgagattgtctttttaagatgaaatggtcttagaaggcagctattcatttggaagagtgattgcagattggaaagtagtgtgcacatcatgctgtggaatgactcctgttgtgccccacgagcttgagtgcggtctgctgcatgggcttctggcacatccattgttttttactgtggcgtgtgggcttgtggtggtggtgtttctttccggggtgctttggttttcggtttttgcatgtttgccacataatccagcaagggaaggggtagtggtggtttcttgatgaaccactttgggacttccctgggaaggggccaatggggaagattctcagccctgaccaaggtgactgtcatctccaggggaagtgatggaggatgtggtgagaggtgccctcgctcctcctctctctctcttccccagaattcaaagggtagccctttagggaccagtcaggacccctcatcccatgagcgaagggacacccattctacccagagctcacaatttcaaattttaggaggagacctctgcattggtggcttgtacttcttcctgctttcttcagcttcctcagatggtctgaaaaataaatttataatattggattgattgggatcaggctaagagacatgcaatttatcatcaccgtttagttggacccaacacactggccaggcccccacagcgggaggatgtgaagttggtctttcagagcctcctgattgtgctgggaggggctgggctgtaggcttggcatcagatccctagacacacacgctgcttggtggcgaagaggtgggaaggagggagagccagggttacaaagccactgaggagtccggctttgcctgtggcttggcatgttctccactttttcttcatttgatgaaacgttatttttcaaagtagggaagtcctggagcgaaggaaagggaaaggaaaccccattttctagggacttgctggggtcagacatgagaggaaggacgactgtgggtatgttcacagggagcttgaatgcctgattggccaaaagaaaaaataggttttggttgtttggggacaaagtctaacacccactgcagtctctgctacactgtgataacctgaccccttcttctgtaaatggcctctatgtctccacttaagtactgcttataagttaatagatgaggttgtgaggtggaagattacgatcatttgggtgattatgggatatgattgttcaatacctgttcatacatttacatacacaagtaaaaatacagatacatgcaaatacagataaaagactgagtcatagtttaatatttcaagctcctgccatatagacaggaagaatctcctaagatatactttgctcatcaacaactagagtagcttgagagaacatccctgagtcacagaacacttcatcttagggtcaattgtggctggggttggaatgatgctgtcatccttttcagattctggagaatcccttagaatccattcttatcctttccagtacatcatctggctgccagtccataatctacataccccaggatgttgtcagagccaaggagatcatcgcccagatcaacaccctgaaaacccaagtgagttactacgcagagcggctgtcaagggcagccaaggacaggtctgccactggccttgag

SEQ ID NO: 95417 - DNA, 1167 bp, Homo sapiens
tccatgggctgaacgctgcacggcctgactacattgcctccaaggcctctcccacttcgactgaggaggagcaggtgatgcttagaaatgaccaggacaccctcatggcccggtggacagggagaaacagccgatcttccctgcaggtggactggcacgaggaggagtgggtgagtctgctgctgtggctgtcatcccactgctgaacttgggctgaaaaccacaaaacctgttgccagtctctgcccctctgaagtgcctcaaggttcaactgctgtgaacaagctccaggtttccttcctggatggctccttggctcctgatgcagggagggaggagactgttttcaaacccttgtgtccagataggggtagggctgtgctgggggctgggccagcctcagacctggatgaagaggaagacaagtgggttttcctcccgtgttggaggtctctccttcccctgcctcctgtgccttctatggccttgggatgcttgagaccagtcagtgctctgtttgctgttagattttccagggctatgtgtatttggggacgtgggagctctggtgctggggcaagtagatatggattttggagctgccgccctgacattacatcacattattgttcctcagagaattggccctgggagcaggatctgtgtttcttgagggagtgacacattgtacaacttgtttttaccatttattgagactactgcttagaggcattgttctacaagcactgaactattaatcagcagcaaagtcccatcctatacactgtgcgtgtttctgcaaatcactcccagaccttcctctcctcctccccacctcccctatcgaaatttctgttcccttctatcaaaaggaggcctccattttgtctgtgtgtgatgattgtaggaagtctgcagtggcaagaggaggagatgagacagtgccctgtggcctttcaggcagcactggagggccacctggcctccagaagagttactagcaaacatctcccaaactctaaaaacaatggccgcaggacatcgattcatcgttgaaaagcaaatgcaactttagtggggaattaggaatcatctttatatttctaaactttgaggtattttaacaagtgtggaagcctagggcaggggatcagtggagggcgattt

SEQ ID NO: 95418 - DNA, 1032 bp, Homo sapiens
ggtcaagagaagggagatcacagagaacctttctgggtgtccttcctctccgggtggaggtgctacagggctgtggaaggagatgggcctctggggacagagcattttctggcctcgtcatgacttgcagaagcttctttgttgttttcctccgaaggcattgtcttgagtatttctgtttagggtccccaacaggttcaggagaccaggcatgtcttggaggtaccggagtagaactggtgtttgaggttgctggaaagagctggggctagagggctagagggctagagactgggttggttccagacagagctggaagatgaggtggagatgggggagtgggaggactgcagtggttaggggccaggtgacttgttaaattgccagaacctaattcttaaaatctctctctcattgtgatgaccccttcgcttgtgccccaggtgaatggagtgaggccctttacccgctgctgaccactctcaccgactgcgtggccatgatgagtgacaaggccaagaaggccatggtattcctgctcatgcaggacagcgcgcccaccatagccacctacctgagcctgcagtaccgccgtgacgtggtcttctgccagacggtaggccccgggagcaccccgagggagaccacgggcacctctcagctcagaaaagacaggcttaggaagcccttccctctcacttcacttgtaaaagaccccagatggccatatttcctcctggtggtgctttaaaggttatttaatagagaggtctacatttcaacacagtcaggagaactaccttggcagcccatgcttgcttctcccaaggaactggcacctgcagagtctgccgattctgcacccaggagatagtgagggcatgcatgggtggcacaggcttctttgctgcgtttttttttttttttttttttactgcacagaggttgagtgagggcaacacaggtatttgctgtcagtgcaaacattgctcgtataacagtaggtgccttagctctgcagcttgttgcagg

SEQ ID NO: 95419 - DNA, 1035 bp, Homo sapiens
ctgtagcaccaaaagggggaagaagccccaaatttctagtgtggtattgtttggattccacccttggggatgctttcagaaccctaacttgcaaagatggaaacagcagtcgctcatgcctgccactgctgagcctggaacccgaggcggggctggtgggggctctgcgcttggttggttggtacctgaggtaaatggtttttgtttgcgtggttgatcaagaggcagctttggccaaatcctttgtaccaccccctgctcaggcatctgtgagaaggtcaaatccccaatggttcttcatgttccgcttgcttctcagaaatccctgtctgtgcagcatgtgggggcatggccgggcagcatggagttgtgcttggccagccgagagagtgaacatggaaaaccattcgttcaacctacatgtgtttattttcagtagattgcagtattttttcttattttcacttctctttctctccttttttcctgtaactgtgctggttttgttttggtcttcctctcatacccgtttctgcatttcatcttttctttctattgtgacttcatttcatttttttttaaccttatcttttgtttctcttgtttatcccatcctttttgataaaatccatcgcatgtgtcttctttttttctttattttctttcctttcctttttcctttttctttctcccaaactttttccttttcacagcattggaacacgggaggtagtcacccagaagaacttgagcggcctggtgcccatccgagacttaaggctagaccccagcctcctctgttccatccctttattagctctgagccccaatttactgattgtgtggctctttctgagcatagcatacctggtgaccaaattgcgttgcaaatgaatatcattatgaaaaattaataagtcacaagaaaaacaaaagtgccagaacatgtccagccaccgtgtacctaactggacagaaggaatgtgtcaaaccgtggtctgccaagaaatatttcatgccttacattttgacgtt

SEQ ID NO: 95420 - DNA, 1040 bp, Homo sapiens
aatggagaagccatatctgaagtagttcattaatgtaagagtttccaaagattaaaggagattaactgtgtataggaacctatagcttctgctttaagtggaagtacgtttttgattactgaatgaatgttaggcaaacacgattgttacttactccagggggcctcctgtggcctaggtgttcagctcagatgacacacatctagctgaggccttgaggctccgtgacaagaaagcatatccaagttaccaaattagttacaacaaccaggtggatacttttctaaactatcggagcttagcttttgaataaaaaatactgtcttaccaaaagtattttacatgttcttgataatgagactgtcattttcactttaaaaggcttgagcaattgccactgatgttttttttttttaaatgcgtgacataatggtcttcatacaatttgaattttttaaaaaatcactgtttcttggtaactgcaaattttacatctcataaggggaattttgtactaaatttgataactagttgatttcactgctagtcttagaacagcataaaaccatcaagttatactgtgctgtgggaagtcatttatgtttaaaatcacttttgctggttagttttatgtctacacctgaacatttcccagagaactccccggacgcgctcactgagtaggtgaggccccctggctgctcatcctcccatgcagtgtttgcttttgccccctggattgccatggcaaccctccatcagatgcagctgaggatgacgctggtagtgagttctctagggaagggcacctgtgggctctcactggctcagtggcacctgtgcaagagggaacacatgggggcagcccacctgtggaagggtggctggctgctaccagaacttggtgagatccctccctcataacattccagccctgattgccaggctgctctgcagacagtgcatgaacccattggattacctggcacccagaacaactgtcctccaggagacagcagaccagaacgccttcctagcca

SEQ ID NO: 95421 - DNA, 1039 bp, Homo sapiens
ttctctgaagctccctgccgaggctccctcacgcccagaggacacatctccccttcttctctagatgttaatgtagggcctcagatgtggcatgtcaacactcccatggggaatttatgaccatagagatagtagaaacctaaatattttcagaaaaaaaattttttttgcaggatttccaatttatctttgaaaagacagtacaatcatgtttgaatgtctgatgaaagtgtcttatttttaggtttgcaataattgttactttcttattctcattcttatgtaagatgactattgagaaacagttgaaatttattctcctcaaatgagattttgaaagggatttatgggccataaaacttaggaatttcatagaaaattttgtctggtcatcttttataagatgatgatgagtcttatctgcacatagcagagtttgtttcttaggagtttatatgttttattgattctgtttacgatgtttacatgttcttgaaaaggttgtaaaagaaatacatatggcacatattaatgatgctgatcctaatgatttgtgaacctcttagaaattcttttgtctaaaagcctagagattcttctggttcctttagaaacatgtaacaaacttgggccaggggtgctgaggcatggggaggactgcttattggcaggaacacagagggggtgggcatcaggtagggtggaactggatgaccttccagaccccctcctactcagaagtcagcatgcaagcagcgcctgctgtctcccgatgcctgcagggaggaaaatgtctgtgaaggacactttaatgaaggacgaagctctctgctgctccctcaaagctgagttcactgtggcaggcaggaagcagagaagctcctgcccgccaaacccactgcacaggtggctgctgctggtatcagattctcctttttaagtgtcaatttctgttcacagacagtttgttttcaatatggctgatttaccctttcacctctccaccatctcatttaatttgtaaatttttagttctgtc

SEQ ID NO: 95422 - DNA, 1093 bp, Homo sapiens
atgattagtggtgaacataatttcatgtacttgttggccatttgtatatctctttggagagatgtctcaagtcattttgaatgagttaaatcattcaaatgggttaaatcccttaaaatggttaaggtggtagatgggtattaaaaaaataggttgtttgctcttttattgttgaagttccttgtatattctagatgttaacctcttatcagatgcatgatttgcaaatattttctcccattctgtaggctgcctttttttttttttttaaatgcacaggggttttgcattttggtgtagtctagtttgtttttacttttgttgcctgtgcttttggtgtcatacccaagtcaccgctgactccaatgaagtttctcctgtgttttcttctaggagttagagttttagcttttaaattatgtctttgatctattttgagttaacttttgtatatggtgtgagtgtccagcttttttgcctaaggatagctggttttcccaacaccatttgttgaaaagatgttctttccccattgaatggtcttggcatcctgtggaaaatcatttgaccatatatgccagggtttatttctgggcatgctattctattctgcacttctgtctgtacatatttatgccagtgccacattattttgattactgtagctctgtaataataagctttgaaatcaggaagtatgcgacctccagctttgttctttttcaagattgttttggctacctggggttccttgagattcgatgtaaatcttaggatggatttttctatttccacacacaaaaaaatcagttgggaatttgatggggggggggtacattgaatctgtagctcacttttgatagtactgtcatcttaacaatattaggtctttcaatccatgtgcgcaagatgtctttccattttttggcattcttaatttctttgcagcaaaattttgtagttttcaatatacaagacttttgcctctttggttgtttattcctgagtattttctttatgatgctactgtacatagaactgtttccttaatttcctttggagattgttcaacaatggtgggttgttttttttt

SEQ ID NO: 95423 - DNA, 2608 bp, Homo sapiens
gcccgctctacataatgggccagtgtcagctccaagtccacatccttattatccatgattcaaaagggagagagagaacttcctttttcagggtccacaaatcaaatctataaaaggactctggtcttcccaggatcacctgcccttgcattggaccagtccctgtggaagaggggatgggggcctgtgatcttggccaggcctgggctatctatctgcactgtcattgctaactcctgtcagaatcacatggatgagtagtgggctgaatcccaaaaggaaaggggtttagagcaagtggaaacaacagatgttcactatagaaagcaagaatgaaaaccatgaagtggttgaagattagccttacagtaattttattctgatcacttaatacagtagagtcaaacaggaatccaagtttccaactttattatttttggcactgaagaattacaaagaactctagcgtctttatacctccgtggttcactggagttaaagcaatcggggcgttgtacagctcacttgagtttttaaaggttctactaaaaagtgagaattccacagcaatatgggtcattgttgcagaatatcacaaaggtctgttgtgtatactccttttcaccaggaaagggacaataatagtttttttcaatgtatatatatataagtgatctaactttttattaataaaagtaaacaactctaaaatgtatattataaagccctgtcatctttgttgagtaatagctttattgagctttatttggagaaatacacataccgtaaaattcacactgaaacttaccaattcagtgttttttattatatctacagagttgtgcaaccatcaccactaattccagaacatttgcatcactacaaagagcaacctgtacccattagcagtcacttcccttctccctcagcctctaaaaaccactaagacactttttatataacatgtagccttttgtgactggcttctttcacttttaccataatgttttcaaggctcatccacatgtagaatctatctgtacttcattaccttttgtgaataatattccatagtatagatgcaccacatttttttatccattcatcagttggcagactggtttgtttacacatttgggctattatgactaatgctatgaacaatagtgaacaaattttgcatggacatatgcttctgtaagagtggaattacagggtcatataattccaaccttttttttttttttttttttttgagacagggtctctgctgttgcccagagtgcagtggcatgattacagctcactgcagcctcacccaggctcctcctaactcagcctcctgagtagctgggaccacagtcacgtgacaccatgcccagctaattttttttgtatttttgtggagacagggtctccccatgttgcccaggctggcctcaaactcttgggctcaggtgatcctcccacctcggcctcccaaagtgctgggattacaggcgtgggccactgttcctggcccaactttaacattttgatgaactgccaaaattttccacagtagctgtaccattttacatttccaccaacaatctttgagggttccagtttctccacatcaccagcagttataattcatgtttgattacagccattctactgggtatgaagtggtatctacttgagattttgactttcatttctctaacgactaatgatgtctgagcatgttttcatgtgcttattggccatttgtatgtctttagagaaatgtctattcaagtccttagtccagttttcagttcggttctttttattgttgtaacagttttttgtatgttgtagatacaagtcacctaaagataagtgattcacagattctcccaatttgtggtttgtctcttcactttcttgatggtatcctttgaagtataatttctaattttggtgaattacaatttatttttttcttttggtgtatctaagaaaccattgcctaatctaagcttaatggaaatttattgttttatcttcatttaagagttttacatttttacctcttacatgtgagtctgattcattttaaaaataatttttcaggcttttatttgcaatatatttttaaaattttaaatgtaagatacatataaaatttactatcttaaccatttttaagtgtacagttcaacagtgttgagtgcactcacaattatgcaaccaatctccagaactccccttcacccccaccacccctccaactctccaccttgacagtcaccattctactttatgtctacagtaagtgcctcgtgtggaatcataccacatttgtctttgactggcatatttcacttagcatatgttctcaaggttcatccatgttgtagtatgtatcaaaatttccttccttttttaaggccaaataatattcagttgtatgtatatagcacattttgtttacctatctgtcagtggacacttgggttgcttgtgcctttgggtaactgtgaataatgctgctgtgaatatgggtatacagatacctctgtgaccctgctttcagttcttgtgggtatatacccataagtggaattgctggagcacacag

SEQ ID NO: 95424 - DNA, 1319 bp, Homo sapiens
tgagggaaaatccctgattatgcagagcagatgagctttgggttatattttttctggtgcatgaatgggccacatgtttctatttaagtagtattccagcctgccttgttaatatctttgtgaagtgtttcgtgccaacactaaaaatattctgattttagggtacccagttcacacatttcacccataaggaaatgaagataaccctttctagatttttatataaacagtttaaggaaaagtatccaatagaaaccagtgttttcaagaattcaacagtgtccttaaagttcccaagttactttacaatttttttttcattctttaggcaccaatagcccaaatgaattaagaactatttcctacataactttctattttcctcctttaacacttttaaaaaggactattttcagaaggacaattattttgtactttgtgagaaaatttccaaggtgtttatattgttttatgtgtctgtcataggaaggaaaatcacctcggcagtgtttgaaggaaggatactgcaactctttgaagtacgcattttttgagtgtaaaagatcagtggtaagtggttaaagatttttaaaagcctatgctaaaaattagctatagggaggttaaatatatgaatgacttaatagttataggtaagttgcagtgatatggtttggaaaaaattacatagataatatttcttcctccagtgagttaacgttaggtagcgttcataaaaacccacagctcattgttatgttcttctgtcaccgtgctaactacagctgctgaacttcatgcatttctgaaagtgtgagaatgaagtctcggcaggtatatacgggtaaaagttgatgttggccactcgagttcagatcagttggcaattgtatacaaacatataatgtggagctccaaggtgtatacatttgtgccttatgtgactaagagaaaatgtcagtatctgtgtttgaattttggagggatggattgtagaaatagggcctaaaaagagattacaaatctctggggttcattctaacattctttgatttggaagatgtatggagatctttggaatggaaactgagacccttttcttggagaaatgtataaaaccaaaaatatgagcatcccattaaaggaagaaagcacttggacttgaggatgttttttttttgttttttgttttttgtttgagacggagtctcactttgtcaccaggctggagtgcagtggcgcaatctcagatcactgcaacctctgcctcctgggttcaagagattctcctgcctcagcctcctgagtagctgggatta

SEQ ID NO: 95425 - DNA, 1080 bp, Homo sapiens
aactgggcgtcctttcattttagccgcaactctatcgccggccgaggggccggacgccgacatggtcactgccaggccgcagcgacgtcaggccgcaagctgtcgggattaaatggcccccggcgcgagcccgggccgcgggagggcagagtggtcctcaggcctcacctggagtcctgctacagcctcgacccacgtccgaaccagcccaccacctcctcccagcagccgaccccagccgccaccgggcgggcttcccttccctcaacggagccggcccttggggcgcgccgcgtcacgggaaccgacttccgccgcggacgcgccacctctcggcccccgtagtcctcggccctaccgccgcggcccgccggaagttgttgccgctggcttccggtcccctgagactggggcctcgctcgctcccgacccggttgcaagtgttgcggtgggagaaagtcgcgtccgcatcggaggggaagcgccgtcatgcctaagtattatgaggacaagccgcagggcggcgcgtgcgcgggcctgaaggaggacctgggcgcgtgtctgctgcagtcggactgtgtggtccaggtagcgcggccgggcgctcccggtggtgacgacccctgtcccaggcaggcctggctcggcggagggcagcgggtcgcccgcggcggcggttggagttaaccatcccgggcgtaggtcacagctcgggctcactgaacgtgcgcagatccactgagctgtcggagccccagttccctgtggggttaaatcggagataacgataaacgcaccctgtcgggtttttgtaaaggttaacccatttcagttcacgaagcctttattgaatgctagcactctactaggctttggagacataaaggagaataagccaggtttcttgcctgcctagaaatgataatctgtagaattaatgattccagagagttgcgtaaacctggtacactgccctggccagtagtgtctcctgcctgttcagttgtgacaatgtgtgctcagtttgacttgtgttgatgtgaatttgtttctgagttacagttctctgcattcttggat

SEQ ID NO: 95426 - DNA, 1037 bp, Homo sapiens
tacgcccgggatggttaactccaaccgccgccgcgggcgacccgctgccctccgccgagccaggcctgcctgggacaggggtcgtcaccaccgggagcgcccggccgcgctacctggaccacacagtccgactgcagcagacacgcgcccaggtcctccttcaggcccgcgcacgcgccgccctgcggcttgtcctcataatacttaggcatgacggcgcttcccctccgatgcggacgcgactttctcccaccgcaacacttgcaaccgggtcgggagcgagcgaggccccagtctcaggggaccggaagccagcggcaacaacttccggcgggccgcggcggtagggccgaggactacgggggccgagaggtggcgcgtccgcggcggaagtcggttcccgtgacgcggcgcgccccaagggccggctccgttgagggaagggaagcccgcccggtggcggctggggtcggctgctgggaggaggtggtgggctggttcggacgtgggtcgaggctgtagcaggactccaggtgaggcctgaggaccactctgccctcccgcggcccgggctcgcgccgggggccatttaatcccgacagcttgcggcctgacgtcgctgcggcctggcagtgaccatgtcggcgtccggcccctcggccggcgatagagttgcggctaaaatgaaaggacgcccagttacatttgcatcgtagataaagaaagagcatttagtataagcatgtccgaaatgttgcgtgggatgtaggcatactaaaaccttattcgtggcctgtctgaaatccaaatggagctgggtattctgtgtttttatttgctaaatctggcagccgtacccgcggccccgggcagggagggagcagctgggctcggccagaccctgccggcgtctggggggcctgcgaagtggaggggagacgggcagccgggcagtggccggcgttccccggagctcggaccggttggattggactccgacgctaccgctccctctgctgaactattccggatgtaaa

SEQ ID NO: 95427 - DNA, 3024 bp, Homo sapiens
tgctttcttaggcattttcttaaaagcttggtggttaagagcacggaatttcgagtcagatttccaatcttggctctatcactatcctcggagtcatggggcagtcacatcatccctgtctctgtaatggtagctgcccctggataagtgttattaggtgattcagaagggtgggctgttgcccttgcctgaggttgcagtctgcggttcccaagccccaagacccgcctcagaactaactgcatttgcttttgactcctggcctttctctagggttgggaagaacatggaaagtgacctccctgccaaataactcagaagaggagtgtcggtagccaaatgtttcttcagaatacgtgtaaaagaaatgtttttcttccatctaggaagatgttaccgagtacttcagtgaattccttagtgcaggggaacggagtcttgaattccagggatgcggcaagacacacagccggagcgaaacgctacaaatatctgagaaggcttttccgctttcggcaaatggactttgaatttgctgcctggcagatgctctacctgttcacatccccacagagagtttacagaaattttcattatcgaaaacagacgaaggaccagtgggccagagatgaccctgctttcttggtcctgttaagtatctggctctgtggtaagtgtgtttatctgagatagaattgaacgctgagtgtttctgattagattttttgttataaatgtgttgtgggtcagaatctggaaatattggaaactatttctcctttttactgaagcctcaaaaaatctcacaggaaagaaagttgtagtcttggttctacaggtcccaagcagatgccagagtaaactgttaccctaggacattgaaaagcaggggacaagattcactccatatctttttaagtacttgaatcggtacccaaatgtcagctgactgtgaataggaatatgaaactggaaattgcatttcacaggcaaatccacagtgagaattgtaaaggtattgatgggaacctgagaaactgaagttctccaattccataatgcaagggtctcatttacctgtagggtgttgaagtgggtaagatattgaagtttatagggtgttttgcaccttaactggacttaaactatgttagtgccttctctacactggcgttctaaatactgaggccaccgtggtgaatcagcctggcaagggcccacctcaggaaacttcaactctctcagtggccacgctgtgtcccaaggtagtgttcacacatcttgggagttttgtttaaagacctgtctctcccactagcctgggcatctggagggcaagggatgtgtcctgtatttccagaacctagcagagtccctaaatgaatcttgtgaatctttctttcagtgtccactataggatttggctttgtgctggacatgggattctttgagacaataaagcttctcctttgggttgtactcatagattgtgtaggcgttggtcttctgatagcaactttaatgtggtaagtaccataactttggtttttcagatactgctgtagcatctccatttgtttgcttcagaggtacaatagcagcagatggaaattgaaacccaggtagagttactaaatgatcaattttgactgccaagattattacaattttccctcctgtgttgccacctatatcagaaaatactataaaggctggtttataatattgtcaaatgtagcaaataattgaaataattatgttttgaacccaaaatatctgagatcggtctcaatttagaaagtttagtttgccaaagttaaggacatgcctgtgacacagccttaggaggtcctgatgacatgtgcccaaggtggtcggggcacagcttgctcttatacattttagggagacttgagacatcagtcaatatgtgtaaaatgtacattgttttaatccagaaagtggggaaaggcaggttacagttagataagagacaaatggttgcattcttttgagtctttgatctgcctttcactgaatacacaatttacttgtgagaggcaggtacaggaatagtcatttatgccttaatctggctcagtgagtctgcatttttacataaacaatggggcagaggaagcaatcagataaacacttgtctcaggtgagtagaaggaggactttctgtcccacacctgtaaagataagctatcttaggaataaaataggaggcaagtttgcctgacacagttaccagcttgacttttccctttggcttagtgattttggggtcccgagatttattttctgcatactaacaaaatgcctggttttgcaaaaatattacagatttagccagttctgcttaagttgtctggatgatagcatggttttctgcatttgtcaatagagaccacttcttgatattcattgtgtttaaatccatttagatctaaagggttattttgtggagtcttactttgaatctttgcattaaatgaagtatacttgaaaaagaaggattttttttttaaacttctcatgccttcctactgagaataaaattctctctctttctctcatacacacacaccctccgccccccccgcccccccaccgccacacacacacacgggctttatcagaagggttctcagtctgactttggttgatttagcaacagcagtgtactgaggataaatctggtgtttggtaaagtcctcctgtgtggttggcatgctggatgaagggcaggggatgtggctagcgatctcagtagaggaccagtggttgggtagacatggtggtcattgtggagaacattttagttgcagagagacctgggttcaaatgccaacttagttatctgtgaaactcttagtcccagtctcttcttttacaaaatctagttaattacctattctgtccaatttttgagataattatgttatgaaaattacctgacacagttaagtgttcaatatttggtagttactaatattttaagcaaaactctgcaactat

SEQ ID NO: 95428 - DNA, 1889 bp, Homo sapiens
cattgaatttccaatatatgtttataatacaagttttgttctttgaagatcttacttttctgttacttggatattttactttttattcatcattgaactgaaaaactagtaggccatgttgtagaacagtgacatacacttgaataattgttcttatggctggatgcgtcactcttcctaactgcttcttactatttcatcctccttttaatagggggttgacccaggtcttgggccttgggcctgttcattatccacattcatttttttggtgacatcattcaggcccgtggctttaaatattaatatcatctacacactgatgagtttatatttccagtttggacttgtcttctaaactctagacattgtatacaacttcttactccatactagttggcatcttcaacataacaggtccaaattcaaacttccgcacactccttcccacctcaaaaccactcttcccacagccagccccacctcaattaaaggcagctccatcttccatttgttcaaggcagaaatctctcagtcatccttgagtatttttttctcatactccaatccaataatgtcaggagctctaccttcagagtatcgtgtgtgccacatcttagcacctccactgccaccagcccctctgctcatctcttccttgcagtagccttctaactggtctctgctgccagtcttgtctctggagtctgttctcagatccgccaccagggaggctctgtcaaggcatttaagtcaaatacttttctcagaactccacagtggcttctcacgtcaccaggaataaaagccaaagattgtaaaacggccacaggcttcgtaagacatggagcctgtgtgacttgatgttgggcccaaccctgtttcttttctggcttcatttcttgctccttttctttcagacactggtcttttcaccattcctcaggcctgccaggcaccatcactatccttgggtctttacccaaatgttactttatgaccctcatatgtacaattgcatctcaagtttgtattctccacatttctctgctgctttctctctttccataataccatctgacataggtgtatcattgtcagccttccttcctagatggaaggcagggatttttgtctgttttgtttactggtatatctccagaatttagaatgtctgccgcatagaaagtcgtcagtaaacatttacagaattcattttattatgaaagaaattttaattttgctcttaggttcatctctaacaagtatttagtgaaacgacagagcagagactatgatgtggaatggggctatgcttttgatgtgcatctcaatgctttttatccactcctggtcattttgcattttatccagctttttttcatcaaccgtaagtagcagttaattagagtattatccaagtcttcattgcatgcattggtaaagggactcatggtctgcgtctcttctggcagatgttatcctgacagacacatttattggatatttagttggaaataccttatggttggttgcagttggctattatatctatgtaactttcctgggatacagtggtaagtaatttttttaaatgtttttggttgagaacatagcaagagggggaaagttgtaacagtagtacaaacagctgcttttatggaacacttacaggcactatcctaagtattttatgtgcattatctcatttaatcttcatgacaattacacaggtttgtttctgttttcaaatgaggaaactgaggcagagagattaagcaacttacccatggtcatgcagctagaaaatggcctagctggtatataacagattttatactttcaaggaaacatgttaaaccatactggttatctccagatgacttgca

SEQ ID NO: 95429 - DNA, 1905 bp, Homo sapiens
attcttagttttcatgattaccgtatggttctgtagacaatcacagaagatcgggcccaacatttattgtcctcaggacatgtttgcagatttactgttaaatcctgttgtcagttcatttttcttaatatgaatgaggaacatatattatttttcatttatgttaagaaatgatcccattaaataaagccaaataaaatctagagactgcgctgtacgtttcttaccccttcctttcctgttactgtagatgattagggcctaactgtaaatacagatggctctgactatgcctggctccggagttattcccaccccggttctctccccccttggctggtttgtcagggaacacttaaccccttcattgtaatgccttgtttggggagtgctttctctagtccaggggagatgtttgtgtcatttctaatgaattttgaaagtgttttgtgatgagaacactgcagcactgtggtttctctaagtggttatttgaacactcctggtaacgacctataccacttagaatagttggagtacagctcagtttgtttaagaacttcctatatgagaaatacttaggtcgggatgcatggggtagggtcccgctaactaagcagtgagcaagaaacatcaatatttggagccagacttttatatttaagagtttcagttcttttctgaagcctgggctactagttgagctcacaccctcttaaagtgggggtataatgctttacactggaaaatctcaaatagctaaaagatgttttcctataacgccatccatctctgtactttaagttggactcctagaggtttctgaggcagtcacaagtttaaattcaccactgttttcatgaatatttgtgacatttctccctcattgttaacctctcttggtccagtgtatgatgtcccactcagcctctgtgctgaaataattcctctcctaggtttcttcccagccctagacaaggaggaaacagcacagaggggttgggaagagtagtctagttctgggcataaatagcatcatcttactgattcaaaatatgcattcccttccaccccacatgttgaagtaagctgtctttcaaaatgttcatttattagtcatttatttttttttttttttaaatcagtttggattcctttcttttccagcattgccatttttgaaaaatacagtaattcttctgtatccatttgcacctctgattctgctctacgggctttccctggcactgggatggaacttcacccatactctctgttctttctataagtacagagtgaaataaaaagtgagaagaagattcaatcgtaactgtgtcaacagtattgtgaagtgatcatttcttgtaaaacttgtaaataaactatcatctttgtagatatcttaaaggtgtaaagtttgcaaatttgaagaaatatatattaacactgtggtcaggtacattccttaaaactaattaaatgtacatttctataataaatattttttaaactaaagcatgtgtgttcactctaatatttgcaaatgtaagagctacatgtaaaatgctaatggcatggggaaaacataaacataaaacaatatgaattatttttgaaagagtatcatctagttggagaacaagggaataatcatacagccccatcgctctcctattgacaaagatgcataatctccatttctaattagctgtattttaaatacttacttacataagccacaagatcccttctaaccttcggaatcctctataaacctgtagtgtcagtcaaacgggagtcactgtacttcaggccctaagcatcattagcagcattttctacattaaaaacttacttatagcccctaaatattttagatcaaagaggcccaggtagctactctta

SEQ ID NO: 95430 - DNA, 3129 bp, Homo sapiens
tgaagtttttaaatatgcacttcttcatgaaaaatataaaagctgaatgaaagtagaaagaagggggaaagaaattacctgtgccctgtcaaaagacatctactagaaatattttggtgtattcctttcctgccttaactcagtgatattttatgtttgcttatctcggtgtatccaacaagtattgatttttattttgaaggaaaatttgagaatggtgttgcagaaggaatggtggatccaagtctcaatcccatttcagcctttcgactttcagttattcagaattctgctgtttgggccattcttaatgaggtaagcatatatcaaatcagtgaaacaacttagaaactacatttttattatgtttttattttgtatttaaggcctttttggaattgagaattaacagctttatcataccttttatgattttgtatttcagattcatattaaaaaagccaccaactgatcatctgagaaaccaacacattttttcctgtgaatttgttaattaaagatagttaagcatgtatcttttttttatttctacttgaacactacctcttgtgaagtctactgtagataagacgattgtcatttccacttggaaagtgaatctcccataataattgtatttgtttgaaactaagctgtcctcagattttaacttgactcaaacatttttcaattatgacagcctgttaatatgacttgtactattttggtattatactaatacataagagttgtacatattgttacattctttaaatttgagaaaaactaatgttacatacattttatgaagggggtacttttgaggttcacttattttactattatagaccctcttttatagattatcagggattatatatataaatatataaatatacataaaaatgttatggaattaatttattagaaacacttaagaagtacatatttttgtgcagtagatttttgaatcgatactttttttgaaaaccagtttccttgcttttttaagttctttctatatttttctttggaaatgcaaacattacaaaccaatgccatttttcaaatgcactgccatttaagattgattatagatggatttcttaattgaagtacttttataatcacagtgactgaacaaaatattttcaaagacatttgtcattccttaaagccaagattttaaagactaatgtccttcctgagggttactttactatactgtgtatggtgtatagccacagaaagtcagtctgataaattttcaatgtgtaagtgtgatgcattcaacccagattattgtagacttaacttattatatttcctctgatatgtaaaatgacaaactcttctttcctttttaatctttgtctttaatccatgaattaggtgcattatctgctgttgattcttttatatctgcactcattttatgacgtcagacaaaatgttttctaggtgttgctattgtatgagtcataattggtataattttaaagaaaattgtaatattgttttttggtgaaatatattattagtagtatattttccaaaatgattttattgtagtatgaactgataagtgagtcccgtgtccaagagactgtatttattactcttaaacacgctattccaaatgatattactactataaacaaagaatattaccggtctcagcaatcagtgatctttataaaagtacttttaaaaaatgatgaattatcaccaggcgctgtggctcacgcctgtaatcccagcactttgggaggccgaggcgggcggatcacgaggtcaggagatcaagaccatcctggctaacacggtgaaaccctgtctctactaaaaatacaaaaaattagccaggcgtggtggcaggtgcctgtaatcccagctacttgggaggctgaggcaggagaatggcgtgaacccaggaggcagagctggcagtgagctgagatcgcaccactgcactccagcctgggcgacacagctagactccgtctcaaaaaaaaaaaaagatgaagtatcaacatcagttcccagccagtctgcttggacacactggggtgccacaagtgggttgcaggttggttgcagacgggcagagatggattctgctgagctttcagagtgaccactggctggggcctagcgctggggcaaggttccagctggctgcctctagcctggaggagcttcatctagttacccaatgtgctgaaccaacagcatgaaatagcatcatttcctgtgctgtgttacaaagtgcaaacgtttggaaacactgatacagtacaattatttccatcactccatgttgttataatttttagttacttttcttgattgaaaagtcaatcacattgccaaaaatgatttttatgtcagttaaaggccagttgaaatttttttattaggatgttttaaatttacttttcactttcttgaatttttttcttctcaaatttccttggcccagtgcccatgagcaaatttcattcaaaaacaggaataaccttttgtcataaaattttggcaccagcttggtatactaaattactgcaaagataactgagtaccagaagtaaaaatctctgcaggtgggcttaggagtactcttgggtccctggttcctcagttgccaactctggtttcatgaagaaagaccatgctctgaaaatctagggaggagaaagttattgcagcacctggtgtgatttgttacaacttctttaaagacagcctgcctggctagctttttcctgttttcatgcagtttgccctcccagcattggtccacctgttgttcccaagaaactcattcttgttcccaagactccttttagccaaatctttcctatcattccaggacttttttgtgcttctctccccatgaatctacccgtgcctagggtgtgtgccaggcacgtggcaggtggccagtcagcatctggatgtgagaccaattattccagcctgccctcctctttctctttttatcattttgtattatttttgagacagggtctcgctttgttgcccaggctggagtgcagtggtgctctcatagctcactgcagcctcgatctctggcctcaagcaatcctcctgcctcagcctcccaaa

SEQ ID NO: 95431 - DNA, 1053 bp, Homo sapiens
atgtttctttacggttaagttgaggttatgcattgttggcaagaacaaccacagaactgatgttgtgctcttctcggcatgtcacatgcttgaagtcgagagataagacattagtttttaagatatgtttagtgtttttaagttttagttgtaaaatacagtttgctgtttatacttcgcagccattcattttttagtgtgaagtttaatgtctttcatttttatcagttctttttttcttatggttaagccatgtgaaaatgaattacagtattacaggtatgcccttgtattctttatttttcttcctgaaacttaatatattttgatccatcagttattcctatcaatttgagagggtataatacttttgaaatagaagtgtttttctgtattgtccttgtacagttttttaatataattactatttttttttccagtttcaatagtcatgggcattcccacagtgaagagagaagttaaatcttacctcatagaaactcttcattcccttattgataacctgtatcctgaagagaagttggactgtgttatagtagtcttcataggagaggtaattatttaattgttgttatgtttttaccaaatatagcctataagagttgaaactctaattgaatatttgaatatgcttttaaaaacgctttttaaaaaatgtgatgagtaaagcttaggtaatatattctatctggtagtttaatgtaaattgaactcacttctgtcctgcaattacaaaccaggaatagtaatatttgttgtcaataggatgttacacccgtagatctttaagaacgtgtgcctatttctagctctaagacttaaatttggagatttgcactgatgatctttgggagtcctgaaacctgaaaaaggtttaggctcagctggggttttatcattcttttattctctccatcccttctctgtactcctaagaaatcatgtgaatgagaaataccacacttcttgtattttagtctcctcaaaagatttagagaaagaataaatcttgagcaagttctttttaaatca

SEQ ID NO: 95432 - DNA, 1050 bp, Homo sapiens
agagcaagaccctgtcacaaaaaaaaaaaaagaaaatggaagtgattgatggttaatgtacttattatttattacattttcataagccaacagtatatttagagtctgtttggcaaacttgagttctaatacattatagaggtgagcccttagcatcccaccttcttacggtcctctagctggccattttggtttccttcagccagttttatcaacatcatgacctgtgagactttggctttgaaagtgtccttttcatcttaaatggagatctcattcaccagagtgtgaaactaggaaagaaaattctttagttctagttcttattaatttttactgctggttttataaaatcagcaacttctgtaaggtaattcttgtatattaattatacttctgtgtttcagataataccctaaagctgttaaaggagttaacaagcaaaaaatctcttcaagtgccaagtatttattatcatttgcctcatttattgaaaaatgaaggaagtcttcaacctgctgtacagattggcaacggaagaacaggaggtatgtttattttgtttcttactgcagttgtactactgctgttaaatgtgttttggactattatgttgaccatcagaagtctgggaggtcaaaaaatgaaagttctttctttatctgtgcacatcagatcattctaaactccatgttgaaaggaattggacattttccttcatagaccaaagtaatacagctgaaagggatcatgtgaaatctagttcaggccccatcccaggcagacaaatgttgacacctttgtcatttttctgtttaagaaacttgggaagtacagagatgacttgccttgtatcttatttcaaaattaacagctcttttggtcatgtcataaaggtttttcttatgtctgccccacttttcctacagaggtgtaagtagatagtaacttttatgtaactttttatggagtagtagaaatactttgatttgcttcttttttcctaatttattcaaaagataatatatagcttatttttctcttcttgtc

SEQ ID NO: 95433 - DNA, 1005 bp, Homo sapiens
gagttatttcagagagggatgaatactgacaaccaaacaagctaaggcgatgacaagtgactgaggtgggaatgacggctgtttagatgcgagtggtcacagaatgcctctctgaggaggtgacagttgaactgagacctaaataataagaagccagagagttggagtgaagaggggtcctggcagtatcacagcaagtacaaaagtcctgaggccagatgagtgtggcacattaggagagtgtaaaaggaagctagtgtggctaaagcactgttaggggtagggagtgttgggggtgtggtgggagataaagttggaaaagcaagcaggggccaggtcacactggatatggaggccacagggacatctttggattttattcctcagtgggaagctttatgccgagggtgtaccacagtctgattgacatttttcagagattcctctgcctttaaggaggtgttctttatccagttgaggaagttcccctctgttcctagtttgtagaaagtcattactttttcatatatttttttctactactttttctctatttccttctgtgaacgcttgggggtatcctatactctggggcctctctgttcagtctgttcagtttgttcagttttcctcaatcttttttctctctgttcttcagactcgataatttctattaatctaacatcaagttcactgattcttctgttcttctgccatctgaaatctgctgctgagcctctctagtgaattttaattttagttgctctaacaactaaattccattttgttttatatttcctgtctcttcgttttctctattcattgagtcagtttcctcacatggtcctttagttctttaaacttggcttcattagttcttttaacttatttatagtaactgtttcgaagtcttcatctgctaaacccagcatctgggaatactcagagaccacttccactgactgccagaattttatttttcccccgagtatgagtcctggtttc

SEQ ID NO: 95434 - DNA, 1357 bp, Homo sapiens
ttctctgagttgggctctaattttgggggaactcttgggggaaaatgaatgaaaaacttgctaaggtcctttttgctttatatacaaatatgtacattttagaattcatgtttttattgtactaaatgagaaggcttaatcaggaggtgctttgtttttgtttgtttttgagacagagtttcactctgttgcctaggctagagtgcagtggcaagacctcggctcactgcaacctctgcctcctggattcaggcaattcttgtgcctcagccacaggagtagctgggactacaggcgcaggccatcatgcccggccaatcaagaagtagtttgaatagttaatcaaactattgattgtccctgacatgaacaaaacaaatgactggctattaaaagtctgtttatgaaataagagggttgatgagcagaaaagtatatgggttttttttttttgtaggaaacttacctattcagagaattatagtagtggagaaacttgacccttctcactgtgccttatttgaaagatggcaagtcttggaatctccatttaattttccttgtttcttatgtaaaggccttataataagcataattattaagctgtctttagaatgaaaattaattaaaaaaataaagattctttctccacgcagtgttagatgcacacatacagtctgttaactttgatcatcattctctgaatagctccataattcttctttgcaaacttctgctctgattttctacttggtgttttttccagactcttccaggtatcaacacaggtttctggttatggttacataaaatcttctgtgttaaatgttatcgtttctgtagccactcaaactgttgggcatttggattctttctagatagttctggcagtcagacagcctgggttttccagagaagtcctgatttgagagactcaattctaatatacccataaaccacgtgctctgatttttattttgaaagtgtggtttctataagctttgatgttgctaaactaatggtttttttttgttgttttttcattcattcatgggtcccttacatgtacctatcttgcacctagccctatattatatgctattaataagaaaagcaataagtaattttatgcctttgagcagctcagggactggtcagggaaagatgcatgtaaacaaatttaccatcagatagagttagatagaaacaataacagtgcttgcctgtaagtgtattatatgtattttaatcctcataacaacaattggagatattatcccctttctgtaaatggagaaaccaaggcagagtgactgagaaacttaccaaggtcatatgttaagtagtggagttaaag

SEQ ID NO: 95435 - DNA, 1084 bp, Homo sapiens
atcccagcactttgggaggctgaggcgggtggatcacgaggtcaagagatcgagaccatcctggctaacatggtgaaaccccgtctctactaaaaaatacaaaaaattagctgagcgtggtggtgcatgcctgtagtcccagctactcgggaggctgaggcaagggaatcccttgaacccaggaggcggagcttgcagtgagcctagattgcgccactgcactccagcctgggcaacagagcgagactccatctcaaaaaaaaaaaaaaaaaaagccaggcatgtggctcacacccataattccagctactcaggaggctgaaaaagttgctacttcagaaaggacaccatgtaccaaatttttcagaggcctggaaatcttgttgccttaccttaaggcagagcctgtgctttatatcctcagccaaaaggcaagcaacctgggaatttacattgtacgacaactcgttgcctctcaggagactgtgcttgacagccctcagcttccagacttaacagctgcatccctagtgtcatacggggtgtggcccaccattggggtcccaccctgggcccctcaactcgtcatagcagaagtccttctgaaagaaaaaaacaataccttaaggctgaattttaataggcactaaaagaactaaccatcacctatcagaaagtcaaaatgaagtgatgagacgaatctgtcccacgtaggcgtagttgaacacctctagaaatggtttaacattgaggatttttgaaagggttcattttagatcttcccgaatacaaatagctcagtaataatgccaaatgtgggtctgaaaactttgtcatcctctcctacaggagagttctgtgtggaggtattttaagagtgattcctgggaatgcagatgaaaacggctctcatctcgggcagtgtgtcctgcatccgggatggccaggctcgctgtaacacacagcgtgtgcatggaggagagagcgccgccgtggatagcgggactgcggtgcacactggtgtggcttgggccaggctcctccatgatgcagcgccagcagggcagccccgatcagacccgct

SEQ ID NO: 95436 - DNA, 1050 bp, Homo sapiens
ggtgcggtggctcacacctgtaatcccagcactttgggaggccaaggcgggcggatcacaaggtcaggagtttaagaccagcctggccaacatggtgaaaccctgtctctactaaaaatacaaaaattagctgggtgtggtggcaggtgcctgtaataccagctacttggcaggagaatgattgaactcaggtggcagaggttgcagtgagcagagatcacgccactgcactccagccttggtgacagaacaagactccatcttgggggaaaaaaaaagaaagtatttccacacacgtaaagccagagacagtgtgggaagacagcctgggcagaaaagagcattgttgcgttggtcgtccttatttcacacggtgaagttcatgctccgtgtgtttgttccttgtcccacgaaggtctctgtcgtgtctccagaccacgtgagcgacagcaccgtctctgcccggatctcagacaacagcctggcaccagtggctgacttcagttatcctgcagaatcctcctcctgcctggacaactctgcagctaagcacaagctccaggtcaagccccgcaaccagcggtcgagtaagatgaggcggctctcatcggtaattgggtttccttctccacacagaggcaggccaggcaggcttggcacccccctatgcccccccccaacctgcctcactcccccacacagggtctcatgccccctctgagcaccccacagttgatggagccatgctgcaggagctgaagttgctcatctttttaaacataaaccagatctgtctctcccttgcagaaatgctccattcattcatccatccgtctgtccgtcattcctcacacactcactactgaatactggttgccttccccctgcactcagaggaaagtccacgctccaggcctggcacatcaggtcctgcctaccccccaggcttcttaccttctttctcactcagcgttctggccacctttctgcctcttgagctcaagagctgcctctagcctcaggccttggtgctgctgtgtcccagccttg

SEQ ID NO: 95437 - DNA, 1030 bp, Homo sapiens
atggaacctaagcaaggtgcagagagggcagtaataagccagccgctgaacctcacagtgggctccgcaactgggatctcctgggactgtccgcctggagggcaggagctgcaccccctgtctctgtttttagtactgtgctgtgcacaggcaggcatccagtaaatgtttgctgggtacattgtcaaacaaggatattatccagagttgccttctagctcaaaagtctgtgaacagctgaacccatgattatatgcacctctagtcccctcttatttttgtgggaatggtaaggaaaaactataacttgagtcttaactatatctcccaagttaggtttgtaaataatgaaaataaaggttaatttttctcctttcattggattacatggaacctccctactttaggaatctaaagtgaccagaaaaagttatgaaaccttcaaggttttggtgttttgctcatctgtttcagcagaagtcactgattttctgcatactccatgtaatgaatctggtatgctgagataaggacacctgtgactgagatgatttctttggcgtccgtgcaagataaaaggtaggtgctaagaggagcaaggcaaatatatatttagcgatgctgtcagtgccttcacgtttaataccagaagggtaaaaggaacaaaccaccggtacatgcaacagcttggatgaagctcaaaagcatcacactttgtgaaagaagccagtctcaaaatgttacatactgtacgattccatttttgtgacattctcaaagagacagaacgatcgtgacggagaacaaatcagtggttgccagggggaagagtgtgtggctataaaggagcagcatgggggaggattttaggggtggggtggtgatgggacaattctgcatcctgactgtgctggtggctacatgactctacatgtgtgtcaaaacccatgggcttgtatgtcaaacccaaggccgatttatggtgctatcctttagaaataacgcaaaatatttccagaagggtgagcaa

SEQ ID NO: 95438 - DNA, 1047 bp, Homo sapiens
cctctacatgagtggttttacttttagtatctgttgctgtgagaaacagaggttctacagattcagtaaggttgaatttcattgcatctatgaacattgaaaaatagtaatagcttaatatctaggtgacgggttgatctgtgcggcaaaccaccgtggcacatgtttacctgtgtaacacacctgcatgttctgcacatgtaccccggaacttaagaaagaaaaatagtagttcacactcctattaatgctgagattacaggcatgagccaccgggcctggtctttcttaacaattttttttttttttttttttagtcataaaaccaattatttaattgaagctataaaaaaggcagtataagcgataaaataattaggaaagaatatttagcatgtttcaaaacatttaaaataggagcagaacattttacaaaaagttgtacaggaaattaaattctaaaactgtaagtacaaacatgacattacagagtatcttataaaatacaaagacaaatataaaaggactatgatgctttaagtctgaaaactattggccaaatatttaggtttatatttacagttctgggtatgagaatcatattactatacacaactcccaaaccagtaagtagtattttccaattaaccatgtgtggtatcatcttctacaaagtctttggccatctccgctgtgatcacatcaatatgactaaccttatttctgaactttacaccatagaatttgtcagctgactcaagcagttcaggcctaaaagtagttgtaataaactgagcatgtacagcaagttccataatcatatctgacacagcctttctgtgctgagcatccagagcctggtcaatctcatcaaacaagtaaaatggagccgggtcacatttctgaatggcaaaaatcagagcaagggctaccaaggatttctgtccacctgaaagctgttgcatttctctcatttcaccttgttttcctgtaaatgacaccctaattccaactccagtaaactgctcaactgatgggacactgctt

SEQ ID NO: 95439 - DNA, 1442 bp, Homo sapiens
atgcccagcctagtagcatatgtttttctaaagcaaatccatgccatttctaggatgtgtgctaggtctgtggacatttctggcctctctaaaatttctttaccattttttctccaaaattatctttcagttaaaatatagcatacccagaaatcctggaaaagaaagatatctaactgctttttaaaaattactgatatataattttttaaatgttgtatttaaaaaataccaaattaaatgtttttaaggatcctgtttgttttcaatttcacttagaaaatgatgctatagtttagcttgaaataatggtctaattttttcctctttggcaagataattttagatactgaaaaagcacaaaataaatctccttctagacttgattcctttgtcaagactttggaagcagacaaagatcactataagagtgaagctcaacatttgagaaagatgatgcgaagtaggtctaaaagtccaagacgcccatcaccaactgcccgggtaggttttataaacttacaaatattttggagtttgttgcccagacactggcttttattctttgttttacctaatttgaaaataatttgttttgatttgctgtgaattgctgtttcaaaggggttgagagacagaggtctctttgatggcacagtagactactgatattggttctttatcctcagcataattagcacttgggaggtaatcaggcaaatgtggaataatttggaatgaagctgttttaaaaagatgtggtttttaaacttattttttataatttcctttcattatatagtcttattttcttaaatagaaattgggcactaccatcagtagcacctttctatcagtactatatatcaaagaagatttcaaattccttatataattatagggtgcaaactgtgatgtagaacttttgaagacaacaacaagagatcgtgaagaacttaaatgcatgctggaaaaatatgagcgccatttggcagaaattcagggtaatgtcaaggttcttaaatctgagagagacaagatcttccttctttatgaacaggtaaacttacaaaaaacaaattatataagtaataacattgagttctagagttatgtaattcttctttgagttttatgagactgcttaaacctgcaaatcaagttaatctaacatttggggattacatatgtttttaagatattcttaatgaaatgtagtacatttccaatacagtaggtatgtgagtacacacgtatgttatccccatagccaaaaatcatacacatgtataaaaatagtcttatttttggaataagatatgaagaaaccgttaaatgataagttgttatgagttcaaggtaaaaagatcaaatcctgacctttttaccttgaacttgccacaccttatcacatcactttaggaacttttatataatttgct

SEQ ID NO: 95440 - DNA, 1060 bp, Homo sapiens
cgctttatttttccctgtagcactttgctgttcctttccccttccctcactgtgctccagccatgccggtctccatacttagaaccaaccagaccttcttttgccttaggacctttgttagagctgtaacttttgcctgcaatgttttttgcccagattttcacatgattgacttcctttcctctgaagtttttggtcaaaggtcacctttcaatgaggacttcctgaccaccctatttaaaattccaacctgttcctccataaatattcccagtatccttaactctgctcttctttttctagtatactatataattatttgttaggtttattattgtctattctagctggaatgtagaatccacaaaggcagaaatctttgtctctcttgtttacttaactcaagtgcttagaacgtgagcgctccttgtattatttttttgagggatgcaatcactaacatattttgactattatcttttgtttttctttttttggctagaatatatactacatgagggcagagatttttaccttttttattcattactttacccagcacataacacaatggcaggcaggtagtaggcattcattaattgttaagtaagtgaaaacactgagttagcagtttttcatttgggccagttattttgtttttcagagtggaatcaacatttttttaaatcactgtaaaattaatgcatatttattatacaaaattttagtccatatagaaaagtaaatgaagaaaataacatctaccataatcataccttgttatacctagacataatcttcagtttatttggttatgtttatatgtaggatgtctgcgtataaatttattttttatgagaatgtgtcataccagatactctgttttgcagagtgaatttttatacttaatgtggaaatcttaacacattcagagtagacctgtatctttttagtgtctacttagtagtatacattaaaacattgaaaattgtctattcaaggctatacataaggttatccaaactctatgtaattatgttctatttctaagtacttcact

SEQ ID NO: 95441 - DNA, 1019 bp, Homo sapiens
ggcaagccatactagaggataggaaatttgtagaaaacttgagaaactgaaaataatgcccaaattaaatagaaaaactattttgatacttgataatatatatttttaaatttgtaggtaccaaagataatactaagagatgtaatctcagagaaaaaatttccaaatacatggacagagcggaaaacataaagaagtacttggaccaagaaaaagaaggtaaagaggttgttttagaaaatgcatccataaacaactgtgactgtccattcacccaatgtttctggctcctgccctttggagctctgtgtggtctggaccagttgtccctgggagcttacaggatttaatctgtatttccactcccatacaggagttgttcttaattttttgtttgtttgtttgttttggcttttgtttttagttgggggtgggaatatcagacacccctttgaacatctcatgaaagctatacttactggagaatgttccatgccatttttaaggggttcacaaatccctatgaagcttatgtgtggaccctatgttaagaaatactacagggaatactgaatgtaaattgtgtattttatttatatttccctttatgaaatgaccaaaatcatgaaagaagctaaagaaactcctgggatttctctcagattttgttgtgaatcaaaacacctcaggagttaagcattcctaatgattagaggtcaggtaggtattgttccctattattagttccctactcctaagcatccagtttacaaatgtctgtaaatggccatttccacccttacctgagtgcatacttgctgctttctatagccaaaggtactgctgccctcaaaagccagtgcccccaggccccagcttttcttcctctctatactttctacacccctttccccatctcttcctactatcctgtatcagtacataccctggggaccccccactgagctcctttgttcagtgggaataaagttatgtttccttagccccgatttgaaatt

SEQ ID NO: 95442 - DNA, 1053 bp, Homo sapiens
agcctctaaagagagcaatcactacacttatggctgggattttgcgcttagtagttcaatggcccccaggcagactacaggtaagtgtttcttttcaagaatttgtcttttctaccccttatgaattttttttttaatcattacaaggcaagctaagttcttttttttatttttttgagacgaagtctctctctgtcacccaggctggagtgcagtggcacaatctgggctcactgtagtctctgcctccctgattcaagcaattctcctgcctcagcctcctgagtagctgggactacaggtgtctgccactatgcctggctaatttttgtatttttcatatagtcgggggtttcaccatattggccaggctggtctccaactcctgaccttgtgatccacctgccccggccacccaaaattaagttatttcaccagttccttttcgaaatggtttagatattgagagttaatcttgtttatgtatggtttttctgctgttttatccctaaagatctagaatcaaaaaagatctttttctggaaaacatgccaataaaaaatggctgtcattgattccccttggtctgtcttaatcttaaagttttaggttgtttttccccttagattatggaaggagtgcattttcaataataaaatattagaaaaatatagaaaatcagaaggaagagaaataatctgtaagagaccctcagtgttagtattttcatgtgtctccttctaggcttgcttttagaaagtgcagtggtgctgcctaatctgctcataagggccagagcctagatgagcctattgacctgctcctggctgcagaggacaacaatgtaaggggctttgtatatattaccttaacctcagattaatcctgtgaggtcaatatgagttcctttttagagctgaggaaactgaccctctgagagagtaagtgtctcatgtctcacagctggtaggcagcagaactcagcccagtgcctgtcttctagtggtttatgccatctctgcaatgcaggaaatgctgggagggaatgatggg

SEQ ID NO: 95443 - DNA, 1033 bp, Homo sapiens
ggtggctcacgcttgtaatcccagcacgttgggaggccaaggtggacggatcacgaggtcaggagatcgagaccatcctggctaacacggtgaaaccctatctctactaaaaatacaaaaaaaaattagctggacgtggtggtgggcgcctgtagtcccagctattcagaaggctgaggcaagagaatggcgtgaacccaggaggcagaggttgcagtgagccgagattgcgccagtgcagtccagcctgggtgacagagcgagactccgtctcaaaaaaaaaaaaagaaaagtttgcatattgtctgactgcttttaccctgtgatggccaagctgagttttggcaatggagactacatagctctagagctggaaatgtttactatctggtcctttacagaaaacggttaccaatccgtggtctaaaagtatatttatatgcttttagctttatattatgttagtgcttagatgggatgcgttcactcagctagggagctaagatatacctttaataattatagggtaggttggaacagacttctgttacctaaagattggtgggtatggatttctctactgacagaattctaaaaaacaaatgatttatatcatattttagactgtgacaaaaggtgtggagtctcttatttgtacagattggattcgtcacaaattcaccagatcaagaattccagaaaaagtaagaacaaagtttgatttttttaatgttagtgttgttttaaaaaatgttttaagtggtacccgtttttgtaatattggaagattttatgttaaattatatgtggatgtaggtgatggtacagagtttaaagcatagtgggatttatgtgaatggtgatcataaaaataaaactgttctgtcacttgtgtcactggccttcacagtaatgggtttttattatttcagtctacttattcctgcttgtggtttgtacatgtgtgttggtatcaccattgtcctgagaaagcagtgggtcttcctactcaggctctcactgtgtcactctt

SEQ ID NO: 95444 - DNA, 1289 bp, Homo sapiens
ccagcactttgggatgccaaagcaggaggattgcttgagcctaagagttcaagacaagcctgggcaatgtagtgagatgtcatcactacaaaaaatgtaaaaattaactgagcatggtggcacacgcctgtagtccaagctactcgggaggctgaggtgggaggatcgcttgagcccaggaactggaggttgcagtgagctgtgatcacaccactgcacatcagcctgggccacagagtgagaccctgtctcaaaaagaaaggaaaataaaattgatctaaaacattcagtaggacacaataaggtttaaggctattaaccatcaatatcaatataagcattatacctcttccctgacaccagcattttaaagaaattttattctatgttacaggaagaaaacaaagatagatttttgtgcagtttagtatactagtactaaatcataaagaataaaatgcttttttttttttttaagtggaaatttaatggagccaccatttcagaaccaaaagaaatttggaacaaacttcacaaagctggaaaagaaaactatccgaggaaagaaatatgattcagactctgatgatgattagagctcaataattctttgtaaattgtctttttttttctgcttcagatttaaatgtgtttttaaaattctattaatgtctatacattggtcacctaaatactcatattctcgagttttatacagttgtatcacatcgaaaagtgtctttactgttttctgtgtggccatcatgtttaagttgaggaaaactcagttcttaaattatctgggaagggtctggattctctatttttgagattgactttatcacaatatgattcttacatctttataccatttacaattgtgttttagatctacagagttagaaattcgaaaactattccaggactaattcttaatcggcattatttatacaagaggtcaagtaacatttactagcgcaatactgcacttgtaaatgaattataaacgctcttctggaatatatttaaataaccattaaagaactgcttattcattctggacactgcatgttgatgttgaatcaactgatgccagcagaaagctattttgatttgtgaacatactgccttatttaaagggtcctgattgcttgtattttaagacattcattaaaaagaaaccaggaaacacttttgaaataacagcataaggaacttcactgtctctgctcaataaaatacctgtaactggaagtttatgtggaaattgtcataaaagcatacatcca

SEQ ID NO: 95445 - DNA, 1226 bp, Homo sapiens
catgccaccacactccatcctgggcaactttagcaagacccattctcaaaaaaaaaataaataaataacacttttgggccgggcgcggtggctcacacctataatcccagcactttgggaagccgaggcaggcggatcacaaggtcaagagatcgagaccatcctggccaacatggtgaaaacccatctctgctaaaaatacaaaaagtagctggacatactggtgcccgcctgtagtcccagctactcgggaggctgaagcaggagaattgcttgaacccaggaggcggaggttgcagtgagccaagatcgcgccactgccctccagcctggtgacagagcaagactccgtctcaaaaaaaaaaaacaaaaacaaacaaaaaaaaaacttttttttttaattgacttcattacaaaatacgatggtgatttggacacttaaaatgtcaagtggttctgaaagagatatctcacatgtgtaatgttttgcctctctccaaattaggaatggctttctaaaggacatggggaatacagagaaatccctagtgaaagagacttttttcaagaagtcaaggagagtgaaaatgtggtttgccatttctacagagactccacattcaggtaactttgtttccatctgtgactttttctaaaaaaacacagtgaattgtttggctggagatatactggcttactagagaaatgaagaaaactaaaagaaaaaacttcctaagttgtttcattgtactctctcatatgttatttagtattaagttaagcaggcaggggcccagtgactcaagcctgcaatctcagcactttgggaggccaagtggggggtggatcacttgaggtcaggagttcaagaccagcctggccaacatggcgaaaccctgcctctactaaaactacaaaattagccgggtgtggtggcaggtacctgtagtctcagctactggggaggctgaggtgggagaattgcttgaacccaggagacagaggttgcagtgagcggagatcgcgacactgcacttcagctcgagcgatagagtgagactccatctcaaaaaagaaagaaaaaaaaagttaattgttattttaaagagtaacttaaagaacagttacatgcaaaagtataaatgaatattactgaaagtcaatattcccatataaatggcttatatttttgaattgtattttcactagctaactaaaaacatctt

SEQ ID NO: 95446 - DNA, 1066 bp, Homo sapiens
gctcaactgtactctgtgtttaagtaaagtttaatatatatatttatgtgtaaaacctcagtaggtataccttcctattgttcgcagttgtttctgatttctctttcccattggtaaagaacactgattgtcagtatatatcactaggtataacttcacaactcatttctctgtggtttggtgatggtcttaaagacttgtcttggctttagtatagtaaaacatatgctaaatcagaagcaccctaaatttgctgtaagtagtttttgagtggtgtgactagaacctactgagaattaaatttaaaaacacataaaaattgttaagcccagcatcaagtgcttggatgtcgttagaatactccatagagtacacattatacacttgccagaatttttgaaaatggtagagaaaaccttgcttattgtttgcattttttaaaatgtattttgtaaatcttctccccagcacccaggctgaactctgtaccatttggaagaatggaagctgatgcatctgttgacatgttttccaaagtcctggagcatcagctgcttcagactaccaaactggtggaagaacatttggattctgaaattcaaaaactggatcagatggatgaggatgaattggaacgccttaaagaaaagagactccaggcactaaggaaagctcaacagcagaaacaagtaacctctctgccctgctttctgaaattgctataacagtatgcgcctaacaacttatatatacatgtgctgtagtagttacatttcgttctttgtgtttagggtttttaaaattcagaatacctattactgttaaaaatttgcccagaaaaaaatatgttttaaagacattcaaaattagcccaatctctatattaatccacagtcgagtaaaagaaagatctgcccaagatcgtttttctgagcttggatttgtttggttgaatggagggctagggagtcattggtttccatttcaggtaatattaaagccgatttagctattttcaaagcaaacgagataagacagatgagataagagcaattaagtcaattta

SEQ ID NO: 95447 - DNA, 1076 bp, Homo sapiens
aattttgtagaaggtgataagatacacataccctttgcattgcattgtataatatagtagcagtatggtttcatatcccttttaaaggagtcacgacttcataaggacatcgtaagctgggagggttttcttttgagacatagctagttctcagcttattgattgtagtacttgagccataacttcattaagagagttgagagtgaaaactgttaagatttgtggttataagtggtgggggccactgaggagcaatgactgctgggctttcccttcttttgtcttgtttttcctctttttgtatgtaactgttgatgatcaaagatgttctgggtaagaagatgaagactggggaaatgagatgtcagaaggtaacctgtagagaaggtgggactgaatttcccggtttctcttattgcagctgttactgctgagatagagttaagaataaagagaaggattccctcttatgctcttcttgtttactattattaagagttttggcggagaggggcagaagccaaagtaagtgaaaaagggcagcaacagtgttatatgtgacttatccttcctttaatactttgaggttttggacaatttgtccatcaacttggggatggggacggaggaaggagtggtgtagtttggattttacacttctaccaacatgctgtccattactataggtcctggtattgattaggaataggaagaaatatgggggtgcttcggttattattgtaccataacaagtcatcccaaacagtggcttaaaacaagaaaacttgtgattatctttcatggttctggaggttgactgggcttaatcagctggagttgtcagctggagcatctctatttgatctctcctcctgacctggacatccccattagcttggcagtgagcattccaagagacaggaagctgccaggttaaggcctaggcctagaaactataacaaaagttgcatccttctatttagcaagcagtcatacaactcccacattaaaggagatagacctccacctctcaaagagtgtcagagatattttgtgccaggttttaaaacctctgc

SEQ ID NO: 95448 - DNA, 2487 bp, Homo sapiens
aatgcacagggatccaaatatttaggtgttgttattgatcgtcgagaaataagacttgttttatgttttaagatctcccattttataaataacttcattcagacgcacaaaaaacctttggtatctgtaaaagttaatttccttttcttgattaccctgatttttttctggagcttttcattatctgttccttatttgagtgtaatccagaaacttcactgaagcagatgtagggaggctgataagtagatgtaacttgtgttgtaatgaaagaacttgccaaatgatttttctcattgtgctgctaatgcatgaaaaaggttaaaatgataaaatctatataaatgaatgattattttgcttttaagtagcatttaggatgtttttgttttcatttaagcaccaaggatgacattgatcttgatgccttggctgcagaaatagaaggagctggtgctgccaaagaacaggagcctcaaaagtcaaaagggaaaaagaaaaaagagaaaaaaaagcaggactttgagtaagtatattttaaatatatttgatttttatttgttttggtactggattcacttaataaaaactataccagtgcttcacaatgtattttaatccttttctagtgaagatgatatcctgaaagaactggaagaattgtctttggaagctcaaggcatcaaagctgacagagaaactgttgcagtgaaggtgaaagacagacctttgttacctattcgtatttcgtattctattctttcttcttaatgttggtttggggagctacatttggaaacttttgagcagtgtacaatatgttatttaaaagcttctatgaaatctgatgtcaaagggaaaaataggaatgtaaaggtattttgtggtatgttgattgttcataaaattggtacatttggagttgtgatgtaatcactcgttccatcttcagttttctctgttgtttctttttcatccttcgaatttggataagcctcagagtaatgggaaaatcatagatattttttcttctttcaacttgtcccttaggctttgtaaagttagtaaatgggtggtgactagtgcctgtttcaagagcccctggattctgcaatttacaatgatgcgagatgtgtctgaggccaaggccaacctctcttgcttgtttgaattttatattcctgtgaaaaagactttgaaaaagattttgaaatcattttgagatttttaaaaaatgtttacttaatgaagcacatgactctggtctcaattataattctgttaattttttctaacaatggaaattttttagccaacagaaaacaatgaagaggaattcacctcaaaagataaaaaaaagaaaggacagaagggcaaaaaacagagttttgatgataatgatagcgaagaattggaagataaagattcaaaatcaaaaaagactgcaaaaccgaaagtggaaatgtactctgggagtgatgatgatgatgattttaacaaacttcctaaaaaagctaaagggaaagctcaaaaatcaaataagaagtgggatgggtcagaggaggatgaggataacagtaaaaaaattaaagagcgttcaagaataaattcttctggtgaaagtggtgatgaatcagatgaatttttgcaatctagaaaaggacagaaaaaaaatcagaaaaacaagccaggtcctaacatagaaagtgggaatgaagatgatgacgcctccttcaaaattaagacagtggcccaaaagaaggcagaaaagaaggagcgcgagagaaaaaagcgagatgaagaaaaagcgaaactgcggaagctgaaagaaaaagaagagttagaaacaggtaaaaaggatcagagtaaacaaaaggaatctcaaaggaaatttgaagaagaaactgtaaaatccaaagtgactgttgatactggagtaattcctgcctctgaagagaaagcagagactcccacagctgcagaaggttggttaatactttagaggaaagagcaaaaggcttttgattcacagtataagttgtaatcattgtgccccaaggtcgttttgttatttgtccatgggtataaagacacttgattgtaaggagccatctaaaaaattacgtctaagtatttgacttgatttgcattgttaattctttacatatatagtataaatatctttcagattatttatgtacagactggaatttttatagaattgcattatgaaaactattttttttgctgttgataaaggctatagaagttacttaatgaaaaatttattcttcctttctgataactcagtgtcagataatatttgaattctttcctgtctttaaaaacctagttcaatttatgaaattcacaaagaaatgttttcatgaagttgctaatattttctgcttcacttaaaactcaacatgctaaaattagtgtcttttaagcaataatgagccatttttttaacaaccaattataaaa

SEQ ID NO: 95449 - DNA, 1050 bp, Homo sapiens
agagttcttggagtataactacctatatttttgtattttatcctactaataccccctaaagtggacatcattctcattaactccatcttgtagaagtgaaattagctacagaacttacgtgggtgttagttcattctgattgttagaacttcatataagcatctgttggacaccagccactcaggtaccatggatttagagatacattaggtacaggattgcccttttgctgctgacagtatccttctgtcttactgtattcctcaggacatctgagaccaacatcagtattgcagacttctcaggaggccatctgtgagttattctgagctattctagttaccaaagtgctcaggatgccttgatgcctgtagaacttagcctgctgctggcatcggccttggcccattatggtccttgaattgtggttgggttttgctcgtcatcaccacagggaattgttttttcatttcaatgctttgcctttattctttttggtagatgacaatgaaggagacaaaaagaagaaagataagaagaaaaagaaaggagaaaaggaagaaaaagagaaagagaagaaaaaaggacctagcaaagccactgttaaagctatgcaagaagctctggctaagcttaaagaggaagaagaaagacagaagagagaagaggaagaacgtataaaacggcttgaagaattagaagccaagcgtaaagaagaggtatgttttcatgaagttggtaacattgatattgtgtttaacttaaaatctattctctgtaaaatatctttactcttctaattctgaaaatttcatagttgcatggtaattcagttatattattgttccgatacaaataataagatgaagaggtacagcacatcttatctttattttctcaagaacagattgctcgatacataagttgcttatgtatcattgccaataatctgatgtgatattaattaataatcatgtataacatttaaaatactttgatttggaatctcctaacataatactttgcatgtgtctcaagagatttatttga

SEQ ID NO: 95450 - DNA, 1023 bp, Homo sapiens
gtagtttcctgtaaaacatatgactatatttaaacattttctaaacttgaagaaataggtttgcacaggctgggtacagtggctcacgcctgtaatcccagcacgctgggaggctgaggcgggcggatcacctgaggtcaggagtccaagaccagcctggccaacatgatgaaaccctgcctctactgaaaataagaaaattagcctgtcatagtggcaggtgcctgtaatcccagctacttggcaggctgaggcagggagaattgcttgaacccgggaggtggaggttgcagtgagctgagattgtaccactgcactccagcctgggtgacagagcgagactccatttcaaaaaaataaaaaataaataggtttacactactgttttttattcagtacttaatggagtatcttaacagaaattatacaccaaaaaaaatattatcttggtttctgcccctttttcagtgtctgaatcaatggaattatgtgctgctgtagaagttatggaacaaggagtaccagaaaaggaagagacaccacctcctgttgaaccaggcgggtagtgttatctgattatttaattagtgaattcttattaaatagtgttggtgtgtcataagttgtcttagttattataaataattggggagaaccaaataagtatctggctggatggccctctttcttcatagttctttcttttctatttcttttcatttctactttgaataagtatccaagtgagacttgaatcagttgtgttcttttcagcagtgttagaaaatgttttgtagaaaggatacactttgggagggtgaggcagatggatcacgagatcagaagatcaagaccatcctggctaacacggtgaaactccatctctactaaaaatacaaaaaattagccgggggtggtggcgggtgcctgtaatcccagctacttgggaggctgaggcaggagaattgcttgaacctgggaggcagaggttgcagggagatttcagtgagcctaggttgcacc

SEQ ID NO: 95451 - DNA, 1338 bp, Homo sapiens
tgtaggtcagctttagtaacaaccctattttgtaacatcatcactctgaaaaaatgcattctaaaccttaggcagctatcttacaaataacattctgaggaaccactcattcacaaaatgaagatccacttgaggacttagaaaccatggcaaaggagagaacaagagacttatccctatccccagaaatgttcatatggctttcataatcaaaagactattcatttaaatatatatcattcatttctaataaccactggatgtatcagtgtgtgcttatgaggtattcacctttttctgtctcctcatcactggccatagcttcccaatcatccaatccagcatcctcagtatcttcttcttcttctgtaagtaaaaatttgcatttaagacacaaaaattatttagaaatatgaaggtcttttagaaaaaagtaaaaaattatgctctgacataaaaaaagaatgttttaattatgtaaaaaatatgtatgcagctattatctttagaactatctttttttttttttttttgagacggagtctttgctctgtcgcccaggctggagtgcggtggcgtgatctcggctcactgcaagctccgccttccgggttcacgccattctcctgcctcagcctcccaagtagctgggactacagatgcccgccaccgtggccagctaattttttgtatttttagtagagacggggtttcaccgtgttagccaggattgtctcgatctgctgaccttgtgatccgcccgcctcggcctcccaaagtgctgggattacaggcttgagccaccgcgcccagccagaactatctttttaatatagctagcatgttataatttactattacttaaatgcttccatttcctactactgccaacatattaaacttaaccaattttacattcaagctaattgtttcattaatttaattaatttaaatgtttctttagatcttgaaaaagctacatgaatatactcagttcttgaaaacaaatgaaatttcatatatatcttctttttgatcatccaactcatactttatgcaaggaatttattattttgcttttaacctttacaggtatttaaatatacttaaattctgaagttgaaggtacaaaactaccaccatcactctgggtcaatgctgtgctcataaccccaaaacagccagaaagctaaaattctgaatattatttagacattaaagacctaatactcttcttaacaagaatgcttttctttactgaaatctaaccaggcacaactattcttaaatgaaagtaagatgacgggtaggacatgtggtacctgcttccctgaaata

SEQ ID NO: 95452 - DNA, 1034 bp, Homo sapiens
ctagcacaaatttgtaaactttcttaaaacgtgagacttttttttgtgatttttatttttaagctgatcagctattgttagtgttagtgtgttagtgtattttatgtgtggcccaagacaattcttcttgtaatgtggctcagggaagccaaaagattggacacccctgctttaaagtctcttatcttgatataaatctatcatattaatgtttatttatttaaaaatatatttgctttcgtagtagaaggaaacaaagttcatatagaagtaaaagaaaaccctgaagaggaggaggaggaggaagaagaggaagaagaagatgaagaaagtgaagaagaggaggaagaggagggagaaagtgaaggcagtgaaggtgatgaggaagatgaaaaggtgtcagatgagaaggattcagggaagacattagataaaaagccaagtaaagaaatgagctcagattctgaatatgactctgatgatgatcggactaaagaagaaagggcttatgacaaagcaaaacggaggattgaggtatttattttaccgtttctctctacttttcttcccactcctctgtgatgattaaaacagtactctacaactaaaggctttgaacagcactttatgtattctcaagaatagaacaccgttcagtttttgtaatgttgaaatattactggcctttgatactggtcttacccaaggaccccccgtccccgctcttacctaagatagaatggtgtgactacttcatttttttcttgttttctccaaattttaatgtactctttgagtgatagtttataagtatgcagaggtattctgagcatatgccctctgcttataaacatcagttatgtgtttgcctcacatatttaggttagtcaccatgaggcatctgatcactatagttatataaatctggtgggttgatgaggcttctatttagtaaagtccgatacctgatagactttctgtatttttcctacttaatgcagtagatttcagtatgcttcaagagaaagttttct

SEQ ID NO: 95453 - DNA, 1108 bp, Homo sapiens
ttgaaaggttttatagcatttgtatattggataaaagtgtgaaataaattgcctttaaaaatctttaaaattcttaggttccagtgaattttttaaaatgtacaagttcacctgtttttatataaatcctcacacaaattcagggttgcactatatagtcagtatgatgggaagattgattccttttctagtcattatattccattaaagtaactgtgtacaaaagtattcaaaaattttgaaatgacactttacaatattcctattcgtattcagcagtgctgctgtgaaatctaaacaggtttttccttatccagaggtgctgtgatgggaattcgattgtaaagttcacattataaattccaattatgtgtagtcaaatcaacaaagaacttggatgcaggttgtagcattcttttgccaaggcaaaacagaaaataaggatagtgaggatttgaaataatatttaatttttgatttttttttttttttatttctagaaacggcgacttgaacatagtaaaaatgtaaacaccgaaaagctaagagcccctattatctgcgtacttgggcatgtggacacagggaagacaaaaattctagataaggtaagaaagtattaaatgtattgatagaactttgaaaataagtgaatggtaccttataaaaaaaaactttagagaccaataggacatataagcaattctgcttacaataaataagttgctaatttcttattatttttgctgctatcttttccatgttcaaataccaatctgtatttgctgtcttctcatagctccgtcacacacatgtacaagatggtgaagcaggtggtatcacacaacaaattggggccaccaatgttcctcttgaagctattaatgaacagactaagatgattaaaaatgtaagtacattgtatttcatgtattttaatctctgacaaaaattaagatatgaactatttcaaacatagaaaaaggacagagactaggataacagctccatatactcaccattcagaattaacatgtactattttgcctattttgctttagatcattctttttaaagaataaaacactacatattataggagctctca

SEQ ID NO: 95454 - DNA, 1050 bp, Homo sapiens
cagaaagtcaagcatttatgacgttatttgaatacaacagggtatgcatttactctttaacacttttgatcaatgtggtaaatttactttaaaatgtacttttgggatatatttgaagtcagaattgctttaaaattggaccacataaattttcccaatgctgagaaccacctcttgcatgtcagatttctatagaatatttcagatgactgccctgcgattcgtatcaccacttacttaataatctgctcaaacttggactacagtcatagttgtaagaccttaagaaaggagatattttctcatttagtatttttttgttaaaatgcctttggattttaatgaaaatactgacaactgtactttgctggttaactcactgtttctaaagccatttatatggaaaagggagtagtgatactttcagagttttatggcaaaaggattgttctgtaaagaagctttcatgtctgactttcttaaactttgaacttttccccattgtttctagtttgatagagagaatgtacggattccaggaatgctaattattgatactcctgggcatgaatctttcaggtaagagcaatttgagtcttttctcatcaagcaatctacttgaaaccattaagtctaaaagttcagcagagtcattaacctttgagtagtaatttgatctctataactaccactccacctttgtacctcattgatttagtaatgttttctttgaatacttgttttttatagagggaagtctttactgctttaaaagagcacccccttaatgtggaatgcagaaaacatgctaatacatgccaggcctatctcctgtaaaacccgttacaagtggaatattatgctgttgtctcttgtccatattctttaacacagaaaacttggtcagtaaaattattagaaatattagttggttctaaaactagctcattccacttgaggtcaattcaagtgattggtagatgagcctttggcaagttaagggctaatagtacttgaacaatttaatacatatactctattttgtttggg

SEQ ID NO: 95455 - DNA, 1865 bp, Homo sapiens
aattttttggtatataattttatagtgatggtacttgctgggattgattgatttgttacaaaaactgtttcggaattccaacaatatacattaatagtcttaggataattctaggatgttatcttttgcaaacaaatggcagccacttaggaactcatggaggctgacaggggcagcatggcaccacagcagtttctaatttaagagcaggtgccgataagcagtctgaaaggagcttttggtacaataaagtgtatgagtaagtcacactgttctgtatatatgagacacacatgaggaattttctggagctattaatacagttcttgaatgttctgaattttttagagatctttctcatgaaaaaactttttcagattgataggttatatgattggaaaaagagtcctgactctgatgtggctgctactttaaagaagcagaaaaagaatacaaaagatgaatttgaggagcgagcaaaggctattattgtagaatttgcacagcaggtaagaaggccttccttctttctgaagagcctatctcagaatatgtattatattatctttataatgaagtcagcattttcattaatactggttcttttcctctgttgacagcaattactttttttaaattcttcttcccttttctcctttttctttgcagtctgaatactttaatttagaaaactgagttgacttagaactactttgctataatacagttaatgcttataggatatacatgatcatttttagtgtttatgaggagtttcaaaatgatgagccatttgctcatccggcttctagtgaggcacacctattccagatacgttttctttacagcctggcattttggatgatttttgctcctagggtttgaatgctgctttgttttatgagaataaagatccccgcacttttgtgtctttggtacctacctctgcacatactggtgatggcatgggaagtctgatctaccttcttgtagagttaactcagaccatgttgagcaagagacttgcacactgtgaagagctgagagcacaggtgatggaggtaatgatcaacttttcagtttattgttttttttttttttaaaaatagcaagttccttgagtggaggatatttactacttttagatttaatgaacatggtgcattgtatgtatgtctttctctttgcattaatgccttttaggttaaagctctcccggggatgggcaccactatagatgtcatcttgatcaatgggcgtttgaaggaaggagatacaatcattgttcctggagtagaagggcccattgtaactcagattcgaggcctcctgttacctcctcctatgaaggaattacgagtgaaggtatgctgaggtgggaagcattgacacgtggggacttgtacagtgtttagaagttctgctgagatggtttcctcactttgaaagctgtttgacttaatacagaacacatacatccctcgctctcccttttattttagttgtcatcatacaggaaggcctgtctgtcagagtagagatgtgtgaaagtacctgcttaccagactgggcctttgccagattctaaactacactgttatggttctacactgctaaatacggttgactcttgaacaacatgagggctaggggcactgactccctggccagttgaaaatccacatatattttttgactccccaaaaacttaactcctaatagcctaccattgaccagaagccttaccaatcacatacacagtcgactaacatgttttgtatgttttatatattacatactgcattcttacagtaaaacaagctagagaaaagaaaacgtgattaagaaaatcataaggaaaatag

SEQ ID NO: 95456 - DNA, 1086 bp, Homo sapiens
aattatattctcaactgcagtattttagtttcattgttttacagcttcatcagttcttggatgttaggttttaaattttttttgccattctgctaagtgtgtagctcattgccgtttcagtgtgcatttgcctaattgttaacctggttggtcatttaaaaatgtttattggccatttatttcctccttcgtgagatgtacatttttcttctgcattatctttcttacagatttatatgcgcttatatattcaggataccggtttgttagttggtgtgttttgcaatatcttctactcttgtgactttttttttcctgtggtattttgagaaatggaaatatttaattttaatgttaaatttatcagtcttgtgattattgctttttgtgcctcgtttaagaaacctctctctaatatcatgatgagattctcttatatcatcttctactgctaaccacttttaaagtacatttggtaacaaatgtttttatctctgtagaaccagtatgaaaagcataaagaagtagaagcagctcagggggtaaagattcttggaaaagacctggagaaaacattggctggtttacccctccttgtggcttataaagaagatgaaatccctgttcttaaagtaagttcatttaaaaatttttttccttaaaagctatttgagttctggcatgtgtcagcattgcacatgctagggatggtgaccaaaactggctttgtctttgtgaagcctgccatttcttggcctcttagcaaacttgatgcttttgaattacttcagtttgtacaatcatagaaattggtataatttttatatgtactagaattataaaaataatgcattttattcaaataaaaaaatgagtcaaaagctagaagtcggctgggcatggtgaatgcacacctgtagtcccagctacttgggaggctgaggcaggagaatcacttgaacctgggaggcagaggctgcagtgagccaagatcgtgccactgcactccaacctgggtgacagcaggaccctgtctaaaaaaaaaaaagctagaaattgtatattctttttggcccatgtccattg

SEQ ID NO: 95457 - DNA, 1102 bp, Homo sapiens
agtatgtcacagaggacagttttttaagataggacagttttaagatagctacgtaacatgaaagccttcatagcaagagaaattacttactgagggtcatgttccaacatcactgaagccttcataacatcttttttatgcactgggccaatgttaattcctgcatactgaaaaaatgggagtttccatgtttatctgtatgtatcaggtaatggcgatggcaccaaaaaccacgaccaaccaccattcacttgtggagcgagttgtagttacttacgggcacttctgatgttttcagaaattccagtagagcttccaaagaacccagtgtagatgcctggacatagactcctttttcttctaatttgatagcatttagtgtctgctttaactcatggatcaattcatccttgaaaagaaatcagatttgataaggttgtcaacacacctctatcctcagcagtctagaattaaattgtgtttctctctttggttaagtactcatctgcaaatatgaaactaaggcttagatagagcaaggcatcacagaacctgtgctggaatgaaggaggagatttcggggccataccctaactgtatttcgcttcacctttgtcttaggtttactaactttgaaatatgtttaatctccgctccacttggcaaatacagtagatgggtgggcagaattaaacagtagagaagaaaaatttttttaaagttaaaaaagtaccacataaacgtaatgtgttatgatagcccaaaagttcagcttgtctgtgttaactaggaaataccataatctcatgatctcagcagctccttcctccatcactgcttgtcgggaaatggaagaagagatttttaaccagaaataagtaaaacaagtttatcaatgccactgaagggacgtaagtccactccatactcaggactgggtgaagagacaggcctgccctattctctcactggccctaagatagcttattcccaacagcatgacttgatgctgcctaaataataaacacggccccaggacacaagagccatgtgctgggaacagttgtattttctctttggcaaatgaacaaactatggctca

SEQ ID NO: 95458 - DNA, 1110 bp, Homo sapiens
atctgatttcttttcaaggatgaattgatccatgagttaaagcagacactaaatgctatcaaattagaagaaaaaggagtctatgtccaggcatctacactgggttctttggaagctctactggaatttctgaaaacatcagaagtgcccgtaagtaactacaactcgctccacaagtgaatggtggttggtcgtggtttttggtgccatcgccattacctgatacatacagataaacatggaaactcccattttttcagtatgcaggaattaacattggcccagtgcataaaaaagatgttatgaaggcttcagtgatgttggaacatgaccctcagtaagtaatttctcttgctatgaaggctttcatgttacgtagctatcttaaaactgtcctatcttaaaaaactgtcctctgtgacatactctgtttttcactgaatggtctttgatgtgttttaaccttttaggtatgcagtaattttggccttcgatgtgagaattgaacgagatgcacaagaaatggctgatagtttaggagttagaatttttagtgcagaaattatttatcatttatttgatgcctttacaaaatatagacaagactacaagaaacagaaacaagaagaatttaagtaagttactgtttttatttactttgagtctttgttaatgaacatgattgagaattactgaattccagaaagggctgtaaacagcaaaatcatggcatttactcatctaccagaggctgcatcctgaaatggtgtgttacaaaccagaaacccaacatactggggacattccagcagtatgcaaacaagtcttgtctgtgacttcagtttaataatcttggcagacttgggtcttgttaatgggttcgtagttattaaatgtagggactttatgttgctcatctgggattatatagattggaagtaacaaaacttgagtgaggaaaaccgggaaataagagattctgtgggagagaagtccattcctctaccaaactttcactcaagcactcacagtacctacattgctgcagtggtagaggaggcatcagcagagaaccaggccagcctccctcctcctttccctttgagacag

SEQ ID NO: 95459 - DNA, 1104 bp, Homo sapiens
tggccttttggatcaatggtttgggaacgtggtggagaaaaggagggtgataatacggtctgatgcctatgtgatcccccagtagcctacatatgtgcctaacgaagacctgcctgtcaccaggtactgcctaggttctaagccccagactgtggctgacatcttcagcagccaagctcagtgttttagactaggaacagaatgctcctgtgatgcagcttcttttggaggtagggctttaaaagagaagaaagcaaagacttgggaagcaacagaatggggaggaggaggttaagaacaaggaagaagcgctctgggcatggggtggccctgggctgcagcaccctgcctgcccctctcctgtggccgctggggaaagctgctttcctctaatgggagaagcctgatgttcagctgcagtttttctttttatgtttaagtgattctgtaagcttaaaattcttttcttttttcctttcaggcacatagcagtatttccctgcaagataaaaatcctccctcagtacatttttaattctcgagatccgatagtgatgggggtgacggtggaagcaggtcaggtgaaacaggggacacccatgtgtgtcccaagcaaaaatgtaagttctagttgtacattctgtgggtcatttcttaaagcactaaatgagtgtccaagagtcgtaccaacacagctttgtgcctgtagttcacagtactgtgctgtgtatttagtgtggtctccaccttcttaacaaatgtttcagtgtttttacctcagtaggaagaaaatgtggtaactttaaaacaagcagagcctgtcaccttctgttgtgcttcagtattggtaaatatcagtgctccatagtcagtgttgactcagtgctgatctcagtgcttcagttaattggggctccaaggcactttacattattgccttttattttattttgaaaggtttcaagcctgtggaaaagtttaaaaactagtataatgaacactcatgtttaccttccctttctgtcagcatacctaagaaaaattaataatatttcaacaatatcctataatttgcagccctcaacattatttcaccagttattc

SEQ ID NO: 95460 - DNA, 1781 bp, Homo sapiens
ttgccccaaactctgagatcacatcactcatctgctcacaggccatcattcttaaaatttcaggattggtcctcactctgacttcattcccatcagccacttcaagctcattcctgactcagaccctttgtgcctgctgatccctcctattacggcacctgtcacgtgaaatggtagagcaaaaataggaaatgacattgggtcaacagggcacttggaatgttttgcaaagcacattatctcctgtcattcttacaaccatcatgaagggaatagggtgttggtggtgccagcctagtttaccaaaatgttacaccgtgagtgatgaaaggatcgcactgccatgacttttaaaacaggcttttgctctagttcttacttcagctatccagccatggcgcctgtgattggcatgaattcttctgcatgcattttaatttgttcttattttatagtttgttgacatcggaatagtaacaagtattgaaataaaccataaacaagtggatgttgcaaaaaaaggacaagaagtttgtgtaaaaatagaacctatccctggtgagtcacccaaaatgtttggaagacattttgaagctacagatattcttgttagtaaggtaagtatttcagcaaaagtggcacactttaagcaacagggaatcactcttcttgggtcacctgtacctgtagctccttgggcttcagtttgattgtagaatctgatgggactggatcccccattagggcttgacctctagctgggccttgtctgttgaggaagttgctctatcaggaaagcagcaccaacagagaaagctaggacttttaggtcccctcgtgcctgacatgcaaaccagatgtgattttggaattctactcccttaggcaggcaagccctgttttttatttctgcttaagctttttagtacagtgagagcgggcatctggggccacagctttctttggcacgtttgttatgttctgtttaccctgtttgtgcctcgggcattgcagatcagccggcagtccattgatgcactcaaagactggttcagagatgaaatgcagaagagtgactggcagcttattgtggagctgaagaaagtatttgaaatcatctaattttttcacatggagcaggaactggagtaaatgcaatactgtgttgtaatatcccaacaaaaatcagacaaaaaatggaacagacgtatttggacactgatggacttaagtatggaaggaagaaaaataggtgtataaaatgttttccatgagaaaccaagaaacttacactggtttgacagtggtcagttacatgtccccacagttccaatgtgcctgttcactcacctctcccttccccaacccttctctacttggctgctgttttaaagtttgcccttccccaaatttggatttttattacagatctaaagctctttcgattttatactgattaaatcagtactgcagtatttgattaaccaagcttctgcagattttgtgattcttgggacttttttgacgtaagaaatacttctttatttatgcatattcttcccacagtgatttttccagcattcttctgccatatgcctttagggcttttataaaatagaaaattaggcattctgatatttctttagctgctttgtgtgaaaccatggtgtaaaagcacagctggctgctttttactgcttgtgtagtcacgagtccattgtaatcatcacaattctaaaccaaactaccaataaagaaaacagacatccaccagtaagcaa

SEQ ID NO: 95461 - DNA, 1062 bp, Homo sapiens
agtaaaaagcagccagctgtgcttttacaccatggtttcacacaaagcagctaaagaaatatcagaatgcctaattttctattttataaaagccctaaaggcatatggcagaagaatgctggaaaaatcactgtgggaagaatatgcataaataaagaagtatttcttacgtcaaaaaagtcccaagaatcacaaaatctgcagaagcttggttaatcaaatactgcagtactgatttaatcagtataaaatcgaaagagctttagatctgtaataaaaatccaaatttggggaagggcaaactttaaaacagcagccaagtagagaagggttggggaagggagaggtgagtgaacaggcacattggaactgtggggacatgtaactgaccactgtcaaaccagtgtaagtttcttggtttctcatggaaaacattttatacacctatttttcttccttccatacttaagtccatcagtgtccaaatacgtctgttccattttttgtctgatttttgttgggatattacaacacagtattgcatttactccagttcctgctccatgtgaaaaaattagatgatttcaaatactttcttcagctccacaataagctgccagtcactcttctgcatttcatctctgaaccagtctttgagtgcatcaatggactgccggctgatctgcaatgcccgaggcacaaacagggtaaacagaacataacaaacgtgccaaagaaagctgtggccccagatgcccgctctcactgtactaaaaagcttaagcagaaataaaaaacagggcttgcctgcctaagggagtagaattccaaaatcacatctggtttgcatgtcaggcacgaggggacctaaaagtcctagctttctctgttggtgctgctttcctgatagagcaacttcctcaacagacaaggcccagctagaggtcaagccctaatgggggatccagtcccatcagattctacaatcaaactgaagcccaaggagctacaggtacaggtgacccaagaagagtgattccctgttgcttaaagtgtgccact

SEQ ID NO: 95462 - DNA, 1376 bp, Homo sapiens
ctaaactatcatcacactaccttgtatgccagcacctggtaacagtagagatttttatacattaatcttgatctgttttaatcttgatctgttttagtagagatttttatacattaatcttgatctgttttaatcttgatctgttttgtcctagaaaattccatcatacacacatttcctgatatttgggcttagtgcttctaaattgttgcagacacaaaacttaatgattcattcgtagtagtaatctgtagctagttttagggttttgctgaagtcagtgtggggtgtttgtttgaggaaaaagttccaaatatccactagcatagaattttaaactatttttattttaaagttatggcataacatataacataaaaatattttatatacgtttgaaaaatctataccgttcttttttatcatcaaagtttctcaatggccagtagaagcaaaaagacaacaccacctctgatctacgggacataatgttcccaggaaaaaaatcttcaagtgggtgtgagggtgtttctaattcaaaatatgtagatttctccgcatggaagaagtagtaaagattttcttaacatgctcctgtgttcatgcttggagacaagaataagatggtttagaagctttaccctttcttggaacaagtagaatcccggtctgagacctctcaggaatttcagagcttagcagtctggcctggaggtttttcagccttttagtataataaacagtagttgcttcctagagttgagtttttaaggattcacaaaaaggagcctgtacaaaatatacatacagttctttattaaacaactgtaaacacttcactgtaaaaatccataaaactttataaacaaacattttgtaaatagaatctatgctacagtaaaataattaacacaattatttacatgcaatactgacaaatttggcactttttgaaaagaaatgtacaaaacacttgctttaaaagaaatttaaaattataaaaactccgagcattactatcatgcactttgcaaatacctcacaagcacttatggcacagctatcagagagcatcaggctctctggtaatatttatgtaacttttaatgtgcttccataagtttgttgtaaaaccacctggacattgtcaagaataaagtcaaatgccatattccaaaccgattccaccgattgctgcatcagcctaaaggtggggagagaagaaatgtcattaggaattaggaaaggtccttaagactaattattcctttttatatataaaaattgactttggcaaaaaaaaaaaaaagtcctggccaggtgcggtgtggctcatgcctgtaatcccagcactttgggaggccgaggagggcgga

SEQ ID NO: 95463 - DNA, 1038 bp, Homo sapiens
ggtgaaccatgattgcaccactgcatggctccagcctgatcgacagcttgtctcaaaacaaaataaaaaaaaatttgagtgttctaggattttattttttttgagatggagtctcactctgtcgcccaggctggagtgcagtggcaggatcttggcttactgcagcctctgcctcctgggttccagtgactctcctgcctcagcctcccgggtagctgggattataggcatgtgccaccatgcccacctaatttttctattttttgtagagacggggttttaccatgttggccaggctggtctcaaactcctgacctcaggtgatccgccctcctcggcctcccaaagtgctgggattacaggcatgagccacaccgcacctggccaggacttttttttttttttgccaaagtcaatttttatatataaaaaggaataattagtcttaaggacctttcctaattcctaatgacatttcttctctccccacctttaggctgatgcagcaatcggtggaatcggtttggaatatggcatttgactttattcttgacaatgtccaggtggttttacaacaaacttatggaagcacattaaaagttacataaatattaccagagagcctgatgctctctgatagctgtgccataagtgcttgtgaggtatttgcaaagtgcatgatagtaatgctcggagtttttataattttaaatttcttttaaagcaagtgttttgtacatttcttttcaaaaagtgccaaatttgtcagtattgcatgtaaataattgtgttaattattttactgtagcatagattctatttacaaaatgtttgtttataaagttttatggatttttacagtgaagtgtttacagttgtttaataaagaactgtatgtatattttgtacaggctcctttttgtgaatccttaaaaactcaactctaggaagcaactactgtttattatactaaaaggctgaaaaacctccaggccagactgctaagctctgaaattcctgagaggtctcagaccggga

SEQ ID NO: 95464 - DNA, 1086 bp, Homo sapiens
aggcgtgagccactgtgcccagcccacttcctatggttttttaatcacatgtaagaccttgagggcaacatatttggaaccttatttgctacttagtcaacatggcaaaataaaggatatcactttctcattaaccctaatgagtacagtttcccagaaagtttaaaacaactcagtacaccctcagccattgtgacatgccattttttcccatttgataaaagtgatgaattactaccttttcatgtattttataactagatccagtttttccaaatctttttcttctattagatcagtacagtatttcacaacttggagaatgtcttcttccattggatctaggaagggggaaaaacttcaaatgaggaccagtctttttgaaggagaaagtcagagatctgcatggataaaggaaaactgcatttctacaactatgtcactaacagctatcaaaggaatgggctttgttacttttcaaagcaagtcccagaatttaaaagatttgggggtagctgctttaagcttatcagagttagagaaatgggttaaatctgcatagtttagtctgtttatgttctcaaatcatgagacgactacatctcagccttgggccatctaacacaggccaagccaacctgaaattgtagttatccattctctgagcaaggtcttcacatcattgaattcaacagctccagctagattgggtgctggaggtctcacacagccagctgggtcagactgcaaactagaaaggcctggcacacctgaagtagaagcagagagttcttcctgttaagaaaacaaaggataaaattgctatattcacacattatccaggtatattaagatctcataaaggtcaaagttaaggaattaccaggggtttctctgcaggaggtccttcatgttttagaaacccatcaattaacttctggggactgccacaggcccctggcagagtttttgcaggactgttaagcagcttgttattcaaaggactctgaatcctttttggtgaaccaatggtttttttcttcttgtttcttttcttttctttcactgctgcctttagatgaagta

SEQ ID NO: 95465 - DNA, 1037 bp, Homo sapiens
aacagcttagactttgcccattatatactgcaataattagacaacagtgactccattactctttgtcttcatttttgttacatgccacttccaaggctcaccagatgcgctggctgactgctggtgagtgctgttctcgccctgcctttgtctttgatcatacgctgctttcagctccctctgaagttcagcaggaagggcagcaaatacctcagggtccacctagtggaaaagacgaggtcaaagtcaaacctgagctaattgtagatggtagctggtttctctttttcacaaaacagactttgttttcaaatctcacttttctgatctgtacgaattcttaacagttccccaatatcaaagctgattaaatcttcaaaatggttagagcaagaataaggaattaagagcaagaataaggaattaagagtactaacttaaagaaacccactacaacagcagaacctgggcaaaatgcactagtagaaaatgggaagcaaaacattgaaacagggactcaggttgttactgtcccccatgcaggattatacatctccgctctgttgtattcaagtgtggccattgatgtgtttgccccagatcagtgtgtttctgtcttagcatgccctcccccgtctcttccctgctgcttcagcgggaggctgctctgtgtctacatcctgcagatgcaggagatggagacaagcccactctcccctcccctcccctcccctccccagtggatgtggtgtcagatacagaggagaaagggaagtgagacaggtcctaagttggagcaggggggtgagaatattgaaactacagcagagggttcccatatttaacttacctgtgaaaatgctggaagggctattaaatttattcctgcgtcactgttcgattcttgaggttctggtatttgcaacaagactgtcccaactggttgtggcaaaattcctgtattacagccatttactggttctttctttttgtcgccatgtgactctgcttgctggacagcacagacttgctctact

SEQ ID NO: 95466 - DNA, 1366 bp, Homo sapiens
gctgttcatcactcccgccaatattttttgagaagtatttcatttaaaaaagataaaaatagtgaagtttccaagtagactgtcctctcttaatttttttttatcctaatttaaaaccttagttgacgagaacatcagtggaatacagtattccacttgtttggattttctgattttaaagatcttttggtatattttgggagaattggatactctgaagtttgagatgaatgaccactcactagctactttagaaattgtttttgtaataagtcatatagaatgctgtttgaatactttcatttacctttattctagaaacaggatccaggagatagtgaaaaggatttgctgaggattttgcttagctgaattcatattttcactttagttttcctagaagcatactctttattctgggttctaggttgggattcacgtgaatcagttggttccaactaatctgaacccttccacatgtcccagtcgcccatcagttcagtcaagccactttcctagtgggtcatactctgtccgtgatgtcttccaagttcagaaagctaagaaatccaccgaagaggagcacaaagaaggttggtggtcatcaatgtggttcttttttaggtgctgcttatgtccttggaaagacggcagttggttttaaaattgacacagctttatgtgattttaaaaatttatattcttcattatgatgaatcagtaataaagtttttttatttgtaatggacagaggattaaaggccctgcccgatgatctgaagaggctattttatatattttctttttgtagtatttcgggctgctgtggatctggaaatatcatctgcttctagaacttgcactttcttgccaccttttcctgcacatctgccgaccagtcctgatactaacaaggctgagtcttcagggaaatggaatggtctacatactcctgtcagtgtgcagtcgagacttaacctgagtatagaggtcccgtcaccttcccaggtacatttttgtagtcctaaatataagtacattttatactcctaaatataaatacaaaaatacaagtttacaaatgaaaatggcatttttatttcttcatccgtttaaccaagaaagggagaacgggccacttgtttgggtagatcatgatgttggattctaaataagcaatatttgggttgagtgaaagtgcttttgcaaagatttgccactcttgcaagttgtaaagcatagctgaaaggcagtcctcctgtggactgccattgtctgtgacagtggtcatcatgcagacttactgtattcagcaaggcagctttggtgattagtggtgaagtagaggccttatgtcgaagggttt

SEQ ID NO: 95467 - DNA, 1066 bp, Homo sapiens
tcaagaacattgtgtttaccattcacttgtgctttagctggaaaatatgtatttatttgtgcatatgttagctaaaatctacctttttctaaatttctcaacttatttttagttgacctaagtgtccattacggtttttaccttaaagttctagtgttccataatttttctttcccccttggttgccagtgtaactaatttggtatttctggcttccttgaagggagactatggcattcacttttataatcttctttgtaactgtttacaacttttctataactcttttaaacagttccatactactttagtactagtgaatacatatggaatgaagcttttgttttttaattctatcacttacaggactgtaactcttgaccaggcaacagataatgcaaaaataattggaaaggcgatgctaaacatgtttcatacaatgaaactaaatatatcagatatgagaggggtaagtatatagtaacattgtaaattctgactttgtgtaatgtatctctcatttttgaggcttgctctcaaaagggttattgctggtgtatagggactttatatgtaggtctttagctgctttgtaatacaaggaaaagagaaacaaaaattcttgacttcctccattttgacctccttcattttagaataattttcttagattcttactgtacttttccaaggtacccctgattaaccaggggctaatatacatgtcttccctgttcttgtttcctagaagtagatatgactgtgaggaatatgaatacataaattttgtacctttaagttcctttttaatcagaaacatactctgcatctgctgtatgatgacctagaagggagtgaaaccacaggcacatcaagatgcctttgaaacaggcaagaggcatcaaaatgtcaaaaccatagatttttgtgtggggttttttttttttgagacagtttttgccctgttgcccaggctggagtgcaatggcgttgtatcggctcactgcaacttccgcctcctgggttcaagcaattctccttcttcagcctcccgagtagctggggg

SEQ ID NO: 95468 - DNA, 1106 bp, Homo sapiens
gtatttgtatttaatagttgagggtataccaaacagtttttgttgttgtagttttacttttttgagacggagtctccctctgtcgcccaggctggaatgcagtggcatgatctcagctcactgcaacctccgtctcctgggttcaagcgattctcctacctcagcctcctgagtagctgcgattacaggcacccgccaccacgccaggctaatttttgcatttttagtagagatgaggtttcaccacgttggccaggctggtctcgaactcctgacctcagacgaatccaccagcctcggcctctcaaagtgctgggattacaggtgtgagccaccgcgcctggccacgtttctttttaatagatgctgagcgtgatagtgagtaaccaacatgtttaatattcaaagttaaaatacttgagaacaattattaggtatataggaaagtggaatggtagtttctccacgtttgtctttccatagccaaaagaggcagaagcttttcttctgagtctttcagaagaaattcaaagaagactagaagccactggcatgaagggtaaacgtctaactctcaaaatcatggtacgaaagcctggggctcctgtagaaactgcaaaatttggaggccatggaatttgtgataacattgccaggtaagctcacctcagaaatgatattggtaattatatttcagtacaggttgttgtaagtaatagaaaatgaagaaaaccaaggaggagtttgaataaagacctgtaaacccgttaatctggtattctgtagaagcaggcatcagcccaaggcattcagcttaggttaatgcacttggtttcagcgaggcccacacacaggaggttggtttgacggcattgctgaccttggcagcctttgcttggcatctttgggctgttaactttactgcatggacagaaagaaagggcaaggctgcagaccaaagggactgctatagtttcgggacttggtgaaacttttttcctgaggaaaatttcaatgtagttcttaaaaacaatgatacaggccaggtgtggtggctcatacctgtaatcccagcactttgggaggctgaggcagctggatcactt

SEQ ID NO: 95469 - DNA, 1042 bp, Homo sapiens
taaaactacaacaacaaaaactgtttggtataccctcaactattaaatacaaatacccaccttcccaacaaagtgaaagtaatgagtacttttaaaagatatttttcctttctttccttttttttttttttgagacagtctcattcttgtcccccaggctgaagtgcaatagcatgatctcggctcactgcaacctccgcctcccaggttcaagtgattctccttcctcagcctcccgagtagctaggattgcaggcgcctgccacaatgtctggctaatttttttgtatttttagtagagacggggtttcaccatgttggccaggctggtctccaactcctgacctcaggtgatcggcctgcctcagcctcccaaagtgctgggattacaggtgtgagccaccgcatagggcccctttctttcttttctatgccatcactgacttgtcgaaaattcttttgtaactatgttaataagttctgctaataaaatgtgtgttccaacactgtgcttacagcccaaacatcatctatctccatgcctaaggaaacaaaactcctgaggtccacagtgtaggcacagagggtaattaactcatcacatttcaaatccttatgatatggtgttgtttgtacatacaaattcaagacatatccagccgggcgcagtggctcacatctgtaatcccagcactttaggaggctgaggcgggcagatcacaaggtcaggagtttgagaccagcctggccaacacggtgaaaccacgtctctactaaaagtacaaaaaattagccgggcgtggtggcgggtgcctgtaatcccagctacttgggaggctgaggcaggagaatctcttgaatctgggaaacggaggttgcagtgagccgagactgcgccactgcactccaccctgggcaacaaagtgagactccaccctgggcaacaaagtgagactccatctcaaaaaaaaaaaaaaaaaaaaaaaaacatatccaaatccataatctgaaggaaaatggaaactactcagccatctgtgct

SEQ ID NO: 95470 - DNA, 1351 bp, Homo sapiens
aaaaatgtggctgataccactgtgagatttggtgatgaccgaaatcataatagatcccttacatttcgtgagttggttagtatgtctgtaagtcacactatagacttgtttaaatgacagttgattccttagttgattttgtgactaagatacatatcttggtattattcactaataaagaaagtgacatttttgataacttgagttatacatattttaaaagtttctggttcatctatatgtggagtccaaattgagaagtagagtctagaaatacatctactagcatgattttgcaccaaaaaattcttcagcctgtggatgcttcagttatgttgcctaaagactttaaagattattttaaactagttgttttgtgcataaatggtgggtattttgtgttaataaacttgttattagtagcttattctgcatacttaactatattccctttcctaggagttggacattcaatggaatctaagttggcatctttgggaattaaaacttgtggagacttgcagtatatgaccatggcaaaactccaaaaagaatttggtcccaaaacaggtcagatgctttataggttctgccgtggcttggatgatagaccagttcgaactgaaaaggaaagaaaatctgtttcagctgagatcaactatggaataaggtttactcaggtactgatcattgaacagattttgccatctgttgctctttatatttttacatagtcctacctctacaactaaaccattagaccctcaatgcttgaaattaagtcttaaaactgttgtatccccagagccttaagaaggccttttaaggcactgtgtggtaaggtgtagccccagataagactgagactgaggaaacttagctcttggggaaatatactaaaagattatgctttggaggccagttattagagaacttgagattataattattctaattaacagtgaaaaaataaaaaagatgagaaaaatatttttaatgttgaaatattttttaagctgtagttaaaattaagtttcagcaaacccctccttatgcaagcttttggaaagctgcagcacagatggctgagtagtttccattttccttcagattatggatttggatatgtttttttttttttttttttttttttgagatggagtctcactttgttgcccagggtggagtctcactttgttgcccagggtggagtgcagtggcgcagtctcggctcactgcaacctccgtttcccagattcaagagattctcctgcctcagcctcccaagtagctgggattacaggcacccgccaccacgcccggctaattttttgtacttttagtagagacg

SEQ ID NO: 95471 - DNA, 1037 bp, Homo sapiens
tttgtcaggaccttaatgttacatttttgttttgcttctattcagttttactttaggtatttctcaagtagcaagattctaagaaacaatgttaaaagggaggatgatgaaattgactttcagtcctttaaataaatgattattgaaatagtttactcctgggctaaagataaaagttttgagcttcgattctcctatgtcatgctgcaggactagcgacagttttctgagtttattaaacaagtacttttaaaagtataaatagaatgtgtgtgagctgtattaggaaaaaggaaacgtaaagaaggattgtgttttcaattaactccactcatggaaaaaaaccttccatcttaacctttctcacctaaggggcaggatgttcagttatttcatatttttgtgtagttacctatttattataaagtgcctctgtcagctttgtaaagtcttccatcttcatttatagtgaaagttttaaaattcatttgttaaaagtagatttagtggcatttttagatgcctatttttaagcctaataaaagtatgtccgaactaacttagaagtttctgttaacaggccataaatattaaacgacagaaatggcattttatggtaggttagttttaaagcttcctgacccccgtagtatataacttaaaacgatgtattagtgtcagaaatgtgtaatatgacatttttgatggttagtttcacatttaatttgagaatactttataaaatcaaactagcaaattactgtagtagacaacacagtttaaacatttttaataagaaatcttactgaagttttatataagaaggaactggtatatttaaagttgcatgtaaaatttgagttttaagtttattacactagccatctgtattagttttctaggggtgccataacaaagtaccacagactggggtgcataaacaacagaaatgcgttgtctcacagttctggaggctggaagttcaagatcaaggtgtcagcagggttggctctttctgaagcctctgcttggcttgt

SEQ ID NO: 95472 - DNA, 1002 bp, Homo sapiens
aaacaaatcctttttgtggatagatcctatgagatgattttttaaaaagtatgtccacatgcagagagtgtagataactattctcagacaagcagttgggatgactggccactttttccttctgtattctaggcctgctacagtgagtggaatttaactgtgatattttggttttaggagagtagcaattactgatttgtctaatttttctgttccttaaaggattctcataaaccattagattaaatgttttgacagttcaaattcacccaccggttttcaactcttcaaaggtttatagaagtattgtcagtatagagaaactgaaataataatttatgctgtgtttttgtttttttgtgtttaaattttttttgttggttattttactcctcaaacattttcctatccaatatgctgtattttggtagttaataaggagaaagagaacacactaattaactttgcagttaaaagttgggtgactaaaatggtacttcagccaattcatttaaaatgctttgtgaggaaatagaaaaaagagaggataagaagactattttgcaacattgggtctaccagatggtggctgtggctgtgattcgttgcctttgctctgtgttgatagctacactcataacattgaagctgtcagttgtgatgaagcgctggtagacattaccgaaatccttgcagagaccaaacttactcctgatgaatttgcaaatgctgttcgtatggaaatcaaagaccagacgaaatgtgctgcctctgttggaattggttagtatctagcttatcttgtactcaaaagagttgctttgagattcttgaatatcagttaattttatggagtttttctttttattagcttcctctcacttgtaaaaccgtttttagcattgcttacaattgtgtgacacacgagataagtgctggaaatataagtaaatggttgataatcttcgcaataaataagttagaatatttcttacttattct

SEQ ID NO: 95473 - DNA, 1775 bp, Homo sapiens
ctataaacatatttgggtttctttttttgagatggagtttcgctcttgttgcccaggctggagtgtaatggcgcgatctcggctcactgcaacctccaccctccaggttcaagcgattatcctgcctcagcctcccaagtagctgggattacaggcatgcgccaccacttctcgctaatttttaatttttagtagagacagggtttctccatgctggtcagggtggtctcgaactccccctctcaggtgatctgcctgcctcggcctcccaaagtgctgggattacaggcatgagccactgtgcccggccttataaacacatttttaaaaaatgtgttatctttaatttgtaaactcagcttttacatgctgaatctatatatctggcataattattacctgaaatttacccttttcaacaccagaccttttttctgctttctgataaagtttctaaactattttatgtttctacatatatgtctaaactgttaggtatctactttcttcattagtggacaaagcctgttgaccataggtcatccttttctaggcaagtgcaaggttgtccccatggaggtcatggagtttgctttatttgccatcctatacccagcacctcgctaagtcctcgacacatcaagaattgttttctttacaactctgtcattttccttcctcttaggtatttcttatctactagggacttagcactgagaccatttataatattactatttttataaacataaaaatgcatgtgattttgcatctactgctgagtaacttggaggactctttcttcttggctctcatggtctggatgttgggagggtgccagaggcctatgagtaattggcaactgtttgtatatacgtttcttaaaacaaggcacgtctccatgctgtgtagtaaatatttattgaacatatatatagaataaccattatcctattatataatatgtaatttggtgaaacattgctttattattttgcttgtttttactataattttttttcttgattctttacagagtgataaaatagaattttactaattatgtataattccataattatagttttgtggtgaatgctccaaatgtcaaaggtaatgtggggcactgagacacacagatttaaaatttaccattttcaattaggtccctcaaagttctggaaccctggctcctgcccagagtgatgtcctaccatgtacaatgctgttggcatctcaaccactgtggagccacttcaggagcatggaattggtcaattgggaattgggtggtaataggatgagtacattttgtctgtttgtcacatagcactgttttgtgtagttcttttgtttatattctttgtctttgggggatgaaccctggccaaactgtgccttgtattaggggaagaaaacctctttttgacagcatattcctgctctgtggtggttgtgatatcaccagcatatggcatgctggcatctctgcaaaggggccagaggtatgagttttaggagaaagcttcagatacaagagccaaacctggtattttaatgacatagttggcacatctacatgtgtcatttacactattcagacagttgtgacttttgggggaaaacaaggctgtaaattttaatgcctatctttaatccctaatgagaatggagttaagtggaaattataaattagtggcatggggagatatcaacatatttgataaatatttgagttgaaaacttcctagaataacctccattgtgttttgttc

SEQ ID NO: 95474 - DNA, 1034 bp, Homo sapiens
tttaacttgaagaaaaaaaaaatgcagccgtaagatttttgtcccttaattgtgattttctgttttctagaaggctattcctagtgaaagtttctagaaaatagtttctggatacttgttttgtggccatccaacaggttatattttccttatctgaggaaaatttttttaacaatttgcataagagaaatgttactgagtttggagtggggactagattgtggggatgatctgctcagtttgatgcactggtgagttttcactatacatagcttaataatggggccagcaaaggatagaatgtgaatatgaaatggtagaaatacaaagtagaatgtgtatatgtgggtcacagtttgcactgctgttagtagttggcctatacttacagtagagagcaaactttatatggaatcagtgagaaggtagattgtacatgaataggtaacgatacacagatatcctagaatcacagatctttaaagtcatataatttctaaaccccattttcttgtgcttttgtaaggacccactacctttcttactttatggatgtattttagtatgtagaatggacagtgacagtggtttgatggcaatttttttcccccagagatgaagtcttgctcttttgcccaggctggagtgcagtggtgctatctcggctcactgcaacccctgcctcccaggttgaagccgttctcctgcctcagcctcccgagtagctgggattactgctcccgccaccacgcctggctaatttttgtatttttagtagagatggggtttcaccatgttggccaggctggtcttgaactcctgacctcgtgacccgctcgccttggcctcccaaaagtgctgggattacaggagtgagccaccgcacccggccagcaattttttaatattgttgaatccaacaccaaatacaactgtctgaacaaagcatattgccagacagaatatgtcctctgtgctttaaatgtaggaataagctgtttttgcagcatacacttaacgaagttttggtaatt

SEQ ID NO: 95475 - DNA, 1322 bp, Homo sapiens
gggagtaataattaaaaagagaagtcttcatttttttttccttgtcaaccaaacacagacatttttacctatatcacacagcaagcccttacacattgctggcaagtgttaaagtattcaataatttcaaatcgaaacagagtcttagatcagttacatctttttttttttttttttttttgagacggagtctcgctctgtcacccaggctggagtgcagtggcaccatcttggctcactgcaagctccacctcccaggttcatgccattctcctgcctcagcctcccgagtagctgggactacaggtgctcgccaccacacccggctaatttttttgtatttttttagtagaggcaggatttcaccgtgttagccaggatggctaactgacctcgtgatccatccgcctcagcctcccaaagtgctgggattacaggcgtgagccactgtgcctggcctagttacatctttttagtcttgattcagagttgtggctattcaggcatctaatctgaagaaaaaatatttgagctcagcatcgtctaatcataatagttttttttaaatttgctaattattttatttaaagtatatttaagttaaaaagcattaagttcaaacgtgcatgcttatattttaaactgttttccattcatgacatgccaaacttttcctccccagctaactttgcctttctcattaacagaattatgttttaatggttttcattgtcacttgatgctgtggccaaggaattgaaacttactttaaatgataattaagtcaaatacaaatacgttttgaattgttatactgctttttattaccacaggcactctagagctgagtttatgttgtgctcagtaggctagtctctttttctctactaagttaatgaatggtggcctggacttcagatggctagacagttatgtgcagtatctggagggtgtgatgaagcccagaaatattcccagtccttgaatttcgctagttggtaaaatgcgagctccgtttacccttgctaaggctgcctctgcagggtctctccctttataccttcatacccagtcccccaccaagatgaatgctggctggggagcagggctgcctccaggtgaaagtgtcaccagctctggtggctttggactccaggagccacaattgtgtgtaggcactaggcttctgttgggtgtttggatggtgcatttatatttacccacggtaaatataaatttacctttataaatttggtcaagcttcatgccttgcaaaataattggggtgactatatgaggacagaatactatatagtgagcca

SEQ ID NO: 95476 - DNA, 1469 bp, Homo sapiens
aggacaaatagcatccttagtcctttttgaaactttagtttcttagttgtcgtatccaaaaactctttaattagccccgtgcaaccagggtatctcatccatccatgacttcttttggaggctgcttcctgagcagtactcagtagtcacacttctcattgatgatctcattgtttggaacaatttatgctccaaatttcatggttggggccttttaccccttcctggatttccaggatacagatgttttctatcccatcgacaacttcagttttcattctaaagaacaacagttttaaaaatcgtattagtcatagatttattctcagcgatttctttttcacagacttgggtcctggcctctgatttctccaaccgttcctccacattctccatgtgcccgtctagtttgtcaagttttgatgagcagttctctactttgccctccagtgaggacagtgtgtccctgcatttccctgaatctcacatgaagcaactcactccgctcgtggagggacccacgcactctgctgcactgtggaacaggtcagccagcccaatggagaggaacacgatggtgctgcctctcaggccagggcactgggggcgcatggaccacagagactgttctctcctcaagcataagttttctgttattttcaagacaatatcttagataactagcccttcagataccaaagtcaggtaattctccaacttgtaaggcataactcatggttacaccttggaaagacagttggttgtggctgttcaagcttcagcactcctttttttggggtctagtagcaccctctgttgaagtgtgatactgacagtcctgaaattcttacagtttttcagcttagatgaatggactattaaaatttatatttacccttttaaaaccctccagaaacactgggtaatctgcttgggattctgtctttaatttgtaatagtatagctagcatacgttattcatatgtcagaaactagctcacattacacactctgctgttttgaagcaagtaggatttgacccgagatgttagtcagtttgatttgcatttatgctgtgtatatatggttgccgaaatccagaaatgcttgtatgggttgcatagttagatgaaagatgctgatgattattggtcaaaccaggaagagttgtttaagcccatgaagccagagactttgccagttttcctggtggtgcattaacgtggctgacttcacagaacagtgagtctgaaataaacaaaagagaaatgctgggtttcttagttatgtgttgttacagtgcactcaaaatagatttgtctggaatagctgaagtgatatattttgggtttgttttactcatggtacttttgtttataatagtagagatgtggctgaggttgtggttttagaatgtgatttttttttttacagcatactcttcctggaacctaatagtagtatcccaa

SEQ ID NO: 95477 - DNA, 1125 bp, Homo sapiens
taaacaccagtaatcattctccatatgctttagtgaacctgttatgagaaataaccttgttgcctctcttgactttttaattttggatattaataagcaaaatcataagttgtactagtcataatacttattaagattttcatgtgtctattgcttttttcccctgagtaaattcactgagaaatgttttcttagaaattaaattttttttggtaactgattagttttctcatggttgttttgcaaagccaaagagaatttttaaaattagtttctcagaaatatattacccagaaagtagtcagaagttagatatacagtgaaatggaaagcatgcagtttagttttattgcagttatttcagtgcccttgtcagttataaaacgttgggcttgtcacaatgactccaatgaaattaaggcaaaaggaaagccagcgaacatctctgaggaccttttttgggattatagtctttttgttggttttgatcatctgtttatgtggtcttaagtatgaaataacataattgcagatacatatttatgctttgtgtgtacatttatttccaagttttataaaggttttcttggtctttaaatcttttcagagatttttgagattctagaattttgtgtgtcatgagtagatgtggagtagctgttactgaacttgttgagatttacttgtattatggtataggtagtttcttaggtattggtagtatggtttttgtggtaggttggtttttctttttgtattttctgtgtgctattaaacagatgaaatcttaagttctagaaaataagaaatagcttaaggaagtacacaatacttgtcatatattaggcatttatgaaatactaaagaatgctgaaagaagaaaaaccaccatgtatatacttgcagtagcatcttcagtgctcagagtctctctggtaggtagtcttgttacacacgtccttttatcggcagcctacatttaaaattttaaccttgacaagctcacattccttaggagtagcagagagctagtcctcttttgtcttttcttctgttacaatcttactataaatggcttattaacacagtactgtcattggttacttgtcttcatcagtttagtca

SEQ ID NO: 95478 - DNA, 2072 bp, Homo sapiens
caaaaaaaaaaaaaaaacaaaaaaaaagttgggggagaattaggtacatgctatcacagtcacagtttggtaaatggagtggtccaaaactgttaggggatatctgtttttggaagcctattataaagactgaccctcagtactaatatttttaagcctgagaaaaactcctttatgagatcagaactttttacaagcccagggttctttttccaggatttgtgtatcttagaggaccagacgaacaggctaaggatgagactgataatagaggaaagctctgcttgtgcctggattagggttaaaatgaccctgatgaatctctttgtagctcaggatgattagaagcttttgtccttaggtgaggacactcacctttatctccttaaatgtggtatatgtcattcagctctgatctttaatagtatttaatggcataaggataaaaatgtacagatttacattttatagactgtttttaagtacttagaacagcaacatggtagtttaaaggctctgaaatcagactgcttgagacagaatcacagctcaaccatttaataataggctatgtgacttaaacttttagtctacaagatggagatgatacgattacctacctcatagttgtgagaatttaaataaatacatacacataaacctcttaacagcagtgcctgacacctaccaagcactggataatagtagtcacttttattgttgttattttatccaggcgcgtttgtagattgcatggaatagtgatcatcaaaaaaagttttacttagcttcatgtaactaaatgtatgccaacacctttgtatttttataaaataatcagcacagtgaaataattttaagatgcactttttgactaattagagacttaattaaatttggcttctcttgaggtgatagaaataatctgtactcaattctggttttttaaaaagactccattctgggtgtaagcatgttttaaatataatttctaaaattaactagacctgatgttttaaatagtaaaaattagcttggggtttgaatgctgtctttttccttctaggagatatgtcagtattgaattctcccagacatcagagctgtataatgcatgttgatatggattgcttctttgtatcagtgggtatacgaaatagaccagatctcaaaggtctgtattcttgcttatgttttaagaaaactgatatattgttataaatatatattcaaagagattacaaaatctttttttaaaaaattatgattttccttgggaaaatcggttcttccaaattttctatattcgattatcagggaaggtatagggaaattagagtttttctttctccctatagggatcttcagggaagaatattcatcttcagctgaaggatatgtcatcgaagactaatgtaggcaggatctgtattgggcattttctaaatttttatctgtatttattccttgttaatgaatggaaattttatggtggctcttgtctttgagacttgggtcactatgctttctcttgagcaaataacttgattaactgtcctgatgcccatgaacatcccaactttttgattgtaggatagttttgcattattgaatattgctaaaatgtgttaagtcgtctggacagtctttgtcttagtgaaattgcagatatttgtgaactagtcagtattttaaaaagcatacattctgggtttttcagtgtttacctctgtctgaaagagataacttagtgttttcttctgagaatcaattcttcccttaaataaggaatcactatggcacagaagctgctgtgttaaaaccaggactttatttttgtcatgggtagtagttcctcagctctgaaaggagtttttagaatgttaaataattgattttcatagagtagctttttaatgcattgttgattttatttcttggtcctcagaataatgcattaagtaaatatatatttatccctgctattgctttacaaatttatagtaatcttgtaacttaacatgcatacaaaaggaaatgatacaggaaagtaagtttatactaaagcaaaa

SEQ ID NO: 95479 - DNA, 3276 bp, Homo sapiens
tgtatgttaacaatgtattttcctgccaatatatggctttctgttgcatgtgttgctataatgcatgtaaagggtctgaatgtttttgacacaaaactagatgtaagactttctgacgtacatcacttttgttgttttctggggtttttttggggggtatattcagtacattttgtacatttctttgaaatgctcatctgtgacttcttgctcccttgcattctgtttatctcaagaggctgaactttctctgcatgtgacaaattaggttttctttttttcttcttttaatcatatctactttgtctttttccccatcactggcatgatcatctgtgagcatggcatctactcacagttgcctgtcacattccatatgatgtttagccagagcctgagctaacccagaaatgggtgatcatccagcttgtgggacttttctgtgtagtcaggctctcattactaataaaccaagttggtattagggtgaggggctttaggtggaacctgataatactgtggtaatttcacctgtggcttactactctgtagggcagcccttcatctggagcctgcgctgtaattgaattaatgctatggacatttggacattcctaagtagaatgaattactgctttgtaattcaggtttttgtttttgttacttagatgattctcgtgaatgcatttctaaacaaacgtctagaggagccaggatgtgactttagcataacatttgtcatgggttctgcatttataaagctgtcatcaggaaacttggtccagattgccttgtaccaccctggcatctaaatatgcatttcttagaaatgaagtgcaatttcccttctcagtaaggcaagcgtccttatttttctaggtgtaaattttactgaattacccccacacattgacatggctttactttttgtctatttgtgcaacagttagctcattaataggttaatcaatatagtcagtttttttcctactgaaaccatctggtttcgtattagatttaatgtgttgaatagtacctttcataaaaactaaaactaggaataagaattcaagtaaggtttttaaatccatttttatgaaagttatttgtagtatattaattcagcagatatttattgaccatgtagtaaatgccaagcactgtgcttcagaactgggtatttacagcttatagattccaattaattttttatgggaaaaataactgaaaagttttttgggtttttcttcagccatgagaaatgttctattttatttcttctttgggactatctgaagtgaaaataaaaaacaaacaaaaaacacctaaagggctgttaatattctagaatttttctagttatcttgctacttttgcaaagaatgatcttttgtcaaatcagaatataaagtttgtggtttaagtttcagggtttttttttttcattgtcaatattcaatataagaattttctgtttttaaagggggaaataccaaactgtgtaccactaagaaaatgatgaaatgaaaaaattgttttaacctaaaagtcagatattattaactcaaaaattttttcctgctttagaaatcacatcgttaagaagattgaaacggaaaatgaagtcaaagtcaatggcatgaacagttggaatgaagaagatgaaaataatgattttagttttgtggatctggagcagacctctccgggaaggaaacagaatggaattccgcatcccagagggagcactgccatttttaatggacacactcctagctctaatggtgccttaaagacacaggattgcttggtgcccatggtcaacagtgttgccagcaggctttctccagccttttcccaggaggaggataaggctgagaagagcagcactgatttcagagactgcactctgcagcagttgcagcaaagcaccagaaacacagatgctttgcggaatccacacagaactaattctttctcattatcacctttgcacagtaacactaaaatcaatggtgctcaccactccactgttcaggggccttcaagcacaaaaagcacttcttcagtatctacgtttagcaaggcagcaccttcagtgccatccaaaccttcagactgcaattttatttcaaacttctattctcattcaagactgcatcacatatcaatgtggaagtgtgaattgactgagtttgtcaataccctacaaagacaaagtaatggtatctttccaggaagggaaaagttaaaaaaaatgaaaacaggcaggtctgcacttgttgtaactgacacaggtagatacttattaaaattgtcttcttaagaaacagtcatgcttgatcattttgctcttatgctattattggtatttctggtcaatatgaagttctcataaaagtctctaagtatgtcaaatcatgtaagttacagtaagcataacatagaaagctaatttattaaaatatttttaaaacaattagatataattgtggctgactgaaaattttcagagaatttaaacagtaagatggttgggattctgagcattcattcctcacgtagaccttatcagttggtgaagttttgaactgtgttaatataacatctatccagtgcttaaactcctgtaagaatgaaattggtttgataagagtaattgttaatttctagaagcttgcatcataatgattttttaattttgacatagagctgttgtaattaacagtggtaaactttcagtgagattatttcacatcttaagtacattggttcattgtattttgttttttaatacttttcttgtcatcaaaaacaaatgcacacacagtagcatactgtttttctgggccagtcattataaattagtatctggtttgaaattttagttccttttacagattataggatttttttatggggagagacctcagagattaatactctataatttatagctgtggaaactgaggtatagagagaagctcatggttctgtcctagaaagtgatagagactctatgtggggtgttttctgttatgttttactgagtttgatgtattcctatgtgcttttagtcaaaaaatgctttttggtatttatgaaatatttcagaataatatagatactagattatccttacatcatgtcttggccttgttacctgaaggttatttaattcttaatgcttctaagaactatgattaattagttctgtgaatgggaataaaatgagaaattttgttattgtatgaaagcatttggtagatactggct

SEQ ID NO: 95480 - DNA, 1932 bp, Homo sapiens
aataaaaatcatttgtccatacaacctggtgcagtgcctagcatgttgtagaggtgtaatatataagaagctactgttactattttatttttattctgtaacattagcaattattagaaaattccaaaaattcaaaagtacattactatctctagaaagtcaaatatattggctgggcgcggtggctcacgcctgtaatcccagcactttgggaggccaaggcaggcagatcacgaggtcaagagatcgagaacatcctggccaacttggtgaaaccctgtctctgctaaaaatacaaaattagctgggcgtggtggcgcgcgcctgtagtcccagctacccgggaggctgaggcaggagaatcgcttgaacctgggaggcagaggttgcagtagacaaaggttacaatgagctgagatcacgccactgcactccagcctggcgacaaagtgagactctgtctaaaaaaaaaaaaaagtcaaataaataacattttacatattaaggattttttaaacctggagggataaagtcaaaggctcgtccctataacatcccactgattccttcctttgcactgtggtctcatgacctaaccactgtctatcaatgatatagtattgattaaaatggcttttaggtatgtgtctcttcaaaggacttggtcttagtatatgaagttggatcactcagagttgagctgtgttgtcactagagctagagtttttatctgggggcaatagttaggctttggagggaatggggaatttctgtggacaggaggagagttgaggggaaagcgatcttgctggggggaattgatttacttagaaaaatggtgttttccggccgggtgcgatagctcatgcatgtaatccccccactttgggaggccaaggtgggtggatcacgaggtcaggagttcaagaccagcctggccaatatggtgaaagcctgtctctactaaaaatacaaaaattagccaggcatggtgttgggtgcctgtaatcccagctactcaggaggctgaggcaggagaattgcttgaacctgggaggtggaggttgcagtgagccgagatcacgccagtacactccagcctgggtggtagagcgagactgtctcaaaaaaaagaaaaagaaaagaaaatgctattttccattacagttgcttgttttgcacgtgttctttttgccagatgcgcctagggagatcataagatagaaaaagcaacttagatagttaaaattcactttaatggattttatcttagtctggactgaggtttaatcatttgtctttaaataattaagagtgattttggacagcatgattatatatcctatgggcctcattttgtatttgaggagacagggccagtggggctcactgacttgcccaagaacagagtaggttttagagtccaggtgttctgaatcctgtttgtgtcctctttttaccatttaattaagcttgttatagatggcccatgtggaaatggatcagtgttggcatatatcttaaatgccaggagtccattatgtcattgtaacagggaatccttttggttaaatcatggcactgtttttattcacactctaatccctggttgatctcttcttagctgtgttttaatgagattttattatacttaaaaattttaacatgtattagctatttaataaacgttacatactcttctgaataattagtttttgtttttattcgagcagtttgaaaaggaactgccacttgtaagtatgtggggtgttgctttaatttcagttccctgatgtctgtatgtcagtagatctgagttaatgtaggcatggttatagggccctgactttgaagaggcaagggaatcctttcatgaggagcctgtgtacattaaagtgtgaaattattttactaaaacctttgttttgtaaa

SEQ ID NO: 95481 - DNA, 2320 bp, Homo sapiens
tactaataagccctacagtaagtctcctttttagtaaatatgagtaactattatttatctgactcctcttgtatactctggaggagtggaaggattagtctttgtaaaatgattcataaatgggtttatagttgttaatttttaaaaacacaatatcaaggtcatatgctaagtatagtaaaaaatgtaaaaatatttgtactgttattagtatttgattcattacttgaggtccctatttgctctgctaggcacttcttagatgtttttgtgttagttggttgtctggcagccagggaagggggatgtactaaaagcaacatagctttctcactttgtgatttacctcccagctttgtttactggcaacacagccaaggagaaggtgaaccaatgacattcttaaagttgacctatttaaggagttattcattagggttctacttcttacacataagactcttaatatattttaatataaattttgcagatccttccgctgaggaattgagaaaactaatgatgttgcatggaggtcaataccatgtatattattccagatctaaaacaacacatattattgccacaaatcttcccaatgccaaaattaaagaattaaagggggaaaaagtaattcgaccagaatggattgtggaaaggtaagtttaatttattaaatttaattaataaatttttaaagttagaatactttttatttatttatttttttgagatagggtctcgctttgtcgcccaggctagagtgcagtggcatgatcatggctcactgcagcctcaacctcccaggctcaagcagccctcccatctcagcttccagagtagctgggactacaggcaggcgccaccacacctggctgattttttgtagagatgggtttcaccatgttgccgagactggtctcaaactcaaacagtcctccagccttggcctcccaaagtgctgggactacaaccactgcgcatggcctttctatttcttttataaaattgtaactaatatattgcctcctgattgacagggtgaaaaataatgtcttaaacaacactaccgtttaagctcatgttgataatactatagcctaggatttggcatcctaataaaagtagcatgttaatgtgtttgccaggaattaggggtgatgactcaggaaagtgtcaggaagcagttatgggagaaggtggagcaagcgtgttattcaacaaatatgtgtgcacctcttaaagactaggcagtgttctgtgttcttgggaaataacaatgaacaaagcaaagatcccttcactacctcatggagtttatattctgttgggagagaaagaatgagtaatgtatgagtacattataccatgttgtctatcacataggtttttagcatggtaatacatcaagataatgtggacctagaatgctaggagtagggggaaaggagggagtacagtcgcagtattatttactgttttttaatgattatattgtggtttctctgctgttggtttggaaatgataagttgtaaatcagtggtgacattcatattgacttcctaagtttaaatatgtcatctgaaaccttggagatgagctaaaacttaagtggtttatatttttaaatgacatgaggtatgtaatacatatgagcaattactgatttataaaagaagtaaaatattaaagtagtaattttatgtatggatagattataatcagtgtatgagagattgcttatctttttaagtcagttgctgaattttttttctagttcttgcttttactaattataacaccctccattaactgttccacaaattaagtattaactcagttcctttgtatagtgtatttagccgcataaattcacggagaagcagcgtggtggaaaaggctgggcctgggctctggagacatacttggcttcagaacttccaaactcggcagttcagtatccatataacctggtataattttagaaactttatgcttggccgggcatggtggctcatgcctgtaatcccagcactttgggaggccgaggtgggcagagaccagcttggccaacatggtgaaaccctgtctgtactaaaaatacaattagctgggagtggtggcttgtgcctgtaatcccggttacttgggaggctgaggcaggagaatcgcgtgaacccaggagatgggaggctccagtgagctgagatggcgccactgcaccagcctgggcaacagagaaagactccgtctcaggaaaaagaaaaaaaaaaaaaactttatgcagtcactcaggaccttgtttcctcatttgtgaaa

SEQ ID NO: 95482 - DNA, 2419 bp, Homo sapiens
ctttacatcatcattggtgaaacatttgttcatatttttttcctcattttctaattggatttagtattttttactgtttagttttgatatttcattatatattctagagactactgctttgtcataaaagtggtttgcaggtattttctcccagtctgtagtttttcatcctcttgaaatggtcttttgcagaacgtttttaattttgatgagatctgatatgttgatctttccttttatggattgtgcttgcaagtctaagaacttgtcactttggtgctagatcccaaatgttttcttctatatttttagattttatagttttatgttttacattgaagttaatgtttcattttgaggttttacaattttttttttttatttgtggatttccagttgttgcaacacagtcagttaggcatattttggtggatctgtttctgggttctctgttctcttccattgatgtttgtgtctgttccttcaccagtaccacactatatcaaatactgtacctatgtggtaagccttgatatcaggtagagtgattgctttcacttgtttcttctttgtcaagataattctggctattctaggacctacgcctctctctctcttttttttttttttcttgagacagggtctcactttgtcacccaggctggagtacagtggtatgatctcagcttaccgcaccctctgcctccctggctcaagcgattcttgtacctcagctacccgagtagctgggattacaggcacatgccatgatgcccagctcattttttgtgtgtttttagtagagatggggtttcgccatgttggccaggctggtctcgaactcctgacctcaggtgatttgcctgcctcggcctcccagagtgctgggattacaggtgtgagccagtgcacctgacctatataaatgttaaaataagtcatttatccacaaaataccttgctgggattttgataggaattacattaaacctgtagatcagttcggggagaattgacatctttactatgttgagttttctagtttacagaccttatatcccattttatttttctttagttgattgaacagatatattttggatgctgcttgtgggttaggaactatgtttgaaaagagatagcagttgatggagaatgtggattttgtgatgaaaaagtaatctctaagccttagacatcaacagaggagggtgagtgccaacacagaagaggaaacaattgcctttgggagtgggagtgaatacttcataaaggaatcgaaatgtttagcttggtcttagataaataggcattttccaaatgaaaatggagaaagacattctagtcctaattctgacctacattttcaacctcatgttcttaaattttgctcaacaagattaccctgatattctagatttgtctttttacttttacagttctgtgtttctgtttgttcttttgcctctgaggaaaaactccttccctcctcacttctgtgaactggaagtatattcattcattaagatccagatatagttaggttttgcctccttccctgtctaagccagtccatagtagtagtattttatatagagagatatataattcatagcattattgctagaaacatttattttgacacctggattttgtcttgtgttgttaggtcttaattctatattaagttctttggcgttaggaagcctgttttatgtatagtaatcccttgccaaacatggattagagataacacctcagggccttaaatttgcagttccttctgcttcctcaggtcttcatcattcagatctctgctcaaatgttacctttttacggagaccttccctgacttcacctatctaaaacaggtgtactttgccctccagtcgctctctaaccccttatccaccttcctcttcatttatttgcacctaaaatggtattacttgcatgacttatttttgtctcctcagtggaatacaagtgctatcacggggcacagacttgagtcttgttcattgccatatctccagtgcctagaaccttgcctggcacattgtagatactcaataagtattagttgaatgaataaataaataacaggttttgtatttgtacatcagaatgttaaaatattttcactcagatgctaaatcaactcagtcttaaggaatgggccacatttgaggcctgcattgtaatctgggaggtaggctctgggcatgtttatttttgtgaaagctgcccagggggagtgagtgcttcagacttagtggacagtggttgcactttagtggtgtgagattgggacagttcatatggaaagaggtgttcaggttattttctacttcctttagtacatgggtaaaagaccaggtcttttgattttggcactgctgaagtttgtgaaaaagca

SEQ ID NO: 95483 - DNA, 2996 bp, Homo sapiens
tagcctcattaaaccatcattaaggaattttcttattggccttgtgcagtaggtatacaacagacgttacacaactggatctcttaaatgattgggccaccaaatgtattaaaatacactttactcctttatttacctttatttaacagtttaatagctgcctttaattatcggggtatgtgtttttagtgtataatggccagaactcccaaactctttacttgttccagcaggtgtatggattcagtttacatgtagtccagtgctgtgtgttaatgtatctcccagatttcctttaagggctgaagtctgttgggactggacaaaatgagcctcttgaaaacaggagaaatatttaacagagcatgtggtacttctgggacttgataatgagcacattgggtattcatgctcctcctgccttcatcagacttaaaaaagaaatctctcctcagggttaatcagtttaccaccttttctcggagcaccttgcacatgcccctaaaacgtttgtattatcttgtctctctgttgggacttaaccttttgacaacacttctgcatgtcttttaggcatcttttaagggtgacagtaaaaattcaaattgttataaatgtcaacaaacaaaaaccaaatcctgcagtatactaagaataaaaatattcataagaaaatatctgctggccaggcatggtggctcatgcctgtaatcctagcactttgggaggcataggcgggcagatcacctgaggtcagaggttcaagaccagcctggccaacatggtgaaaccccatctctactaaaaatacaaaaatagccaggcatggtggcaggtgcctgtaatcccagctactcaggaggctgaggcaggagaatcacttgaacccgggaggcggaggtggttgtgagccgagatcgtgccactgcacttcagcctgggtgacagagcaagactttgtctcaaaaaaaagaggccgggcacggtggcttacgcctgtaatcccagcactttgggaggcagaggccggcggatcacgaggtcaggagatggagaccatcctggctcacatggtgaaacgccgtctctactaaaaatacaaaaaaaagaaaaataataatcgggcgtggtggcgggcacctgtagtcccagctactcgggagtctgaggcaggagaatggtgtgaacccgggaggcggagcttgcagtgagccgagattgcgccactgcactccagcctgggcaacagagcgagactccgtctcaaaaaaaataataaataaataaaaagaaagaaagaaattatctgctaatgtgtgtggggtaaagtgtcatggtttaaggtgttgttaagtaaaaaattctcatagatcatatcagagctgatttgacgtggataatatataaggcttcatatggtaaccatttgatacacatgtatatagttactagaagaaaattatcttaatagaagtcatattaattttgttaagaataaatgtagtcatagcccaaaatgtagctgtttgtgttaaaaggctttgactttacaaggggtttcatttagcctctttttatgaattatatattttgctagccactgagccagctgccacttaatgtgagccatcatttggtcatcctggtggttttatagtatagttagttaagtaagtgttgccttaaggagaatgacagatttactattatagtttattatcaatgataatcttttctgcatcatttttaattgacttcttctagggctttggcagaatatgtgaatcaggctatgactgaactcttaagtgtccagtatgtaatagcaaagacagagtttaaaagccacactataggacaactcatgaagggaaatgttttgttagattgtcttatataatggtaacaagtaaagtaagcatggccatgttagttggatttggtgttttatgtaagtgaatgttaggattggtgctcaggaatgcataaagatatttttctattgaattttaaatataagagttacaatttaaacatgtgtaggagggtgttttatagacaaatttcacttgtaaagctggagaatggagaacttcagaaaaagtttacttaatattgtatactttcatcagttggacatttgaatttaatttctcattttcttgatattgaaataaaatatcatttagaaatacattatgttataaaattgacattttttttttcctccccaatacagaagctccaccatgaggcgaggtggatggaggaagcgagctgaaaatgatggctgggaaacatgggtgtgttttaaaagagtaaaaataattatatcgaactgtctagttatttttcattcttctgttataatgtggtttaagttgttttctaaattgtaaattactttagacaccacatctttgagttttcacagtgtattgaaagccttatgatgtttataaactttatcccctaaactttactctcaggaattttaccctgaggaaataaatatgcctagtgcacaataatttactatatgatgattttattgcagcattgctaataatacagaaaaacaggaaaacacataaatatccaataataagggattggtcaaataagttatctgtgtatagtggagcactgtacagtcattattcagctttatatatctcaacctggaaggataaccttgactaaaacaatgtgttacaaagaaatattttgtatgattatatgtttgtaaaacctctgtgctctgagttatggaaataagctttgaaaacaacaccccaaagttttaatgaataggattataccagttttaattttcttccccatatttcctgtattttctgaaaagaaacttcatagtgagcatataatattttaataatcagcaaaaataatgcagtcatttccattttgggaaaaaaacatcatgtacttctagccacctacacctttaatttaaagacctaataattgaaatc

SEQ ID NO: 95484 - DNA, 1038 bp, Homo sapiens
gtagaccatggataactgacttaaaataatgatgttctctgtgttatagttttcaaagggtttccacgtgtgtagtctcactcgattttcactctgtagactggcagagtagattactataacagtagttaatgtttattgaaggtgtaccctaaatgttaagggtaagggtacttttgcattcatgtattcactcttcatccgttttttaaactaattttttgaaacacagtaattggctgccctgttaaagttactggataaggagagattggcaggttattttaggttgtgaatcacagtttcagaaactgttatcacattcctcaaggtcatcaagttatgtggaattaaattgggagcctggtctgcaagagttcctctgaaaactagaaggcaatttttgtttacaagtctagcttgataattggatggtttgtcaatacagggcagtcacttcttagtgagtaggtttagtcaagaggacacattgtaattcaggaggttgcttggaacaggataaaaacagagggagtgtgttatttctgaaggatatttctgtcaagtagtggtatcctgattaaatgccctcctccgttctagggaaagtcctatttaaagaagcaaatcagtcatcttagtgtggagaacttttccctggatgttattacagaggcattggcggagtctctttttcgaagatccctgctgattagcagaaacagcccccatgcctggctaatttttctttctttcttttttttttttttgagatggagtttcgctcttgttgcccaggctggagtccaatggtgcaatctcggctcaccgcaacctccgcctcccgggttcaagcgattctcctgcctcagccttccgagtagctgggattacaggcatgcgccaccatgcccggctaattttttatttttagtagagacagggtttctccatgttggtcaggctggtctcaaactccccgcctcacgtgatctgtccacctcggcctcccaaagtgctgggattataggcgtgagc

SEQ ID NO: 95485 - DNA, 1840 bp, Homo sapiens
tacaggcatgagccaccaggcccggccttttgttttgttttatataccttggtgagagtcccttcaagatcaaaacctgactagtttgtgggatgtgcatgtctgtagtgcccgtacaacttcagcaattgtttgaaaactgtagccgtagacaatgatggtctgtaaggttgaatcaaaacaaaacccacaaacagctgtatttttatatctaaatgttacataaaaagctgtttgtgctgttaaaacttttaccattaaaggacagaataagagcacattggagcagactgttaccaaactttttttagggcatgcgtgctagcactttatgtacttagtcactcataaaggcaatacctggttcttgtaaattctacaaatggcctcccactactgccaattcaaagtaaaaaacaaacaaaacacccaggtactgctgtacagatttcttgaagtagcctttttcccagctttgcaccccacctgaagatcctgtccactgcagcttgcaggtgcctatacagtgtttccagcttcagaactacttttttaaaaaactcttttcttcttaattgtggtacgatacatataaaagtttaccattttaactgttcagtcacattaagtacattcacattgttgtgcaaccatcaccactatccatctccagaactcttcaccttgcctgagactctacctgttaaacagtaactccacccgcaaccaccattctgctttctgtctctgaatttaactactttaaatacttcatataggtagaatcatacagtatttgtctttttgtgaatggtttatttcacttaccataatgccttcaaggttcatgcaagttgtagcacgctttggaatttccttccttttaaggctgaatagtatttcgttgtatgtatataccacattttgtttacccattcatctgtggatggacacttgggttgcttccaccttttggctattgtgaataatgcttattaatatgaatgtacaaataaatacctctttgtgtctcaggtttcagtgcctttggatatatactcacaagtggaattacatgataattctatttcagattttttgagtaactgccatactgtttctcatatcagctgcaccattttatattcccaccaacagggctcgggggcccaatttcttcctatccttatcaacacttgttttttttttttttttttttttaatagtagctatcctgctgggtgtgaggtggtatctcattgtggtttctatttgcatttccatagtgattaatgacactgaacgtttttttgtgtgcttattggccatttgtctatcttctttagagaagtgtctgttcagatcctttttttatttcttagtggcgttgtgtgtttattattacagtttatggtaggagttctttatattggtaagtgtatgaaccccttatcagatatgatttgcagatattttctcccattctgtggattgccttttaacccttttttgccctgtgattcacagaagttttaaatttttatgtagtccagtttatctgtttttttctgttacattttccccaaaaagtcattgcaaaatccagtgtcatgaagcttttatgttttctcccaagagtttgatagttttagctcttatatttatgtcttttgtacactttaagtttttttttaacatggtgtaaaggtccaacttcttttgcatgtgatatccagttttcctatcaccatttgttgaaaagattgtcctttcctcattgaatggtcatgaagaggttcttttaaacacagatgaccctgggttggatcataccttaagc

SEQ ID NO: 95486 - DNA, 1584 bp, Homo sapiens
gtgtttgttgaaagcgtttttaaaactagatgtgtagaatcatacacatttgtttattttcatttatttatttttttgagacgaagtctcactctgtcacccaggctggagtgcagtggcatgatctcagcttgctgcaacctccgcctcttaggttcaagcagttctctgcctcagcctccggagtagctgggattataggctcccaccaccacgcctgactaatttttgtattttttagtagagatggggttttaccatgttgaccaggctggtcttgaactcctgaccttgttatccacccacctcggcctcccaaagtgctgggagtacaggcgtgagccactgtgcctggcctatttattttttttttgagacagagtgttgctttgtcacccaagctgtagtacagtggctcaatctcggctcactgcaatctctgcctcctgggttcaagcgcagaatcatgtacatttaaaaaattgcaaaagactctagaatttgtcaggtctgtaaaaagtaaaagtagatgtacctcttcaaagactttcctccccatctgattagaaataaatagtaacttctcttagaagcaaaatttattcaaagacctgtgctcctaaatatttgccctggcatgcttatactggtccaagcaagcattaggtcatatcctgttctcttccttatttaaaagtgtttttatccttctcagcattccacaagttacttcctccttcctttgttctcctccacctttgcctcttttaaaaagttctaagttgctagccaatcggaacaaatacagaatgtgaggtcccgttccagccaatggaaaccagacacagcagtatgatggacgcatcaggttataaatgaccctgtctcctttgttccttgtactctcatggcaaaactgctggcgagtgtaccttttctgcaggaaataaaaatggccttactaaataaattaaatttatgttcaagtgctgtttctttatggcaccggggaacaagcatttcaaacaggtccaactctttccacatacggaggaactaaaatatgactgattatgacttgcttaagttcagagaaccggttagcaacaaagttgatgctgtctttgaatctctacttcttttttttttttcttttttgaaacggagtctcactctgttgcccaggctggagtgtagtggcacaatctcggctcattgcaacctctgcctaccgcgttcaagtgattgtcgtgcctcagtcccccaagtagctgggattacaggttcctgctaccatgctcggctgatttttttctttttaatagagacagggtttcaccatgttggtcaggctggtctcaaacttctgatctcatgtgattcgcctgcctcagcctcccaaagtgctggaattacaggcgtgagccatcgctcccgacttctgcttatcaatatggactagttggggtctagatggagcttaattgtaggacctgttttcttccttagttttgttacatatatggctctattatgatccagactgttgctagattacctggtgaagaagcatctgttttgttg

SEQ ID NO: 95487 - DNA, 1035 bp, Homo sapiens
aaaccattagctcagacctggaatttggggtaaggggaagtggggggcaggacaggcgagattttgttgcctgtaatctttttgttttttttttttttttttgagacagagtctcgctctgtcacccaggctggagtgcagtagcctaatctcggctgactgcagcctctgactccctggttcaagcagttcttctgcctcagcccccaagtagctgggactacaggggagtgccaccacacctggctaatttttttatttttagtagagacgggatttcaccatgttggccagtgtggtctcgatctcctgacctcgtgatccgcccacctcggtctcctaaagtgctgggattacaggtatgagcaactgtgcccagcctgtcgcctgcaatctaattaaaaccttcacctggtgaattgcattactcctgatgtgaaattcattctacttaggacacgttgtagcatcattctctctactgtatataacctttctcgttaccactgaactgtccttttctctattatcaccactatagatacatttttaggtacaggcaaaaccagtggttctcaaagtgtgtgccgcagtccagctggaaatgcaaatttccagccctgccctagactcactgaatcagaaacgttggagttggggcccagcatcttgtgttttaacaggccctgtgctagtgattctgatgcatgctcacgtgtgagaattactgctttagatatatttccctcttctttgatattatttcctttattcttcagctaagttctgttcttcctgttactagctcttctgctgtggcctttggaatccctgatttattgcaaccttgaacttttctacagataatcatttggctttcctgtgagattataccacttctccttagtgaagatcagtggcttcttcctccttcctctagactcttaatttttatcatgtcatctctagaacattcttttgtgttccttcgtagcttgatcctgcttatggacatgctgactttgagatgtgtag

SEQ ID NO: 95488 - DNA, 1067 bp, Homo sapiens
actctcccacccaatttacacttgcttaaaacttacaaagtaaggtttaaacttcttagtatgatatattcaaggccttctgttatatttctccacctaccttagtttgtctacctctacatctggccatgttcctacatactggtaagttctagaatgttgtcctaaacatctttttgtattttttatgaggcagagtcttgctctatagtctaggcctgagtgcagtgacgtgatgatggctcactacagtcttaacctcccaggctcaagcagttctcccatcccactctcccaagtagctgtggccatgggcgtgcaccaccatgactggctaattaaaaacaaattttttgtggagacaagggtctcacttcattgcccaggctgatctcgaattcctgggcttgagcagtcctcctgccgtaaccccgcaaagtgctgagatacaggtgtgagccactgcactcggcccttttatgtttttaattatgaatttttcttcttcctgaaatctttgccttcatgtcaccccttcccacctaccttctatcctaccttctatcctgtaaaatcctactgattgttcttagttcagatctacctctcagtgatgctttcttgggtgtcttctcgaacatgagatttatggctgttttctctgtgcatttattgcattccattagtgcctataatgcaggatcttgtattattattattattattattatttttacttttttggtcttgttctgtctcccaggccaagtgcagtggttcactgcagccttgaccttccaggctcaagcgatcctcccacctcagcctcctgactacaggtgtgtgccaccatgcctggctctttttattatttttattttttttgtagagatgaggtcttgctgtgttgctcaggctggtctcacgcaagagatcttcccaccttggcctccaaaaatgctgggattacagatctcatattatagttatatgcaaatctctgataaccttggattgtggtttattctcattttactcaccttgaaaactatagattatagtaaatt

SEQ ID NO: 95489 - DNA, 1063 bp, Homo sapiens
aagaatcttacagactccagaggcaatgccattatatcttactggaggaaagtgagaccccaagagtcatttgcctgctaaagaggagaaataagatgagaccctaggttttccccccaaggccattttttccccctgctacaccaaactgttccctgcattactgagggaaagaccagcaacacttagtatctcatattcaagagggtggaaaataaaacgatatgttcttgtaaaattacgatttaaagtcttgattttatcattggaacataatagaaaaaaattttgtcctctattataatgcagttgaaaatgatactttctcatataggcaggagactgccttatccacataggatgctttgagaaaccttttaaagactagtcgggtcccatggctttgtgcttgaattaaaatattaggtagtgatgggcaaaaaaagttggttgtgatgtgagtagttcgtattcaaactcatagcctattaagcaaagtgttgcttactgacctcagtcattcctgatcatacccaaggctaaaatgaactttttggaggtttagtcacaaaataatggctgcatcttacattctctaagctccatcatttctacatttgctatttctaggaatggacttaatgcatttttatcttttaggcactggtctgagttatgtagttgaaactacttagattttttgctcttttaaatggttttcattaagttctgtattttactcataataaattcaatttcttgatgactccttagctttttattttaagcctttttttttaaagcatttaacctggacagttctgaactttacaaatgttttaacaatttcttcttcaatatcttaaagaccgtaacaaaaaaaaaatttttttttttttttttgaaacggagttttgcccttgtcgcccaggctggagtgctatggcatgatcttggttcactgcaacctcctcctcccaggttcaagcgattgtcctgcctcagcctcccaagtggttgagattacaggcacctgccaccacgcccagctgggttttgtatt

SEQ ID NO: 95490 - DNA, 1099 bp, Homo sapiens
gattgtcactttcttgcttagtgtcctctaaaagcatcctgtgaaccacttacatttgaatcttagtcgccatcagggcatagcatgatttggcagctgccagcttctaacgttacctcttactaggtgactgactttcagcaacctaccccagtcccatagtcattttgccggttcttgaacaaagtgtttcttccttaggatgttatacttactattcttttagctggaccaccccttcctctaagtggtcaaggctcttcatgtcttgtcttgtgtttctgctcaaatgtcatcgcctcaggccttttctaattctaaaataggaaccagccccttcctttataatcttttattctttattctctttttctccatagcatttattactaggtgaagatacactgttttttttttcccacttatttatttccccccttagacttgtttgctgccagccctgttctcaacaagcgagcagaggtcttgtctgacttgtacacagctttatccccagtgcttagaactgtgcctggtacatagtaggctgtcagtaaaacttgttgagtaaatgaatagtatagttgatttaaatattggctctggaatcagacagctagggtcagaattctctggctcccaccatttactgattgagactgtgggcaagttaataacttggtggtgcctcagttctgctcatctgtaggatgactgtaataatacctacctcacaggattatggtgagtaataattgagttaatgtatgtaaagtgcttagaacagggtaattttttttttttttgagatggagtctcgctctgtcgcccacactggagtgcagtggcaccatcttggctcactgcaagctccacctcctgggttcacgccattctcctgcctcagcctcccgagtagctgggactgcaggcacctgccaccacgcccggctaattttttgtatttttagtagagacggggtttcaccgtgttatccaggatggtgtcggtctcctgacctcgtgatccgcccgcctcagcctcccaaagtgctgggattacaggcgtgagccactggtcccagcccagaacagggaa

SEQ ID NO: 95491 - DNA, 2460 bp, Homo sapiens
tgtccgaatggcaaccgaagagccgcgacccggtcaacgaagcgcgggggtgaccggagcaggacgggcgggcaggcggcgcagtgcgtgggcgggcccgcgctgcgctcccctccgcccagctagcgagacggtcacgtgccgcccaggcgctgccccttgcgggcggctgcagaacaacagggcggggccggggaggggaggaacacggaggccgacgccgggcgccgcggtgctacgcccgaggctggggtcgccccgggccggggggagcagagcgcgtgcgccgcgcggctgtgagcgcgagcggggccggggagcgcgcgcggaacgctagggggcgtggctgcggcgcgcgcgctaaccggagggggaggggcggagagccaccgcggagcgcgcgcggggttggttgccgcgagcgtgggggagcgtggaccgcggcgctgctcagcggtggggctgccttcccccggccctcctccctggtccctggcgagggcactggcggcggcggggccggggtccgcaaggccggagaaggccgccgggcccgggcatggtggtctggggcaacgcggaaggtgagcgacccccgggccggcggcggggtgggggaggggcgggatcggacacgcgtcgcccggaggcgccgcagacccgcccggcagcggccagagcgcggtcggcctgaggtggcgcgggggaggggtgcgtcgccccggccccggcccgcggccgtcctgtcgcggcctgggctgtccacggcgccttcccctgacgctcgcagccgccgggttatgtaatgtgtgacctcccctccccttcccttccgtcatggcgcggccggccccgcgccgccgccagccccatgggccgccccgcgccgacccctggcgcagcggcccttccctccgcgcccggccgcatcccgccggcccggtcagaccgcgccgcaaactccttcctcctgcgccggcgcctcggccggccattcagttccgcgccattcattcacgcgcgcgttcgggcgttcgttccacaagcgtttgtagaatgtcgacccggtcgagccgccgctcccacccgcactccagccacagcgtttttccgcaccccgccttcgacgtccccggtgcatcccagaaccggtcggaatgtccgaaggcggttgttgctcccttgtttttccttgctgcttgtccgttcgctaaatacgctgggcgccgttccccaactgtccttccgagagccccttgcccacttctgtactgttacagtgacgccgctctgggcgcaccgagccgcgctgtgtttcgctgctcttcctacctattctcagtttgtaaagaaataatctcacataacactccttaatgtactcctccgtaagataaattgcagataatatacgtctgctaattctctttatctccacgtcttctcacgccatgtactaagtagaaatggtttcatttaggtgaaaataatgcagactagcacatagcacaacaagggcttgtaactattaaggactttatgtaacagtctgtaattctgtgtatctgtctggtctttccggacttggcactttagtctccgagaataagccatttcctgtttaggtagggtaggaccaaccataaccttggttctttctatggagttctgtatgtagcaaatcagcctgtgggaaccatctatctgtccaccaacctttcacacatattcttgggtttgcccgtgcagggaccagtgctgcgtattgttccctgccttcctgtactggacacttaagagctcacctaaagttcctcttccaggaatcattctccagtatacaaggctctcttccattcaattcttaggctatttgcgccttttcctgtgttgcgtttatctttttagccctgtcttctcttactgtgtaggaccttttgagggtagagtctgtaccaaactcctatcttttgttgtagaaccttaaccgctattttacggtaaaccgtacatatttaattttttttgtaaagatgggaattgctcttttaaaattaatttctatgaggtctcaagtagaacataatttttaaaaaataatgtgcttgaatatataagatcactacatttccaacttcccactcgcaacttcaaaactctgattctacataagagcattaaggaaacgttgtcctcaccagcaacaaactggtcattattcataagaagttgcagtgactacatataatatatatttgaaagcactttctttgatagctgctgtagtggaaagacaggaagttcacagttacatggaggttagatttctggccctacaaattgttagctggtgactggacaagttaagttactagtatctctgattttttctcgtttgtagaatgaagataccatttcccaccttgggtagctgaggattaaatcagttcttaaacgtga

SEQ ID NO: 95492 - DNA, 1144 bp, Homo sapiens
acagagccacgttcacgttcaggagtgggaagcattactggactaggagaatgcagctggaggatatggattttctttgctatttggctaagcaaatactattcatttgagttagaaatggcagatatcatgtatttatttatttggatataggatgagttccccatccttggattttattttgttcaaaggaatgctaaagttacatgatggaacggagaatccttgatttatatagagaccatgaatggaatttttccttacatcagttgctcaggatagcacacctagcatgtgtggcattcttaacaactctttctgtccccctagaattcttcaacgacctggatctgctcatggggccggtcaccctgcacagcagcatggagcacctggtccagtactcccaacagggcctgcactggctgcggaacagcgcccacctgtcatagggacctcaccctggggccagagtgggctctggtctccacagatggctcaacgtttttggacactgtgctactgaaactcccagccacagcatttatcagactgcggtgaacatttcctcagcattgaacaatgatcttttgcagggcatgtgtgtttgtatgtgtgggtatataagaagccgcctgtgtatgtgtgtaagatacacagctcttcagaacacaccttctttgtctagtttccataatcccaggctagacaaagtgatcagaggtttctgactagaggaagtacacacacacacacacacacacacacacaccgtacactcacacacaatcacagacacacactttctattccattccagtgctaaaccgtgacttcttagaaaattcaaccaaaatctcatgggttagttaaccaggtgcaatacagcacaccaaaagcttgactgccagtgaagatggacctgctcttatactgttgattactttcagtattaatatactattccccaattattttttgattggtatgtattaatgggtaattgaataatgaaaataagccaggtatttttgtgccggaagtttactagattgcatgttaccaaataccctgctcttcctctaattcccttcccccatctgactctattatcaactaaatgcattccaggcaaacagatgga

SEQ ID NO: 95493 - DNA, 1115 bp, Homo sapiens
ttcagaaaccatgaaatctttaggtacccaagacaatttggctatatgtgttttatcagtacagagctatctctaaaaaaaaagaactttgttcctaccggtatttcttgggcatggggcttagtggtagaggaagagaactcaagacttctttttttgttgtttttttttgagacggagtctcgctccgtcacccaggctggagtgcagtggcacaatcttggctcaccctaacctccacctcccaggttcaagcgattctgtctcagcctcccaagtagttgggattacaggcgtgtgccaccacacccggccaattttttgtatctttagtagagatggggtttcaccatgtcatccaggctggtctcagactcctgacttcaggtgatccacccacctcagcctcccatagtgctgggattacaggcgtgagtcactgccttcttcctccattcagtagcctttactggactgtttctgcaacccccaagcctttctccccttctgccattagtgttcttatatccagaacatgcattctatagatcacgttctcagaaccacaggatgaagtggaaacaaagtgatcagtccagtagcaccagcttgagaaaggtgtcagtaacattgtgtcaagaaagggaggataagctcccctgttcaggaaggtttcctaattctcctcatgaaaataattgtatttcctgacacaggtaaaagtggcatggtttgcggtgttgtccttacatttacatcttgccattgtagcacctcagagttctgacaggccatttcttgccattttaataacacccgcactaaaaccagaaaaatcagtcaccactccataaagttctttctaaccaaaagaaacatgttgtctctggagaaccaggctgaggctgttttcttgtctctggaaggggaaaactcccatcagcatcacaaagaccgctttctcccttaacagtcctatgaaggcatgattgggttctcagaggggaaatctaactgtgcattgagcaacttccctaactagaggcaaaacttttaaatatctgatgcaagcacctggcttgtgcaacagaacttcctaaaccagaatattcaga

SEQ ID NO: 95494 - DNA, 1109 bp, Homo sapiens
gcagtgccagcatcctggagtggctgactctgaagtgccctcatccatagtcttcactgactctgtgtattaaaaataattacttaatttcttatgcattctcctcaaagcttgggacatattaacacctctggggcttatcagatgacaagctgacatatcggatagcagatgatgaattcatttggtatgcagttgcctatttgtctgatttggatttcaacttccctaagaaaatcatccaatttctgccgcgccgaggaacttgttgttcaaacacattgagctctcatccctgccagttttcacaaaacaggctggctctactgagggcggcatttcacagaggtaggaattacagaaaggagtctgccaggctctccgtgggagaccattcaactctatcccggccacaaaggagaacaaaaagcaaggttgctttaatattcccatgccagaagaaatatgggggtagctcaaaccctgatgctgctgagaaccaagaccgtgtgtttctaggtgggggggggggggtggtgggagggggaagagaagaaaagaaaacattctatttggatcaagtgctcagaatgcttttgttggagagagctctcataatgaagatgcatgcagctaagctctggctttcagatcactcaagccccgtttctgaagagcccatgattcacagttagttccatttatggtgtttaattaaacttttattaggtttgctcatgtgtcatcataaaataccatcactgtgggaaacaatgggaagaattttattacacaaatgaaaaatgaaaactctaggttttccatgttaaaaaaaaaatagaagattagatggaaaatctatttgaacactcagataagatctcattttagtacctttgctgtattatattctataactgtcacaatggtgacaagcaattttacttttcctactgacttgtgtattgctgtcagaagggatgcctttgtgattcgtggcaaggctggacactgggtgacatcccattggtcctgctggctttataatgatctgctctggaagtacagcactagaaatcactcgaaaggagaaaatgggccaatcatca

SEQ ID NO: 95495 - DNA, 1071 bp, Homo sapiens
tcaagttattggaccccaggttaaaaaactcttgctctagagacttagcctggaagagcctcttagttctgatggttttgttgctgttaagtggtgacacaatgcatataaaatgcttagagtacattctgagaaaggtggtctgtgtacctctggaattgtgattactactatcaagttttaccagtgctgtacagcagtccaagagaaggggattgccaatttcaaagaagagctccaaagaaagtttctttggccaacttgaatatatatataaacttgcagtgatgaaaaacaggcaatcatgatatccatgataatatttaatgtcacagttttgttttccatgcactgtaaaaatcataaagtatgtcaaataatagagactgaggaaaaggtctttcttcactcacatttcgagaaacaattataatcaggctgttcgcattatcttcagcatcagcatcttagccatcactagatgagcaacttttgattctcccaaagcacttttgcgtgacacagcctctatgttgttagacacaccgtgcttttggaacagtgcttttcaccagaaatgctatccccacatgtatccatttgcataacattcagaaccttggttttgtcatttgttctagaggtctgtgtttgtaatttctccactgtgaccaccagctaaggaaattgcttttcgaagtgactttagtggcttctttgcggtgataaccaacacgtgcaattaagagatcccaaccccaagaataatgagtaaatctttgttagatggctttaccattttttaactgactctaccaggtgacctctggaagtatcctaaattagtgatgactgagtttatttcaaactaatctgtcttccccaaacaatacttttaagtaatagaggcctaacaatataatatacattgcaaactcagatataagtgaatccctcttcactgatggttgattttggagaatgttacattcaagcacagacagtagttttgaaggtaaaataaggagttaggaatcagaaactgtaacttctactcaccatttttattta

SEQ ID NO: 95496 - DNA, 1036 bp, Homo sapiens
tgtttttgttttgagacagagtcttgctctgttgcccaggctggagtacagtggtatgatctcagttcactgcaacctccacctcctgggttcaaatgattctcatgcctcagcctcccaagtatctggaattataggcataaacctccacacccagctgatttttctatttttagtagagatggggtttcaccatgttggccaggctggtctccaactcctgacctcaggtgatccacccaccccagcctcccaaagtgctgaaattacaggcgtgagccaccacacctggcctcatttcatcttctaaagtactctccctaaaatcctagtgagtcttgctttccaaactcaggtaattcacccccagtctggaaagccacagagtggtctgtgcagctccagagttggtgctcttagctacttcagtagcagccctctgcatcagactatgaagaaatcagtgtcactggagggacacaggtacaatattaccctactctctgacaggggaaggagaagggggaggacacatatgaggtgtcatgtggaggacaggaagcatcgggtgacccaggagtggagaagggaggagaacacagaaggaatggcctgggcagggccaggctgcagggtggacagggagtggcaggcctcccctctgtggctgtgggcatctgagtagaaagtgtctgaagccagctctagacagctgccagtgcaagaactcatgggagggatcttcggttacgcagtgcatccctcaagcatggggtcaagcctcatcttctacggaaaccttaaatagccaactgccccagcgcccacagctcctattccatcagcacctcatgtaattcctggcataggcccagcttacagtctctgcctcctttatttatgtctggtcttaactactgagagcaagaaccacatcttgactattagtagtactttatacaaaatgactgctcaatcatgacttattgaatgcagtaagaccaagaatacaaattatgccactcatttatgctgt

SEQ ID NO: 95497 - DNA, 1019 bp, Homo sapiens
ggagtgcagtggtgtgatcacagctcactgcagcctcgacctcccaggctcaagccatctcagctctccccgtgccctgcccagtgccatggtagccaccatgcctggctaatctttggacttttcgtagagggggggcttcaccatgttgcccaggcaggtctcgaactcctgggctcaagtgatctgcctgccttggcctcccaaagtgctgggattacaggtgttagccaccacactcggcccagcaaagttcttgacaaagtaaagaagccaattacaagaaaatctcagtttgcaaagggacagaattcgtctcacttattcactgcttattgtgtgcctctcgtgttttttcttcttgtgggtcggtgtatttgatgctggttagtagagacaaagaagaaggacaaacaggataaaggtggatctttggtgtggaccctctgcactgcgaaagaagccacatcaccgccaatgtggaaaatatgcaaagtgccgttaggaagaaggaaggatatgtgtgcagcatatgaagtgccttgaatacgattaacttcccttcatgagtagtaaatagtagataactctgatcaaaaaagggattcatgtgatttatcaagctgagcaactgcgcgtctgcagagaagctggaggtcaatcttgaaatctagggcaagaggagcactaggcaattgccaggactaagaagttaatcatacccttggactgcttccatctgtctcagagtgacagcgctgctctcagcgagcaggcatgctttatagcagcagatcaggaattaatattttctgtgaaacctcaagcatcatttgcagtaacttgggttttataaaaatggaacataattttatatgaataaatcacgttcagctagaaatacgagaggctgcaaaaaattatgcttgacttaaaaaaaaagagagaggaacgagcaaaaaagccaacatgaaaacagttgttgaagcgatggcacttggagggcacagatagccatg

SEQ ID NO: 95498 - DNA, 1049 bp, Homo sapiens
aagtatttaaataaagcaaatagggaaataatacacagatgtgaaaaaaatgtatttccacaaacctcttagattggagatcgtggcaaacagtagtatttgtcatccccgaggttacctgctcacatcttgtaagtgttatgggttgagagagagctcttttaggtggagggaaaatgagctaggatctctgccatcaatgttcttttaaggaacttgggaagccaaaaataaaattgtcatgaggcagacggcatactccccaaaaatgactagaatccagggctacttcatgttacagactaggagtgcatggagaggagcttgagaacttttacaaaagagttaacacttaacacaaagggtgagctagacctcagagtgtctgctgtgaacagagggaggagctgatagacagagagccagaaaatcacacaagcatcagttggactcaacattaggaattagaaggattcgtcctctgctgaccccgttcagctctgtgctttcgttattggcatgctcctcaggccctgaggtctgccttcttatcatgatcttatttaacagggtttataagcagcaagtcatatttgcacagagcagtcctcattagagcgactgtacagccccatgtgcccagaacagccaggttttctcgttttgtctctgactccagtctggttagcatcccctttctctctcaaatttgttcttatttggatgataaattatattatcatccctgactgcctgacccctatagagaatgggatgaggtcaaagttgaccgaacaaaatgcttcctaggcagcatttatttctaggaatccgaaaatgcaaaagactcattattgctgaggaaaaaatagagaggagtaagaatttttcctttgtcttgcagatattactaaacgggttgaaaaatactaaatggaagcccacaacataaaaagttaagagacccattaactaggactgaagtggaaaacaatggcataaaagttcagataatgaaacataaaattgcttatagatgtggaaggaaa

SEQ ID NO: 95499 - DNA, 1858 bp, Homo sapiens
ggaaatggggtcagggtgcgtgaagcgactcaccccacatgcatagacaggtggggcagagcctgggccatgccttatcctgccagttctttaccccccagttcgccccaaaagtgactgaaatgactcctacgaatgttcagaggcatgtatcagtgataggcctacaaccggcttttaaaggacactaggtacattttaggggacagcctttggaagctggcttcaatgaggcctttgagcacaagggctcagcgggcttcacactgatgtatggagccccagggtccctcagaagtgggctctcccctgctccctcagagcgtctctgcgtggagagcacgcttttatacagtgcacttctgagtaagatttcttttgaaatgaattaatctgaaaactactataaagaaaaatttagccatgctgaaaagaatacagtgttatcataacaaataacagagtctgaagttctgtttctttttttcacttttaacctcgtgcttccccgctgtctcctcaggatgaatggggggacctgggtgggctggggaatcaccttcacaggcttttcagaaagcgccctcctgcttggttttccccactaggtaggatcttggggacaacatcttttccagctctttgactgatggatggcctaagaagcttcgctcacaactcaagtttatggctttatggctctttttctcatctctctttaccatgaaagcccctggggcaggcacggagacacagcccagcactgggagcttggaaaacactaaacaagtaattgtggaatgcaaactgcccaggggaaaagcccctatgtatttgagagaaaaaaaaaaaaagcatcttcttttttattgctattttcaggtacgtgtgatattttgatacagggattcaatgtgtaatgatcaaatcagggtaactaggatattcgtcacctcaaatatttatcttttcttcctgttgggaacattccaattcttcccttctagctatttcgaaatatacaatacgttattgttaagtattatttccctgctaacacagcatcttctgaaagctgcccgtcttagctgatgactgttgtgagggttaatttttatgatggggctgtctactatttcctaagtgcaccagaggaaaagtgcataagaaggaaagaaaaaaaataggaaatcaaatagacttatttccaaaatgttgctctaataacaacattaaggtgatattttggtgctgaattattctgaatccactaactatctgtacctctttgtacctctttgttccttctttcagaatgctggaagatgaccttaagctaagcagtgatgaagaggagaatgaacaggtaagattctcttttatgtcatcatcctttggaggtgacactggtaacagttacctggtggactgtgccgggtgttaaccaagctgaatggtggcactccaggctgctggtcttttgtctgctaagtgtgagcttctatgcagttgggtcagtatattaaaatagcttgcccataatttcccttaagccttgaattctgtaattttttatgatattgagaccagcaatgggtattacaaggaagctaagatcaggcttccctcagaagtagacagagccttttttttttcttttttatttattcatgtgtgtgtgtgtgtgtgtgtgtgtgtgtgtgtgtgtgtgtgtgtgtgtgtgtgagaagctaactggccttctggagatcaaacatatgaccttaacctcatcagcatgcaacaggcaatccgtaacattaaatattgagaagtcttacacagatattattaacattgagaaggagcaaatgtagag

SEQ ID NO: 95500 - DNA, 1099 bp, Homo sapiens
aaatgcatattaaaaccacaatgagatgagataccagtacatacctaccagaatgtctaaaataatgataacaccaaacactggcaaggatgtggagtaactggctcactaacatattgctggtgaaaatgtaaaatggtatagacactccagaaaataatttggtagttccttttatagctgaaaatggacccagcggttgcactcttgggcatatatcccagagaaataaaaatatattttcacacagcaacttgtacgtgaaggctcatagcagctttatttgcaatagccaagaaccagaaactacctaaaagtccattgaatgctacccagcaataaaaggaatgaacggttaatacatacaacttggatggatctcagggaatttatgctgagtggaaaaaaagccaatttcaaaaggatagatacttcacattccacgtatgtaacctttgtgaaatagcataactatagagacggagaacagatcagtggttacctgtggttagggttggggttgaggggtggctatacagggctggcatgaaagacgtttgtggtgatggtgtggttaaatactttgattgtggtagactgttacgtgtagctacacgtgtgataaaattacatatagctacgtgcacacacatgcacaaatgagtccatgcataactgttgaaatctgaataagctctgtggattgttctaatgtcagtttcctggtttcgacattttactacagttactcatgacactaaccttggcagaggctgggtgaagagtgttcaggacttccctgtacattttgtgacaccttcatgtgaatctataaatatttaaaatttaaagtttttgaaaacatactcatcattctcaaagaagcagctttctatttttgtgtattttcttttagtcttaatctgtctaataaacagcatacctgatgagaatactaacagaatcctccagtgtgccagtgacttcaggcctctagcaggaagtcatgaggtaccgaagagacgttctttcctttttgcttcctgggcattaggaggcccttgctttttctgtctgcacgaccacacctcactttggt

SEQ ID NO: 95501 - DNA, 1104 bp, Homo sapiens
ggacttctttaatataaggatgtgacatgctctgtggagcttttagtacaacttactgggtcaaaaataaactaaaatgaggtaatcaagaacattacatctagacaaaaagcgttcaagaggataggagtggaaatttctcttcttccaggagttgtaaatggatgcctttgttttttttaaaatcccttccattgaacctccaaagtagtgttgccagataaaatataagacgcccagttaaatttgaatttcagataaacagtaattttttacaatatgtatgtcccatgcaatacttgaaaataatttgtagtgtaaatgtgtctcatgcaatatttgggacatacttatgctaaaaatttgtttgttgtttacctgaaattcaaatttaactaggcatcctgtattttcatttgctaattctaacaaccctaccaaacatcatagagactgtagtccagtccaccaaccggactttaaattcttaattcaattcagagaataatacaagataggtgaagaagggagagaaacagaagggggtaaagggagaaagtaccagaaggagaaagaaaataagaatgaattctggcaatctgccaaccaaaataactaaattttgcaagaaagaaatcctaaaactgaggtcataggatggaaaaagtctgcttcacagactctttagcctgaagattggccaaaaaaagaaaaaaaaaaaaaaggcaggcatcctattaacatctaaataccaaagctcttccaggaatggaaagatttggaatgtgaagattcttagctttggaactttgttaaaataccacaacttgtttattaattgcaagggggatttttttttcagcgagatactttggtaattcaatatcaaagaaggctacctaacttcagtttatgttactaagacgcgtttgaaacttcgtggataaccttttgtttgtttgcctcgtgctgaaatgcaaaaaaattatctgatacttgatacgaagaggaatttacctctgtttaaaaatcacacatttctcccatgaagcatgaagatggcttttttaatttaaaaatattaactgacagcttcaagattga

SEQ ID NO: 95502 - DNA, 1027 bp, Homo sapiens
tataaatgtattaaaatcatagaaataattcttaggttttggaaattcttacagacctgaatgctttaagtaaccatattttctttactattccttcatgtagttagtagaatttgttagatggaaaaatcacacggaaatacttagctataattaaagcaaaattagcaagcaagtttgcattgaaatgtggatgttcagttcaattcaacaagtttatatagagcacttactatgtaagatgttccagtctccacaaagataagtaaatatccctctcagaggaaatttatattacttctttaggcgattatgtttagtaaatccaaatgctcttgaaagggattattagaattcctatttggggattatgcctagtaaaactgaatgctcttaaaagagattattaggattcctaagtattgcttttatttcacattggagaaagagcattcaaagagagataaatggttgggtgtagattgaagtacatattcataaaactataacacaaaacagaatgtaagagaaaaagaaataagtgctttggaggagcatgagcagagaactatcctattatattggcatagaagggaaatctgcaaaagcctcaagacacaaatgatgtttgagatgagccttaatggataaaaagagactcagagacatatgaggaagggtattcacacactaaggggatggtgtaagtaaaagcagaggctagtttttcttgtaggtagagtatttgtagagcaataaaaaggcatgaagctgaagactgggaccttattgtagaaggtcttgagtactagggtgaggattctgagggtaaattcaatagattggaaaacaaatactggactgggagtaaagagttatctggccaaacctagaaactgagtgaccttggactaatcagttaatctttttgagctttaacttccttgctgtactatggagatggcaattgttgcgttaaagattgggcataagtgacaaaatgcatggggaagtattttgaaaacta

SEQ ID NO: 95503 - DNA, 1034 bp, Homo sapiens
aaaacttaaaaaagtagaaaaatgttctgtgctcatggataggaagacttaatattgttaagatagattggcagaccgatgacatagatcacattgatattcacatgaaagagcatctagagatgggagtggggagagacaggctaccaagcattgtcccagccagttatggtgggagttgggtggcatcctgctggtgtgcttatgcatgaatacatctattgctttctatgcgtgctgttaatcccctctgtttctgcctgtctgaggcaccttgtgtcatcccttccttgtatcaattgtacattacttcatgttttgaacaaatatttttgagcttcacctagtgccaggtactgtgtaaactgctggggaaagccacagacctgaaggagataagagatgagaaggagaaggaggaggagaccagaggaaggaggaggagaagggtgttccgggcagacagagctccaggcaggatccagaagggatgcgatgtgcaggggtcactctggcttcagtgcttcagagactgctctgccttctggctctcaggcctggaacaaaccaactgaaacctgtctttattgcacagtcagacctggaggagcccagccatatggacatgcacattgcccatttgaactgatagtgctggaactaatttttgcattttgttttttttttttttttttttttttgcttttgctttttttaagtaccccagggtctgcttcagtaatgctgtgcaaactgagcctgcgctcccagggccagggtgtacaggacacagcctgtggcgcatctgctctgtgggaccaccgggagctggtagaaggcagccaacttgtctgtgtgcatgaagacatggcctacaggtagcttgcctggccaagaccagcacttcagagcattttcatagaggcagaaagcaaaggaaccaggtagaaagcctgccagatgttggaggcgaagagctagcaatccttacctgagatatttgaaagagttatgaatgaagagccttgtacata

SEQ ID NO: 95504 - DNA, 1059 bp, Homo sapiens
ttattcatcgagcaaatgtgtttggtgcctctactgtgtgccagcattgtcttctagaccccaaaacgagccagcaaacgttttctggaaaggaccaaatggtcaacattttaggctttgagggccatccagtctctgatgtgacaactcaattatgcttctgtagcacagaagcacccatggataacagcagtgagtgaagtggtgtggctgtgttccagtaaaacatcgtttaaaataatgtggcaggccagtttggcctggcagccattgttttgctgacccagccctaagatatagcaatgaacaaacagagaaggtttcctattctcatgatgtttacatgttagcaaggggagataataaacagataaaccaataaatatataaatggtaggcagtgataagtgctaagaagaaaaataaggcaaggtgagggaatagagaatgactgggctggtgttatttaagatagggcagacggggaagccctctctgctgaagtcgtggttgagcagagatctatcaagtaagggagggagtggcattgctgacatggagaagggtggacaggccaagggaacagtaggtgcaaaggtcctgaggcaggaacctgtttggtttgtttggagaaaatcattgtaactaaagtagagtaagtaaggggagaatgatgagtactgagtcatggagggaaccagggccagatccaagaaccttgggtttcattctccataagataagaagccactggaagtttttcagcagaagactgacatgatctgttttgtgttttaaatgatccctctggctgctatagggagaagaggcttgtcagggaacaagggtggaagcaagagacctcaggaaaagtcaaatgagagatgacagtgttgtatactaaggtgggcagccttggaggtcgcaggtgactagatccaggatacattttgagggttgggctatcaggattcagtaatatatggcatgctcagggtgaaagaaagagagaagtcaagatgagtccagggtttggatctgaacaaatggaagaatgaa

SEQ ID NO: 95505 - DNA, 1005 bp, Homo sapiens
ccctagcctcaggttattttttcatgtacttgtgccactcagaactctgctgaatactcaaggaagacctgcagatattcaagattctctctgtacagcaatctccgctcttgtgtcctgagcagcaaactcaagtcaacttgttctccccagactctcagctcagtgtgttcactgggctttctcatggtttcccctccctgtgctatagcccagaagttcttagtgcagtaagctggggcagtcatacagcttgcctcatcagtttttcatttcctgggaattaagttgttggttgcttgatgtccagtgcttgaaaacctttgcttcatgcatttgttccaaataagaaactttttgagttaaaatctattttcttataaagcaaaacaaatttatgacacaatgtaataaattgaagagttttgtattaagtaatgtatttgttagcacagtgtattcatatgtcagttgcagtgggtgctacagtgggatactaaatatagtttagtgggaagattgcaggtggtttgccaacttgagcctcaccagactttggaaggtttgtttagatcataaaataccaaaaaccttcatactgagatctttacattaaaattctggttttctgaataggttttgattgcaggtgagagtttaagaggaataaatgggtgattaggtgttaagaggcctttgggcttctttagctctgaaggctgctgttaaataagaatatagatactaaacaatcttctaaattgcccctgttcctcatcctttatccaatttttcacaaatattgtttctggattaatttttctaaaacagatttcttgatttttctctcactttctcaaaaacctagtctagaagaggaggcaacatgcaaataaattaatagaatagcatgaggtgcaagccaaatcaggtgcaaagcaccgtgtagacctagaggaagttaatgtttcaaccacctggagggcagaagaggagtttactaga

SEQ ID NO: 95506 - DNA, 1056 bp, Homo sapiens
aatgagcacatttctggccttggattctctattgaaacaatgcagctttatggagactaaaataatgctcattggcttacatgactgaaatattttaatgaaagttctcaacttctctcattgtctgtgttcaggtacgtagctaccactgtccacacaaggccaaggccatcgtacagctgcattcttttattcatacaaagaaaatatgcagacataaagcgtgtgacttattttaactgtgtgcatgaagtgcccacattgccacgttgttctgcgtccaaatggtgactcaacctgtagaaattctttctgtcctttcgttcccttgtctcttgctttgcaagcatggatcagggataagactgaattaatggagggagaatctggtgcctcagctctgcaaggggcatactttatgcactttattgagtttctgaacaacctcacatctgttttcctttcatgaaataggagcaggatctcttcttttggcaacatatgtcaatatgacacatactgtaaaggtgtttgcagtacggggaggataaagagcaccagaccagaaacccacatgcctcggtttgaatatgctgttttctgtccttaagggaaaaaaaaaccaaaaaacctctgtgcctcagtttactcatctgtgattcagagataataatagtttccttacttgtcttgcaaagtagctgagaggttctaaccaaaaggatgaatgtcaaagtgctttgcaaactacagggttggttttggttgttaatattttacatacttatcaccttcctgagagcataaagttctgaaggcaatagatgatcttacataaggtcctgagttgtacccatagaatgaatgacctttcattgctctcaatagataaataattacagccagacacacatgtggtaggcagaaaagcacgtccctcccatgtcctaatccgcagaccatgtgaatatgttaggtaacatggcaagagggaattaaagttgctaatcatccaccttgagttggggaggttatcctggattatctggatgggta

SEQ ID NO: 95507 - DNA, 1028 bp, Homo sapiens
gattgacattcatttaccatggatgaaggattgtcggtttcaacgttgtatttttcattgatgtacagttttaatttgattagaatgagattccctacatttctgtcgggaaatgattttgtagcacccacctaatagtctcaataagtactttaatgatttgagtatctcttatctgaaatgcttgggagtgtaagtgttttagattttggattttggaatatttgcattataccagttgaacatcccaaatctaaaatcctaaatgctacaataaacatttcctttgagcatcatgttggtgctcaaaaactttcagattttggagtatttcagattttggattttgaaatttggaatttggtatgctcaacctgtattgggtatattacttttaaattatattcagtcccttgagttattgctataaaaagccagttatttccagggtccagaaacgagtcagagatggaattctgcatatgtcttcataagaaggcaaaggcatctaaaattataaactttgtttttttacttctgataagaagtcacttctgagtgaatttagagtttataatgacactgtgattacttgaaaatgaaggattggtcatgcatattcaatgtagtaaatacagtaataagttttctaactcattttcttctccgacaatggaagctgcaacatgtgcttgacccaggctagttgtttagctcagagattaaagattgcacacaacttggtaaagtgctgataaaacagcaacaggctgggcaccgtggcatgcacctgtagtcccagctactcgggaggcttaggtggaaagattgcttgaacctaggagttcaaagccagcctgagcaacatagtaagactccatctctaaaaacaaaacaaaataaaaactcagcaatatttcaactcagagctaaaggcagtaatctggaaggagcagtaatccccctcttagaacaggaaaaaaagccaaagaaacagaaaactcctttgggagatctgaaatagcatg

SEQ ID NO: 95508 - DNA, 1080 bp, Homo sapiens
tatttctgcaggagtgtttaagagtgtacatgggatacacaatttctaaatgcttgagggtcttttgagtgcttgaagataaacaaaggcattgtgatttgaaagtagtagtattttagaatgcaagttccacctgaaatgtgtgtgataaagagttaaactattttcaaaaatgaggacttgtgcagcccatctctgcaatgaaataccatttcccactgatttgatcacactctttttccttaagccctgcttctccccatattctgtgcttggcatggtaattagggacttccaccatcagggatgggatgctcctggctattccccgagctacacttacccacagcatagttctgtacatttcttggcagtgtgcggcatgtacatttaaatggtaggatttagggaaatcacatgctagacagtgctgtagaagaggagaatcagctggggttgctagctcttaattgaagtttagttggaggttcaatgaggtgagactgttatgacagatttcaaaatgtaatgataggaaaatgaggtgggttcctcaaagttggagtaaatacggagcaacagctcagcaactcagcatgaaacaacagctacaaaccgtcaaaaaatacagagtaattaaaatgtgcattgtgcagccttccttctcagtgggtacctttccaaggaaagcaataactttattgtgaaaaatataaacacgaatttggagatgtaaattacatgcatattttaatcttgttgataaacatggaaagttttcaaaatgtaaatataatcaaagtaagcacacaactgcagctgaaaccagatttgagaaagacctcaagaaggtaaacgtaccccagatcccccaaccccaaccctacctatctacctacgctttctgtaatttggaaaagataaggtggaattccatcctcctacttctaaggacacaaacccttaccccttattttttaatgtcacagaaggggtagtagatttgactttttctctctacttcccctctcctctcttccccctttggtctacacgtgtagtgttggagattagctagtg

SEQ ID NO: 95509 - DNA, 1034 bp, Homo sapiens
caccacgcccgaccgccagtgcttgattttttatcccgccttgaagccaggacttagagccatgacccagcgtgacccagactcttccagtctgattcagcctcaccagactttcttgtggaggctggtgacacaaagacctggagaatgattggaatcccttccagtgaggagggtgatgatggtggcagtttcttctggtttccaggctgctgttttcctgtagcaccatccagcgtcccttgacagtgatgtgagctcatggttcgctgcagaggcgtcgtcccagaccagctctgcagtgcatggctgggctttttttctgatgatgaggtcttcaagcctatttttgcaggtctcctggagagtctatgggaaacccagtattctctttaaaatgccattcatttcaatttaaatttgccaatgttggctttggctgctttctactgaacaccatgtggagttggttagcatctctcttgaaatgtggaagaactgaaaaagagaggtacatagtgtaactcacagatgattgtaaacctctctgaggtggggagcttaagatgcatgcattccatttccaaccagtctaagactgaaatttcaacttttgccttactctcttcagcaaccatgtgtgaattgtgtccagaaggtagccctgtttatttctggaaagcttgagtattgcgaaagttttccttaactgccaatcgggctgcctagcacaatggctgacacatcgtaggagcttaacatatttgttgaatgaatgattgaactgtagtgtccatcattgcttctcattttatccataataggcttatagaataacttcaatctcttgtccacatcataaccctttaaaatgtaagcctttatgtccttgagttctcacacccccggaataaatgctgtcagtgacttcctgtattcctcttctttgaacaccttcctaatggatgacatctggagcctttggtctgtaaacagggttgtctccttctttgttttacattattaatcaaatt

SEQ ID NO: 95510 - DNA, 1148 bp, Homo sapiens
aggcaaccttcctctttccgcttcttgttttctcctactgcttaccacaaatttgcattttattggatgtctattttttttcaacataggacttaactgttaggtgtttctgcaacatttaatgattactaatcaaggtaagctgactgatagtatcatgtctgtggaactggggagcagtgttgagggtgtgatgtaataatagagtgatttgatttgatgtgttcatccaacatgcatttttttagtgccttcagtacttcttactactctctctccagcacctagaatagcatctggcccacagtgggacttagtaatacttattgcatgaatgaatagtgcacgtttttgtgaattactttgttttggaatggaaaaaaattaacacctagagtctagatagtgtctagtctctatttagcaaccttcatactagtaacaaacaagcagtatatatttttctaaacaaagtagtatattatgctcataaaatagttttatgttttcatttaatcttttcattgcattccaaaaataatcatcctggcttcatgtgttttgtgaacatggtctgaacttctgactatagaatgatggtctttaataaagtgccagtgacagtctcgtcataaaggaggttccctgtctatgctgccatcagttgtaatggctttcaccacccatgggcctcacagcctctttcttcatgcttctaatcactttcagtctcatttctcatagtggtgattccaattgttagcattttcccaagtccccatcacagcaggtggtagacatctgtacctgaaggccccctggcatcccaaatgcatgccccaaactgagctcatcatcttcctcctgcccttcataccgattacatctccccctcaatcccacttctcagtggcttcactgtttgacgagtcattcatccaacccagaaactgagagggcatcttcagcatttccatgctggctaccatgtccagctgattcccatgattgtccttaaggaatgtttcccaagaatggtgggagacaggaatttcccaagaatctgtgtattcctcactgtcctggaaatgttgttaggttagaccttcttatcttcctctctccctcagcgttagtagcctccaccc

SEQ ID NO: 95511 - DNA, 1071 bp, Homo sapiens
tccaaatgaaattgaagggtcactccaaagattaatgactctgagatgttaattcagaagagaatttattcttaaaggctaagatttattctgggccagagattctgagttcagctgggagactaatgaagcgtgtattttattttttagcgtttttaatggtgctgtcagtcatatagcatggggcttattcgcaagaattttaggtctggttaaaagtctctacattcagactgtgagaaccttctttaatgggaatttttttcagaaaacctttagggggtagcttatttcttttatacttgaaaggttttatacatgagagttctgtgtttttatgaagatatcgtattggtgtgaattcatattaattattaacatattgcaaaggttaaaatgcacatatttcacagcaaggcaccatcccttccctgggttgcatgttgtttttcctgcctggggtcaaatataaaacaatttattgatatcctagccagttctcttcctaaactgtggatgaagcttcaattccactttaaaatacatctatcattgttcaacacttcttcagagttaaatatctgtgcagaataataccttgttttcctttgttagaagtaacgttcacttcatcacttaaactgcaccgggccctatcaacacaggacattggcttcttcctcactaattagtgttgttcttacatcataaaccaattgatgtgcccgtcaaaatgtgcattactgggaaattgctagggccatgccttgggcccagactacagtttctttatgtgggcaactgtcatgacgacagccttgagccttgcattgagttcagttctgtcacattaaaaagaaaattctccattaaaaataactgagtaagtaaactggaacaggatggccagtggattatgcaggctttaccatgagctcctgtctgtcatgatatgctctttcatcagccagaccttccaagagagatgccccttctctagaggtgagcctgcattgggcactgctgtgagggatgagtgcttcccaaatgcagcagtcctcatgaaccagg

SEQ ID NO: 95512 - DNA, 1030 bp, Homo sapiens
tctgtagctgagcaagtgacctttgtttcagaaaactgtagtttaaacttgccaagattaggagagttggaagaacttgtgtatatttgtgaatgtggcgtgaaagtaggaagaggtattttttcagaagtaggcatttttgttttcttatctattcagtattttgcattccatttgtgttgccaaaatccagacatgtcaaatccacaggtacttattaagacaatctgtgtgcccagccctgtgacaatggctgtagcagaaatacggcatttgcagtggtcttggtttagaaggtgagattagcataagcagaggtttgagggaagagtgggagcaaggagtggaggacaggaaacaggaaggagactgggctgctggtggggaggaggcaggacaggccctgtgagggcagggcaaagtgggagtcagcgttggccaaagcgagagagccccaggcagtggagcctttgatgtcaggcctgaaggcagtggggactgtcttagaattttatgctgagatgaaaatgtatgactgaaaaattggtctggtggcaggaggtgatcagagtgggtggccgcaagaggcttcctggggaatgggcttcctcagtatccgggtgcagcaggtgggccagaggcgacccatggcagcccccagtgtcaacgtgagcaagtgcaggactgtggacaagactgtgatgccatgcccggggcagagaagatgatggaaaaggagaagttgccccagatccagtggctcacagaagcactcttcctgaggaagagcttgttcttgaagtttgcacccacagcttctcctaggcgatgggcttggagagctgtggtcagcatcaagagctagcctggcagcagggcaaggatgtggctgcgagatggcatcgtggtacccactctctctcggtgcctcagtgtccttgtggaggatctggcctctatgacttgagtgatggtaaagtgagatgatcccatatggcgtttgacgttgtgctgcacacggggtgggtgc

SEQ ID NO: 95513 - DNA, 1018 bp, Homo sapiens
ttggcttgttttcatttgacatatccccatcattcctcattatttctttttccagtatagcaagatgttctagaatcatttcatcattctacaaccccaacctagaatcagccagttttcaagagagccctggttcctttgattgcggacatggtatttagaaaccaagatccggataccacatgtgctcattactacttaagtgttgtgtgttctaggcccgttcattggacagagctagactgtgtatgtatttcatgtgcatatatacatatacatacgtatatctgtccacatctacttcagtattgatcatctattatctgtctaccaatctatctaatagaaactagggttcatattgacatctccaattccagtccagtttcacaggtttattctagtgttcccgcttctgcatttataactcccttctctgactataagaaaacttgttcccactatccacagtatacttacttatttgatcaatatcagaatacacaaaaaagtggattcaaaattgctaacattgtgaaaatcaaggctgctatctagaattcaatatttgtttaaaataattctttatataaagtttcctgttgtatgtaggtacagtaggggctatagctgaataagacactgtctttgtcattaaattacttccttctcttctttcttttcccctctgaactgaaggggtgaaattgaattggttttgtcacagtggttatcagaacacagtaaagggcttgtgagtctaggctctgatggagtgtggggttagtggggaacagtgtgttggggcgcagatggaggtttttcctttctcttgtctattttggtcctacttagtgtgtgtctctgtaaagaggacagcccttcacatgcatctctgaaatctctttaaggacatttctgggttagctattgccgtgtaacaaagtactgcaaaattaagtgacttaaagtagccataacaatttattttgctcatggatatgcaattttggcaggg

SEQ ID NO: 95514 - DNA, 1051 bp, Homo sapiens
taaaaaatattgtaggtaagttgaacttaatatcagttttctaaaaatgaacagaattcacctattcaacataaaataatctgaacagtcatggcttctctgctcttaatggcagctgcctggaggattgggttagttcatagaaggagccatcccgtattcgacaacccattctagaactggcaaactaacacctccagaaatatatagacaagagggcataaaacagatttcacataattaaattcatctgaaatgtgaaaattatatatctagttttaattgatgtgttcaaccgtgggcattgatgtgggaaatatggtaattacacttaagagataaacattaatagttttatgctcatggatcatccataaaagaagaattaggtgccccaaatgtttttcatccatgtcttttatgagggaaaacgttgcagtggagggagatgattctgtactactaccggggggaattaatgattattgtctatattcataaaaatgagacagtaacctaagatgtaccataaagcagtaaaaataatgattagaattggtattaactcctgctttttaaaggaggatagccaggcatttcattcccctgatgaaaatcaacttttctgtggggagatgggggaatatagtggttttgtgcaaaaatggttttgaatgacaaagactcaaagatacccaagtttggtcttcatgcaaaagtttttctactgaattttgttggtgctattcatttgtataacaacctttgaaaatgagattaaaacctatgaaaggtttgcatttggagaggctgcttctactgggttttggtttcaagtaattactagtactcactattcatacttcacttaattaccacttttgtgaggtagcctttaggttagcactgactgtaacagtcattgaatacctatttgcgttaggtctgtctcacctcataaatatttgttgtcagaatgaatgaataaaggaatgcaaagttgttaatgaattaaaggttagagcaattagtattacaaacactgtcggga

SEQ ID NO: 95515 - DNA, 1063 bp, Homo sapiens
gaatactttttcatgtgcttattggccatgtgctatcttcatttgtgaagggtttcttcaaatcttttgcctatcttttatagtgttgttgctaatttttattattgagtaccagagtggtttttatattctggatccaagtcatttgtcagatatatgtattgcaaatattttctctcatttcgtggcttacttgtttattcttttgatggtactctttgatgaacagatatttttaattgtgatgaagtccaatttttctttcacatttattcctttctgtgttacaagaagtgtctctttcattctaataactctttttaaagctttttattttgaaataatttcaaaattataggaagttgcaaagatagtacattgagtgcctacgtacacttccttcagctacgcttgatgttaacattttacatgaccatggtacagttattaaaaccaagaaatgaacattacagtagattaagtaaactacagactttgtttggatttcaacaattttccccataatgtcctgtttcattccaggatccaatctgggatactacattgcatttggttgtgataactcctcagtttcctccaatctgttgtagttcctcagtcttcccttgtcttttatagccttgacacttttgaagactactctaagaattttgtagaataaccatcaatatgtgtttatctgaaattcttttcatgatgagactgcaattgtgagttatagaaagaatgaatgttacagagttggcattctcattgtttctgataacaatttttagctttgatgtttaggtctgtgactgtttcaagttgtatttttatgtgttttcttttgagaaaactttgctgagattttgacttggatggtattgaatctttagatcaatttgggaagaattgacatctgagcactgttgagtcttccaattcatgcatgcatggtatatccctccatttatgtattcactcagtaatgttttagagtttttagtataaaaagctggcttgttttttgttaaatttatccccaagtatgtatttgatg

SEQ ID NO: 95516 - DNA, 1035 bp, Homo sapiens
tccagcctgggtgacagagtgagaccctgcctcaaaaaaaaaaaaaaaattaataaatcatttttggtgtgtatggacacaggaaaattaagttgattaagtagcattttgggttctatatgtcattttaataattcctaaatctgcagcatagcacgtgatagattgacctcatgatgtcggtttttccagatcgatgttgaattcattgcagtaagcaaaggtaaaatgaagtttgagtttataagtaatgtgacagactggagaatggtgctggtaattagaagcaggatttccactccttaaccctcctcctcatgacagccctcttccctactccagacttaaatgaaaagattgagaatacaactattatttggtgaccactaactgcatacaaggtgctatgctaagcaccatggaaagaattctgagaggactagagaggaacttagagcctactacatatatttcagacatgaattgtaagtaggagctataataaagatgctaatcgtaatatgggtagcagggttcatttctttgggaactctaggaaaacagctcaaaggagctgatggacaagtggaaccttgaaggatatttaagatttgtgttggatgaagggagaggatatacattgttgtctttgtgtgtatgttttttatttgttttccaaaataatttaaccccccacaacagggatcatatcttttgggaaattttccgaatcccccagtccagtgtggaacaccgaagtttgttcagtgagacttggaaaggacagggcaggtgagctcaggggaggaatgttacaataaacatgggaatagcttaagttggagaaatgtctgatgcctctttgagggtcatatctagcaggccgattcataggaaggttcactcccagtagactgcattaagtcatctgctcagattctctcttgtccattctatactcagaaagcagagatattccttaaagtgagattttcctatcttttataggtaggtattgatttttttctttacctt

SEQ ID NO: 95517 - DNA, 1062 bp, Homo sapiens
atgtttgctaaatgatgattgcatttaactgtgagcagctttttcagatattaatcaaaatgcctgcaaagactacacagttgcaagggacatcagcttatatcccaacattattggttcctgatccatagttgtgagaccttggttgattccctgatagtacagcaactccctgggaatggaagttcaacttgttggctttagaacaacataagcagtttcattgaacattcactgaatgtctcctctgtgctgagcccatgtcagggactgggtctttaatcatgttcttgtatgcagcatccctgcactctacctgcacatgacttctgaacagcatgctctgcccagacagcctcagtgagggccaggacttgaaccctgtggaagcatgtaaagacatatttccgtggtggcagaaggctgagagttcagcatactgtctgtcttcacttttgagttgttctttcatctgcctaagactcatggcagagcactcatttcacaaactttcactgagtgccgactatgtgccaggcactgtgccatgtgctgaaagtacaaagactttaatatgtagtccttgacctcaaagagctcaagagtaattgacagaaattcctagatcatgatctgtgatgatgagaatcattccttagaagggcttgcatataaacatatttatatacttattttgtaggaaaatatccttagtaagcttgaaaaaataaggattgatcatccatgtcaagcctgacataaattttaataaatcagtgtgagcaaaaggaaaaaaaatgtacaataataataaaataaaaccgtagtcatttatacttcatgctgtagttctaaaataaaaattctcctttggggctggtgtggtagctcacacctgtaatcccagcactttgggagtctgaggcaggaggattgcttgagcccaggagttcgagaccatcctaggcaacatagtaagaccctgtctctacaaaaaaatgtaaaaaattagctgaacatgatgtcgcgcacctgtggtcctagctattcaggtggctgagg

SEQ ID NO: 95518 - DNA, 1088 bp, Homo sapiens
gcctcagcctcccgagtagctgggattacaggcatgtgccaccatgcttggctaattttgtatttttagtagagacggggtttctccatgttggtcaggctggtctcaaactcccaacttcaccttgctgagtttttactttcatttacgcatgccatttcttaaataattgtccaaaatgtattaaactgatgtcaattattctttttttacttctttaaaagttgactttaatctacagtatttccttctagacctgaaagtgtggctcctgtggtgtttctgtgatgtgtgagtcgcacactgctgtgtagtgtttgtgcggtcagagttgttatcatcaaaggctgctgccacttcaagagagtgggtctgagctcaccctggactaatttgacaggtcccttagagttgagattataaaattcttcattcaagtgaactgaggttggggtggtctcaagacacagccatggtgttaccttacccagcacatggccaagaccggcctccggaggctgcatcttgttttctggttcctttctgtgtttcctgttgacaaatgagcacaactggccttatttactgaagtgatacgataaaaagaggaacctaacttagtttacacagatacagttactgaacttttgaaggagtctttcatccatggcagctttcaagctccatctgacactggaaaacaaagtttacgagaacaacaacttgttctagttatagaaatgtaattaggtgagtatgtgctgtgaagatgacctggaaatatcagctttcccttgtagttgtctgtgaggacaaagagcttgtattcaaggaacaagttcaagcttccttgaacttgtattcaaggaagaatccctggcttaatgttttatatattttaaaaacttacataatgccatttacctgctgcgttgagattttcatgaagttatttagtcttaaactttaatttcccttcccatattagtacatctgccccacaatagctatgtagactctgaagcatgaaacagcctctgtataagtctgttttcacgctgctgataaaagacatacctgagaccggg

SEQ ID NO: 95519 - DNA, 1028 bp, Homo sapiens
ctgtttttgctattgcttttaatggcaacgctgcagttacttttgcaccagcctaattctttggctttcctgcagagaaagcagctcacttttcttgacatctccagggagtggcttgagctcaataactgttccatgaatggatgactgttaagtcctgacccatcccacctggggcataaactaaccaaagtaatgagatgggaagggggtccttacatttatttcatcattttgctaatttttgtcacaaatccaactgattctagagtcatgataatccatggttatttaatgtcttaaacctatgaaccgtctacaagattacagagttgaaaaaagcaaagactgggtctgtaaatttcaattctgaaccttaagctggtggttctcggaacttcagtatgtaagtgcttagacaagttactgagttgctcccggatgtgctgtgagagccattgtaagtgtgactttaaaaaaatatgtacatctctcagatctcattagagcctcatagaaatggaacatgtccttgaaaaccatgaattggaaaatgcatacattttgagcttgtgtttggggactagctctctgggtcccagtggtaaacttagcccattaatggctgatgctttaaagaaatataaaagcccctaggctagtctcttcttccctccccccatctgcatagcaggtaccaatcttcatcaaagcttttgaacccaagtctcagattgcctttgatcagaagcctggtttgtcccccagtgcagaaatgtaggaactgtgtgagagaaagagaaagagggagagaaggagggaagaaagaggagagagagaaaaagaaagggaggaggagcaggagagagaagcctgtctcgcctactatagaattttcttctctcctctcaaaacaagttccttacacatttggctgaccgcatggtacacgtggctggtgtcagggttctgtctgaactctgtgattgaggagaccaacctgcaggagccactttgaagatgcttac

SEQ ID NO: 95520 - DNA, 1048 bp, Homo sapiens
tgattagggtaaaacccatcatcaaagcaggccaggtgctgatactcagcacacgaagctgtcaggaagtgatccttcagatttcctggggattcctgcccacatagccccaccaggctgtaacagctcctgtgcctcagatgggggattagctgagactgtgtggctagtgattgctaatctttccgtaccagccaactgagatcctctaattcatacccagctcgtaaatacccaaatctgtttccccaaaggctgtagttcctgagggttagattagccagttagtatgggtgatcttcctcttctgattttagaatacaaataatggagatttttttaaagatttatgtttgaatttatattcttacttcctacctcctcctgcttttattcagtgattcatcatgaaactcccttaactgaggacgagtaaccgggttacttactgggaagaccttttatttgaagttgtattgtttcacgtagacggtctcagttccttcctccatgtcgctggggactctgatgtcttactctcctagctcctttaagtggaatggaaaaaactgaagtgtattcaaattgtgaggggatgcccaggtgatgctcaacaaccacagcttctcttgagggcagaccctgccaaaatagaaaagtggcactagagtattcaggtagataatagctctttgatatggtctatttatggggtcctagaaacactgatggtggagccaaggtctcaggaagttgtcagtcatcatatggaatgtaagattgtcacagtccatcattgggatggcccaccatctctgcacactttggaatgtttcagtccccttcttcctaaattgtacatgctactgtagtgagaatgtgtcttctcagtaaggttcatggtactttgttcttagtacttccttatttcagagaagatccttaaagaaaatacctgctcccctctcccttaaaagagttataaagtgcttatgaaatatttgtagaatggctgaatgagaataatgactataggtaaattgtttgg

SEQ ID NO: 95521 - DNA, 1088 bp, Homo sapiens
ttttataaccttttccttaaatccagggattgtgcattctgaatgttccaggacattcttcccaattataaccaccctctcttaacactctcatgtttgaccagttgtcactagacataccatccttaagcaaagtctgttattctattactgtttttacatcttctctgttaaaaatcaaatgcagggccgggcgcggtggcttatgcctgtaatcccagcactttgggaggccgaggcgggcggatcacaaggtcaggagttcgagaccaccctggtcaatatggtaaaaccccgtctctactaaaaatacaaaaattagctgggcgtggtagcaggcgcctgtagtcccagctactcaggaggctgaggcgggagaatcgcttgaacctgggaggcgtaggttgcagtgagctgacatcgctcactccactccagcctgggcaacagagcgagactccgtcttaaaaaagaaaaaaaaatccttcaattcatttaaattctatggcctttatatgtatagctcctccatatcctcctaaatgtctttgtgagtgaccttttcccttctctctcagcctttcagaccaggacatcactggctcttatccaggttgagcatcccaaatctgaaaatccaaaatccagaatgctccaaaattcaactttctgagcactgacgtggcgctcaaaggaacttctcattggaacattttggacttcaaatttatggatttgggatgctcaaccggtattctataatgcaaatattcaaaaaaaaatccaaaatccaaaatgcttccagtcccagcattttcagatggacctgttcctgtccatcaagaaataggtcctaccctgcttctcttttcctgaacataaatcatcatttcagaatgttatattctgggcttttggacccatgaaaaaaccatagctgtcttgggattagacctgagaggctgagagctgtgcttactgaggtgtcctgagttgacactgcttatgaaaagtgccacagttaaatccaccttgggctggtgtctcagctgaggggggaaaaatgcatgacaatacttactgaagga

SEQ ID NO: 95522 - DNA, 1157 bp, Homo sapiens
atggaagttggatttttcatcttgggtgattcatttcaatttgttgcaaatatttaaatgttccttaaatacagtgtcaatctaaactgaaatgagctcttctgtaggagaggagcttaggtgttctttaagagagtaaagagggagactcaccagggcccttttctctcctgcatcagagaacttagttatgtttatgtgattaactgagttaagtgtgaaaacctttgccccatggtgtcatcaggaaggttaaatgttacccaagtttatcttaattaaacatttgtatttattttctaataaaaagcaaatgaccaggtatgcattaagtaacttctcttggcattctgccagtggatttatggaacaaagatgaaacaggatagtccttccagggccacgcagaaaaagttgatcaagcagaaatcttgtttgtgatattgatttctcacacttcctttctttcttagccataaaataataaaataacaaaataacatttgtattagattaataggatatgtcagaccaagagagagagagcaacagtgcttcctttgagtgtcatgttggtactcaaaaactttcaaattttggagcatttcagattttcggatttggaatgctcaagccatataagagcgagtaatgacctggttggaaaggctgagagaggaaaaaggtaattctataggtgtatacagaggggctgcatgtataaaggccatagaatctctctgtctctgacaagtgtatattatatacatggagagccagagaaagacactaagactcatattaaagaattggttcacataattgtggggactggcaagtcacaaatctgcagggatggccagcaggctagacacccagggaagagttgatgttgcagtcttatccaaaggctgtctgatggcagaattccctcttccctgagggcctcagtctttttctcttaaagcctccaactaattggatgaggcccacccacattacacagagtaatctgctttactcaaagcctactgattttgatgtcaatctcatctaaaaaatgccttcacagaaatgactagactagtatttaccaaatgtctgggtactgtgacctagctaggttgacatataaagctaaccattacatcatatca

SEQ ID NO: 95523 - DNA, 1035 bp, Homo sapiens
aatggttaaatctgtccttattttgaggttgtaagataaaatgatttcatggatatgacaatttagtgaaagagaagaaaaatccctctaaattttcattcagtcatatgatcttcattattagtagtagcaatgaattattgtgatcattcatgcaggaaacaaacatgacccaggctctggtatacagaatacagtgactttatatgcctttcaccagagaatgttcagattcaacccatgtatttttattcttcctctcctagaacctctaccacatattcacccacatacttactcttctttaacttatttttcccttattttttgacaggttaaagtaaaatgaaacaaaaaccagaatcccaaccacacagccagaaatacttggctaaggaaaagagtatagaaacaatccatttaagcttactattatgttacatttaatgcttctgcacaattaattatataattatttgtccaaactgagttgatgcagtggcacatgtacgtaagatttagctaaagtcactttgttagtagtgtgttgttgcctgcctcctgtaaatcaaatagctagtgtcagagattggatgttttagaattcctttgttgtggctagggaaaatagaagagtagagtgatttcagtacctggatatcatttcatggttattgtgtgatgatgtgaaaagacattttattccattatttgatatttgaaatatttataagagttatgagtatttagaacattcatataccaaatggaatccacatatttccctaaagtttatcttttcttctgcctttagagcaagagtccccaacccctgggccacggaccgctactggtcagtggcctgttagtaactgggccgcacagcagaaggtgagtagctggcaagtgagcaaagcttcatctgtgtgaagctccccattgctggcattactgcctgagctcacattagcagcagtattagattcttatagaagcatgaatcctattgtgaactgcacatgcgagggatctaga

SEQ ID NO: 95524 - DNA, 1251 bp, Homo sapiens
tcagggcagctcagaaggagccgcacatcatgggggttggcaagtgtggaggctgggtcctgattagcatatcacagtgctctaggagtcctggaacgccttcctcttccatgtgcactgctgctgacatccaggccattttggaacctgcaaatgtctcttccccaaatgcagcaagccccaggctgaatttggaggacccctgtcctagctagtatgtaagcaagcacaaaggataggacaggagagggaggcaaagaagaaagagcagaggacggagagagcaagcttgacttcttaacgaaaggttgtaatgtgaagcaaagcacttgttagaagagaaagtgtttgggggttgtcataaggagagcagcatttagcatattgttgataaagcatagcatctcagcaggatacctctgagttagtccatatggtgctagtcattttctcagtaaacatagaaaataattgtaaatagtaatattaaatgaagtatcagaatgactacggtactttttttttttaacagttaagaatgtgtgacgttatttatgaccagaaagttcagattgagtctaaaaatcacagtagaggctaacccgtattattattatttaaacacaattaaacatttaaagatgagttctgggggagtaattactcagatgttaacactagtgcccatcaaagaaggatttttaaaagatacattttcacatttcgtttattgtaaaatcttgattgtgctactctattaataccatgaataatcttaagtagcaggtaagcaaataaaatacataattgtattttggcttattctgtgtaagtttacaaatctgtttaccttattcaacaacaaaatatttattgatcaacacactctgtgccagttactgttttagacactggaaatgtaacagtaagcaacacacatacaaatccctgtccttggttattctctttaggttactgttaaaatatctgtggtcctttgcttgggtgcagatgtgattggttgatgcagggggaagccataggctatgctgggtgtagagaggaagctaacacggggttaaaatggggaacatattgtgaacatggatttagcaagagcgggctgtgtttacaagcagatagaaaggggagaaacacatgactgatttttggaggaaaaatgccaataatcgcatatatatatatatatatatatatatgctatacactattttttaaaatgtaagttca

SEQ ID NO: 95525 - DNA, 1307 bp, Homo sapiens
gcatgctaaattatttcagggcagtgaaagccatctcaactcctagttgtaccaaagcagaaatgtcaactaaattatctttaatgaaatcattttcttttttaatcatagagtcaaccaaagtggagaaaaaaaagatttgctttaattgcagccacttggaacacccagcctggggttaaacatcctttcatcttgcatgattgtgacagacagagtaggcatccttaactctgtagatgcttatggtttggggataattgcaattgggttagggaagcaaaatgaagaaaatacatggttgagaggaaaatagaatccacttaagggcaaaagtatgttttaaaaatggaaggaaatgaagtcagttgctgaccaagttgagcaagtgggaggcactaaagcatgaggccagaagaacaggatggcaccaagacaaaggtcatgtaggcatagaggagggactagttcattcttactgaggggagctgggaaggggcttctcagctgagtgggccttgagaggaggatgagggaactcgggacagggcaaagatggatgtgtataggtgcatgtttttgtggtcagggaacacagaatgatctactgttgctgagatgttttggggctttgttctttagaacatggtgagacattaaagcagaatggtatgttgcaggctgtgttgaaagtgagacaatcctgtggctgtgtgagggatggattgtgttataaaagacggcagtcagggacaccagctaggaaactgttgcaagagcgtaggcacacacaggtgaccttgggctaaggcagtggcattggttctggaaagaaagtggctgtgtgagagtcatttcagaagtagaatacaaataacttggtaattaattaaatgtggagggtaaggtgggtgaggtgcctgaaatggcttcaagtttctttgctgtttaaggatatggtggtaccgtataagcaagggtgtgcttttttctctggtgaacaaagggctctacttgttgtgtttgccagtttccatggcgtaaatgccctcaccaaagcccatttcagtctgcccccaggacagtgccactgaatgtggaggtgggaagagatggacacagtcagttcacaagctggtttgagccagctccagcatacccctgtgtctggtaggttatagagaaagatgccaatccagttttgaatggttcaaatttaatgcaacagtggaacgtccataggaaagagtcaggcaggcattggaagcctagaactggcactcaggagaaaggatcaggcaagatgt

SEQ ID NO: 95526 - DNA, 1054 bp, Homo sapiens
cttgctgtcatcattagtatttcataagcaggtatatcctttccaagtaaaattgttcagtctagatagttagataattttgatagattgttgggtttactctgctttgtatgataattcaaaatatctaattctaccccaattcattagggttaaaaatgagaggtcagtgattcattgggtctgggtggattccagcttcaagtcaaccgtgtatccctcacttgcccaatggctgtcaagagaaaagacccagtgagctttggtgaaacacaaaatcaagttgaccttggcctaacagtaagttaatatgattaccagggtatgaatgcattccagttcagcaggcttctaggatggcccacataatcctggttatttcaagtggaaaatcttaatattcccttagtgattgagctacaggtttcaggaagtccattattaactaccactgccttgaattgaaacctgatgatgttttcttcctttcaccatgccacggagctgcactgccatacctttcccagaccatcattcactctggtagagtttgtcacacgtgtcacaatttgggaaggcagtgtgcattctccatgggcaccagtgggtgcactgggagaagggactccaacagatctcattaattagccttttatttctgccatggatgacaaatgtcagcttttgcatttgttttatactcaactgttgaactaaatctccacactcagaagagacccttcactgctgcgggaacagtagtgaaaaatcatttccattttccattggtcagagagacaaaaggttgtcagattgggtagagacaggtttgagataaatgccgcagcaccctggtagtaaaggagagagggttatctgtgcatcactgcagcgattactcatgcttttagtggtgtgcctttcatcactgcaattagcttcttgtctgcgagtgtttggatacagagtctgtggttgtcatgcagtcagtgtcagaatcgctcaacactgtgctcacttttgtgcttgagtacacttattgatgagcacacag

SEQ ID NO: 95527 - DNA, 2017 bp, Homo sapiens
aaaagagataaagaatttaaaaaaatttctaaagatggggagctgtttattctccttttcatggaatctgaatagtcctttctcatggtttatgagacttctccttgaatctaaatattctcagcctcagagccatagctgttctgagctttggatcagccttcttaccccttttcttcaagagcccatctcacaggctgcctctcactaagatgagctagttcttaggcactgatttttcccttgggaaaaaaagcagtggagttcagtataaatctttgctgtaaacccacactgtatataacacactgcagggtctttgcacgatacaagaacaacttagtcccggtcctcatcttttgaggatactagggaggcaagcaaatatatctattaatacaatatgccctatttatatacttccagatcttcaacagactattctattgaagagatcattgcgttgatctcttcagttgaagagcccatgtagtcagtccttccaccacctgcctttgatcctgttagttgctgtcttagtttatgtgggctgctgtaacaaaaataccatacactgagtatgtgtgatgtgtaaacaataaacatttatttctctcattctagaggcagagaagtccaagatcaaggtggtggcagattcgttatctggtgagggcctgcccgcatagataacatcttattgctgtatcctcacgtggtgggagggtaaggcagttctctggggtctcttttataagggcaccattctcaactggctctgcccttatgatctagtcaccttccaaaggcccctcttcttgatatcatcaccttgggggttatgatattcaacatgagaattttgtggggacacagatagtgagattatagtggttgttcatctcttccctgccatgccatgcacacacgtggcaccttgggtttgtctggggggagaatgatgttcccgttatcccgatggtgtccagcttttgtatttgtcatgtcagctgctgggcctgtcttagaagttgctaataacttccactttaatattactcttattgatgcattgggtttttttattgaccaataaataatttaggcattggcaatgttaagaccataacataaaccttttctaagtaatttttccatattgagcttattagcatcttttggtatctgctgggtttttagctttacaacaggcactcacatataaacatgtttatcctatttagatttgtagttcctgggagtcagagttctgtgagcagtcttaacttataaagcatgttcagacatgcttttcagatgattttgtttcattttaaaaggggaaatggcattaacctaataggaattctcctcctgaacctcagaggcagcagatggtacagctctctttgaactttactgcccaggtgaacgttctctgcatttagatcttcaggagttttacagactagtgtggagtggacatgtaaggacaagaggaagaggcaggtttcagctgagctcttctcctccttagagcaggacagtgttgggatgggctgattgtgagtatggagttctttctggaggagctccagcaggagctgggcaaatactgggagctttgactaaggggcatgcattgcagatgaggtttgaccagaggttttccaggatccctgaagaactctgcacttctaagcctgtaaggccacaacaggtgagatgaagggggagttgaacttccagctccttgtgtgtcccctagggttccccttttgggtccacacaaaggctcttgagcccaatctgaaggtctaaggctatggatatctcctccatttctaagttgggacaaggttgtccagcaaaaagaaaagcaaagactggtccaatcttagagacgtttgttttggaagcagagctgggctattagctttcctcaagaaggaaaaaggagtgctacaaagttaaatactgatttttaaaaaaaattggcattcacacaatttctact

SEQ ID NO: 95528 - DNA, 1013 bp, Homo sapiens
ttaagtgttctggcaagaatttcaggcagcaagcagttcctgtgaattaactagatccttgtgatggggttggggggttggtggggtgggcagacttggaccatatagaactggaacagatggtattaatacactattttgtctttagatttgtagatttttaatatgcatctttccatttctattccattatttttacgttcttagagctgtagcatgtttttgatcctataggttacccaaacaaagcaaaaacacatttagatgatctttcaggttagttcttaagcaaccttaatacttggtccaggctgccacagaaggggactatatttatttcctctcaatatgtttcctagcatactaaagtaaggacttcgcataaaactggaaatggaagctgagtgaaagtgatctctttcactgttataattttctactcaggactggatttagaagctcatagattcctttcctgtagagaagtcaatgaactgtttcactggaagcaattgatacctacatatcaatcttggatacattgtgtatttcttcactgtccatattatgttcagctctagccacaattgccttaacacttgaagtttcacattttaaattttaatttacactatgttgtgaaattaaaaaataaaagactaaaacaaatgcaaaaacaaagcttattcttacaatctgggggcaaaacccttctatattttgtttcattttatgtaaaagatctttttgtttttttaaaagagcttttttattttattttttgttttatgtaaaatagcttttctttctcatgcttgaaaaccagagttttataaaaacctttttgaagttgctttttttttccaaaatgaatgaaattaaaactaatgttatttacattaatttttctgctctgctggcacttttcggagctctgtagtacaattgcaaaactctaaaccttctgaaaactgcttccctgacagcattatcctctttcttcttttgattaa

SEQ ID NO: 95529 - DNA, 1037 bp, Homo sapiens
aggatggattttgccgcttgaagaggttgtggctaaaagtggtgagtaaacgctatggttgacactgaaaatcagaaaacacagtgcatgtcctacattattattattattattattattattattattattattattattattatttgagatgaagtctcgctctgtcgcccaggctggagtgcagtgtcatgaccccagctcacggcaagctccgcctcctgggttcacaccattctcctgcttcagcatcctgaatagctgggactataggcacccaccaccacgcctgactaatttttttgtatttttagcagagacggggtttcaccatgttagccaggatggtctcggtctcctgacctcgtgatccgcccacctcggcctcccaaagtgctgggattacaggcgtgagccactgcgcctggcccacctttttattttttttcttcttatgaaagtacaatttctatatagaaaagtaatcctaagtatacaacttgaagaatttttacaaactgcacacacctgtataaccatcactcaggtgaagaaatggagtatgaccagacctgaagaagctctcctgtgccccctccttgtgatggccctacccacccaagggtggccactatcctgacttctaatgatacaattacttttgctcatttttgtgctgtatattattggcctttttgcttagcattttgtttgtggggttcatccatgttgttgtgtgaattttaaattgttctttctcatggtagtggggtggttccattaatttatccttacctctcactttttgctgtaattttatcatttcattagttttatttctctgatctaactccacaccaatttacctttaaaaaggtcaaatgcgattccttttactgcatgtgccatgcagccttttaaaacatagataaatgaggcagcaataaatttagcaaattttatgagtaaaagaaatgggtagcacattttcattattcaaaggaggtcatgttcatggcagtccattgcaatttcga

SEQ ID NO: 95530 - DNA, 1659 bp, Homo sapiens
cttgccattaatctcttccaaacttagttcaacctccatatcattaccagacatagactgccaaataaatatttttctgtagtaaggaaaaggaaaaaataaatcagatcatgttacattcatgctccaatagctccttttgtcctctctttcctagggcagtgttcagtgtcccccatgtgttctacagaacccagtgccgagggatgtcaggagttctgcaaaaatggtgtccaagttaaactgatttctttcctgccacgcttatcagccccctcgagaccaaatatatgttactaatctctgaaaggagattgtaggaggcagcatttcccaaatgtacttggccacaaaatggttttttgtttttgcttttgcaaagcaacccatagaattagtattctgggaaacttatgctagaaaacactaacctagaagagaaaaagctggagttgtgggtccggcatacaggaccctttacatcacctcacccctccagctttaacctcaggatgctgtgccaggtacactatactttagctactcagagcttgactgttgtccccctaacatgctgtgcactttgcaggcctccatgcttttagcgtgaatttctccataccagaaatatgcatctactcaccctgcctgatgaagtcaagctggcactaaatcttctttatcattgcctccaagaaggcttttctactcctcatggaatgagttgctttctatgttccttcatagcacttctccccctgccttcactccctggcttctctgttgtctaccatctatctatcatccttcatccctttgttccttctttccttcctcccatccattcatccatccatcatattatattttcagtcggctcacatagctgcctcttttattgttctgcgtgctcctggagggctggcatgctctcttattcatctttatatccttggcactgagtacagtgcttaacatgcaggtgcttcataaattaatgttgaattaaataaaaaagctttaaaaatcacagagcagttctttttcataacaggttcatagtgttttataagcaagcattatctgaggctggagattgagaaaataatacactttatttcttacattctgtcagagttctgcctggacattaacttcttaaacagcatagaatacatttttaaaacatgggcattggaagagtaggctcacaggtgaaccttcctttggggtagcagatgataggtaggagagtgtacacactgtaagaatgaatgggaatcttaaatcttataatttcattaaggatgcagacctagttttttcaaattgtggctacagaaaaagtgcttgaaaacaaatgcccccagccaggcataaggggaagtccaggtagcattgcttatttcagctaaagttgagaataaatacaattaaatgagctgtggcactgcccttggcccccagctagatctcagactggcattacaggagggtctgtggatggatctaaactaacgttagcttaatgcaccagcccagagtatagggtctgatttctgcagtcattgcagttgagagctgaacactcatctgtggagtgcttcattgtgctaggtacacatcgtctatgactttcgcttataaatgaggacccca

SEQ ID NO: 95531 - DNA, 1098 bp, Homo sapiens
ctctttcttcctcagctcaaaaaaattgacaagctcccaatccttgcaggatgtagaacaaacaatttatggacaaacgtcagttatttaaagatattttaatttcataatataaaaaatttttagttgtatgaaaatgattaagatgttaaattttatgctatgtgtacacacagcataaaatttaccatcttaactatttaaagtgaacaattagatcgtgttcactctgttcacattgttgtgcaaaaaaacttcataattcttgggtttttggttttattcctcacaaaagagacttgtaaatcctgttacatttaatgcaggattgtaagtatgtatactgaagtgtttaaggacttcatactggtcactgaatgcattatattcaattaagtagtggccaacggaaacctcctcgaactcagttgtgagtgggctacttcctcatccttttcctggatgtctcctctgtgagtaaggactgtgcctcactcatgtaaggcccttgataatgtctgttgagtggctgcgtgagctgataagatcattgttgatctagaatacagcttttcttgaccacccttacaagaatacaggctaattcccatgatattctgatgaaacacaactcaattacatcaataaaaaacagctaatattgttagcactcttctatcatagcaattaaaaataaaaagataacgtgggaaagcagcaaaatgcttttctaatacctgataatgatcttactttcaagtgaattatctgattttatttgcatcctcaaatgccttagaaacaagtaaaatgaaagagaatatcatattttgaattaattttcaaccttttttcatagaattaaaaatacaattttgatgaaaattcacagatggacctctcagggtccttttcaaacctgagcccatgattcacgctttctttttttaaaaaaatcattgttgaactagttgcaaatgagactagctataaggctttggtcaattctcttaattgctctggccttcaggtgtatttaattagatcctattctattccaaacatattttgattcctttatactatatactgatgaca

SEQ ID NO: 95532 - DNA, 2338 bp, Homo sapiens
ctgtgacagaatcatggtagaacctcctgatagcatttttatgactgttagatgagttagtacttacagtgcttagcacggtggctggcacatagccctcagaaacaattcacactcataataattcctatagttatttatagtggccctatttgctttgcatttacctgctcatgtgtccaaccccagatgggttgacagctctgaatgtagaaattgaagagaggtggatgaatttcactagattataagttccacaaaaccagggatttttgtttattttgtcccattttcatggtactgcttactgaagcatctctaatggttcctggcacatagtttgtgctcaatagatacttattgggtgagttaattaatttaaggatatggatgaaagaaggtgctccccaccaatcctgggccttcccgtgttggggcctccgtaatccctgccagacctttatgggaagagaggagccaaacacttccaacatataatttatagctgctgttacaaagcgaaatggaaaccgtatttactgatgtatgtaaacacagcacatataaaataaatcatagagctagatgctggcctcagaaacaaacacttaacaggcagtgctctgagtgggacgctgtgttctctgcctctttttccttgttctcctttgtttgattttcatgagcagaagtccttccccgggggtagtgtgtgcgggtgtgctgtgcgtgtgctcccacagatggtcgtgttctgtggccacaagatgatgtgggaataaggagggtgatgaggggaacagagcaatataggagggagcccacatttccagcgtctctgccacatgaactaggttttaatgtacgaaagacctaaaatatgcagagttcttagaaacacccattggccccatggggtgctgtttcccagaatgtctctcagcctttttctctgcatgccatttagtactttaccaatcctgtttctgtcacgattcctcgttcagttattcatgggaatgctgcattgtttcataatttaggtgaacataagccgtgtatgtctcctgagctctgtgtatttgttatctgacagacataaccttcaggaatagcatctgtgtccatataggccttggcatgtttttaatacacactaaacggttgaccccttatgtgtgtaacaaaaggattaacagcagaaaatagaaaaatgtatgcattcagctatttctctctataagccctgacaaaaggtatagacaggccctctgcccacctctcccccattcttggatatctccatcagcgatgaagacctcctccatcccccgagggatgctctatgctctctgtggcatccctgctgaggctcatgctgctacatgctgaaaccccccactttcatgttgaaaccccccagcagaaggggatggtgccctcctggggtgcccttttcatctttgggcaactctgacccttatgctgatgaacaaatcaacccatctataacttaacgcttcttagctttggtcatgcccctgggatttcttaattgctggcgatttcattttcatccatctttgatgactgattcgtacctacgaggtccttactgtgtccctcaggacagtacctcacacagggtcatgccaccctttaccagacagacctgaaagtcagaggagccttcctgtgtcaccatagcctacctaaattcctgttagaattttgatttttaaccttttggcagttgacagtaagtggtacagagagaggaaaaagcagagcaggggaaagagggctggggatgcccatgggggtggagggtgggagctgggtgcagcatcaagagggtggctgggtcactgcactgagacattgagatgtgagcaggagaacagtgaggctgggacgtggtagagttagccaggaagacatggcagggagaaggcacatgccaggtggagtaggatggaaagctggagtgaaggctgagtgggaatgtgcctcctcgcctgggatagcaacaagacagcatgctgcagtggtgtacatgggatgggagaagtggcaggggaggccacgtcttgcaaggcctgccaagcctcagtaaggactgtggctttactgtgagaattgggagccattgaagggtttggagcagaggagtgtcatgatctgacgtaggtatgaaaatgatgggtttggctgttgcactgagaatgagctgtaatgggtcaggggagaagtggaacatggcttggcaggttattgtgctaatctggggggggggtgatagttgctgggaccatggggacagcaaagatggtaagat

SEQ ID NO: 95533 - DNA, 1763 bp, Homo sapiens
ttttgtagagaagatcaagtgacaggtataccgtaactttttttgattacacgtttatgatagattctagaaaatgttcactagaaactaatggaagcaaaatgtaatttctataggcatttacgtttttaaaagtttgtaggagacacacgtaggtaccatcttacaaaactgaattcatcaggctgtttgattcgtcatcatcaaatgactggtagcagcaaataaattccggcatatctttgagcagtggtgactgacttttacaaccaccaggaaccccttcattatttcaatctcaattgacttcttgttaaaatggtttttatctaccaaagaaacttcagatttattaggtaataatttacatgtttgtttattttggaattcagtgagttcataaaactctagttaaaacaaaaaaagatgaatttttgattgccagtaaagccttaagcagataactgtgcagtttttatgaggcttttgggtatgtcattaataacctggacactttcaggatgccctttgaggactcagattggaaagaacatgctgtgtatggtgtctggttagcagagagagagggggatgcctcagacagagactcacgctgagagaaatcagagctttctatgggaagtgttccatttcccctatatgtagtgacattgaactagcgagcctgccctcttcctaactttttgtcctgaatatttcaaaaaggccagtcatgctttgatagagaagagataagaggtgtttgtagaagaaagttaaaaattggtgggtgggttctttttttttttgtgaaggggggtgcagtgtttatcatagttaaaagcactgcatattaggagaaatgttgtaatttgaaccttataacacttgtctgtttaatcagtccactcccacaataaaaacatgactaaatttcacagtcagcagccaagtagtgagttacttctacccttcaaactcagagatctttgttgacagtattccaagagaagattaagacatactctttcgcaggtgcattgttcaatatttataggctattccaataaaatccgcaatcaggccaggcacagtggctcattcctgtaatcccagtactttgggaggctgaggtgggaggattgcttgaggccagagttcaagaccagcctgggcaacatagtgagatcccatctctacaaaaaataaataaaaaaataaaattcacaatcataacatagaagctgaagaattttatcaaccagattttacttttgagggaataaatatttttattttttgaaagaggtaaaacgatttaatgtgacaatttcaaaaatattcatgccaatatttttaaaaataaagatactgctggtatgaaaatgtcctctcaatagtacagacattaacttccagtgaggtagagaagggttttttagggaaatttccaaagaaaataacctgcaaggttattacttgactatggtttttgaggatgttagctacagagcaagacttatcacagtgtgaagaatttgggggctggaagggttaggtaaaaatgacataaaaacaaggagggccatacaaaaatagctgtttggcatcgtataggtacattcctcataagaaaatcagattaataactaggtgcaatgcaatgagagaatttttttttttttttagtgtaagatgtaatctctgcctccaagaaatttacattaactgaataaattagactgcagcacatagcttttaat

SEQ ID NO: 95534 - DNA, 1062 bp, Homo sapiens
agaatgatggccaggtcactgaacccacctgcttctgctgggaaaggaggacagagctcatcttaagggatctgtaagctctttttgattggtagtgttggttctgttgtctacacggaggccagatttctttatccagggagccagaaaaacaagtgcatttccttccttcagtaaacaggtcacttcctcatcactagttgaattagcccctttgttttctccttattagggggaaggaacactttatttcttcctcatttcttccagttgtctggtgcctggccacttcataattgtattttgagagaatagatattaattttcttcaacaaaaggcggagttccttgatgacacaacataattcaatttccgttctctcccctcattgcctgcaccccttcctcctggcacatttttcatagttaggaggagtgatagtgtcaaatatatcagaaggaagaattgattcagtagtcgtttgacgacttgactgattaacagagatcagaagaaggctcataactgtgaaaaccactgcagcatgcagttttaacagctctttagggagctagttaatgaaagaatcactgcagaaacacagccatgcaaaaaggaaaaaaaaaaaaagaacaggagcattcccatataacactcagaagctctgtcatagagaaaatatgctcataatttctatttacacatcactgtaattaccgtctgccttaagattactttcagtcttctcctgtcaaagttgcttaaacagttcctctttcacataccaggaagagaaacctagtactggttggaactggtcctaaggattcttttccccccaaagaatgtaattgttagacaccccagcacactgcctgatgactctggcttttgtctcatccatgttcttgttgtcatcaccatttgtccacgaaccagacttctgcactcacacaagtgttacattgggctttacagtttaatttgtgtgtgtggttgttctctcttctttttcctgatgcagtgtctatgaaccagatagaaatgcattacggaggaaa

SEQ ID NO: 95535 - DNA, 1056 bp, Homo sapiens
tttcttagactccccacaaccctggagacatatcagtagtttggatagttttttaaaaataagaataaaacattttgatgattctagtcaagggatacaattggcttcatatacccttgcctaaaagtctcctccatgggaaatgcagtttgcttggagcgagtgctccaagcaaactgcatttcatcagatttcatcaggctgcatgtggatgagtgcagtgggaaggaggtcatccccccctggctggctgggtctgctgaatcaacctgtgactcagccagagggcaggctgtcctggctccagcacctttctcaccagtagggcagcctagggagagattggagcaggctaatgaatgggtagcacttgataaaaatagtgacatcagtagccctcgctgggcaactttagaatcttatcattttttatttttttattcacttctctatcttccattccacaattctaggttacataggtctgctttgtgtgtgagctgtggaaagagactgatttctatcctttgtcagttgggggctgtaaaaaattataacagctgagactttattccagaattctccttatggttctctctgtctgactgggaaatagcttgccttatttcatttattcctgttttgcctctggggctcatgttaactacttctcactactgggcttgtcagacatcagggtttaagaggtgccaccacttcttggctccaggatagctcctgttctctgggcagagctgagtaaggtactttggacattgctgttccttttacacagtgtgtctttatgacattgttttgatgatcaaactcttatcctaagtttcttgatctttaaaagagttaacctagtcataatattcaccatcagtgtctttctccaaggggcattgtgaggataattaagggacatataggtgaaatgttttgagctcaatggaagagaaaagccatcgggctcatagatgttacttttatttagtttcatgctgttaccgtatgatcaagaatagatgaattttggaaatgatgacagtt

SEQ ID NO: 95536 - DNA, 1023 bp, Homo sapiens
cagtagataagaaatgtgagccatgctggtttttttcatcttaactttttacagcttgggaaaggggactagcaagatgctcctgtctaatcaggttcaataccagcttctcttgtttctcctaacaagcttggcctcatcctaattcttccttttctggagacagaatatctattttcagcctcagaacattgcaagagcagtatgtttgaagactgagttgaaagctgctgagctgctgatttatctgcagatcagctcccgccttaactagttcttcatggaagcccctcgacatcttcctgggagccgttgcgtgggctcagctcgtattctccagctctctttcaaaatactttttacctcccttattagggctggtctaccccaggggtttcatccagggctggggtgggagtgggtgcgcatttaaacaaaggggcttgatgtctgccctaaccggcaggataaccacatttaaagaagactacctgaatgactatttgaggtggaagaaatgggctttgccgtggggagaaatcaggactcttgtaaataacttccccagcatttctaaaaacgacataggttgctggaaagctttgtgtcagtcacaaggattagcggagagcatgttgggcagtttctctgtctgggtaggagaggatgggagacagggaacctggaatgtggcattcttctggcaggtcttctttccgcgggactgttcccttgttggctgttactccacattagtcaatagcagcatccccagaagaggttgtcagcatcagctcctgcatggaaattggtgcatcagtcaagcccatctgcatctgcaggggcagtgtggaaatgtgaagcagggactgctgggagatgagggggtaatgatctgccctttagggtgcttggggatttctctcggtcagacaaaatcctacgtgcactgacgtttactttcctttaagaaagtgtgtttttgcacacttgtgcacagtgctgtgtagtggaccttatagt

SEQ ID NO: 95537 - DNA, 1049 bp, Homo sapiens
ctgttgttttagattaccttagcttgtcttcatcattactgcagagacttcaaagctatgcagagtaaactctcaggatcaatttccccctctccacttcccctcttgtcacatttccccacaccttttaacagaagccctgctcttggggaagtcaggaattagttgcttcactttctaattattacaagtgtgttaaacaaaatcactgataagagcctcacatgttgcaggtgcgcatgctcaagctcgtactggggaaggcggctggaggaaatgtgagcaggtgcagcgccctgtcctgccctgcccctgcaggagtcctcattagtgaatggactgagagtggcctgggcagtgttctatctggacatacagatacattatttttaggctttaaaacagtatgatttggcaaatggacccaccaagttgaatcacaatctctaaacccaggagcatttcctgggttcctgtggagcagttcctctgtctgggtaagggaggactggagacagaccctgcacatagagtggggacaaggagtataggtggtgtgaaagtttgctgttaacacgggactgttatggatccactctaagccagggtagttctagaaggcaggatatggtcagctccaggtaggtcccaagcatactgggtcatggccctgggtcccaagcatactgggtcattgtccttccctaaatccatgttgtggaagggatggcatgggggacgaggtagaagatctagagctacttctgcctttttcttcgtaacttcccaatgtaagttttgtggattttcagaaacacaaatagaaatcttaatcgtattctttatcctattaaatgagttttaatgctgcaattttaaaatgaattgagtgacatggctgctcatccctagattaaggttctttggtaaaacaaatttaattcatacatgaactacaaaatgaacatgaaagcagcacatcagtgagggaaggaaatgaagacttcatacagcaagctcaggtctgttgtctgtttccttctgccccc

SEQ ID NO: 95538 - DNA, 1193 bp, Homo sapiens
gagaagaatccatgaaatcatgtttataaaatgcctggtatgccatttcttggcatatcttagttactcagtaaatggttactgtttttgtagttgatactaaaactgtagctatcactcatttttctcctgtgtggtcccttttatgattcccctatttgaatatgccttgggtcagtccttttctcagaaagttaatgtcattttattttctagctagggtgatttactcaagctatttgagagttgcagtctcctaagttttcagagtgtgttcccaagggaaccatgaagaataatagtttatcttgattccaggaaagacagttgctgagggattcatggaatacacgtttgcatttctttccagagcagctcacaaattatgtttgttataaatgctggttgcttctttgccagagaagaaacttccttggagtattccagatttctagtgaagacaaagatttctttgtcaagatgagaaagactttacgagattgtggggaggtagcattgagtttaaaccagtagcaagagattggtgagaaaacaagatgtgacattctgaaaaggaaggacaaactgcaccaatagagagtcacagataccatgttgctgtggaggggttgagggagttaataacactgatagtaatattggcaatgataattggtcttgagcatttatcatgtgatatgtgtaaatgctatgtgctttaatcatgcatttagtattaaataggcacagagattccagtgagttgagctgagagttaaagagattgggtaacttatcctgtggtcatagaactagtaagtggcaggcctaggatatgaatccagtgtggctagagttttttttttttttttttttttttgagacagagtcttgctctgttgcccaggctggtgtgcagtggcgtgatctcagctcactgcaacctctgcctcccgagttccagtgattctcctgcctcagcctcctgagtagctgggattacaggcgcccgccaccatgcctggctaatttttgtatttttggttgagacagagtttcaccgtgttggccacgctggtctcgaactcctgatctcaggtgatccacccgtcttggcttcccaaagttctgggattacaggtgtgaccatgcctggcccagtgtggccaaagttttcaacagaaatagttttc

SEQ ID NO: 95539 - DNA, 1087 bp, Homo sapiens
ttgcatattagaaatgggatggaggtgagtgcaggcattgaaattatcgctgcatgacgatgtatttttgtatttgcataggccttgtttatcaagatgattgtggtttttgaccctgggaaagcaaatggtgagagatagacttggtttcttctgcaacttgcaatgcataggtaacaggaatttatcacaagctttttgttgaggaaggctaactcacatgtctctctttcttcctacattggacagttgtgttaagttgaaaacacaccatcttaatttagtagcaattcagatattcagtcaagaatattaatatgttaatgagaacttcagaaatttcacttatgcgaaagtaagactttccttgcccattgaagacatggctgtaggcatccatccagattatgtgggaggaggtaggtttagtgtcatattgatactctccccacccgctccagctactctttctcattgagtgaatgctggggagaaaaggagtagaggaggggtaggtgatagtaagaaatagaagggatttctcactgggtctggtcatatgctggctttgtgttttctgggccttgttgcaatttaacatctcttttctttatcattgttgtttatcagttttatgacaatcacctagattgaatttcttttcttttcttttcttttcttttcttttcttttttttttgagacggagttttgttcttgttgcccaggctggagtgcagtggcacgatctcggctcactgcaacctccgcctcccgggttcaagtgattcttctgcctcagcctcccgagtagctgggattacaggtgcatgccaccatgcccggctaagtttgtatttttagtagatatggggtttctccatgttggtcaggatggtcttgaactcctgacctcaggtgatccacccgcctcagcctcccaaagttctggggtttaaggtgtgagccaccgcgcccagcctgaatttcttttcatttaccctgattagtatatctgtggatttatgtcttttaacactcctggaaacatctcagttatcatctccttaaatattccctttcctcct

SEQ ID NO: 95540 - DNA, 1721 bp, Homo sapiens
attttaaatttttttctctattgtatatgatgacatttccagaattaaaagcttttgcatacattctatttcttcttagaaacaggtcatatactgttagaccctggttgacaagaagaaatgtagcattaaattgcagtgtgtttcaagtcaaatgttttaatgccacaacttctgaaatgtagagtaattttaaacaaatatttgagtatctacactgtgctggataagtatttagctacagtattattctgtcacgtccttttatatattacaaaatgttcattcctatcagcaattttaatactgaaaaccagaaacaatatatcctattataagaaaaatctcatttattaaaattaaaaattatcacgcaagttcactagagatggcaatttgcaatacaaaaaaaggctttcgtgaaaaaaatgtcttcagggagtagatcttttaggtgttaaagataattacttcattcaacagatcttggttgagcatctaccatgagctgacacttgtaattatgtgacagaaatgagcgtagagaaatggaagggaagagagaatcttcaggagccatggccagtttggatcagttggaaatgaagctaatgccttcctaaaattatcatgtactgttaagaaaactaagtgttttaatggaaaaaaaattatcatgtatgaaacggtgtgcaaatataactgacgattagaattcaacttataactttctaagagcatgtctgtagaataaactatgaacatcgtataataattcaggagaatcacagtgtgaaaataaatgaaaggctatgattgcatctcagtcatgaacaggaaagttgacctggagcataaacatgactgctccaaaaagtgttgtatcttctaaaaatgctcagatttctacttctaacaattatagcaacgatggtttcacatctgttagtcagacggttttaatctgcaaaaggttaaatgtttgacagttacttgttctcacatgcagattagctgcttggagtttaacctttagatgtgcttacgcaaccacgttttacagtttttttttttataaaaccacccaaacagaaacagtctaataacttgcaactaggaatacagaaatccaggagacacttttttcacttgatacaaattactccaattaccttccctcttcctttctgtctgggagtatcttaacactcaccctaatgtgtagaagcaacttcacaattaaagaactgaagccatttgtagagatataaatgtcaggacaggatgattcttccacttcaataccttgcaggattttaaaggagtgagtgtaactgcgtgatacagaggagaagagacatgggatcttttatctttacctgagaatggggagatatgtatgaattttaaacttttttgagtgaggagtttatatctggagcttctgattattataaaagagcaaaaaatcataggctttctattactgcattcaacttttaaatgcgtgttgatgatacattaattttaaggcattattcacatagataaggcatttgattaaactgattcaagttatatcgtatcaaatttctttctgattttgtgttgcttgaagaacaagacaggattaaaaaacaggcaagaaaataggagatggctaaacattaactctatgtaagccattctgtcctcatttttaatcagtgaatgctcttaag

SEQ ID NO: 95541 - DNA, 1755 bp, Homo sapiens
attcagcattgggtccgtggctgagttacaacaagggaccaggggtggtggtcgttcgcagttttctactcagtctccttctgacttgtgagagattagttcctctgatatgactgtgtttatagtaccctattatacagatcacgtgttcttgttttttgtaatttaacaatttctcatttcattagtctcttattcaggtccgtaaagtcatggatgaagtaaagtgttgcattttgcacattaggttccttatttacaattttaaacttaggtgcaacacaaaattttcacaggcaaagaataaacaggattcctatgaagaggtcatctgaaaagcccttgacagcaacctttagattatagacaacgacaattgttcttttaatttttaacttctgactatgatatatgaacttgcctttatttgagaaagaggttagtgtcttagttatttggtgctctgtgtttcattttatttgaccaaataacacattttgttgaatttcagggtagacagagaaaatgcatggcatatgtattaatttgatgaagctgccctataaagtcccacagcctggacagcctcaacagcaggtgtgtgtcacctggcagtcctgggggctggaaggctgagaggaaggtgttggcaaggctggttccctctgagggtggtgagggagaatcccttcatgcctctccagcttctggtggatgctggtgatctttggcgttctttggcttgtggatgtatcacccgacaccttcatgttttctgggcattctgcctgtgtgcatgcctgtgtccacgtgtccccttttcatgaggacaccagtcacacagggttgtggtgcccaccctactccagagtgacctcatcttaactaggtctgcaacaacctcattttcaaataaagtcacattctgaagcattggagattaggatgtcagcatctgaatattgtggggtctgcagggacacaattcaacctgtaacagcatgttagactacagcatgggaagatcctctgaggctgaagttagggaacctgtcctcaacattgacactcacagcgttggcctttatcttgttctccatcgaaaaaagacattgcagtgaacaatgtctcattccaacaataacttcttcgtattttaatcaacgagtgaactagccaagtcatttaatatggggacagaaataggaaacaaagaactcagttaaggtaaaagggatggcaggaaagagggaaatgaaggtgaaaaggcaaagataaaatacaaacgagaagaaacagcaatgaggttattttggaaactggttgacccaacaggtcagtgtttgtgatatggtggattcctagcattcatggcattaatcctgcacttaatacacatgaggaacaagggtgcagctcttggtgtgactgcagagatgtttccgtttgttgtgagcacctcccttcttggtctgaaatgggcactttctctggggttgcaggctttaccagtaggacaggcagctagctcatggtatagcccggccagcaagcctgccccagcccaactcaggatcagctctccatgggtccagctccaggtgtgcagcatgtgcccttaaaggccaagggttcatttaaagcagtaatccccaacctttttggcaccagggaccggtttcgtggaagacagttgttccatggacgaggaggtgagggtggggatggtttcaggatgaaactgtaccacctcat

SEQ ID NO: 95542 - DNA, 1048 bp, Homo sapiens
gttggaatatgcaaaatatgtgtagtttactaattgaaatattcattttaaaggaaaatttgccaagggaactggcttagggcaggaagaatgcttctgaaggagtgagttgtcgacaatactagcaagagatgagaaatttagagaactggattagaaagccagcaaaattcacccattaactggtgtccaagggcattccttgaacccttctttgtccttttttcttttttttctttccctcttggataaaattagaggcttggcttaaatggcctctagtttatccagccttaaaaactctatgatgctgagtggtttccagataaataaaccatcacttggttagtttctgataatggaacagatacttggtagtggaaatagtagagaaagagaatttgggtattagctagatttcctccctccacttccccaaactcctagattggattagatcaggaaggaggaagtaacagatactgtagtttcccattgctgctataacaaattaccacaaatttagcagcttaaaacagcacacatttattatcttagagtgctgaaaatcagaagtccacagtgggtttcactgggctaacatcaaggtgttggcaggcctgtgctccttctggaggatctaggggagaatctgtttccttgctatttccagcttctagaggagctccacattctgactcacggccccatcctccatcttcaaagccaacaacctcctcactctggccctcacttgtctaaccttcctgctccttcttttgcttagaagggccttagcgactaccttgggcctgatcttattatttttaagattaattttaattgttttattttcgtttgagacagtctcactgtcgcccaggctggagtgcaatggtatgatctcggctcattgcaacctctgtctcctgggttctagcaattctcctgccatggccccctgagtagctgggattacaggtgcctgccaccatgcccggctacgttttgaatttttagtagagacagggtttcactgtgttcgcca

SEQ ID NO: 95543 - DNA, 1037 bp, Homo sapiens
atacatagtgagttaagagcaaggaaaataagatcaggaagttctgtcttcatggccaggcacttgaggaacatcagacgtcaaggaggctgagttactcttctttttgtgtggtgagtctattgacccagaacgcagatataacatctgcggcatcagacctttcttgtaccctgagaaaaataagcttcagaccaaggagcaaacactagtacaggaatctggtgtttgtacaggaatctgggccattaggacaaatttaaattatgtctgcaagtggttatgagctggggaagcgtgagttctgttggggggccacaagaaagtacagttcatcatattgcttcatatttctagattcctaggaaatgtattctagattcatttctgggagctaagcaggaactgtgtataccagttgaattcagcccatgctgattgtgcacctgtggttaaataaggtgcagcaggcaagagagagaagtatgtttagacagcatctgccctcaaggagtttgtaacctagttgagaatcttgaaatctgttttctagtttgctagtttctagttggctttaactaattaattaattttagattcaggatactactgtgtaagtaaaacttaattacatttgacatgatacagttggccctccatatctgcggtttccacatctgtggattcaaccaaacttggattgaaaatattcagcaaaaggccaggcactgtggctcatgcctgtaatcccagcactttgggaggctgaggcaggcgaatcacgaggtcaggagatcaagaccatcctggctaatacggtgaaactccgtctctactaaaaatacaaaaaattagccgggcgtggtggtgagcacctatagtctcagctactcgggaggctgaggcaggagaatggcgtgaacctgggaggcagagcttgcagtgaaccgagatcacgccactgcactccatccagcctaggcaacagagtgagactctgtctcaaaaaaaaaaaaaaaagaaaatattcagcaaag

SEQ ID NO: 95544 - DNA, 1041 bp, Homo sapiens
tatctctgagggctttctgtggtttccttaacatataaacagaaagtcagaacttgttgtattttggtatactagaatttgaaagagtttgatttctacagttttctgaccacagtaaatccagtgttgacatcttgatgcctttgtgggaggttcctttggagcaagatgtaactcagtgtctgcacaagatctgccaagtagccctgccacagcagtgcctggctcagcttactagttaccctcagtcagcgggcacagtcatagaaacccacgagtcacaagtttattgagctccttctatgcataacacaccatgctggcttggggacagtgaaaaagtaatgtggcccctgctctgaagaagcatggagtctgtgtggagagaaaccagtatccatgaaatagctatagagtctggactcttggactgttagatctgtctggaaggaaccttagagatcatctttccagcccacctccctcaatgtacagcagagaaagtgatgcctataactaaatgcttatttctatggtgtagtccagggcttatcaaatttagctgcttcccagaatcagctggggatccagagtgcctggggtagggacccaggtatttattttggagttcataagtcctatagtttgcttattggatttgggaatggtaacaggctgagagtggttttggaatctaggattttgggagctcagtgaaagaccaagaaagagcctcagggaggaaatgatgttgcataaagggcaggtaagattgagggagactggagcctttggggacaggggtgcagttaggtgagcatatggaattgggaactggtgtggccgaggtgatgaggaagatgttttacgtcacgtgactctcttggacagcaaggggctgtaggagattttgtacatttgctttgaaaaagagctgtgagtatatttctgctaaagacattttgatagtcaatttgacttttttttttttagttttaagaaagtatgtaattgcatcacaattaattcttcaattccaaa

SEQ ID NO: 95545 - DNA, 1068 bp, Homo sapiens
taaaactaaaagaggaagctttttaggtgccagtgattatttagtgatggtaacatggatcactgatatttttactttcttttttatatattgattttgtatcctgtgacctcgctgagtgtattcatgagttctaatagttgtgtgtgtattttttaggattttatatatatacacatgattatgtcatctgtgaatagagatagttttgctttttcctttccaatctggttgcttttaatttttttttcttgcccgattggcctggctaggacctccaggagaatgttaaatagtagtggagtgagtagacatctttggtttgtttctcatcttgaaaggaaagctttgtcattcactgttgagtgtgatattatctgttggtttttcatagatgccctttatcaggttaaggaagtttcctgctgttcctagtttgttgagtgtttttaagcacaaaaggatgtgtgatttttgtcaaaggcttttctacatgtattgagatggtcatatgggttttaatctattaatactttaatatactttaatatactttaatctattaatatacttttatatactttaatacattgactgatttttatatgttgaaccaaccttgcattcctggactatgtcacttggttatggtatgtaatccttttatatatcactggatttgttttgctagtattttgttgaatgacttcctttttcagaaacagttgcctattttcttctttgataatgaaagttcatgaacacttgagataaaaataaaggaatatgactttctcaggacatgcccatggaaacacgaaagcattgtttctgcatattctctgaatgatagtcctgtaagtaagaataatcaaatctcaaaagagatttgagtacttgagtactcaagttcagaaacttttatgtaatgattttctgaagaattttaacttgacacctgcttaagaaattctcacataatgtaatttcttatatgacacatttagattttaggtcctgatcttgtgcaagtcattcaattttttttagcttagtcctctaatgagt

SEQ ID NO: 95546 - DNA, 1068 bp, Homo sapiens
tagctggccatcgtggtgcatgcctgtggttccagctacttgggaggctgatgtgggaggattgcttgagcctggaaggtcaaggctgcaatgagccatgattgcaccactgcactccagtctggatggcagagagagaccttgtctcagaaagaaaaaaaaggtaatgttttagagccctaaaatatataataatgtaacgcaatccgtctacagtatagagggcttgaagctgctctttgtaactttcttcctctggatttctaggtgtctgggttgagatgagcatccttttattgagccagacacagaagtgaagagaccacatttctagcccttgatatgtttatattttagcctggtaataagaacagattatttcattagtctaagtagactttttacctgccccaaatcctgtggagtatgtacgggggtaccctactcagcatggtattttagggatgatttcctagagaaagtgacatctgattgcagtcttaaaggaaggataagagttagccaggctgggagcggggtagggatatggcaggtacgataatgtaaggaaaggcaaagaggtgaaaattagcaagttgtgaacaatagcagtgaccagtgcaggtcagtttcaggtccctggcattcaggttgggaatggcaggatgggaggttgggcagtggagctgggagcagctctcagagggccttgcatggctttctaaggagctcaaacattttccagtaggtgatggcctgcatgagggctttaagcaggggagcaaaatggtcacgtttgcatttttttattatttctagaaggcactatagatggatgagtctggtggttgtgagaggccatgtctgaaggtcaggaggtcagtgaggagtgagggctgactagcctgggccggtgaggatggagaggaggagagggagtagagagctgttgggggcatgacacagacagtattcactcattttctgggtagaaggggatgagggtgctttgaggctatctagcttgtgtgatgagatagggaaagtaggaggaagagcaagctgagt

SEQ ID NO: 95547 - DNA, 1030 bp, Homo sapiens
cttcatctgtatttacagctgctccccattgctaacattactgcctgatctccgcctcccgtcagattagcactggcattatattctcacagaagcatgaaccctatagtgaaccgagcatgtgtgggatctaggtttctccttatgagaatctaatgcctgatgatctgtaactgtctcccatcacccccagatgggactctctagttgcaggaaaacaaactcagggctcccactgattctacattatggtgagttgtataattattttattatagattacaatgtaataatagaaatgaagtctacaataaatgtaatgcacttgaaccatcctgaaaccatctctccacccctggtccatggaaaaaaagtcgtctacaaaactggtccctggtgccaaagaggttgaggaccacttctgttgtgggagtagaaatgaggattcaccttaaaggaggatacagctctagcaaccctttgagcaaaatatatgagctgtctgtcatctcgaggaaatagatggcaacatcagaaatgggaagaccacactactccaactcacatctatgtctatgtgcagtaggccctctgttttgatggataatcagatggtctcacgtttttaccatggtgtgccacctgtggccctagctgtgtgactgtctaggatgaagtctgggctcaggttacagtgatgtggataaagtccgttctgcctgagcaccagtgatcatcacgtgcggcggcatattgtagagcccaggacagagtttgacttggagcctgctgagttttttgcagaagcatgtctacgtgcaggagaggacagctcagcgggtaacaccaggactctcttatttgtgttcctttcattgaaggtagttccttccccagaacatggcatagctgcttttgagaaccaatccttgtaagtgacttcctttaatttttttcaataagtagagtttaatctttgaatatgaatggaacacctgagaaaattctttggagtctgagaggaagtagg

SEQ ID NO: 95548 - DNA, 2373 bp, Homo sapiens
caatgttggctgttcccttttgtcttggaatttaattgaggtttctgaattcagctggccccaaccttgctttctgtttggccctgggcagctcatgatttttctcatttcctattctcagtcttggtttaatcacttataaaatgacagcacttagactggcctacctcataaggttgtgatgttaagtaataaaagtgtcaattgctctgaatgccaaatgtagctcttctataccctttgctttcttaaaaatgtctctttttcataaacaaggaagaatacagaaaggccgcataaggtcagattcagcagtccatgcggtgcagcgttctgtccctggcaacaggaccctgggacggttttgagtagaggttggtagcttttcttagtcgtgcatcatagtccagcagacaaatatgctcttacttacggtggtactactcacatatgtagatctattaaccattacataatcttttatgtttcactgagaatgtattgcattaccaaccattacatcgaatgacttcatttggcactgtgggtctcattaaattatgtcaggctaatcataatttagtttcactggaaacaaaatacacagtgtttatatcagagtaagaggacaccacccaatccaaggaactaaatgggttcaatctaaggaaactaccacccgggatatgataggggccttaagtgtttgaaggcatttagctgggaagtgggaatagagttgttctgggttgctcaagggcacgagtaagatcagtgggtgtgagagcatttaacagtgatgtgatgtgggctgtctcaaagggtaacaattacctgactttgtagaaagacattcctgggtaggcagagcggcagcaataggctatctccgagattccttccagcttcaaaattctatgatcattcccctcacagggtagcaggaatcaaagagtgcagaagtcattaattgtattcacttgtgtatttttcctctgcaatttccccactcacctgtggagaaaggcatagagggtacttaaacttcttcacataatttcttcccaggaggctcattgttagcggaggtaaacaaaaatgactgtaatttggagaccactttaacatagcaactccatttagagagttatgtgcttaacttgatactggaaataattttatttttccttttatatgggcaggaaattagtttcgaaaatcccctagaggaccatgatgtgagtctgttggtcttaaatttttcttctcatatctgtactgtttacctgcgttatgaagtgacagaacagaatttcagccagtgttcattgacatgttaattagttacctggcaatttagataggaagaggctttactgtagtggatcaccaccagttctgggaaataatctgtttttgttttaaaatttcaaaatatatttgttttcacgtagaatgcttgtagaagaagaaaagacccagggtgtagaaaatagttttgagagcataggtcagtatgcttagctctcactcggggaatgcttctcaaacttccatgtgcatccaaataatctagaggccttgttaaaatacacattctaatctaatagaaccaggagtccacatttctaactggctcccaagtattagttttggtccacagaccaaactttgacttgtaaggactaaatggacaaaaatttcctttgaaaagaagacctttcaaaatttgcatttccttctccctgttttggggacacctttgtgtaataacagtacagttccataaagcttgacggttgcgtttagatgcagtatttattttatttttgtgagtctttctaatacaattctgatgagtgagggggtggttaattgtattctggtggagatatggtgggaagtaaacataaaaacctaagtaaacacaatttgtaataaataggctaatcactttttatagcctctcagttctcatcattccttcaaagcccgggaccttctgttgtatcgggctcgaatgctgagagtaactgtatagtcttacagacacttttggatttgtggagaatctctcagtaacccctgtggatgcccaggattcagaccaaatgtccccattctctcctagccattctgtctttgggagggctggggttggggggatgggagtgttgggggtggggtcagctatttgcagaattattgcactaccccgtggccatagctgcaaattgcaactttcctagtgtcctacgagaaatcacaactgaagactctacgtggaacccatagtaggtttcagatacttcagttggggaccttgcatccccgctcggccaaccttcttctctctgcgccgttaccggagta

SEQ ID NO: 95549 - DNA, 1490 bp, Homo sapiens
aattcaataagcattcacagaatattagacagaggagaggtaccatcagggcagtgactttcaaatgcttcagaccatgacccccagtaacaaatacacgtttaacactgccacccaccaccccttgaacatgcatacacgtaagtgaaacaagagcatcatgaaataacgcttattactatgtgtgatacacttggatatttcctatcctctttctttctcttttttcttttttttagaatttcccattcataggctgaaacctgcagtttaggaaaccctgctgtacaggatgcaaaggacagtgtgttttttgggaacttaataggagaataagccatacccataaatacctgtaatccaaggctgacactgcctgcttgagggggcatgggcacatcctgttgaaagtaagatattcatggtggggtggcatttgaaatgggtcctggagtagaatttcaggaggaaatggaaaggaggaaaaccacgtggtgggaagactgtgaatagaaacatggagggaataaagtgtggatcttgtttggtgaaggtaggctaacacaggcagggagggatgcagaggcactagcagtttagtctccctaaggatgctgcctagtagtgcccgctgatgcttttgcttgtcttcaaatcaactgccagggggcatgcgcaggccagtgggcggcttcctccaggcctttttagactttacttcatagtgccagaaaatgctacagatccctgatcttgaccttcaggtgcctctaaccctttcctccagctgcagtaaagcaaacattttaaggcctattcctatccttttggtcagtccttatgggtcaaaacagagtacaaagaaagggcagaaggagagtgcacctgtctgagccccaggtgtcctggagctgattggtagacagcagctctgcagagctgcgtgtactcacactggccgaaggtcaccgtgtagttgactgcgtggctctcattggccctcagcatgggcctggaggggcctcggcaggtacgaggaggcaaagccttctcagaagagaggcttccagggctagggctgtgggcagcagtggggaaggggctgctcatcagcctggaggaggcagggggcctcgatgggaagcagtggagtgttgcatccgctgtggaggagctcagccctcgtgtggggtgtgttttggagaaagctgggtggagagactggttagttcagggcgccgagaacttggggactccagctgggctggggccccagaggataccagggaggaggaacccagggagtgtgcaccttaatgtgtggataggtttttaaccaaatgtatctggatgacgatgaagatgagtattgtgtgtggggaaatgattccttcctgtgttccagattctcttttgtgaaaatgtaggagggttttaaaatgctaagaatctattttgggagaatgtccttgttaactacaatgggtcta

SEQ ID NO: 95550 - DNA, 1025 bp, Homo sapiens
actaggacagtttggcttgaccgggagggtttctagttttgcagatgtagaattacattttacaaaagcttatatgtttctgataagttaaagaaaaaccaagcttgagtatgcatttctaatatgtttagacattttctcacagatgaatttttggatgctatgttctcagttttatggtttacgtaaatttttaagtttatggttacttttaagcttatagatggttcaaaataactaatatttgagaactttctgtgtgtccaatattttcatatccattgttttcttatttgaatctcttaatcctggaaagggtaagtaagtggtagtagttccattttatagatgaggaaatagaagctttgaactgttaaatgactttactgaggtcataaaacagatgacagcagactttttaaaactaacatttgctgaacacgtattatttatcagacactgttctgggtacattacatgttttagctcatttaattataaagcaagtactgttattagttccattttaaagataggaaaattgaagatgggaagatagggtaacctgcccagagtcacacatctaaaaatggggcagccatatttcaaccagaaattagcttcaaagcccagtgatctgacttcaaatccggtcagacaattgccattttctagagtacttcaaatatctctcagcttataaggacagctctgaaattaattacaaaacaaaacctcgatggactggaagttaaggtcctactaaaataacaaagagagagagccctaaatggtattaaaattaaaaatttgaaaataaactaccatagttaggaaagtatacctgttaattatgaattattgtattagagcaatatacattttaaagaccattgaaaacttcttcctttgattgatcatagaaaaacttttttgaaggaggaaggaggaggtacagattaatggcaaaagagaatcttaatccctaagaactttttctaattgatggacatcattttccaatt

SEQ ID NO: 95551 - DNA, 1048 bp, Homo sapiens
gaatagtcggcaagagctggctaatgccagggagagaaataattgatttttctctctgtcaaggtttctggcagcccttgtgcttttataaatgtcaggcatggacgaatagccgtccattcattgtgcttcatcaagtgcttgtggatgaggttccaaaatgggacgcttgccaaacattgagtcctcctcaaaaatgacaattctgtgtctggtgggatctgaccttgtgtgaggttagcctgaagtctgaatggagcccatagttggaaaacaacctaagaaaatctcttagaagcaggtgcttggggaatgcagttcactgacagcacaggaccctgcagatggtttacatgtggtttgggtttcacgagaaagaaggattcacttcccagtcagcatctggctctgccagatggtaaaggcgtgctttagtgtgtagacaatatgggggaaccacgtttttatctggaagtggatttcttagaacacaggctaaccaaaactacgcttaggctttgcgtgttgctgtgaagttgtctgtgaaatcgaataatcacaccattgttcagtgcaggagcccaaactagtccttacccaagaagtagtagcctctggatagaactgtgtttaatgtcctgttgtagtcccaggtgttgtaaattgcatgttgtaatcaaacgaatgtcaaaacataagaaagtataccttggatatagaaaaacctgagaacagtatcattcacttgaggatatatatatatatatttacacacaataaagtgagttaaaattgtatatgcattgggatgtcaaacataaaaccaccaagtgcaaagaatgctttgaaagtagaaccttgtctcattgatcagtggttactaagcatttaggaaacagtcatctttttctattgggatttgcattagaaattagccccatcagtaaatttcagtttactatccatttattaatatacaaaaacattaaaaaatctgccatgccatggtaatctatctattccaggaaaatagatcagaatatatgaa

SEQ ID NO: 95552 - DNA, 1045 bp, Homo sapiens
caaattatgggccaggcatggtggctcacacctgtaatcccagcactttgggaggccgaggtgggtggatcacctgaggtcgggagtttgacaccagcctggccaacatggtgaaaccccatctctactaaagatacaaaaattagccgggcgtggtggcacatacctgtaatcccagctactggggaggctgaggcaggagaattgcttgaacccaggaggcagaggttgcagtgagccaagatcatgccattgcacttcagcctgggtgacagagcgagactcgatgtctgaaaaaaaaagaaaaaaaattatgttttacttttctgtttcttaaacatgaatttccttgcatactttcataaaaattattttaaatctcttctaaaaatacctagttatagcagtgagaggattcagcagttgctgaatttattattggagatgatgtagctcgtgtgtgtgtaggaatactcagtggcagtctgtttttcttggtgctttttcaagtcttgttaatcttcttcctgttttcctgagaggagctgtctaaaatatacttatcaaataactaaactctaaatatgattggagggaggaattctttcttattttgtttttatacttattttgtattgtattgtatttatactttatacatatgtatatatacactttaatatatgtaatgacattaagattacttgtttttaaatgcagtcatttttattgatttgtattcctcctgtctttcagctcctgatgataattcattattgctgctgcgggcggagttatatttgaccatgaagaactatgagcaagctctccaagatgccagtgcagcttgtcagaatgaacctctcttgattaaggtatttgtatttgttagctttggagataatcaatgtgaagtttatatgattttcttaaaaacaaaagtaagattattgtgatcaggtacctatagacaaagtatgtttccctcacattactgtagcctacgtttagcaatccacctcacactaaagcaacctaatttaaa

SEQ ID NO: 95553 - DNA, 1061 bp, Homo sapiens
tcaggtagatgtctagattcagaaggcacataatcccgaagcaaatgacaccatgcttagctgggcacaccactctttaggattcatcaaaacccaccacaccagataatgtggatcctcgtagctcatccgctggcttctagagccacagccagagatgatgggatgtggagcacccaaccggggttgcttgtgccgggttagaattctccctcctccatgaatgaaaatgaccttgagactgggcagtggctgagtgggcatttgctttttgtacctctgactctgctgctgaagaaactgtttcaaaatttaaatcagatcatgacatcaccacccctcttttcatgtaaaactctcttcaggggctcccattgcttgcaaagaaaagaccataatagccctggcaggccccatgttgtctggcctgcatctgcctcagcctgtgccccagaactccagccacatgggcctgcgtttagttactcaggggcccattcccttggcctggaaccctgcccttcaccttaggtaactgtgctgtcccagaccactctgcccaaggcacatcccattgtattttctccccacagcaccatgtccctctcacaccatcaagtaccactcctcagatagcttctttccttcgtgtgggcctgttagacgacaagctctgtaaggacaagaactgtgtgtgtttagttagggactcagggtcatatccttggcagctgttttactgcatgaatgaatacactggatactggataatgaataatgagcttgaagtcattatttttaggttattttgtccttaaacttgtatgcacatacacacctactcatgtttgagtgctgtattttgtaaactgtagagatattggacctgagggaagtgggtattttgagagagtactgggctgtagtcttactggttctgattggctcatgtaggatgtgacttgtagaacaagtcccagttttctaaatttttaactaggccgggtgtggtggctcacgcctataatcccagcactttgagagtccaaggcaggtggatc

SEQ ID NO: 95554 - DNA, 1047 bp, Homo sapiens
cttggccaacatggtgaaaccctgtctctattaatgatacaaaaattagctgggtgtggtggcacacgcctgtaatcccagctactcaggaggctgaggcaggagaattgcttgaatctgggaggcggaggttctcagtgagtcaagatcgcaccattgcactccagcctggatgacaagagtgaaactctgtctccaaaaaaaggaaaataagcggggcagggtgaggcggaataggagaagagaggggaggaggatctgagggcttgggtaaaatgttgtcagtcaataaattgggattacaggtgtgagccaccatgcctggcctctcagcttctaatgtagtgtggtgccttaagtaatttttgtttaggtaggctaaggatctggtgttgtgtgcatatctttaggagaaaagagaggggaaaaaagaaaaatacatgttcgttcatctttttaaatttttgctttttgccaatgtaaccaaattcagtgaaaacatatgaagatatgactttggaagagctggaggatcatgaagacgagtttaatgaggaggatgaacgtgctattgaaatgtacaggtaagcgccacccagaggggctgtttgtttttttgttgttgtttgttttgttttggttttttttttggcgtggcaataaaatgtgtgggctgagcatggtgactcatacctgtagtcccaacactttgggaggctgaggcaggcagatcgcttgagctcagaagtttgagaccagcctgtgaaaccccgtctctataaataatacaaaaactagctgggtgtggtggtgaacggctatagttccagctactcaggagccctggaagtggaggttgcagtgagctgagactgtgccactgcactccagcctgtgtgacagagccaaactctgtctcaaaaaataaaatgaaatgtgtgtccttcaaaaaattaattttcagctgaaacatctaggagcgactgcaattaaataatattgtgaattttagcaaactgatcttagatttttgccataagaccaata

SEQ ID NO: 95555 - DNA, 1035 bp, Homo sapiens
ccgggggtctagggggccgggggtccgtctgcctgcggcgcgcgcggggtgcttgtcccaggctgggtcggggccaggagagaccccgcaggcggaggcaggcgaggggaggaggaggagggtgggggtaggagggggaggtggagagggaggagggtggagggaggaggcaggggaggaggcagaggcggaggcggctctccccgccggctctgcgtgcggaagagtttgccgcgcgagcagccggcctctcgcaggagccgagggacccgcgcggctgcggcccaggagcggcggccgcggagcccggagacccgcagccgcggcggcggcggcggcggcggcagcagctagagcagcgcctcccgccgccgcccgggaggagctcgccgcgcccgctcgccgcctcgtctcccagcggcggcgggaggcgcgtctccccggcccagtccgcgcccggccccgcggggccgctccggcccgctccgaggtaaggggccgcgcctaggggcgcgggggacccagggtgggtagtacgtgcgcgcggggtcgcaggactcggtcacctgctcgccagcgtggaggacgcgcgggggcggaggggcgctcaggcgcgaggctgcgcggcaccggggaccccggacgcgggggcgcggagaggtgggttcccctccacagtcaggccgctgggggcttcgcgtcctgcaggaggtagcaatcgctgggccggtgggctccgggcgcgtctcgacgcagaagacagaggactgggcatccgagcctcggaatttgggggtcctcggggtgtccgacagggtggagaaggatcgtgccccagggcaacagctttggggattgcccgtggttgtcttcgagacccatcgcgctaccctccgaaacgtcgggcgtcctggacccccggagagtgcggcgtgcgcgccctgggcccgcggtctctcggagtccctgggtcggaattggttccgggccggattgggtgcggaatcggtgcccccaacccccgtgtgcgcagac

SEQ ID NO: 95556 - DNA, 1056 bp, Homo sapiens
ttattttatttttatactataagttctagggtacatgtgcacaatgcgcaggttagttacatatgtatacatgtgccatgttggtgtgctgcacccattaactcgtcatttacattaggtatttctactaatgctatccctccccctcccccgaccccacaacaggccctggtgtgtgatgttccctgccctgtgtcccaagtgttctcattgttcagttcccacctatgagtgagaacatgcggtgtttggttttctgtccttggatagtttgctcagaatgatggtttctagcttcatccaacccagcagctagtcatggttctccgacatgggctggagtccttttggagtattttcacaaatagtccccgtcagtagaagtcagatctgtctttagtgttgtatagaaacatccatccattattttttcaatctcagaacttgatggcttcaattttccattatccatcatggagggtgaagaccttttagaagcagacagcatcatacgtccacataggtcacgggacaaacagtgctgatcactgcctgttgacaaagtgttgacagtaagggaggggaggaaacattttcttgtagctagagaggttttttgaggaggtgggttggagtgaggacaaggggaagccagtctggctgctacattgacctaccaaatcttgtgtttgggctgggcacagtggctcatgcctgtaatcctagcactttgggaggctgaggcaggtggatcacctgaggtcaggagttcaagaccagcctgggcaacatggtgaaaccgcttctgtactaaaaatacaaaaattagccgggtgtggtgatggctgtaatcccagctactcggaaggctgaggcaggacaatcacttgaacccaggaggcggaggttgcggtggactgagattgcgccattgcactccagcctgggtgacaaagcaagactctgtctcaaaaaataaataaataaaaataaaaataaattgtgtgtttgccacgtcagcacttcagtttgtgttgtctacgaaagacatggcat

SEQ ID NO: 95557 - DNA, 1127 bp, Homo sapiens
cttaaaggatcctattgtttgtctcctatgtcagcatcccctgaagaataaggatcacctggttttcaacggaaccaggagtttattcttcagattggagacacactcccaattctggttaataagctggttttgaggtggaaggaaaggaccctagtgatcatctggtacaacgtggtgcaccttttccaggtaaaaactagaggctcagaaagcaaagaggcctttgctgactcctggagcttgcccggcaccgaacagaccagccgaccccttcctggtggctcagtgcttctctttctctgatgagtcctgaagaggcttcctcacctggagaatcaggggtttctcaggccctgcttccagagaatccataagaatgaggctttctgggctcagccggcgcactctccacccagaggttttgggagggccacgccacaggccaactacccactctgcctgaatcgccttatctctctgtgtgctctccacaatctgctctctgccgtgagtagcataagataaggaaggctgggtgctagaggcagctgggtacagggagaaacaaggacaaggatggacacggaccgtccacttgacttgtgggaaccagctgactctcttaggtgcggacatctgacttttttcagatagactgaacgcacagagctcattcatgcctatgaaggagactaaactgcctacttacttgaccagcttttaatagtgcttctcatgtatgccaggcggggtcagggtcagctgcaggattttctcacccgtactttttaatcccataacattgccatccttggccatccctttatcatttttcttttcttttcttttctttttttttgagatggagtctcactctgttgcccaggctggaggagtgcagtgatgtgatattggctcattgcaacttccacgtcccaggttcgagccattctcctgcctcagcctcccaagtagctgggattacaggcatgcgccaccatgcccagctaattttttattttttattttaatttttgtatttttagtagagaccgggtttcaccatgttggccaggctggtctcaaactcctgacctcaagtgatctgcatgccttggcctccc

SEQ ID NO: 95558 - DNA, 1014 bp, Homo sapiens
tccccgaaaacacactttataaagactgatttcctgctggcaggagagagagctgctgtacatcacaaagcaaggcggcccactagagtggtatggtcagcgacctctgccttgcctgggtgaagtgtctctctctctgtctctgtctctctctcacacgcacacatgcacgcacacacatgccatgcactttctctgtggaagacttcaaagtgtttggtggctgttctgagacctgttcctcctcggctgggctaggggaggggcccactccttttacctgtgtttctttttagaggagaaactgacacaaagtcagatagtcttggggatggaagttgctctcatctgtaagaaaaggaaactgacctaaccagcaggtaatcacttgaaatcacttgtgtcccgtgctggaaacagctccacagcagtgtctatgatggattggaacctacacagctagaggaagaatttgcatccagaaaccacaggagcagatgacccacaagtgtagctattttacttctttcatgttaaattccaaataaaaggatgattatctttgaactgaccccagtccaaagtacaaatgcctggctgagatccaccaaggccagatgttgtcatcagtgactgggtttatgccaggctatcggtgaactgggtcagagatggtgcaggcaaggttgctgggtcagggcaggttcacagcccagtcattcctaaccaagaacatcagcacctgactggagggtgggaatgaggttcctgacctgctgactcatttgcagagtggtgtgtcagagccacacacggtagcagcataaacctgaacttcaggtaaccacacgccatgggatgctgcagatttatgtgcccactgcttgcagctgagaggaccagcatgaatggctctaatttgtcaccatggcacagtcacagatggagaatgctctgtcataaccagcgctcccagtctccataggttcttagcacccttccccatccatgttt

SEQ ID NO: 95559 - DNA, 1018 bp, Homo sapiens
agaacaaaacattctttaaaaatgcagaagaactaaaatatttaaggagccccttgtaggccaatgactatttgaatttacaaatcggcataatgtcttcagtacaaggcagttctgtgaaatggataaactatagattaaccccaaaaagttttgagaagagtacattatgtgtatgtgtatagcacgctgtatttcagtaatggaaatgctgaaaaatatggtacattctgtataacacagtgggttattttccacacgcctaaggtgtttctggaatttttaaaatcccaggtctgtgaagtgttttgcttcacctgggccatgaagaagccacttatgaaggtgtcacaccatcccagtgtttgttcctattgccttcataggtggtaactacctaattccaactgttgacgatggagttcgtcatgtagacattcagggccatggtaccacctgcaagggcaggcaccacagccatagagaaggtgggggatgcacctccctaaagcctcattaagggagatgagaacatccgaagctcccagtccttggaaatcagggtaacatatttccttctgctggcttcttaaattaaactacacagaagtttacacaaaattacatagaagtaacatgtgcttcatttgttaattccaatttctaggtgccattgaatataaaggcttatttgtgtctcttttctagaagtctcagcgcaaacggaaatctgtgacattcagcaagactggaagccttcattcctcagtaatgaagaattcacccagctgatgttggaggtgaaatgcactttcaaaatagcttaaacagttgccagttaaaatgtagctacttgttgcagataagtccctgtacccaaaggaaactactgttcttgatcctgggaagacttgactttgaaacagatacctccctgaggctctctgcctgctgttgcctatgggccatgtcaagaagaatcccaaaattgaatgtggtcacgtgttttcactacagt

SEQ ID NO: 95560 - DNA, 1074 bp, Homo sapiens
tttgcacagtgagcagcaggactcgctacttctctccacctactcacaacagccagggaccctgggctacccccaaccacccccagcacagccccagcccctacgtcctccccgaagggtcagcagtctgtctgagtcgtcaggcctccagcagccgccccgataatgccccggcactgaagtcgggacacaatcagctttaaccaatggatgaggggggtggccacaggagatggggagaggagtctgaactaaacccctggcttttgtgcacactgcatacgtttcagaactcctggatggtaaccatctctggagtgcagcgcttgctgcagtggaaatgatcaggaatactgaccgtgtttctcttgcctccgaggttcttgggcacactctatagccatactggacaggaaccaggtgccccgtgtaggcatcgtcggtcggtttgccgtcagagatggcgcatctcgctgcatcccccgagagtacaccggttgctctagccacctgcggcccgcccatctgcgctagctggccttcacgctcttgatcgtctttcctttgtattggagaaggactgggtcagagatctgttggagagagagaataaagagattatttttcattatttttaaatggttgtttttgttttaatttgcacagctacacagaggaaataacttaggcactttctgttttttttaaaaaaataataaggtctcatggcttcatttagagaccacagtaacaacagcagcccaccaatcagagaagctggttgttattaaccaagctacagattcacactttctggcctaaaccctaatgggatgaggcttttcaccccaggccatgctggtggtgattttttagcccctaaataaaacactggactatttcctgtttacttcattgattgcaactacaaaggtggactcaaagcaaagcacaatcatgccagccaacattccagaattctgctgagaactccaagtctgtgaggggagaggttttacaagccagacaggcctgggggactgcagtccccaaggagaccctgccacatgctgg

SEQ ID NO: 95561 - DNA, 1011 bp, Homo sapiens
tagagcaaaggacagcattagaagcaggcatatgagatatgtgaatacagctagtggctgcttggttgaaaggaggcattgacttcagcaacacaattatgtttttattaggaatgtgccataccgaatccgtgtgcggctgtccagaaaacgtaatgaggatgaagattcaccaaataagctatatactttggttacctatgtacctgttaccactttcaaaagtaagttctccatcccataaagccatttaaattcattagaaaaatgtccttacctcttaaaatgtgaattcatctgttaagctaggggtgacacacgtcattgtaccctttttaaattgttggtgtgggaagatgctaaagaatgcaaaactgatccatatctgggatgtaaaaaggttgtggaaaatagaatgcccagacccgtctacaaaaggtttttagagttgaaatatgaaatgtgatgtgggtatggaaattgactgttacttcctttacagatctacagacagtcaatgtggatgagaactaatcgctgatcgtcagatcaaataaagttataaaattgccttcatgtttttgttctttttagttgcaacataatgtacttgtataccctatcctaattatgggatcatttgaagagcttttcccaaattgatggcctgtgctgccttctccccatcccctggggttttaaagtgatttcaaactgcaacctagttttagaaccactgttctgggtagttgggatactgaaggcatattgttaattattctacttgtatgttttgctaattctaagataagcatttttccagaaaccaggatgtagaatccagttgccattgacatcttaacattttaggaaacaactttaaaatgatatactatctatctatctatctgtagcatcttaaaggtaatgaaattaatgtggcagtaggtcttttaagcttctgcctacatccatattgagtatagttgttgtcttctaaaataattaatt

SEQ ID NO: 95562 - DNA, 1005 bp, Homo sapiens
tgcaaaaaaaagccaaatacaattgcacagatagtggactcccttagatcttgaaagtgaacttgattcctgacctctcccattgtcactccaagtgaaaaatgaaagcatggggcttttcttgcttcttggttagtatgagacattgtgttcatctgagagcaaaatcaacactagcatcacagcagaagtgcccatttcagcaaatccggtaaaaattgtaagttggcatcaagggaaccaatggataccttagggcactgacaattctcaatacatagaaatgcttgagggttgtgtcggttcccctggccacagtttgtcaggttgtttagccagatgccccattggtaaggtagactgaaatctcggtttagggctgaccccaagaaacagtctggttcgtgctttggtatggtggactccagtgtgcatagcagctgctgtcttgctacaagttactcagcttaagttcagattgtgattggtggctcatttcaaaagttttgagattgtactgattgatcttggcattttcaagtttggatttcatgtccagtggcttttcaaaaaagttgactaatgactgttcagtcagaagtgaagctaaaatatgttcaagggagacagtccagtccctttctgccgcctctggaaatgcctgggagtcctggggcgtcttcccagtgtctgcaaaaaccgagtcctcaggagaaggagctgaagcccgcagctcctccccacactcctgggagcagcttccagagctgctgcctcgctgccccacctccccgatctgcagcagcagtgtggtgactgtggcgatggcttgatacaaatcattttcttctggatcttcatggaacatactgtacagagttttacagaactggataaattctctctgaaattgaaataagtcttaggtagcagcagaaccagggtggaagtgtcatttttttttttaaacatacctgtgagctttgagaaaacgacacagtattt

SEQ ID NO: 95563 - DNA, 1018 bp, Homo sapiens
acaaaggaaaacaatatgtggtttaatttaaataaattcagtgacagcaaaaaggaaactatgtaggagagaggagcaagggggtgaggaattccactaagcaaattccatacaaaactggaaagcaagagattcccctggagagccagtgggtggtaactgggggacttctgctctaagaggacccgtgaaacagcaaacaggaggaaggaacttggtggtgggggcaaggggcagccacccagcaacacccccactaggagcacttctgtcctctaaaggcagtgagtttggggataattcattggacgaagggaaaagacaaggctgctacaagaagagggatgagggcaaccccggtgcctcccgccactgcagtggtatgcaggggaaagcaacaatgaaaagaggtacgtgccattgggtttcccgaaaaccaggggtctcgatgttgacaacagaggattcctcaacggcgactggctgtctcggtcattttcagtgagtgcttaaaaaaagatgagaggtttaaattaaacaaattttctgccttaccaaaactgacagtaatgtagctttctaggcaactaaaggctaagccagcagctcccagcctgtggactgtagtttttgcagggtccacgaacccaaatgcacaccaagcactgtctggatacccagagaaaataaaatgtcccccacaccaagtgtgccttttcccagaggtatgtggagactgttgtaattaacaacatacacattcatagaaggacactgctaatactgatttggaaaaaatgtatgtagtgaaatcccattttgtaaaactgaaatatatccatgcacacataaagtactctagaaataaatacactaaatctctgggtggtggagtaattggtaatgatgttaaacttttcaggatagtatttctctacaatgagcacatactgctgtacttacacgatttcttttaaaagttgaagaaaagccttagtgaattcaaagcagcatctta

SEQ ID NO: 95564 - DNA, 1126 bp, Homo sapiens
gatctcctgacctcgtgatccacccgcctcagcctcccaaagtgctgggattacaggcgtgagccaccgcaaccggccctacccttactatatttctaaaagcattcttcatgaaaatcagttttgaaataatatctgaaaacttgaagtccactgcataaatgaaatgagtaatcatcatttctgtcatatctctgtcgagattaacgacatacaaaaatctggattatgccacaagggaaatttaaatctaacataaccaaggctaacaaaagcacttgtacataagggatgggcacagcttatgggtcccccgtgcgggtgggagacactctagaacagtcactttcacctcttggtgatctggctcggctcctgcagatcggggtcgaggtcaaagacctcattatccagcagccttcgcagcgtcacgtcggccagctgctccatgaccttaaacacctcatccaggttcaggaacatggagaagtcacgctccttattctgcgtggtgattcggatggtatccgtcagaaagacattggacgttctttctaatttctggatatcaacccacggaaccacaagtttaactgtaagagaaaagggtgaaatacctattatgccatgaaatttgagccaaacttgagtgtgtcagcaagcaactatccaaagctctccttaggccgatgtgtaaatgcctttttaaaaaatcttttaagttcagggatacagggatacacgtgcaggtttgcaatacaggtaaactcatgtcatgcgggtttgctgtacagattatttcatcacccaggtgttaagcctggtacccattagtaattttttctgatcttctccctcctcccaccctccaccctcaaatgggtgcctatgtcagttcttcccctgtatgtgtccatgggttctcatcatttagctcccacttctaagtggaaacatgcggtatttggttttcttgcgtgttaatttgcaaagcataatggcctccagctccatccatgttcctgcaaaggacatgagctcattcttttttatggctgcatagtattccatggtgtacatgtgccacattttctttatccagtctaccaatgatgggcatttaggt

SEQ ID NO: 95565 - DNA, 1032 bp, Homo sapiens
gccacacagcattcaactctgtggctgtagctcaatttactcatccaatcctttattggatacttaattggcctggattttttaatagtttaaaagcatttaaactgttatagtttaatagtgaataccctggctgggcgcggtggctcacacctgtaatcccagcactttgggaggctgaggtgggcagatcacgaggtcaggagatcgcgaccatcctggctaacacggtgaaaccccgactctactaaaaaaaaacaaaaaaattagctgggcctggtggcaggtgcctgtagtcccagctgctcaggtggctgaggcaggagaatggcgtgaacccaggaggcggagcttgcagtgagcggagatcgagccactggactccagcctgggtgactgagcgagactctgtctcaaaaaaaaaaaaaaaaatagtgaatacccattcatgtcaacttttcaggacacttcacaatcccttaagtccatttatttgaaatgtttgttgcctgccacgtaccagacacatgcttgatgtcggagattctgcgctgtgtgtgtgaggggcagtctccctgcacctagcttttcaggacctgggggaaggcagatagcaacatgaataacaggtgcaggtgggcagagggctagggaggcccgagagaaaagcacccttgcagagcacatcctgaggaacggctgcatggaagggatgtgtgtttcttttttttgagacagagtctcactttgttgcccaggctagggtgcggtcatgcgatctcggcttactgcaacctccacctcccgggttcaagcagttctcctgcctcagcctcctgaatagctgggattacacgtgcacgcaccactgtgcctggcaaattttttgatttttagtggagacgggttttcgccatgttggccaggctggccttgaacttctgacctcaggtgatcctcccacctttgcctcccaaagtgctgggattacaggcatgagccactgcacccggtgggatgtgtgttcctaat

SEQ ID NO: 95566 - DNA, 1044 bp, Homo sapiens
cctgtagtctcaattactaggaaggctgaggatcacttgaacccgagttcgaggctgcagtgaggtatgatggtgccactgccctccagcctgagtgatagagggagagcccatttcttaaaaaagagaggctgggtgtggtggctcacgcctgtaatcccaacactttgagaggcccaggcgggtggatcacgaggtcaggagttcaagaccagcctggccaagatggtgaaaccccgtctctactaaaaatacaaaaattagctgggcatgttggtgggtgcctataatcccagctactcgggaggctgaggcaggagaattgcggtgaggaggaggttgtagtgagccgagattatgccactgcactccagcctgggcgacagagtgagattccgtctcaaaggaaaaaaaaaagaaaagagagagagagtgtgtgtcaaatgaatcagctaactgaaaaatacaaagaaggtatctatctccccaaatcccagccacccaaagtaacctctagtttcatgaggtgagcatcagcccagataactttctaagacatttagacacacagggatagttgagaagatggacagaaggactttcataaaaatgcaacttgtgtgtcagtggttttataacaaaagtattacacttgcttgatttcaataaaaggaaataaactgaaatgaaaccaaagaaatgttaaacttcaaataaatgtttctttagtacaagagagattattttctaaaaggttcaagtaaggttaagggaagagatttttgaaagcattaaaaggttagaattgtggcttttgaaaaacaatgtttgaagtctgatagtgttcactggctctccaccctctgagtcaagggtgccagcattcttattctcctccctgctttcccaatctctcatttaaaaaagttttattattagttttacattgtactttccattctgtcatgtaaccttactttattgtttagctcagttctcacttatacattgatttaatgcttttactcaggtatagatttccca

SEQ ID NO: 95567 - DNA, 1042 bp, Homo sapiens
ggagcaaacactatatatctaccacctgtaagtaaaaaaataagagtatatcctatgcctgagagaccccttctgtgttttcctgattacatttccctcccttccttgcaggcaccactaccctggattatgtgttaatactgacttgcttttctttatagttttaacacatttatatgtattcgtaatcaatacatagttcagttttgtgtgtttttgtaactttattacaaaatatacttttattcatgctttatgtatttttctgtcacttgatcaccccaccccctgcattatgtttttctcactttgacccatggtagctgccgtggttcattcattttcatggatgtgtagtaatccattgagtgaatgtattattatttattcattctcctgtccttggatatttgggttgtagttgttttagtagataaagctgctgtgaacattttcctgtagtgttcacacaggtatacatttctctagagaatatttctatgagtgaccttgttgggtgtatccatcaggatgagttaggttatgctgcagtaacaaacaccccgacacataaatttatttctctgtcatgctgtatattcaatgtgggtcagcaaggatctcttctgacggagaactgggacttttgtgaacagccctaatactgggtcatagctatgtgtattttcaacctttctagataattccaaattgtttccaagcagagcatggtggtgcatgcctataatcccatctacttgggaggctgaggcaagtggattgcttgaacctaggagtttaagtccagcctgggcaacatagtgagaccactgtctctaagaaaaaacttcccacagtggtacatccttgctaatgcttgatattgtcagagatgttactttttgccaatctggtaggtatttacatagtatcttagaaccactaagatactatttctcattgttactaatagggatgagaatatttttatgtgttcattaagtatttgtttttccttctgagaaatacttgagtcttttgc

SEQ ID NO: 95568 - DNA, 1029 bp, Homo sapiens
gggcaggactgtttcttgggagaactagttggtcattaagattatttttagttacaacagatgacagaaaaaaaaaacctgcaaaggacttgacattgttacaaccagacagtattttatctgaccagacagtgtggagtctggtttgatgcccaggaataggaatcactagcatatttataaactgtcttagatgtgtttgcattttagtttgttcaaaattaaaatgtaaatttagaaatgtcaagacatcatgggtttgaaggaagaaatttatgaagttggttcaatgcagatagttttgtagctttttgtataaaatgcttatttcatatacatgggaaaaaaaattgactcaacaccctttctctctccctctctctctctttaaaaatctggtgtatttagctacttggtgagttggaaaaagaccccaaacttgtctaccatattggcctcaccccagccaaacttcctgaccttgtggaaaacaaccctttagtcgctatagaaatgttgctgaaattaatgcagtcaagccagatcactgagtatttctctgtcctggtcaatatggacatgtctttacattcaatggaagttgtaaatcggtaagtttctagatttgatcaaatgtgtggggatagatacagattagatggccaggaaagaaaaattgtaacagatttttgtcttgatattattggcgtaagattaactattaaagaaataatgtaagccttagcattcactacatgtaaatttagcatgcgttaataagaactgagggtaggatttcaaacatatttagtgttagtagaagcataaatgaaatttaattgctgaaatttattttatttatttatttttttgagagggagtctcactctgttgcccaggctagagtgcagtggcgtgatctcagctcactgcaacctccacccgctgggttcaagcaattctcctgccttagccgccctagtagctggcattacaggtgtgtgctaccacacccgactaatttttgta

SEQ ID NO: 95569 - DNA, 2279 bp, Homo sapiens
gtaaatgtaagtagagacattttaaacagtgttatttatgagtaagtaggtatggctcttaggttaatttgcccaagtatatttaaaactagggaattggatatgtcagaaaattccaccagatgaccaaagcaaattttgtattttatggttaacagtgtttctcaatgttagcaaatgaaattaatgggccaaattttcttttacgaaacagactaactacagctgttgatctacctcctgaatttattcacctttatatatcaaattgcatctctacttgtgaacagattaaggataaatatatgcaggtaatataaatttttgtaaattttataaatggctgccaggaaaatgagcagactaacatttttttttttcctttttcagaatcggttggtgcgtcttgtgtgtgtgtttctccaatccttgatccgtaacaaaattattaatgtacaggatttgtttatagaagtgcaggcattctgtattgaattcagtaggatacgagaagctgctggtcttttccggttgttgaagacattggatactggggaaacaccttctgagaccaaaatgtcaaaataatacctcatcagaaccatcccatccattcactgttcagctgtactgtgatttagtttttacaccgttaaaaccctgagtggattgcttggtttaatgcatataaacagtactttatctacttaaagcaaagttttgctttcttgaatgactttttctgtgagatgaatttttgataagaactagggaaaacatgtcttttaggtgtcttgctgatgactatccataggaggaatggctatcccaaaaaaagttccgcaaaaaagtagatgagtttcttttttttttaagcactaaagaacaaaatgcatttttcattaatacaggcttctgatgaaccaggaatcctgttttcgtaaagttccaatgttgatgagagtaaattcttaagcatttgtcctagaggtgaaagcagctgaatgtttctgaaccatcaagaggcaaacaaacaggagtttgtttcttgaacctgcttatgcacacagctcttaactcctcatgaggcacacagctcttaactcctgatgaaccaaggatttactcataactttctccttgtcatggaggcttaatagacaacagaataaatgcatttcttgggcctcttataaacttgggaattcttagaaagctgcttctattaccaggctgtaatagctggtatagttttttttttttctcttaagatgttctgttattagtctgagacagccatttttttgttttaaggaaaaatatcagtcagtgctccgggaggtaatttcctgtggggtctgcaccctcctgtctgggtggtggatgtgggtttgagaagtaggagagcagggtggtaccgtgtgggctcttaccctttatgtgattttggacaacagtgccttccattaaagttctttttatcaactgttatctgatgtattttttactttaagaaatcatgagaaattccttttactgaggtattttcaaagcatatttacagggagataatctgttcaacaggaattactctctaacaccttgaaaaagttaaaggaaaccaagcctgtgatttttaagataagtacaagttccagtcttaaagctggagaaagagcagtactaaagatttataataaattgtctataataaattgtttttcttacaaaagaaatgtttaagaatgtttgcttagaggaaataatgaactaagcccatctatcagaggaatgccttcagacaattaaaatgatggcaacagagatttctttttacacctaaaagcgagcatccccgttttgcacgttagcattgggaaaaggacagcttattactgaagtactttaggagtggcagtttcaacaacccagctttaggttctaggacctacaggacctactgattctctggcataataaaacactgaactcagagccaacaccatcactcatgcctgagtgaagctgatctaacagacacttagtccatgaggcacatcacagccttgcccttagagcagcaggcaatattttgccacacctgaggaccattttaaatagtgaaattgccaacaaaaattgcagaaatgcaaaaaacatggtactgtgaagagactatgaaaggacacttgcttgtagtaggagaggaaacggcagggcatcccgtccagcctccgtcaggaacgtgcgggtcaggcagcttggctcattcgctgctc

SEQ ID NO: 95570 - DNA, 1331 bp, Homo sapiens
aaaaaaaaaaaaaaagaaacaaatattacaagagtttttgctgaaagttttaagttgataagatgcagagaattgggggaatgtataataaatcaggtttcattgttatattatttaccacatgaatcaccttcctcctaaccattataggagccatgtgttcacatgtcatgtggaccagtatttaactgtggaaaccgcgggtggcatggagaaggaggcagtgtccgtgactgtgctgctctccgcagccccctgcctgctgtcctgtttcctcggctcctcggtgtctggactggcgttctgggtttcccagcagaaaactaaagggccagagaggtgtaaaaacacacaccacttggcaggtaataatttccccgcatgctatctttttagggatcctgaacacacagcctttcccagaagactgctccctccagctactgaggaatgatgacaagaaaaggccgaattgcagtgtctccatcagcagtttgctctccatgggcacacgatgacaaaatatcctgaagcgaaccactagtctgacctcagtagcaggattggaagcttcatgccatgggagctgtcaagaaaggcatcccaaagagaactgaaatttaaaaataataatagaccttcaggaataggtgattgtccccatatactggggatgaaatacccaatgtaaccaaattccccagtaagatcacttagtttggcaatagtcttttcttttgagcatgttgaagtttatttgctcaatgaaggctgaaattataagtcagtatatatgtattactaagtagaacttgaggtaattatatgttttagtcaaaagcagtttctgtgggcttggtataaaccctactttgtgatttgctaaagcacaggatgttgactcaaaccaaaactagttttgtagttaatatgtgttgtgtttctgtgacttaatagtcaactagaaacgccacctacaacaacccaggtacttaagttttaaaagttttttttaaaacacttgtcaccatattttgaaaaatactaacatttggattactagttataaaagtgtaatttctactgtgtcataatcagccatgcagctggagacttgccctctttgtacagcaaagttgtgaaaaaaagtatttgcactacatttatttaaacattaggaaaaaaagccaacccatgcttttctttgccgagatgtagggctgtattattggctagtgagaagcctgggaacactaggactttgtgtgggctgattgcaggtatcagatccgggattatacaggtactgttggaagtatcttggggatttt

SEQ ID NO: 95571 - DNA, 1018 bp, Homo sapiens
attttctgttagccgggcgcggtggctcatgcctgtaatcccagcattttgggaggctgaggtgggtggatcacctgaggtcaggagttcgagactagcctggccaacatggtgaaacctcatctctactaaaaatgcaaaaagtagctgaatgtggtggcgggtgcctgtaatcccagctacccaggaggctgaggcaggagaatcgcttgaacccgggaggtggagttgcagtgagccaagatggtgccattgcattccagcctgggcaacaagaacaagactccgtctcaaaaaaaatttttttttctgtttaccatcttgaattatctccaagtgagtaagtgtgtttgcatagttgaagctcggaatatgctgccctcttctgatggagtagcttatgttgctctcttgcagaagccggcaggagtgactctcggcatggaggacccatctcctagcacacgtgcccactgaagtggcaccaacagaagtttggcttgaactaaaggacattttattttttttactttagcacataatttgtatatttgaaaataatgtatattattttacctattagattctgatttgatatacaaaggactaagatattttcttcttgaagagacttttcgattagtcctcatatatttatctactaaaatagagtgtttaccatgaacagtgtgttgcttcagactattacaaagacaactggggcaggtactctaatataaaggacaggtggtgtttctaaataattggctgctatggttctgtaaaaaccagttaattctatttttcaaggtttttggcaaagcacatcaatgttagactagttgaagtggaattgtataattcaattcgataattgatctcatgggctttccctggaggaaaggttttttttgttgttttttttttaagaacttgaaacttgtaaactgagatgtctgtagcttttttgcccatctgtagtgtatgtgaagatttcaaaacctgagagcactttttc

SEQ ID NO: 95572 - DNA, 1074 bp, Homo sapiens
cagtgctttgggagtttaaggtgggaggattgctcgagtttgagctatcgaagagtaagtaaccagaaatttgagaacagcctgggcagcatagtgagaccccatctctacaaaaacttcacagattagccaggtatggtggcattctcctgtagtcccagctactcagaatgctgaggcaggagagtggcttgtgaccaagagttcaggctgcagtgagctatgatcctgtcactgtactccagcctgagcctgggtgacagagcaagaccctgtctcttaaaaaaaaaaaaaaaaaaaaaaggaattttattagtagctgtgaaagaaaataaagaaatacataaagtgcagaaaagcataaggaaaaaatgaaaatagtcgtcccccacgtagagatgtcatcttaacactttgataattacctttccagatgtttttctggaaatcgaaaggtgtttaagggtcggtgaatatcacttatgggctgttaggtaacctactttttacttaatatatgaagctctttctatgttgataaatagataattttttacagctacagagtattacattttgaattttctataatttcttgaaactaattaatgagtgtttgtattatcagtagcactttgaaatcattatgtatatatacttatgccttgtctaattgttttctgtcactctgataggtaaaatgtagtgaactgcatgttttttgttttgttttgttttttgtgttttattttggtttttgagacagggtcttgctctgtcaccctggctggagtgtagtgatgagaacacagctcactgcagcctcaaactcctgggcttaaccaatcctgccacctctgcctcccaagtagctgagaccacaggcgtgtgccaccacatctagctaactttttaaatttttttgaagtgatgaagtctcaccatgttgtctagactcattgcattttttaaattacatttttgtcctcttttcacattgttggtcatctttattctttgatgaactgcttattttatccctagcttatttttttatggagatagtaatttttt

SEQ ID NO: 95573 - DNA, 1237 bp, Homo sapiens
aacatcagacctcagaaacttactgtcttgcctttgacttttgaatctttagacagtacacccttttctgtggacctgttgaccccctcctgcagtgtatgctttagttagccatgctgtgccctcttatagtaactagttttctatttccccataactgtagtgagagtcaccctcagtcaaccacacaggctttaaaggtttacagctgtaaccatttcagtgtgtccatgtcacttgttttcattcatttggcaaggatgggtcaaagaaatgacatctaaggtgctagatctgcacttggctctggggagacaaagatgagtaagacacagcccctcccctcatgggctcttgaagatttcactttctggactggtagggggtcagggcacgcatacagacatgacatggccaaagaggcctgtttgaagtgctgcccgtaggagcacagaggaggggtcacgtgccctgctgccaggtagaagttggaaggtggggcaagtgcatttgagagggcagttgagctgggtgttgcattatccatcagacacaccaaagtgttgaggctaatgctgtgtctgtggagtgaacagacagggttggaggttggcaggtagttaagttggcagatatttaggtaaaaaggttggagctaggctgggcaggagtttgggtattgtgatgtcacagccacaggatttgttgcttggtgtgtcaggagtagggatgggagggcgttacgttactggtgaggcaggaggggcaggttctagaacacaggtggagcagggctgtggggggcacagcccagtggagggaggaggggtgcccgtgagtggtgtttttacttgaagcaatggtgagatgctgagccagaaggtcatagtcaacctgcagtaacccctcatctaataagtcactttaccaggagttccatccacttacaacacagctttgactctggtattaatcaaataaagtttctagctgtcccccaaatgttgagacttaatgcagtgatgctgatagtgtccccagccctccactttcactgtcttcctttctttaaagcagcaaatggaaggagggagggaaggtggagacaaactacagctgatcaacaccctgtccatacggaaggagccagagtaactttttcaagaaaataatacagtctgaaggcatctgttcaaaagccttgtttatttctgaaaccctagtgcctcactgtaaa

SEQ ID NO: 95574 - DNA, 1581 bp, Homo sapiens
ttgtaaaaattatttcttaagtactgttttttttatttttttgagacagagtttcgttcttgttgcccagactggagtacaaggggtgtgatcttggctcactacaacctccatcttccgggttcaagcgattctcctgcctcagcctcctgagtagctgggattacaggtgtccaccaacacacccagctaatttttgtatttttagtgtagagcgggtttcaccatgttggctaggctggtctcgaactcctgacctcaggtgatccacccacctcggcctcccaaaatgttgggattacaggcgtgagccaccatgcccggccgcgagtactgttacttttaactccactagcagatttctgtttgtaaaaaagtcttcaaacaacagtaataataccaaacaattaccaagtatgctctgtgcctggcacagttgtatgcacattgcatgtgcccctctaaccctggtgtggggcagagtgtaggaacctagttcagagtcccagccattgagtcgcagagctcgtatctgagtccagcctgtctggctctgaaacccatactatactggtaactccttttcttcatcacttgcagaaaatagatctatcacacaggaggaaaagttagccaactgagacaaatcagcaaaagaagaaaatatgtctgcctttttttttattctgaaagtgataggtgttcattatagaaaaatggagtgtatacaaaactgtgtaagagagtaaataagtgttgcataagcctaccaccgcaagatgatctgttaatatttttgttgttatttccatttgagtcattttatggacttatgtaaggtacttccagtttagtattagtttacttattactactagttgatttatgccacattttttcccaaaaagctttcaaataacttacagaggcacataaaaatgtacaacctagcgtgagagcataaataagccatggtttttgtagagtgaagggaaaatttccctagaagtgccagattctgtttcatatggaagagagaataatgacatgataagtaagtagactagaatgtttatttgacatcagctaacttgtaatgagaggatgagttggtacaatgtcttatttcctttataagttatataaacattgattttaaaaacattaacacatacttaatctttttaggcatatttttcatagaatatgcattgacccatggcttttggatcaccgaacatgtccaatgtgtaaacttgatgtcatcaaagccctaggatattgggtttgttacatttttgtttatattcaatctctgccccagttcttcctgagtgattcagtttcattattgactagaaacaagaggaacaggtgaaatgctcctaatatccttgtagttctctgaagaaattttcctcattattaaaaatgagttattaaggcagtgtaaaaaaatcagtgaaataaatttatgatggtagaataatatgctcagatgtttcccagagagtttgtaattacttacagagtaatgtgttttggcatgctgcaccacagaatgtatgtatgctagttttg

SEQ ID NO: 95575 - DNA, 1067 bp, Homo sapiens
gtagaagggaattcgtcattgttttagtccggatgtagtgagtttaccaagggatatactgtgtaccaagaatgtagtaacactttccttttctttttacagggaattgatgttgatgctgaaaattgtgcagtgtgtattgaaaatttcaaagtaaaggatattattagaattctgccatgcaagtatgttctttttacatattgagatgttaaaaattacttgacaagttttaggtgtctgacaaaatagttatttgttttttatgataatgaagatcttgtaatttgtgatcatctcttctttttagaaaagcagcttggattttaaatataatatcttccctgccctttaagattgctttgcctaggagattcttaggtgacactaagactcgttaagtatctttgtcgtagattgacttttagtcttctaagcaaggctttatcagaatcctaggaattccattatacatttagcagtgcaaaaagtaagctgtgttgggagcaaggaaaatgagggaccagggagaagggcctgaaacagcctaagggaaataggttgaggagggcagtagtctgctgttatttgcaccctgggcttgcgttccttctgaggttgtttaaaatcaatattcctggctgggcactgtggctcacacctgtaatcccagcactttgggaggctgatgcaggtgttcaagactagcctggtcaacatggtgaaaccccgtctctactgaaaatacaaaaattagccgggtgtggtagcgtacacctgtaatcccagctactcaggtagctggggcaggagaattacttgaacccgggaggcacaggttacagtgagccgagattgcaccacctgcactccagcctaggtgacagagtgagactccgtctcaaaaaaaaaaaaaaaaaaaaaaaagtttttctttcctttattctggttatactaagggttttgttttagtagcaggaagttgcttgaaggaaggcagggcatggtggctcatgactgtaatcccagctactcaggaggctgaggcatgagaattgcttgaacct

SEQ ID NO: 95576 - DNA, 1183 bp, Homo sapiens
gcaagcctgtagtcctagcaactcaggaggctgaggcaggagattcacttgaacccaggaggtggaggttgcagtgagccaagatcgcgccactgccctccagcctggcgacagagcgagactccgtctcaaaaaaaaaaaattaattaattaattaataataaaatgtttactgcttccatattgacaggtggtgcacatggctaaatatatttttaaatacagtaattacataagaacagtgtaactgtgttccataaaatgaactgcctaaatttgcagccacatgctgatactgattggtagtccctgagtctctaccccagcatcctgggaaagagaatcctgttggcctatcttgtgtcagatggccactgtggccctggctgccttggttgatgggtgagaccaggtgtgtagatccaggggttagccagagaagtagggagggctgattaccaccaaagaggtccatgacccatagattcttagaagtggaaattttgtcacaagactactttctccccagcactttttgtttctttgtacctttattaagtagttagatgaaaaatggtaacttactctaatttgtcattctttttaatcactagtgaggtaactattttcaaatatttagccatttacattttctcatttgtgagttgtaattccattctttagcaaatgtaaatacgttactttatatgattccagaaaactagtagcttatttatatttattctctttttattataagttttatgtttgaaaaatagtttattttataatatagcagacatttgcatttctacagcacttaaaacatgaatactttttaacaacccgtgaacacttgcttagtatttaaacattttaaactgtacaaaagtgttttcttcagtctacatcatattccattctagagagactagtgttgtctaatttttattttcttgtagactcattcacagtaatggataaacttgcaaaccattattagagactttaaaaattatttcatcattcttgccctgtgtatgataaatgatagtatttactttcattgaaacatataattttaaatgttgttgaaagttcctttttttgttttgttttttgagacggagtctcgctgtgtcaccagggtggagggcagtggcgcgatcttggctcactgcaa

SEQ ID NO: 95577 - DNA, 1026 bp, Homo sapiens
ttgcggcagtatcacttcccccacccccagccttgagattgtaggtgttaaagaaccttttaaatctcagttaatcttctgtctcccactcatctgttcatttattcaacaaggtacctttacatgtatcttagtcaccagccaaactgggctggtcaccatcccaaatatattttgttgtggtctacagtctagaaaccctcttcctttgctttgtaaacttttttgtctcctttgagatgtggctccagtgtgcctggggagatttccctccaccccaagcaaaattgtctccttacttctgtagctctttgttactctgctttcttattgaaaaagtgttagtccaaaatagagtcattctcattcccattttgtagctgcagaagcattctcagtgaccatggatttttccaacctcccaggcagtggataacagtgatttttgcacccaggtctgtctggctgtgaagcctgtgatcctatgaaggcggatggggaagggacgttacctcggagctgggtcttcagactttagaactggctttttcaggtggtgtgtgacattgagcaactccctgggatttctgaacactcagctgtagaatgatagtgtggcctttgcctgcttcaagtgagacataaatgtgaacgtgttcttccccattaccacacaaagaacgtggtatcagtaccagaaattgattcaactgtcatcatagcatagtttagttttctgtgtaaaagcttttaactgaggtgggaacatgagacttcgttgtactattctttctactttgtatgtgcttgaaattttccacaaaagcaagtttacaaaaaagacttctagcttgcaaagtgccatatagttatatcagatataaccatcataattctttctatatacatccttcttaactactagatgtttagaaaatgccttcctcctttgttgtgtccccttgtgatgacatggttggttgtgtgggtgcctcggaaatacagttcttgccaagggaccctttt

SEQ ID NO: 95578 - DNA, 1117 bp, Homo sapiens
gtaggagtgatacacagaactttccagacaatatggtttggacctcatataattccagtatgcacaggtgcttaggaagcataaagaaaagggtttgcttttgttttgttttgttttgtttttgaggcaaggtcttgctctgtcacccaggctggagtgcagtggcatgatcttggctcattgcaacctctgcatcctggactcaagtgatcctctcacctcagcctcccaggtagctgggactacaagtgcacgccaccgtgtctggctaatttttgtattttttgtaaagatggggttttgccatgttggtcaggctgttctcgaactcctcagctcaagtgatctgcctgtcttggcctcccacagtgctgggagtgtaagccaccacacctgtctaaggaaagggatttaatgcaggtattgcaaaagtatcaaagtaagcttgaccaaggtaggtggaaattagtaaacatcaaagcactacaacaaaagcttttacaggatattggccttaaattaacatacatatgtttgttaacaaataggctgatcctttaactgaaatcttagcgtggtcttttaagaatggcactttcattttttaacagttatttactgagtgccaagtactggcaaggcttggagctatatttgggaatctgccagagttgggtggcaggggaggttacaaagaggtataagaaatccctcctattgattagaggtataagaataaaattaaaaaagaaatccctgaactctccaggggaggttacaaagaggtataagaaatccctcctattgataagaggtataagaataaaattaaaaaagaaatccctgaactctccaggggaggttacaaagaggtatgagaaatccctcctattgataagaggtataagaataaaattaaaaaagaaatccctgacctctagagagttcacatgttgagaggggtgtgcagtttgtatttgcagagcaggttaaatagtcttttatgaatggataataaattcttgatgctctgtaatgctacactctcacaaatgatcgaaaaatttagatttgaatttaaaatgtattttggggtcgggcgcagtagctcacacct

SEQ ID NO: 95579 - DNA, 1008 bp, Homo sapiens
tcgagggctgcgcgcccgacacgcgcttcttcgtgcccgagcccggcggccgaggggccgcgccctgggtcgccctggtggctcgtgggggctgcaccttcaaggacaaggtgctggtggcggcgcggaggaacgcctcggccgtcgtcctctacaatgaggagcgctacgggaacatcaccttgcccatgtctcacgcgggtgagcaggccggggcgcgaggacgggagggggacttcgcggcagccgaggctggggtcttcagggttggccctgaaccgcaggccgcgaagcgggcctggcacggctctcaggcctctggctgttggaactttcagggaagccctcgtttgctcggtgcggctccccgatcgctgttgggagggaggtaagtctgcggacaagatgtgatcttcgcctttgatcgatgaggtgaagggagtactaaagacgttaaaatccacagaaggaggcttgtggttctaacaggtgaggaaatctcatgattcctaatcatgggcctcttttccattcaccgcttcccaaagtcggaggggtgagtaggaatccaaactcttcccccagcgcgccccacgatcggttgtcccttcaccaacataaagtgatggctcgttggcactctggtttcttcactttcttgaatcatgtctgaatattctaaactgagtcagaaaacctgcatctgactgagtcagtaagccttgacctgtgctttctgacttgctaaatttagggttataacactggctgtactgccagtcagatttcctgagtcttgagttacgatcaaaattttaaaattactgtattcattcaagaaaagaccttggggccgggcacagtggctcacgcctgtaatcccagcactttgggaggccgaggtgggaggatcgtttgaggccaggagtgtgagaccagcctggccaacatagaccccatatctgcaaaaatttcttaaaatcgcgtggacgtggtggcgcccgcccg

SEQ ID NO: 95580 - DNA, 1022 bp, Homo sapiens
gcgatactgcggagagtccctgccctgtgatgacccattcaaggattctggacacttggatctcctgacatcagagcaaggtctggctgattttgcagagctaatcaaacacttgaaaagaacagtcctaggagctgaaaatcaccctgtcacggccctctagggcccctatggtggcatgcttgcagcctagttcagaatgaaataccctcatatggtagttggagctcttgcaacttctgcccttatctggcagtttaaggatttggtaccttgtggtgtatttatgaagatcgtaactacagattttaagaaaggtggtccatattgttcagagaacctccgtaggtcctgagatgccattaatcgactctcaaatatggacggtagtttgcaatggcttcctgacattcgacatttgaaagactagacctctgaagactgggtgacgtgcagtggtgagctatccttatgcatctaactttttatagcgttttttgtctgaacttcactcgtggaacttgaaggagttttctgataactgttttaaacagtggggtgtgagacagaggccctcctggatcactacggtgtgtggaggcaaaaacatgagttcgcacatggacatcattttcagcaatggcaaactagacccctggtcaggaggtggagtaaccaaggacatcacagacaccttggttgcagttaccatctcagaggggcccaccgtttagatctctgagccaacatgggccttttgttccatgtctgtgctgttagccccctccttggaagttagacacatgaagacatggatcagagatttccaccacagggcgggagaaacttttgatcatttttagtttctccttttatattcacatcacccacattcatgttcactttggttttcttcatgtagttactttcccttgttcctcactcaatttgatggcaccgaggggagacagaagagagggtgatggtggtgacagcagccatcccaggagtgtgatttcctg

SEQ ID NO: 95581 - DNA, 2642 bp, Homo sapiens
gctgccgcgcgaggagcgcggtcggcggcctggtctgcggctgagatacacagagcgacagagacatttattgttatttgttttttggtggcaaaaagggaaaatggcgaacgactcccctgcaaaaagtctggtggacatcgacctctcctccctgcgggtgagtgggcccgcgagcgggcgcgcggggagcgggcagccggcagccggcagccggggccgcgcccaggtcggccgggcgctcgggcgccgccgtgggcagagccgcggggcgcggcggcccctttgtcttcctgtgcgggctggtgcggggcgggcgctaccctctaccgcccccacgccccgagcccgccgcgcgacccccgggcgctgggggaccgcgcggggcgaagcccacctcttttgtcaccgccttttctctccaactgccttgcttgatttattcatttttttggcttcttttaaatgataacccctcccctccttcctctccaggatcctgctgggatttttgagctggtggaagtggttggaaatggcacctatggacaagtctataaggtcggtgtgggcgccttctttgtttcccgtggcatgtggaaacttcttattgggggacgaggagagggtgataaacatgctgctgactggaggccacgccgcttggccaaagttgggagaggggtttctttcgccttgcagtccctctgtttttgcacaccgagtttatattcagactggccttaaaagacctcatttcctggctttgagataaggaaataagctacactcttaggcatgcactttacttcgataaaatggaaaagcattttttaaaaataagacaacctgaattttttctttttttccccaaatccggccttctgagtttgtgtgtaaattgaaatacagtggaggcgggccttgcctctgacgatcctaaaccactgctttggccatcgtgaaaattgtcatcatgtttcagcctccactcagtgcttgccagttgctcaaggtggggagtttggcgttacctgggaatactttataactgtggttgtcatcctttctattgatggatacgtattttggggaagcagggaggagtgtgtgtttgggcaacagcagcaggaagaattacagtgtggggattataaaatctgaattccaggaataacctgtttgacagctgtgtaattgaaacagaaatgacagagagcgaagagaatatagaggatgccctggtttacacccacccaggtctttctcttttttcaaaattttaacacccaccctccaccccagcgataaatgaaactagcaaatctggagactgagtctgcgctgagtagctgacacctgatgtgactaacagtgttcattttatacattgtacagtctagagattatgaaagatgtgtagggaatggaggcgcaggccttgaaaattcagaacggaatgttaaatttttcctgtcttaatttgtttctcaatactgaacgttttctaaaagtttaatctgcactgggggagtgttctgttagagtcggtacaaggttagggaagcagggctctgtggttcaccatgaagaattgtcattgtctcattaaaaatgggtggagttgggggggttggaagccgactgtagaccttttcttaggctagattaagtgtggatcttattgtctcttttctgcgttgtgagtagagtttatctatcacttgaacgcctctccttagcctagacttctagcctgggtagtgtactgtactggactgtggtccgaacttgggtcagtattcttaggtgatctcaagtgtattagcttgtgttttgttggttaactgttcgggccggggccagatttttgaatttgaaagagagccccgttaactcagcttgcccggctcaactgaatttggaaggctttggaaaattttggaaaagattgtgttgcaactcactgagtggttggtaactggctaaaagacattctccccggtctgttgtttgtttaagcaccagtcattttttttctaacccagttttttctcgccaaattaaatggtgattgtagtcttccaagtgaattagccagagcttgtttttgacctggctacacagtagttggattgtttgtgtcttacttggtcagcatggatgttaagggcagagaagtaagctagaaggcgatatagtctttaaaccttaagagaaaggaaagaatgaaaccccagtttgtctttattggttttaagaggtgggagctgtttatggtaagagtttagtcaggttcattgttatttcccctcattgccattttggttccattccccgcaaccttcccgagcttttgaactaggtttgctgagcgctagctacgtttggtaggtatttgggatactggcatgacacagctctctgactacaaagtcggtacagttgagaatttctctaattatgcaaacctagggaattaaatctgtgcaaaagttgcctacagtccagaacaaaatagtgcctgagattttgctcataagcagttacatttttatattattatggaaaatttcaaacataaagactagagagctcagtttatcagcagatgactaatcttttctcatctgtattcttct

SEQ ID NO: 95582 - DNA, 1427 bp, Homo sapiens
tgtggatgtgtgctgggccctgttctgagagttagatacacagtggtaaatgaagccgatgatatatctacccttatggaactcaagaaaaacagggggatggacacaaaatgccagctgtgggatgtcagtcatacattctgtgttgtctgcatctccctgggttccctgcccagcacacttgtgttcagacacaatgaatgcactgacacatggaaacagcacatactgcaatgtgttcattttaagtggctcaacctcatcagcagggcttctctgtgctttaaattacagtaaaaacaaatgaaaagtgaaatgaaaaggtagacatatagaatatcagtctactttttttactcgtagaatcaaaagacattttcccatgtcaaattgctgtaaaagtttttgtttttgttttctttttaaaaaagtataagaaactcaggtgatataaaagtttttatatacttttaatttcagaaatgatcttgctgtggtcagcagaccacactttgaggaacactgaactggcaggattgaatttgtagcagggctcttagtaaactgtgggtggttggtgtgttagtgagctggagaattgaggactgttgtttgtgcctagtatttggttctcccaccctttgaacattggggagctacagcaggtgctgcttacagctttatgctttagtgccaaaacgtctttgacccctgtgctttggaactgtctcagatatggctaaatatgaacaagttatcctattaaatttaaataaatgaaagaaaaaccccacttttacattataactttaaaaaatccttcatatgataaatagggccttaacttaccagttatgaatcgatagttataatcaaatgatactaaagcgctcataccaaaagtcagagtcatcctgttctccagaagcatgttttcagtgcttttagctgctacatctgaaatttattgctatatttgtaaattatgtacttatgtggctagttcatttatcagttttatacatttattgacgtcctctagcagtagttgtagttattgaactagttagttcaatagtagttgaatatttaactcctatacttgctgcctcccttaagtgggcataccataattttgggttaaagtgatagttgtttcttttatcatgactatgtaaataccatttatatgtgagctaaacagtctcatacgattacatttccttttttaaacaacacccctgcccccacatcgcttttagtttttcatttgcttagttttctttgtacctatcatcaccttcctcctcagataccctaaaaggtataacaaatgcctaacaaagtttagtctttatcacattttccaaatgcttaatttaacaccacacgtcagataatttattgttgcaagataacctgttgat

SEQ ID NO: 95583 - DNA, 3206 bp, Homo sapiens
ccagtcttattattagtcattactgtgagtttatttatttatattttgagatggagcctcactctgtcgcccaggctggagtgcagtggcacaatcttggctcactgcagcctccacctcctgggttcaagtgattctcctgcttcagactcccaagtagctgagattacaagtgtgagctaccacgcccagctaatttttgcatttttagtagagatggggtttcgccctgttggcaaggctagtctcgaactcctcacctcaggtgatctgcccgcctcggcctcccaaagtgctgggattacaggcgtgagccactgtgcctggctttaagtcatttttaaaaacaagaatacagtttctttcttatcgctatgaagacaaactattcactatcagcgaggtcactggtagtaggaactaggccaaactagtttttccttctatttttgggaggaattcccttgtataatagccagctatttaccatgtgatgctagactgcagttttcctttatctcaagcagaagctattgtcttgcctggattttgaaaaaacaaagcaaaatatgttatctttggtcagaaggatgtatcccaagttaaataaatgatttgctatgtgttttgggcgaataagtttgctcatttgtttcaagtgtatttttcagagtatttttcttatattttattcttaagtttttttgtgataccttttgttagggccttactgcattcagattacataaaattaagttaagtaatagtttattttttgaaaattcttatactgcagagctttcgttcttacttgctgtgacagtgacagaatactgttgactaccagagcccttctccccctgagtttttctgagactctttatgtgtaattggtgtgtagttttatgacttcaattttgagaggtatgtcaaagactgaatattatctgagttagggctgtgcatcaaggtacttaataatttgttggagatcccggttgaatattgcctgaggttgagtgtgtacatttaagtgacacaattcactgggtgtattcattcacctgctagggcatgactcagattctagggccattccagtttgaacttggcatattagagcatcttagttctctatatgtacacattttctcatttattcttgttgccttccttgattcccagaaaaatctgacaggtgttcagctctttactcttcagtgatttcaaggcttggtttctgtttcttgtttcactgtctacagatattttgagcctactctgctagtcaagatttcctttatttatttatctagtacttaatgtgtttataatatgtgccaggcaccatgcgaggcttgctcactggtgacaatggacaagaaaggcagtcagcttatgcccttgtgtagcgtatagcctaatgtgtaaggcagaaaatgaacacacagttaaagaggatgatattgcagatggggaatagcaggggcctatgggagtgtgtgacatgacagctaagttagagctgataaaacagatacggtggtatgcacagtgaagctttatgatttcaattcagatgctctagatgaggcatagatatatgtggagcagtgaacagtctgctaggagttaaaacccactgagctgatgattcatcatcttggttaatactactttgaataaagataggaggggtgtgttccattgattatggtaattgactgtcttcattcagtttgccttgagccagctgtctctcaggaagccttgcctcctacatctgcactgtttggtgctccttgcatttgaatctcctgtatcagttagaagttagcatcctgaacattctcatatgggtgaaggaggggccttcgtcaggcttcagattgtcttatgagcaatatctggaataatatttggtaaacagctggcctgaagtaggccacattctgccctacattacacatggggagactgctttgttcagctgctggtccccacgacgttagggctgaaagggacctctgtaaaatgggaacaatggtgtacaggtttgtgatattcacatagtttttaataagtttctgtagttccggttatataacaaaataattaaaagataaagtttttttgcttttttttttaagacagagctgcaacctctgcctccagggttcaagcaattctcctgcctcagcctgtcatgtagctgggattacaggcatgcagcaccatgcctggctaatttttgtatttttagtagagatgggttttcaccgtgttgatgaggctggtctccaaatcctgacctcaagtgatctacctgccttggcctcccaaagtgctgggattacaggcgtgagccattgggcctggccttgctctttgataatatggacaaaagagaattttatttttctaatccgattaggtaaaatgatgttgtggtttttttttgatgttgagtgagatatttctaaccattctctaatcatactggaaaatgggactttgtagtcccattagtatgctggctttcaaagtgtgaaattctttttgcattattttgtataagcaagggctttgtcagtcatcaactccaagattgtattagacgtttcattagttttctagttaattagctgaaaatatattcttattgttatatgaaaaaagcaacttaaatgttgaattttaaataggatgcttatttatttttttcttgtctttatactgtttattttcttgctggctctatcagctaaggacttgatctcattggtagtctgtcttgccctttttttttttttttttgctttttaatgattccttttgctgacttattacctataacttctacttaggttgttttataggttgctttaggtttgtagcacatgtttttaacttaccacagtctaccttcaaatgatattataccttactatggtatacctccatttctacccacttggccttatagttttttagtatacatttcacttttatttattatttatttatttttatttttttgagatggagtgtcgctctgtcactcaggctggagtacagtggtgcgatctcggctcactgcaacctctgcctcccgggttcaagtgattctcctgcctcagcctcccgagtagctgggactacaggcgcaggccaccatgcccggcgaattttttgtatttttagta

SEQ ID NO: 95584 - DNA, 2268 bp, Homo sapiens
tgagaattgcttgaactcaggaggcagaggttgcagtgagctgagatcacgccactgcactccagcctggggtgacagagtgagaccttgtctaaaaaaaaaaaaaaaaatgctgggtgcgatggctcaggcctgtaatcccagcactttgggaggctggggcaggtggattgcttgaggtcaggaattcaagactagcctcaccagcatggcgaaaccccgtctctactaaaaatacaaaaattagatgggcatggtgggtgtgcctgtaatcccagctacttgggaggctgaggcaggagaattgctggaacccgggagacggaggtagcagtgagctgaggtcgcgccactgcactccagcctgggtgacagagcgagactccatctcaaaaaaaaaattttctaatttcccatcatctgatcctaccaaaaataacaaatacctagggggtttttcatttcatttacaatctggaacctcatatggccttatgacaagagccaatattttaatatctttgtcttagaacctcactcatacaatagagacaaacctcaaatccaatccagagagcattgcttcaaggaacagtggtgacttaagataggttggaagtctaatggtgctgcggaatgctaaacaatcaagccttttcaggtttagtttaatagttgttattcttatactttcaaaaccattttcatgtaatttttttcaactatttattaaatgttagtaaaagaggaactacctgaacacagattttgtccaagcaacctgtttagaataaattatagggaaggaagttttcgctaaaatgcatttcctgtacttgtgaagaaacttgttgagaaattaactttgagaaagttatgccatctttatgcaacatatttatatagttaagaaacataattttcttacatttcaaaagaggctgtttgacaaaaacggctagaagacccctccctacacagtgagaaataacattctacaattatgttatataactaatcataataattttactttctccaaataactataagcaccttatcttccccgttatcaaaaaaccgtgagaaaatgagccttcctaagaagtttgacactgataccagccaactctaaatcaaaatggaaattaacattcctttctaaatcatgtgcagaattcatttgaacattctgataatttccctataaactctgatacgtaaatgttggggctaggaggaggcttgaagattatcttgttcaaactctctggtaaaagaatgtatctaagatttgttccataggctgcagtccacttcgggaatcatggaactcatcagtcacataaatggaactaagataccttctcatagttaaaaaaaccagcttaagaaattcttgccacccaacttttcttctatgaatctctcaataatttttcactattcagagaatgtggtaaaaataagaggcttcaagacccaaaagaacaaatgtatgggaactccatacctgcattagtctgttagggctgccataacaaaaggtcacaggctgggggcttcagtaatataagtcattttctcatagttctagaggacagaagtccaagattgaggtgttggcagagttggtttttcctgaggctcctttttctaatttgcaaatggccaccttcttagccttgccttttgtgcacccctccctggtgtctgtgtccagatttcttcttacaaggacagcagtcagattggattaaggttcactctaacagccttattttaattcagtcacttcttcaaaaggccttgtttctaagtctcaatcactttctgaggtactggagatgagagtttcaacatgtcagtaatttttgggggatcacggtttcagcccataacaatactgtaaagtttttcttgtactgaagacacagaaaataactttactctaaagtgctaatgatttattaactaacacaggtagaatatcccttatctgaaatgcttgggaccagaagtagttcagatttttttggattttggaatgttcatattatatttcatggtataatatctctaatccaaaagtctgaaatccaaaatgctccagtgaacatttagtttgagagtcatgttgatgctcaaatggtttaaaattttggattagggatactcaacctgaaaattttgaaccttgtttttttaaactaaaaaatacatagggtcttctaatccaggggtccccgacttctgagtttcagacaa

SEQ ID NO: 95585 - DNA, 1301 bp, Homo sapiens
atacagttcgtgttttcatggggtttaaagaaggcagtaaacccatcagatggtggtactatatcagttagcctttgctgggtagcaaaccatgcctgaaacttgctggcttcgtgttgtataagcatcatcatctttgttcatacttttgtaggtcagtaatttggactggggcatactcagtgtggtagtgtggtggctcttctatccatctcttctaggatctctccggaagctgaagtcagctggcagttaactgggggctgcatggtgtgacttgggttggccgactttttaagcaccctggccttttgtttcccatatctcagttttctttttgtctcctttcttccttttgttgttcactaaggaatatttaaaaagtttcgagtattataaaacattcaacttttggggaatgagatggagatataataaatggagataaatatgtacatttaatatcttcattttacaaaagaatctaatcaccattaattacagtgttacagtatgccctgttacagctgagagttagggttttgcatccactaatttgggtagggtgacaatagcaaaatgataaataagtcatgaatttagcctgggcttttggtgctcaaataccttaattcatggatggcaacaccaacactctacctgcttttcttagctcaacaggaaatgagagtagggcttgggcaggaggaagtcatgcatacccagctgtcagcgtgcggccttctcattggttgtttaggagagcaaacgaagcttatctccttccccaaattgttgataatgaaggcgaaaagagatatagctacaggtaaactagattgaatctgctgtttatgtgttggaagatgacgtttgaagatgagttttagttcttagcaccaatacaacaaatgatgggatttgaggtttaagtgcctaagtttaaggctctcatataataactcttaatttctttttgtgtcgggaaaagaacaaactcttgccttgaattaaccagttattttaaaaaatcatagacttctgtcattagaggaaacggcctgaactccattaccaggtgactttttagctttagtgggtggcacatgggactgtctgtggtgtgccatctgcagtgcgcaagccatttgtttctggaaacagtctcacaagcaatgattctggtgagtttagaaatgaatcaggatgtgctaagctcaatgaggactcattagccttggataatgtgattctataaatgaacagaatggagacggtgaagactcaggagtatagagaaa

SEQ ID NO: 95586 - DNA, 1538 bp, Homo sapiens
ggagtggaagggtgggggatggggggtggggtggtggtggggtggatgggttaagggtgggattgagaggcaaaggaggtgctgagaggagcagaagttgccagtcctgaagctttcctttttctctactttcctgtgtcttcctcagagcctctcatactctaatgtgcactcagtcatcttgggagcttgtgaaaatgcagattctgatttcagtgcatctgggaatctgcatttctaatatgcttccccagtgatgctactgtaattccatactttcaatagtaaggagtagtagggcaaagaagttagcatgggaaatgttggtagttcactggaacacagctgctagggtgggttctttggactagggttatgtcttatccatgtggtgtaaagtgtattgggtatctgtacattcaaatcaatgattttgtgaacagattacaactttcagttgggactgtagtctttctgaggctcacaggatgttgatgtaggaagaggtgttagagaatgtgtagctcaaccccttagcttacagagagtgagggactttgtggcctagtcagagctagggttgcagatctggcctcttttatgctcttcatctgtctgggttgggttggaaggcagtgcagtgaagtgctactgtcttcccccctactatttgatgatttggtgacatgacaaggtcataaatggattatgattctcaaattccatttcagtttgtagtacatttcctgaacaaaagtaagtgtttgagacagtgaatgaataaaagggctggtttctgggtgaggtggctcacagagttggtcagaggccgggactgcccctaagccatggcagtaagtttctagtgaaaatagatgacaaccattttggtgttttggagaaggcagcagacccagacagtggcaggcttttaggcaacagctgtgttttgaggccccaggaaagagggggaaagtgggcaggtgtaagtacaatcagggagaaactggggaaagacttttaggcaagctttttggttcttgattatgtggtctctcttgcacctaggaaagcagacagtaaaatgcgtcgtgttggaatagaaaattcaagcgcctgattgtgagaataagagttcaaaaagggggccaggcgtggtggctcacgcctgtaatcccagtgcacttggggaggctgaggtgggtggatcacaaggtcaggagttcaagaccagtctggccaatatggtgaaaccccgtctctactaaaaatacaaaaattagccgggcgtggtggcgggcgcctgtagtcccagctacttgggaggctgaggcaggagaattgcttgtacctgggaggcggaggttgcagtgagctgagatcatgccactgcactccagcctgggcgacaagagtgagactaggtctcaaaaagagttcaaaaaggggagaacagtggatggaaggtagaaagagtttgaagctttaaaatgctgttgagaaagaaacaaggaaaaaaaatgtctggacagagattt

SEQ ID NO: 95587 - DNA, 1078 bp, Homo sapiens
aaaagcaatatactacccaaccccttaacacgctactcaaagatatttcagacaggctctttcttgtcctgcccaatcagctatccctcctttacaaaacgggcaatctcctctttggaaatggtttttcacactgccctagagaaaaaaaaaatgcacctctccaaagccattcagaagtggattttgaattctcaagtctgccttaagggattatctctgtatcaatgtattgtatgatgtattgacaatttctagtatcagtttttattctcttttttaaacctcatagtctactgacatgttctatagtggaaactcaattgtaaaagcttatttgcaaaatgggaatgttttttctctactttcaaataactggaagatctgaattaatgctagtaaaaatcctatgagtagcgctaaatgcaattcagccacagtacagtgctttgaaaggacaaaattttaaatgtggtttttattaatgtgactcataggaaaaatgaagtattaaaaatgttattctctaaagactgacctgatgcaacaaaatgcaaaatatgtgatcaactatgcctaaaccaaaaattcagcaataattcaacttgtttttccaaattaagacctacaagagctagatctagtaattattccccatcaagaaaacagtaacaaaagattacttaacttgaatatctgaattttcagaaagcacaatctaaaaatcaaagaaaaatgataaaaagatcagtgcccgctcataaagggcactcagtaaaagtgttgtattttgttttaacgagtaagatgagagaaacccagagtgtcctctaatcatctgaggcaaaaatatgaaggtccatctggcagtctactatatgctgacagatcttttagccagtcagtccctccacctcactgggtccttggaggtttctccaggaaaaacgagggagatgcatagaggctctctgaagctccttccagaactatcattctatagtccaggacttcaatgtaaaaaccactgaccttagggagttcaaatccagcctggccaacatggtgaaaccctgtc

SEQ ID NO: 95588 - DNA, 1017 bp, Homo sapiens
actgtaactcatgatctttccatcgcagggatgggagaacgagggaaagaaaataaaaatgcagacctttatttacctctttctctcaaatataaaactagctaagaagcaaatttctacagtgaactgaatctgcttcccaaaattgggctatcataaatgaaggtaaaagaaacaaaacgagagaaaaattcacaaaaactttcaaattcacccttcatcagagttgcagggccaaaattggccaattccagtagacagataatgtccaaattcaatggtttaaaagctcaaaggcacatcagaataatccatgaggttacgaaaaccccaatacccaatcctggggttgcagcaaaggcatcaatctttttcttgcctcctcaagtgactgcaaattacagacatggttaggactctctgctttatagtgagactttaaagctccccaagatataccaagatgtaccagagctgagagcctctaccatacttttccttcagatttctctctcctactatcttcctctattgtaaaccaaggtgaggttcaaggcccacaggaaggtctcagcaggcactctgttcatcagctgcagcaggagttagggaatacaactagccaaagaagttgctatcagctgaagatgggcttattgtcttgctggcttttattgggtttaggggatttgcaggggctggctctgctctaaatattatatttgctagggaaagctgaagaaaacacacccttgctttttaacaattcttgaattctcaaccaattaccacctccttctgagcaggtgggtcgaaaggctttagtaaaaacaaaaagcaagggctgggcaccagtgactcatgcctgtaatcccagcactttgggtggccgaggtgggcggatcacgaggtcaggagttcaagaccagcctaaccaataatggtgaaaccctgtctctactaaaaatacaaaaattagccaggcatggtggcgtgagcctgtaaactcagctactc

SEQ ID NO: 95589 - DNA, 1659 bp, Homo sapiens
acagttccacatggctggggaggcctcaggaaacttaaaatcatggcggaaggcaaaggggaagccagacatctccttcacaaggcgtcaggagggaaaatgaatgcaggaggaactgccaaacacttacaaaaccgccagatcttgtgagaactcactcactatcacgagaacagcatgtgggaaacaccctcatgattcagttacctctacctggtctcttccttgaaatttatggggattacaattcaagatgaggttttggatggggacacagccaaaccatatcagcatcttattgaggatgttcccctcctttttgcatataatgcagacatctcactgtataaactaatacgctagtaacatattgtaaatatttgtactaagtgtaggagagagttgctgaagatgtttagatgcatatcttacatggtaagggtaagaaaaataggctttggataagcagagacggtagataaagtaggttctaatttgctttttgcccaacctctggagaactgtgagagtcactgtttgtcttctgttgggtttggcttgagaaagcctctctccttgtgtagcttgtgtgccttgagtggctgagctcctgggccagaatccaggtgagttctcagtaagggtaagtctagagttttcacattaagaagcttagaaatgatcttttgaaggtttgaagtattaactgcttgtttttaagtactttttgttgctagccttgctttgttttctacactttgagagagattgagaagaaaccataaactggtttgatggagttgagtaagctcttgaccctagaattggaggaggagattttaggttaactagtgaaacttcttgtttcggttcgggaaaccctctcacagcatttcatgtcagtcctttgcccttttctcttgcagactcctagggacaggggctcctggccaccattgtttactatatcactcacaattaggaaggtcggctgacattttcttccctgtaacttctgctctagtaaatgatgactagccagatagtgaaaacctcaatcatgtttccctaaggcttcttagctgtagactgagcatctttagttctatgtttgacatgtctttttttctgtcttacatgatacttatggatgtgctttagtttgatgatgacttatttaaaaacggtggtgcttggggatggacccagcattccagccaaccaatcagtgtgcaatgtcctgtgcacttgcttgccaggttctggacactggaacaacctaagatgacaggcaaacaggcaaagctgtgaggttagtgagtggcagtttctcaaggggccaggaggaatttccctcagtagtagtacactggcaggattagttatcttgagccagatcgtgtcatctatttgggcctcaggttccttttatacaaaaggagggatgggtcagtatgggctgtcattcctctttaaaatgttgagtgctttcaaaaggcagccgtttctgaaacctctaatacagggatttaacagaaggtgattgggatttattgggctcctggttccactcaaaggctaatgccagtgttttaggtcttcatttgtcacttggtttggtatttctgccacactttgcacattctgatttctctctta

SEQ ID NO: 95590 - DNA, 1049 bp, Homo sapiens
acaggggcaaatggtcacctacagtaaacttctgactaatcattttcaccaatgctagccctatttatcttcatctctgtactagacagctggaagttgtcagagggccaaaggtctttatttcttggacagtgtttgagcagaagttttcttctgttcaatgcccaatcagggtaccaagtaggggccacctgctttatttttttattagggtttcctggtaagatcatatgaaaaaatctgtaggttttggagtaaacacctcccagaatactctaagtcactcttcttagtcatttgttgggtggccaaggtcaaggcaaaaaggtgggctggggcctgcccatgggaggccgtctttgtcaaaccaaggaattcaggcttcaatctgaagcctcaggatgaagaatttgaagcagaagagggagaccactccagtaatagtagggtgggtcccatggaacagaatatgattgagtcaaggagaccagtttggatgttgttggattaggagctagaaaagaaaatagaaatggaagtagatagaagggtataaatgagttctggctgacaggtcaaattgtgatggggacgcagaagtctcagaatggctttgaatggttgctgacagatactctcaggatgaatgatgtgagtgatacttttccacagggaagaagtctgtttcctacagccttctatttactgatggtgttttccctgttaaactttccagatgcctactagttacaggtgttttattccaccagaagcaaattcacatcaaatattttgaatgttaaaaattgcagagctgctggagctgctgctgcagtcagaattgcttcccacttgtttttacacagtcccctgtgataacctccatcctaactggcccctacatctgatctgctccctaactttcagctgtccaaatcagttcgatctgtccaacagttcccttccttcagtggttgcccattgctgacagtataaagaccaagctctttaatgcgactctaggcccacctaatgcgtggccctcctta

SEQ ID NO: 95591 - DNA, 1363 bp, Homo sapiens
ttggttagtaatggagagggatcacttgcttattgcagcagtgcctggcatgtagctgatccttatgtgttttgagtataataactcgttctattgctgaccctctgtcattcaaaaatgttatattcagtatatttttttctgattgtcctgtacaagtaagcccctttgcagtgtgccctttaggaccctgttctaactttgtaacacccctcactgcttgtgagtaattgttgattcttcctgccagaatgtaagttctgggttgcagagttagtgctcctgacacttggtacctggtggatacttaataacggtttgttgactgaaagaacagtttagacagttgtctattaaatttaaagcagttaaagccctggcagcacaagtgttcatcaatctccttcctccctcattccttcctttctctctttgacaactcatttgtactatcacagtattacatacttgctctgttatgagctgtccatgtacaggaaaaaggggctattgggcaatcggagttttgattatgaaaagttagtcattatgacaaaaccatgaaacacagatgataaaccttctagtaaaatttaatcttttgaaattatttgtcacctgggagagctgccattctgacacttagtgctttttaaaatcagtcaggtgtgtatgtacttctgttggtcagagatggtgagtgggtgtgtggtttctgggagacctgaaaatggggccagagctgtgggttttctgcagctctaacaagctgccacccttattttggtgatgaggcttgtgcccactttttaattttttgattaaattgtgctgattacatggttccaaagaacttagggaatgcacagtattgctccagattacttgtcagttaggatttacctattgtgagatatatatatatatatatatatatatatatatatattttttttttttttttttttttttttgctgttagtcattgttgtctcatttgatggatcagagtgtgagattgggaaatgttacgtattaatatcaggaaaagagacaggcctggagtaggtctggaggtagggctgcttagtgttttattaaccatgctgatgaatgcacacattcaagataatctgttccctttccattctctgccactccttttgaattgctcaaggctgggattctatgtctggaacaggtgactcagatgaaataaagtttgaaaaggaaaaaaaccctgtcaatttctggttactcattatcattcagggtccagattctgccttttctctctactctctcccccctctttctccctcacttaggctcctgtcacctttaactttctcaccacactttt

SEQ ID NO: 95592 - DNA, 1006 bp, Homo sapiens
tgctgtttccagtagaataaaaacttgaagccatgctttttgaccttgatgtctgcagtaactgttcttttcaagcttgctgagaagacagaaagcaatgttgactttcaagggggaaaataaatatttgaagatagggtttagttgtctcagtttgcactgtcagcataagcaaagaccttcccttattcgctttgaaaaaaaaaccttatttttagagtaagggaaggaaacatgtctgttgagaaaaccttgctaaattttgtggaagtgcaaaattctctccttagtcctctccttttctgtagctaacaatagtaacagtgattacagtcagcatttgaatgtgtatgagccagaccctgaactgtttacccttaaaatacctccattagttgttactctcattgctacaaatgatgagactgaggtttagagaggttatttatcacttaaagccataaagagttaaaaagtggatctgagaatcaaattcaactttgatgcttgaggactcttggagcactactgtattataaactttgaaattttgaccctcttttgctgtacatggggaagtgtggagggtagtaggtatttttttttttttttttttttgagacagagtctcgctctgttgcccaggctggagtgcagtggcgtgatcttggctcactgcaagctccgcctcctgggttcacgccattctcctgcctcagcctcccgagtagctgggactacaggcgcccgccaccatgcctggctaatttttttgtatttttagtagagacggggtttcaccgtgttagccaggatggtctcaatctcctgacctcgtgatctgcctgcctcagcctcccaaagtgctgggattacaggcgtgaaccaccgcacccggccagtagtaggtgtttttcttaaggatatcgcagactccatgttaatgaagaggagttccctgcccacttgctaaattagatcaaggacattttactctacccacccc

SEQ ID NO: 95593 - DNA, 1152 bp, Homo sapiens
gtctgaaagagcaaacccatggcttttcagattttaaattctaaagggagaggctttttatcaggcccacgtcctgctctttttgaaagaggttttatttactttaaataaattactaaaattataaatctgtttatattcagttctaacttgtcttcaagttttctgcttgggaagactggtgagactggagcaagatgaactcagttttccccatgaaagattgttagggatgtgtgagcagaaggtaggttaaccacatgttaacataccttggggagtgtggcaaggtggctgccttaattttcagggcaactcagatgcttccgtctatctgacctgagcatgagcagatagatgttgattaatgctcttttgccttgttttttggcttttttggggggtttacatttggtaagcaatatttctaacacagtgaaagtaacaaaacgacagagttctctgtaacagaactgtgaccctagactcaataataaggaagagcgttgatttgaccgttcatttttggatccagtgtttgttaaggccctgactgtcagtaacagccatccttttcagttagtgtgttgtctgttccctattcatgtgacagggccttgttgagcttttcatgggcacttgcctttcactgacaggatgctgttgtcctttatttccattctgccctccccacttcagacatgataacatgtttactagggggaaaatacctctacattttaaaccactcccaggagcagataacactttctttttttcttttttgagatggagtcttgctctgtcacccaggctggagtgcagtggcatgatcttaggtcactgcaacctcttccttccaggttcaagcaattctcctgcctcagcctcctgaatagctgggactacagccacgcaccaccacacctggctaatttttgtatttgtagtagagacagagtttcaccttgttggccaggctggtctcaaactcctgacctcaggtgatccgccctccttggtctcccaaagtgctgtgattacaggtgtgagccaccatgcccagcccagataatactttcaagaagaaaaatgtgataaaggtaggactgcctgttttcttaagttgtttctagcacctctctttactct

SEQ ID NO: 95594 - DNA, 1051 bp, Homo sapiens
ctgcttttgtgtccatattctttttttttgtttgttttgttttttgagatggagtctcactctgttgcccaggctggagtgcagtggtgcgattttggctcagcgcaacctccgcctcctgggttcatgcgatcctcctgcctcagcctcttgagtggctgggattataggcacctgataccaggcccggctaatttttgtatttttaatagagacggggtttcaccatgttggccaggctggtgttgaactcctgacctcaggtggtaggcccgcctaggcctccaaagtgctgggattacatgcgtgagtcaccatgcccggccttgtgtccgtattcttagtcaagaatggtgtatatttcttttaggtttgggaaggggagagtgatgtatctggtccccatagcaggggtaggaattttcaagggtggagtaattaaagactgctttaaaggaacagatattcccaccttctaattagagaagatctgcactgcaagtgaccacaaattaaaacagctcagtggggacagaagattggatgtcatgtcccaacagccttatttatctctttttccttccaaggtttttttccctgcccccccttcttagctttggatagagattagaaaagctctctgaggaaaaaattaaccagcaaacaaacaaaacagatcccaaatatcattttaatactatgtctagtttggtccaagaaataggcttggttaatctttacagcagcctttgaaaatgaatggaaatactaaggaggtaaactgcttatactttttggcacctcttctgcttccagtgaagaaatgctctgtaggtgcttgaggaactggtgtcgtgatgaatgtcaccatcaaaagtgaagggtcgagctctttttttctgataagcaaaatgacttttaatgtctgtagcacattgatgtgctatatcagttgtatacattgtagtctgttttctatatcctcttattcagaggagtagccacaactccagtctctggtgtaaaacagcatgttagtatttcatagaat

SEQ ID NO: 95595 - DNA, 2502 bp, Homo sapiens
ctctgccatgagactgatcctctcctgcttcccagtgctgctttcaagtcccagcttgtggttgggaacacaatagcttaacccctggagtctcaatgtctcatctgtaaaatgggactcagacaaaaggccagagggggtgaaactttaaggtgcctttcttcattcagcacattattgggtacatactgaatactaggcactgctgtttccatgtatttaaaatggaaagaaatgcatggcctctgcctgacctcatggagcagagagagaagacaggcattaagcagacaactcctaaatcagtggttacatgacatgtaagttaaggaactgttaggaggtgctgaaactaaactggctttcatttaaaaccaggtgagttggtaggggctcgactacagacacctgtaggtagggtagactgggcattctatctgccttcaaggtatgaatcttcgctgtggtctggacagtgtgtcccatttacgtatacactggcattgctttcttttatactgttttgtttcagtttggtcccaaaggagccagcacagtgttcatcattcatggggaggtgtcagctgtcattctactgtttccttatcaatgttttacattttggttttgagcattctgatcctcatagagcaggtgacctctgtgtttgtagggtgagccatgtgaacgtcctctggggctggtgggggagagcagtgctttccaaagcttaacggtgtttcagttccctatttgttttttgttatctttttcttctgaacctccctgtttttccagggttgtaaagtggattaaaactaattttatattgaaatggaaacttttataacatgcccaagggtaaatgaagtcacaacaaggtagtgaatgaaagatttcttgaaagttgatgaaaataaagtagcatgggaatcacacttggtcatacagttttaaattcctcaggttgtattcacagtgcaccagcttgtctcttacggagtgcttagtttctcagcagttcatattcttgtatgaagggtggcattatctcaatagaattggttcattcttagctcaggagaaaatgccactgcttatatccatctgcattttctcatatccttattcatatagtgcctagcctattttctgccaatcatagctaagctcaccctgtgtaccagaagtcacatagtactgggaagttccagggtaaaggagggaaagaaagaggatgacattgatggtgcactcagctgggcactgtgctagtgctttcacctatgaggatgaatttgaggtaatgctattcccatttagctgaagaaaaaaccgaaggcttagcaaggttaatttacctgtctgtggtcataaattggaggtactgagttagaatccaagcttattccataaaactgcaccaggagttttactggccgtgtccacattccacatcattattgctactggccactgtccacgtctgtgtatgaaaccgtgtcaggctcaggagacctgtttctgtttctactggtgccaggctccgactgtagggagcattggcagttcacgcagatagtcatggcattcaaggcaaaagcagactgcaggacaatgccagttctgtgtttattgcacagtaaatgatgacagtaacaatagccagcatttattgtgtgttttattcactccaggagttgtggagcatacttgtacatgcaatatctcatttaatctctcaaattaatgctataaagcaggcactgtttttatttccattttttagatgatgaaactgaagcttagaggtatttgtgcagtttgcctgatgtataggtacagagctactaagtagcagagctgtgatttgacttccttgccaagcttaaatgcctccccagatttgcctttgatttaaagagttaatcagtttctacagctcaccctccccacctgcccttttcccttgcctaccccataacatgcattttcaaagaaaatctttgtttgaaatagtttttgaaatgtgcctttggcattttgaacataaacattctcattgtgctgcttgcaggcaagaggctgtggaaatgcattccctggaggatttagcaaaatagggtagatatccatctttttttgttgaggttctggactctgaaaaatcaagtcagtggcattctaagatctcatctagctatgatttatgaaacacagtgagatatggatttcagcaagtatgggaaccacttttagcattttatgaattacctttcagacatttttgtccgcaagtatacagttttttttttttttccttagcccagcaaaaacctttccaggctttagtctggaagacagtctgtttgtctcaaggagtgttcattatagaaactaccaagggattttggtgactgttttggatttaaccagtaatgcacttttaggaaagtacctcagtctttggtggcttgaagagttaaactaccttggtgtaaa

SEQ ID NO: 95596 - DNA, 1067 bp, Homo sapiens
tagtgtgcttcactttctgtgccagactggaaaagtgtgcataacacaaaactaaatgaagtcttttttggcattcacattgcaaagtgtttcatcagtttcatgtaatataaagaattgcttaggtgttatggtaattaacatttctttatcttgccccgcgcctgggcactgtgctaaacctcacacacatgaggatgtcagtcttcatcttcactccttgatatgggtacagatgaggggactgggctctggaagttggtaatgttattcactgcctccctgtctgaacccatgctgctcacttgcttttaggtgtaacccttccttgatttatctgggttgacaaagtcggtttctttgcattgggttttcagaaagtggagtacaccatcttcacattggtgtagggtagtgccttgtaaatgctgctgactgcaagacccccttccttgggcttctctgtgccctagttgaccctcggcacttctccttggacctaatggaccccagcacttcttccttgattgtagcactagaggcaggaattatacctgttctggttttgatgttttcccaactcaagaccctaaatcagtagagactctgaatcaacctttttgcttgacaatgtggtaagaataggaaaagggagggcagcaagggggagggaacaaagacaatgccaacaaagcaaaatccctaagcggatgtgtctgtctgttgaggggcctctcactgagcagacaggaaaataggccgaaggcccagaggcgacctgggttccccaccccgcaattgccttcaatttttttcttgtgagtacacagtagaaaagattttatggatacatagtaggtgtatatatttatgtgttacatgagatgatgttctgatacaggcatgcaatgcgtaatagtcacatcatggaaaatagggtatccatcccctcatgcatttatcctttgtgttagaaacaatccagttatactgttttagttatttaaaatgtacaattaaattattattgactataggcaccctgttgtgctgttaaatactaggtc

SEQ ID NO: 95597 - DNA, 1506 bp, Homo sapiens
ggggacattcaaaccatagcaccctttttgaaagaattactcgtaaactctcatgaccggatttcttctcttgcacccttcattatctgctcatttaaattgtctccacttctctaacatagaggtgatttttactacagtgatagctcctcgaactggaactgagcttgctgtctggtccccccacctgccatctgtcctagaacacagcacacagctgtaaatgactgaacaagcatgcagagcccagatgactgggccctttctttgttggagtcagaatattactgcctgacgtaatattcccggaggctatcccttaattgcaaagactggatagtaattagtgatcataatgatttccctgggccattaagaaaagtaccttttaatgtgctcaagaattcagggtttagaaagatttccatccagattggctccttaaagaaaaaagatgcggtgcataatttattttactttcagttatctgctaacgcagctatgcaaaatgactcatttattggggagtgggtggtggcattaggtaaagtcttaccatattgtctattttgactgtttcattcttaatagaagtctacacattgcctgcaattgaggtataattttctttaaagggagtgttgtttcagataaggtagctgcgacctaagaaaggaataattctatattgattttaaggtctttagggaatggaagcactgtcttattaattggaaagtcccaactgatagcactgacatattcatgtgctttctttgcctgcctgctcatctgcagccctgatcacagaaggaagggagaagtagataagaaatagtagttatgaggatgaaacgtgcacatataggagccctctcacgttaggcttggtttggtgtctggaggcacgtgatgagaacagcagtggatctgtgggctcatgtttccttactcctgctctattaggactccagtctgaagggatgatctagtaccaaccaggagatgtttagaagaccgagatgtttcctgaagtattctgagctgtctcaggttgattacgtgctttcttatcttagatggctcctggagagctgtctgggtaatatgctctcccactttggtaattttggattttttgcagatgctttttgtaaaagaacacctatgagtgaggcctatggttttggggtttgcagtgcccaaccagtcaagctggtctttgccttttttgtggttggatatggaaagagtggtcagtagatttcccagtgctgtactcatgccattcagctcatagtcacataggtttccatatttgctagtaaaaataagaaaattcggaaaggggagtaggttggaattgtcaagttgaactgtgaatggtgtggatgagatattctggggagagaatggacagaccaggtttggcttagctactagttgagtgtccttctagctctctgggatttctttctaatctgtaaaatcaccattttgttgaag

SEQ ID NO: 95598 - DNA, 1037 bp, Homo sapiens
aggtccacagcctggtatagagagccagtctaggtgtgactcttgagcttgttaacctagccccctctgagctttagtttctccatctgtgagttgaggataatgatacttgcattgtgtggggagtaaacaacaatgcatataaaatgcttgttcactaactgccccaagagtagggccaacatggttcctgtgtcctgttcttacagtccaacctcaggactgtaatgctctccggtgtcacaggatatgcttgctggagttgatgctgtgtgtgtgcacccctctgggctatttagggacgaaggcatttgttattcctaacttctgtgtttatttaccttacatagtatcataaacatcataaattttccttctctcctattcttaggctgtatgagtacaaaagttttatgattctggaaaaaggtgaaatttagggagaaagcactatgaatggaaaaagtgctgttgagtcacgtgcactttcttgctaagatgtgaggtggtggcaccatttaatagcaaggctctgtgacggaaggttggaggatgagtggtgaaactttttgatagagtggttggtattagaccatctcttcagattggagtcttgaggtgaaggctctatttttcatttcttgaatttattcactcctcacagttcctcttaatatggatgagacaatggaatttgcctctcaacgaatatatttaatcatcaaatgtgttttaaagggataattggagtttaggtaaagattatgcagcatgaagttacctagcctttagtgatagtagaacatttgagaagataggaacattgccatcttcttctttctttctttctccctctctctctctctctctctctctctctctctctctctctctctctctctctctctctctctctctctctctctctctctctctctctctctctctctctctctctctctctctctcttctttctttctcttctttctttctttctttctttctttcccttttttgagttggagtcttgctctgt

SEQ ID NO: 95599 - DNA, 1010 bp, Homo sapiens
agaaggaaagccaggacagtgcatgtgacattttccctcatcatttggtttctgtcagcgagaaatatgctttagtaatttggaaataaactcactgcagggggtgaataacaggtttgaaggttggttagttgccaaggagatgaactttgtacgcttatgtggaaagtatgagaggatcacttaatactatatcctctgaaattctactctttctccttgggttcaacaaaatcatcatttggttttaggttgtgttggcagtcacaactataggagctatcattaatttaggaaacagggttccagggttgtgcttgaccactgaccatgtgccacacaatgttccttgtgccccatttattgtacacagaagccctatgaagtgggcactactatgatctcacttatatagataggagcctgaggcataccaagcggtgtcttacccaggtacagttactcagtgtcatagttgtaatacagtgtcattttcatagagttgctttgtccaagttgtaacttgagttcctacacagactctcctcagatttaaagtttcaaagttcacaactctttaagtcatgagacacaagagggacaggcttttggaaaatatggggatgttctttctgttttacatctgttgcagaaggaccgtttctcacaaagttgttaagtagatcatgctcagcatatctggatgctctttgctactggcctgagaaatgaccagcagggcattgcaaagagtgggtagagagtaacaagactgacagtaattaaacccagtactcctcatctgggtgaaaggagaatgatatcaagtatgtctggtatctagtgatataaatgggttataggattttagattccaggtgaggcattataatacaactgtaagaaacctgtctccctcatccccccgacttctttatacacttaaaaaaaatcccagaattttaaagaagtgtataaagaagttggtgggaggagggaaataattttaa

SEQ ID NO: 95600 - DNA, 1004 bp, Homo sapiens
agcctggaaaacaagcccttgccaagcctgcatgtcaaagctcctcttagctcctcttgtgcagttgtaggcattggcctggctgggacctgggagcaagtggggagcaggctgaatgagagagattttgcagcatgtgcttctggttccaactccagcaggaggggctattggagcgggttctcttgatgagaacaggactcttcatggttttttttttttttttttttacctccacttagtttcatctcaggagcaaaaaggtgcaaatacttgtttttgggaaaaatcacagattggttctgactctttaggtgaaagtgagaggcagttaccaggtcactagttattcctcaggcccagaaggcaagaattgcagcaggtgtgggaaattgaatggtgtggctgctcttctcccgagctgtcagctgttggcaggctgaatgaatctagctctagagctggctgcagacaatgcaaagatgtgggcccacttcacttgctttacttgattatgtgaatctggaaaacaaaaccagctgagaattacagatttcatcctcgggtgaggtgacaagggactatggaggaaaccaaggggtctggaagtggggaggcatttatttgcaagagatgtcaagttctcttcaaattttgtgtgtgagtacttcagctgtattaagaattgactatccttaggattttgaaaggctctttttagggaaagcatgtcttttatctgattggttttgggaagggtttaaggaacagattaaggatgtgctcaaagtggatggtattaggatagcagatctataatgtggtttgtttttgtttttgttttaaataatgacagaggatttgcagaaaaatgtatagggaggtctcatgtaccgttcattcagttttcctgataaaatcttgcataactatagtacaatattataacttaagtacatgcacaaaacaaagcaaggcaaatgattgcttttaccagtgattgc

SEQ ID NO: 95601 - DNA, 1039 bp, Homo sapiens
cagttcgtgcttactgaatgcatttataccaatggatgggcatgtggttggggcacttgttaaaatctgccaaggaaagtggcatggcaacttactgaccttcatttttttgggtaacagcagatggtaaatttggcagttggtattgttggttggagctggataagttgggcaggttccaacatggtaatatcctttgtgcttgtgaatttgggttggtgaatggcctttcagggtcttcactggagacatttatttgtgtaatttttactgatttaagtttttgtctttatctctgtaagtcaatacacactcttggaggaggaggtacctaccacttgagagactttgtatgtgttttcatgacaacaatacgtttactttttcttttgtgcagaaatttagttccctcattatattcaagataggtgtgtggtagtttatggtcctcctttattctgacaactccgttctttttcctgccaccccatgagagttctagttttaaaacaattgcttcaagttagccagactgactcaggggactccatgcagactttgcatgtgttttgcttcatagccattcagagtacagggagatgatgatcacaagacagggaggactgtgttgttctttagggagtgatgttgtttgactcttcgcagacggaggacatcagcagtgtctcgaggccttcttttcatgtctttcgttcagccactcctgcagcctccagtccacctcctcacagcacgcgtgcgtgtccctgggtacttgcagatagatggagtaaagattaaggaacacaatggcaagttaatgaactgttttaagaccaaaatgacttactacagctttatgaaatgtgtaggtagtagactgccttaaagttctatataaaatgattaatagcaaaaaaaaaaattgctaatgacttagagtatctttctggtgattgtttttaaaaatgtgcatctttgctgtagataattgccatacagtgtgcttatggtgctggatggggtggtgggatgctag

SEQ ID NO: 95602 - DNA, 1904 bp, Homo sapiens
gggtcactgcccttatggcctgaagtctcttctaagcgctttcgtatattttggctaattttagttgttcaggtgggaggataaatcatctgtccttgatactttattttggccaggagccaaagttcccttcattcttttttattgaagacacattttgtcaaatatgtaagcacgagctctggtgcctgtgagtgcatggatgaatccagcatgaagtacagaaacactgttgcttatcacaccctcctttagagctgtactccttgttgccattcctttcttggacctgtttttaaggttttagacaacactctattcaatgtgtattgtattctttctccccttgtgttatgggaagcttcatggagtttgccactgggttagggagaggtatgaatagactgaggcaagattctcctcaagggacctttggcaggtcaggaaagtgaagacagtggatgatgagtgctccacctaccttctccttttgctccgggaatgacttaagtctggaaagagccgatactaagaagttgagggtctggattggtacatcatagtaaacaggaagaaatgaccatgaggctaaggtcagagtggtgccactgacccagttgaaggcagtttaaacagccagcctctagttcttcaggctctcctaggcctccctgcacaactgaccattggtttcagtggcccaagcagggaaactggcagtgaccctcgagcagcaaggaggggagaggaccctcagtccaaggacagaggagatggactgtgtgagttgccggaaagctcattttgaattctttgggggccaaacttttctatcctaaactcttatttttttttttttccaaattaggaaaatagtatatgacaattgtagaaaattgggctataatctagaggtaatatttggtagcatttctcccctcctcctcaatgcattcatttaaactaagtactaatatgaactatttcaagtatattattgaagacacttgtacccatggtattttgtctatagattggggctcgacgaggtcaactgtcaggattcctgggtgttgatgacatgaagctttggaaagatctaatagtttcttttagatcctggaggaaatagtgatcttatttgcatttattgtttgagtaagatcaccatgttcgttatttgtcatgtggtgctttttggtgggggtttgtcagacatgtattttgtcctccttgtgggtcattcaggcaagcatcagtctcccaaagttgttgatgggcaactgatgtagaagaaaatagaatgaactatattcaccatctgaagtcctccccacccccatccatccaggtgaatggtgtcattgtgtagttgtcttctatatcacattatttttagataccagctgagtagtgcagtctcattgaaagattcagcaggtggcactttgtagaagatggaggggatccagagggcgcgctgggggctttgctgtgtgtagtaaaagttctatgttgtgctttccatggagaagagggcgggtccagggcttcaggccattgcatgctgggtttggaatcccagaactagctcattggttcagtagcagaactagaaagaggatgcgttgcgtttttgtttgaaatgtgctgaagacagtgtttttttattgagcaggctgttgttaaatttgtaatttttccgtcagtttttattgagactgattgatcttggggggtgcggattaattttaaggaacatgtaatttcttccttttgatcagatcctatagccttaattttgttctggaatctttcctgtgtagttatattcatctgtgtttagttgactagttagtgaatttaagttgtaatgtgatgtgcctatttgaggccaaaaaata

SEQ ID NO: 95603 - DNA, 1078 bp, Homo sapiens
caaggatgattttccctttcctgcacagtttctcttctttctcactttaactctgctttcccctcattctgtactaactacaaatcttccttaacctgactctttgcaggtagtatgtcatgtatatataacaaggaacagaatgcctacctggctggtgtgcacagcgtcttctccaggtttatatgagagagagaggtggagataacagacttctcagactttgtcattcacaagggcaacttatttttattttccagacttgtgtcactatctgtttccttcattccccaccctgatcttctcacacaaactctgggtttcttcctctgctcatcttatttcaataaaccaagatgctaggagaggagccaagtctgaaaccacattctcagtgatgttttgttactggggcccactggacgtagctgaacctcttttcgggttagtggattctcgctgagcacaccgtcacagactacacctccagcctgcgttcatgtattcagtactttgccttggcttcactagagggtgctgtcgtgcagggttgttagaggtaaacgttttctggacttaaatggaccagatgatctgtatttgcaaaggaaacagattttccaagtgataagttcaaatagtatcagtcattttccttttgtggtcccatttttacagctgaacaaaccgaggctcagagaagtggagtgcattgcccgaggtcacagttagtgggagagctggccgggcagtcccctcgcactatccctgcggctctccgtgtctgcctttacctcctatgcatcacgtcctataatcacacttcaaaggatgagtcctctaaggttcctgttcttggcacaaggataaagtgaatgtatatgtgcctctgctcctggaggatggagaacttgtgttcctttcattattgtatgtagtgtgggggaagtaaagtcattcacatcgttcagtagccacacattttatttttattttttcataaggatgaagaggaagaaatcaaactggagataaatatgctaaagaaatactctcatcacagaaacattgcaacata

SEQ ID NO: 95604 - DNA, 1066 bp, Homo sapiens
agtagaatgtttttgaggtaaaatgaaaaagaatgttagggaatatttgagtcagatatttgataattgggtagtgatgaagagcaaagtggtcctcctgtgcccatgtgcttctgagagagaatgagcacttcagaattgctgcacttgggtgtgccgtagaataccagacactgtcagtcttctggaccaaatatatggagcgaatacactggactatgaaatgagctttcagttatttaggtgcctccaaattattatgaattattgaggagcatcacgtttctaggtctttagaaaagagagggcatggcggttaaactggttttcccaatttctccaagatatgttgctcaccttgtgtcttgtctgccctatagcttgttatggagttctgtggggctgggtccattacagaccttgtgaagaacaccaaagggaacacactcaaagaagactggatcgcttacatctccagagaaatcctgagggtaaggaaagtgggtggctacagtgctccaactcatgatcctgtgcttccgttttcattttcccagccccaagtacttctttgcattacttatatctatatagattattctctttgacagccaagggttctgtatatctagctagctttgataattttaagctacatcatgatttgactctggcaagtatgtaaagaaggtagacttaaataaaaaaagcatttctgaatttactttccatggcatcatgacatacctattggcagctttcctttgagttaaaaggaaatcagagtggaagggaagagaaataatctccaactattgtttttaaaggaattctgtgtttaagcttataaatcaatactaatggtgctgaatgctggttttcaaaatcaccttgaagtctttggcattagctactagagtctgttacaatatttatgaagaaaagttcgaatgtttaatattatttacagccatttgaaaagctggctaatgatcttagagtaagtttctgaactgctattttagcagcttttaaatggttcttttgagtagtaaagccatattga

SEQ ID NO: 95605 - DNA, 1791 bp, Homo sapiens
caagcttcctttgcctacatgtcatctagaatgggagtttttccttgtgacaaaagtttaaattaactaaaaacaagcaaatgcctcagggagagttcctgtgtcatgcagtaagtagtgtgtgttcattataggggttactaagagtcggctttggtaaagagaaagcagcatgataaactggaggtaaggtctcatgagaaaggaatgcagccacccccagacagataagctgtgttctcaaagacagttggggttaaacaatttctgtggtggcaaaacctttcctcatttctcactagatgttggatttagacatcttgatcattatgatcagacccttcgaatggggagggtcctgagcaggtaggcctcagccaatagagaagtgctttttggagcctgcacactgttaccctgtggaccacaaggcttagcagcaggccagcgtgttcttttcagcccacttccatgttcacattccacatggcagtatcttcatattgaacatgggaactgagagctttctataaccaatactgtatgacaacctttgcctgctcttttattctgtgaccatgcatgatacagagttaagggaaaaatgtttcctagttcagaaacactgatgcatttgctcgaggataggtccttcactgagtatttggacttggcatctctgctaaggaaggataattgtggcctaatttctggtgtgggattagctgaacacacatacactcccaggtacttcatggaagaaaaatgtacttatttttcagaataatcatataacattgtttcagagctgctagacacaccttaattccctgtagaagcagtgatcctgtagcagtatagacaggaaaacaggcattgttccatacatttactgctagtaatgaacaagagtgcatgcaagccacatttgttggacaagatgtgggtgcttatgtttgttgttaagatagtcctgtaaaagtttaagaagaggttgtgcaagttagagagcaaaaatgaactgaaataatagaaataggaattacgaagaattgggaagttagcttttgtgtctctcctttcgctgtttgaagttataccaagctgagaggaggtgctttgttcctaactatagcaataaggtaccatatatttttagtgcttttttctctagtcagtgctttgcggtataataccgcacatcctgtgttgtgaaaaataaacagagctgtcgaataagctctgctctgtttcatagacagaccagtaaatgaatgttttgaaaccccctatgttagaaaaattagtattctagaggagctgttgtatttaattcatatcttacaaagtaatgataacaataaaaccccatgaaaaaagaataaacaggaaaaatcaaataacccttacttataatctgcccttttggattgagacattttagagtaaataggttgcttgtatcttaaggaggcgagctgtatatttggcttctctagctaaggacagaataagtaaatgagttgtgagaatgatgcattgctgtctcttggaccatatttggaggcaacatgtgtttttgttcttccaccacctctcgtaagagacaagcttttgggcctcattccagatacaaggtcatcaaaaagtgttatatgcccagtaggtttgtttccttgggaaagaaagatactttatttgaacacaaggctcttttgacagcacaatcgttttatgcttgggatggaggtgggattgatcagcacttagcagtttgtcactgtgcagtgg

SEQ ID NO: 95606 - DNA, 1030 bp, Homo sapiens
gctagccagtgttaaagagccagatttcaaagccctctcttgccctttgcttttcccctgagatgtgtctagttcaaatatgcccacggggtcaccctctagacatttagcgtgggaaaggaaccaccctgtacacaaatagcacaaattatagcacagaaactgcagatggtaatctgcagtgtatcttaaaggcacagctagaagtgatcacgttgctcacacggggaacctaacccactgggaatgtggagggtggggaggacttctttctgtgtgtgtggtagtattggtgctgtcttcctgggaatgcactaagacgaagttaatgttcatgagctcacaaacacctttggtccacatgtgcactttcttataaaaggtgtgttcctggctgtttacttatagtcacagaaaactaaaattcaggtctgtctttcctattcagggactggcacatcttcacattcatcatgtgattcaccgggatatcaagggccagaatgtgttgctgactgagaatgcagaggtgaaacttggtatgtaatggatgtgcggcgtgatctcataattgcacctggcacaagccagctgcactcccagttctgcttccatctagctaaaagttcagtcttacccatgttttctatttctgttcttcttaagaatgtgggaactgagcatattacttagcttggctccagcctccccacttccatgtttgtgcccccctgccccctggttctctatacagcagccagactgatcttcaaatcagaccatgccactttcctgcttaaagaaccttaatggcttcctattttactttggataaaacctacatttctcacccttgcccataaaaagccatgtaggatctgacccgtgctacttttccctcctcattttatgtccctctttacttctctcttcatcagtcactgtcttttttttcttttcttaaactttttgggtcttgcctttgggcctttgcatgactatttcccattgggaacacttgacttcagtt

SEQ ID NO: 95607 - DNA, 2050 bp, Homo sapiens
atttctgcgtggttagataattacagcccatggtgttttcctggagttactcacaagggttcttttatatttcttgtttcctttagctgggtctgaactcattccactttcatctaagtgttgtatcaaaattttaaatagagtttgtattaatttttcttccactaacacatcacaacaaaattctttatgtttatatgggtctggtcaacctttcttttagaaatcataggcacagctgttgtactgtaaaagtaagatcttcatagttactttcttgcctgtggttgtgtttgttggttttctatggaggaatctgcccaattggaaactcccctcagagctaacataggaagcacttgagcagttctcataccaaatgactcagtgagttgtgtgttccctgctctggtctcctggtaccagcctgtgatagtccctgagcgatcacttagtgattggttaccattgccttccaagttgctgtgatgctcgcttaggcttcctgcactggctggcctgtgtgtccctggttcctgcactgcctggcccgtgtgtctctgtctctaaaggagtactcagtgagtgagtccacaccctggacgagccattttctgagcgtgttctgtgcatgaatctatgatccctttaagtcatctcagcatttcgtaggcctttttgcatgggctcctccacctttgcaggttcctgctgggttaatggcagtgtgcgtagtgatagtgttggcagggagtgatgggaggcattctgttagaggtcatggtcttcctgccagctctgcctcccgtccttgaactttcctctagaccaccaccaccatccaattgggtgggatgcagaagtcactgaaaaatcagcagaagttccaagtgctttagggtgtgttgtttgtgaatatgtgatttagcttgattttctttatttgattcagtactgtgttttttttcaagaaaactttcgtgaaattcttatctttatggttattagtgctgtttaagaaggtaagtcaagtgcatctcagtcagttctcctgaacctggggctctctgtgacttgatcttgtttgtggcagttctctgaaagcactgaaggttgtggttcattcaaaaggccctctgctggtcactgttggagaagctggggaggcagccagatccaggcctcacagaagcttccagactggtagaggatctcacagtctcggtggctttactgtggaggggcactcctgaccagtggtgcctgccttgagcaggatcgcatattcatgaagcactgctgtttcagtttactatgaagacatttcctccttgtgttttttcccaagtatatctggtttgtagttgtgtttatctttctttatctgcctttttcttcctcccacagttgactttggtgtgagtgctcagctggacaggactgtggggcggagaaatacgttcataggcactccctactggatggctcctgaggtcatcgcctgtgatgagaacccagatgccacctatgattacagagtaagaggcacctgctccgtaggcctttgcagggccactggcatacccgagggatgggggctttgcttataaattgcacaccccttgtctgcctgccttttcagggaggaagaccttcagtgaggaaaattgcaggtgcaaattttccaggacagtattcagatgctgtcttttttgtccatttgcatcacatgactgtgttctcactaaggaatacactggtttcaaagcagtctggagcactttgttgtgcctagaactttttgttcctatttgctatccattttttaacttgaagaatatattagaatcaaatatttattcttttaaaaatattgccaatataaagtaatagcttcatttgagtgaaattttatattcttgttaaaccactttacagcttttatttggtacacaaatttatttaaattattagagtgacctctagggacttgagtcagtaacacactttaaaaaaatctagatgtaaacccatatttgatatcaaactc

SEQ ID NO: 95608 - DNA, 1051 bp, Homo sapiens
cattcaacaaaaatttattccatacctattgtggcatgcatgcctagtgttgagcattgcctgcaggttgagatgtaggaaccagtttttgacgtgtaccatttcaacctttcagtgggacagaaacaaaaagcatgcagtctgttaaaagcagataaccccagaagaaaggctcctaaattggggacacataggacagagtgttgccaggaagatttaccagaagtggtgattcttgagatgagtctcaaaaaataggataggtgataggtaagagtgtcttgaccaaggctagggccatggtcctcatgagctgggcatggagaaacaggaagaagtaaaagtggctagtatggcaaatgtaggtgacagattaatctcttccctccatccctccaaaagaaccaacaactgtaatttccacctttgtaggttaaacagagggaactgacaaatcaaccagtttggaactccggttgaaatgtcaaattaacaggttcaagagacccagcatttcgtcatggattctgctccttttcttatctcattgtctgtccttgtcttctaggtaccagacatctgtcctgtctgccttcattttatcaaagacctccctttacccccttgctgccaccactcctgttaattaagtgattaatgtgcaatattagatttaaacccagttcatttaaatctgacctccttgttagctccctgtttgtggtgtgttgttagtgataggatgcaccacttaaactgtgctaaattaatgctcctgatcctcaacagtcctgagttcctatttatgtttcatacattattcctatgcatttgcagaatgttcacagtgaattctgaagctcttctttatgttgaggcttgtaagttactgatattttcgatctttactctttgtggtggaaatttgatgatctttttcacttcttacaggtcgaagaagttttttagttttatagaagggtgcctggtgaagaattacatgcagcggccctctacagagcagcttttgaaacatccttttataagggat

SEQ ID NO: 95609 - DNA, 1140 bp, Homo sapiens
aagtgggagggaattatgacagggcttggtggttgaccagacaaagacaaaggaatggtgtaaacactgaagagtggtctgatggttctgtttgctgaagaaaaaaaaagtggttaaaggactagtgaaatcaaagaaggtgatttcaacctttccttttactgagtttgaattgttacgcgaatcctaaatagaaatgtcttgtcaagcaaacatctaggacagcattttaagatatttactaaataagtaaaagaagatatgggactattgaattgtagatatagtcatttctgtggatgtattagttgtctccctggagtcagaggaactcagagaatgaatgtagaaatgggataatatgctggtgctattgactcacttataggacagtgtgatcggtgcacacccctgaaagccctgctttttccaacagttccattgtgaacgtgcctggtgagtctactcttcgccgagatttcctgagactgcagcaggagaacaaggaacgttccgaggctcttcggagacaacagttactacaggagcaacagctccgggagcaggaagaatataaaaggcaactgctggcagagagacagaagcggattgagcagcagaaagaacagaggcgacggctagaagaggtagcaaaaggaaaatgtccaagttggttggtcttttctctttctgcatttacactggtagttagccactcagaggaatatcctctgtagcttcctggggtaatacttatcccctggcacagctgtttacataacttgtgaaagaaagcttacgctttggactggcaggccttcacattccttgaggccttagaaatgttttccttccttgtgaaaactttaaggatctgccccacagttactcatcaacatactgtgttagatgcagagcaagtgtcccaaagatggcatcagaccagttttgtgaagtctttttgcattatggtttaagttggcttgctcaggattgacctgattgcttttctactctcagcctctgggtcccagtttgtatgtgcatatttttctgaaacttcagactttttcacatgaaagtttttttttttctaaatgccttaaccttgggtatactcaagagtaggggatgcagatg

SEQ ID NO: 95610 - DNA, 1635 bp, Homo sapiens
ggaagttgtagtgtcctctggtggagaagtacattttacaccacctgctcatttaactcattaatattgctaacattggtaatgtggttaccttacagctttcacgtttttaatgcacagaaatatattatttccctatacagtcatgggtcgcttaatgacggggatacattctgagaaatgcatcattaggtgatccgtcattgtgggaacatcatagagtgtacctacacagacctagatggtacagcctactgcgcacctagactatgtggtgtggcctcttgcttctaggctacaaacctgtacagcatgttactgtgccttatactgtaggcagttgtaacacaatggtaagtatttgtatatgtaaacatagaaaaagtatggtaaaaatatgatattataattttatgggaccaccattgtatatgcagttcatcattgaccaaaacatggctatttcacttggggatcagaagagtcttttgattttctttttttgactggcttctgctgcatacctcacaggtccaaatttctcattcattatcatttctgtttttatttaattcacagacattattgttttaccttttttcccccagaaaaatgggccaacaacagtaaagccctgtattgatattatccagtggaatttaacctattaagtagcaacacatgctattaaatattatcctactaatttaacagcacactttggcatggaatctttcattcactttgtgtatttgtagtctggattctgaaaactctttataatttgccgcttgtttagaaaaatcagtgcctgctgaactaaggagcctgcaaatattcagctaggacttttagaagaaaacaggacgtacgttcccctgtagtagggacaacttcgctgcttttataatgctttttgtagctaatttgcaaattccttgtggtatttttgttaagactcttttcagtgttctttgaacgtaataaatcttgaatgagttcagagatctgttcaagttgcatattgactgtacttactatattagaatgcttgagttttgagactctggctgtttctagttgtttcttgaagtggtgttttccactatctttttttgatcccggcctgtactttccttaagcaggtggcatagactactttggtggtttataacttgaagtgccaaggaccagatcaagttagcactcatttgtaacacaggcactggaaatgtctttcaggctgtcactagtgagacgagtatccattatccagcctctgcatgtggtaggtggtgaaggtgagcgatggtagaaggtgaaggtgagcgatggctcacagggaagagctgaaattttaaagtcattttgttttataagctaagtagatgctggtgaatgtctgtgaaaacaacaattttgtgcttgtcatgttttaattagcccattatggattttcagtgtaagttcaaactcagggtcatctctttgagcttcttaattaggaaagattaagaaaatattggaatgggaaaagtcacatgagtagaattccactggtttggatttttggtcagctagctgcttgttactagcctgggtaattaagctttatttacactccaggtctgagga

SEQ ID NO: 95611 - DNA, 1261 bp, Homo sapiens
tactagagcaggagcatcattcattttatgaccccatctccacccatgggaagctgatgagttttgtgtattgaattcgaagagcagagaatgggggaaaaggagattcccccattgaaaacctagataatgagagaggcggaaccaaaagcagactcagaacttcactgagaataatgggggtgtagtagtcaggtgagagagactggactaccaaatcatcgttgctatccagttattccagatgaaagatactactttacatttcttagggcatcatttttaagtgttggctttcagattaaatactagttgagagtggtgggaagacccagaaggaatacttaaactataataaatatgtactttgtgtatccattataaatatgtctaacatccctgatagctttaccctaagctttcttgtttaatggttaattttagtgtcacaaataaagtttgtgttaatattattggctctctgtgtctgggaaatttgatggctgtgcatcccctagagttgctgctacccagtagccactagccacatttggccatttaaattaaaattaacttcagtgcaacaaaattaaaaactcagtttttcattcatgctagctatatttcaggtgctcattagcaacacgtgactagtgactacggagcagtgcagagacagaacatttttattatcccagagagtccagagtctagcttgtgctttactggcagacagccttgagctagaagagtgagttgtcatcacgtgcctggcatgtcatcttgctctgttctgtagggttacatagaacagtctggatttagaaaggctgagtgagtctggtgattcagtagcaccttttacacctgttgatgggatgcagggtagagggtggttaagagtatgtatgggccgtagaggcagagcagctcttccagctgggggcttgctggctgtgtgactttgggcaagtcacttaccttttctgaacctgctttcgcatctgtaaagcagggatgaaataatgacttccttgggttgttaggagaattatattaggtaaagtaagtggaatagaaatatcaaatacttagcatagtgccaggcacatagtagtaagcatttgctcagtagcagtttctgaaatacttatattaataataatggtcctggttattcttgttgacgtcagttcctcttttcctgatgtgtgcttctttttttccttttttaaattctttgtctgtctttgctgtattt

SEQ ID NO: 95612 - DNA, 3890 bp, Homo sapiens
tttctttctcttaatgtatttttcttctgacttaagggtcctgcataaccctgttaatgatatccacgaataaagaattttctgtcccctaattgctgtggtgcagtgagcagtggggaataattgttatcaaaatgaaactaaaccctataaggattcacagagtcacaatacttttgaccagcattcatgaagaagcccttacttatgggtccgaggggcagtgtggaaataattggccagtagatatggggcccatgaacctcacctcattagtgtccacctggcactgactgatcagcacactataacatcatgagaaagatggcgggaagatccctggtaattatacatttttacttacgtagcaacaaaggagagagcgggaagctagaaggcagcaggaacgtgaacagcgaaggagagaacaagaagaaaagaggcgtctagaggagttggagagaaggcgcaaagaagaagaggagaggagacgggcagaagaagaaaagaggagagttgaaagagaacaggttagttcacagataacatagcaggcatacacttgtgaagtttgttactttgcagagctgggggatttttagaaagtatacacacatgtgatgcatacacacatgtacacacatacacatatacttagaacttcagatgtatgaacgtggtgaaacacagttggaatgacaccaataaattcagtctcttgtcttaaaaagggtttataaatcattacactttaggaacctgttgaaaccagttaagtggtctctaaatagtataatacctgaaagatgtctgcatgtatcttctcaggcttggcttaaatgctgtagaccccaaatatatgggtgataattaacttttaaaaaaaaaatgaaattaaaaaccaacagtaagaaatttcttaggagaaatatttgaatatccagtggctaagtgaatactgtaatatatatcagcatgtaattctgtatatacacagcacattaaaaaaactaacattgatgagttcaaccaaaaaagatcaggttttaataatatttgcagcattttattaatgtcaggtatgattttatttagaattatttttttgtttcctgaaccacctgtacaaatacaatttgcccttagcccctttgcctttcttgtctttgaattgatctctttgttatgagcttggaataaagaaaaaaatgatatgtgaggaccaatttaaatagcacttggtatctgtattttaaacttataaaccatggtgttaactttcaaatgtgactgttcagctgccgtcctttatgcttatcatgtgtcttgggctttctaagcttgggtctgcatgctcctcggtgttttcccaggaatttcagtgacgctttttatgttacctaattgacgttgtcaaccatttaactgtgtagcgcgtgtgctttaacattccacttatgtttatacctggggtctgcaaagaggaaaacattcaagcttttaagaattaaatcacctagaaataatgattacagttcgatcatgagaggagggtgtgatggtagcaattcatctttaatgctctagtggcagtcattaaattttgtgaatagcaagtatttggcaccacttttaaaaaaaaaaattctaaaatcggttttattctgtttttccctgttctattgtgaaatagtaattcccatgttaacagtgctgtaggacgcatttcatttcagcataagtgtgtatgtttgtgtagatgcgtgttgtgtattgtttgttcattgactatgtgttaggacctttgtggtttggagaggacatgatttttccagctgtccctgtgttgagggcagaaaacaaatgagtgtactgacttgatctttcgagttaagatttaattctgttttgttcaaaaaagaaaatgagttgaaagtcaggttcctttgctccgtcacagttgggttaaggccacaagccttgctagggtaggtattgctgtagcatgtaccatggagggtcagacatagacacaagagacgtagatcccaggtcagaaccagatatgtttgtcagtagccttctgactaagtccgccccacccctctgcccacacccccccagttggcttttttggctcagttttctttgtaaagtaaggttttctaaggatttttatatgctgtaatttcaatattctcccagagatattggttaactaaaacttctgttcagcccatattgatggctatttttgtttcaaggtgtgcaccatgacacaaggggatggtcagcagtagacactcttaaaagggaatctgaatttcaggataaaatgtctcctcgtagtccttcttagtctattcctcttctagagcttttttccctgtccaaaaaaaggaagcctctttggcttgtaaaatgttttatgcttttcaaggttatttcatatcaatctcatgtctgaaccttacaaaaattcctgagggttgggagaggagattttggatgctcatttctcaaatgaggagactgagaaaaggggagctttagagcatgctagggatcatagagccagtcctcagtggaacagggactgaggcctcctggtatccctgtcctttataatacgcatgcagctttgaagtagggttttacccctctctataacatatttgggatgtgtttacttgttttcattgttataatgactaatcattctcttctcattgaaaagaaaaaccaccccatcctcacttcctgctgtctttctctccccttgtccttgtctgtctctgtctgtcacacacacacaagctcatcatggagcctgggtctgttcatttgaggagagttgcccaagtctggaatgtagtcattccaggtgcctttggaattgttagtgaaagcatgaatcatgtttgttgtattttattattaagcaggttttggttttaggtttcaaaaattggtgatctgtgcttgttacaaataatgactaataagcagatgtttactaatcagaaccctctgatactttttaattaaaatcttgatttctctggggtttaccaaccttaagaggaatggcatactgttttaaaattctgtatttgtttacaacagctgtgttctaacagaagtactcttagatcccttcgtgtatattatgggaatgcatatcatcatttgttagactccttaggtcttactggccaatttgaagttcttggagaaatctttagcaatagattttcttcaggtatttaccactaagtgaattgtcactaaaggtgattggagcaaatggttcttggtgctccattcaggtggttctgatgcttttctttgggataatttgattgctgggtgatttctgtgtgacaggagtatatcaggcgacagctagaagaggagcagcggcacttggaagtccttcagcagcagctgctccaggagcaggccatgttactggtaaagccccgcctctgtttcattctgtagcatcagggctccttcatccgtccccaaagttgagcaagctgtggtggtcaccagaccattttggttttgctgtgggcagccaggctgaaatagtgatgcccattttgtggtcctattgctagcacattgcaacatggtctttatttatttatatctctttaataagttaattgttcttgtttggtagaccaacaaggttttgaacagaacttggcactcagtgaacacactagaatgctgagggcagtaggttgaaagcacatgtcacaggatttttacctagtatctataccactaaaactcacatttaattgaattatctcttactctgtccaatgataattatggttagcaacagctgtgagatttttccacaggtaatgtgc

SEQ ID NO: 95613 - DNA, 1018 bp, Homo sapiens
aggcgagctctccagtgtcccatagatttagtgttatcctctccctctccaaggagtgccgatggcgggagatggaggagcaccggcaggcagagaggctccagaggcagttgcaacaagaacaagcatatctcctgtctctacagcatgaccataggaggccgcacccgcagcactcgcagcagccgccaccaccgcagcaggaaaggagcaagccaagcttccatgctcccgagcccaaagcccactacgagcctgctgaccgagcgcgagaggtatcctctttcctttgtcacttagacattgccctggaaagtcgtataacgactcttcagaactgtgtcatatgagttctagaacgggccatagagtttagctaattatctggtttcttcattttctaactaggaaattgaatttcagaggagtggagggccttgcccaaggtttcatattcagtcagtgctttttccataaaggaccagagtgcctcagttaacatatcccagaagaacttgaaactgaactaaactaaaagattacatgacacagtcactcttaaaaatgtggatgagggaaagagtggtctgatgaactattctgccaagctagtataaagctaaagtgtgcctgtggctcaactttctgactttgcagatgtcaagatgccctgctagattggtgcattagggttacccagagcctcagagtaggctgcggcagggactgctcgggggtgcaagatgggcgacaggtgtgcctccagaggtgttgaatcccggcccacaggtggcagcagccttctattgtgtctgccctcacaggcagtagattctagaaacaagtgttctgtttgttctggagtgcttttatatttggtggagtgaaatgcattccggatttctgatgatagttttttagtctgttggtttagttgcttgtgacagattaatttttttctacttcatcatcatatacagtcttagaattctgagcaaggaggagagcttagagactg

SEQ ID NO: 95614 - DNA, 1039 bp, Homo sapiens
gagccaccagtgccttcccgatcagagtctttttccaatggcaactccgagtctgtgcatcccgccctgcagagaccagcggagccacaggtagcgacagccagctttgctgtggttgaggagactcatgcaacggctcgctgagccgcaggcctgctgtaatatcacagtttagtttgtcaccacactgaaaaagaggagagattagcaggagtgagtttagactaaaagaaggcatagactcagttgatagggaaatatctttttctttctttttgagatttctatgtactcattaagagtatctagagtgagtgatttcttctaactttttgccttccctaactcaggtgttaagtgcctcctttttctgatacaaagatcttttagtttagtttttagagaactgggattataaatacatagagggagagccaggaattttctttgaagtattttaaaagtaagcgctttactgtgtgagccctggctcttggccagtcctatgaatgggccttagatgatgcccctgaaattgcatgcaaaatgtctttatttgctcaaatgtgtattttttgtgggggtggggggaatgaccttttatcagattctcacagggttcaagatccaaaaaagtttagatctagtgggttaggtgtggatttctctgaaataggccagggaaaaggctgtgacctctccttgggtctgctgcagcgttctagccttggctaggtgaggggaactgttgggccgatgctgtgtggctggagcagaacccacagtgctgtccatagaggagaacaagcaacgaagatcatggctaaagatcttagagatccttaaaatgccgattcctaatctcttgctgaaaactactgacttttagatattttcccgcttgccactctgtaatccagaatattaggaacaagttcttaaactcgagtttacttttcactggtgtttgcatgtgtgggggacaaaagtttatgttcttgtggcaggaaactgtgggatctgcagcatggaggagtta

SEQ ID NO: 95615 - DNA, 4953 bp, Homo sapiens
ttgtctttgctcgttgaacgtgccattttgttactcgctctggtgtaaaatgtgacactgcaggtaatgtgaggatggctaggtaggtttgcacatttggcagtgcgctttatcttacaatttttctgcctctctctgcctttccagtctctgctttgacatggatgtgcatgcaacacatcataacccctttgggctctgagagcctctttgtggggaaaaaaaaaataaaaatcttcacattaactgctatctgtaatgtttgtctggatattaaaaagagttttccttgtaaatgtacatttgttcttttctacatactgtgttcccagaccacttcttcactttgaagtgtaactgtttcactgcgtggctgacctaacactgtaccaccccggtgtgtattccgcctctgccagttcctgctttggatttggtattgaccagaaaagccagttttatgcagaacgcattgaatgttttgtgttttgttttcttgtaaggtacagtggtcccacctggcatctctcaagaacaatgtttcccctgtctcgcgatcccattccttcagtgacccttctcccaaatttgcacaccaccatcttcgttctcaggacccatgtccaccttcccgcagtgaggtgctcagtcagagctctgactctaagtcagaggcgcctgaccctacccaaaaggcttggtctagatcagacagtgacgaggtgcctccaagggtaaggagcagaaagacagatgtgtgctgcttttttcctttttgttatttttttttaaagattatttattttaattatgggtatgcaacttgaccaaatttaaaggggcattgaaatttcaaagggactttttactggtgaggataaagttccatagttaggcaattctgtttagccagtggtcagttagcgttttatttttgttaaccctaaataaggtagcaaaatgatgtaagagtaagtctacaaagaataggcttcttaaacaaattcataatctattttagcagttttttatatgtttatacagaagctatgcagttttgcaatattaatgtcaaaatttttagaaaaagtcctataagaaaaattttattttctttttaaatgtaggggattttgttttgtttttgtgtttacataatagtgaaattaaacaaaggagcccatgtcaatttatttttcctcatttggaatttgcttcctctgaatattttcttgcttcctgctagtctttgcttcctgctgatccatttatagaccattgtttggtttctttgagcttattttcctgattctcacattatctcagcaaatgctttgtatgtccctgctaccaagcttcagtccaaacatcatttaaatgttacaggagcatagaaagcctgtttgtactggcttcttggatgcttgtgactaaattttctctccgattgtatcagtgtaggaccagggaaggagttggggtggggagtggaggtgataggaaggactgcttttaaatattaggactgctttaaaaatatattttggtagggaagtattttttttccttttcatgttttcaataatttaattgctatattttctacttaaaggttcctgtgagaacaacatctcgctcccctgttctgtcccgtcgagattccccactgcagggcagtgggcagcagaatagccaggcaggacagagaaactccaccaggtaaaagacaagtgagcactgagaacaggccttctgtgcagtctaccacagccttacattgtctgtttcataaaaatgctcttaaacacagacgttctggggctaagagattatcagttataaaaggaaaagctgccataaaatccatcaacgtggatggcatcaagttgatgtgtagtaaaaagtgggtttgaatccggatgtgtattatagcaactctgaaatttaaactacttttctctgtaagagtaaatggagggagcagcaaggaagggggagaagttctaagagaattgtgatcggggggagcttttcatctaagggatgttgtaaggcctgtggcataaaacagaaatcacaaacaggttactaaagaagtcactggttgacttcacagtctgcagtaaacaagtgaattcaccaaatactatcctttttaggttctagagctgctctgtccagtacgattagctacagaagcttccttatatttaaattaaagtttaagtttagttaaaatgaaatacagtggaaacttcattccttagtgcactgggtatattcatgagctctatagccacatatagctagtggctatgatattatccagctcaaatatagaacattttcatcataacagaacgcttcattgaccagcactatcatagggaagaaaagatgattatgttgaatgttttatatcttgatcatcactgaacctctaaagttagccttctgcgcatggaaccttggtctgacttgaggtgtcagatggatgatagcccaaaagctgcacagaatcctcagcactgctaatggcagggggactgtggtgttcttccctgaccaagtctgtgtcattaattcttacctagcacatgtgtgctttgggtccatccatggcaggaaatccatcccagctcatgctttctgtaccgtttccaacagcccatacaaaggactattctttgtaagtgtcagtttttgagaacagtaacaggcaggtgagagcagcagcctagaaacagaatatagttttgtgtataattatacaaatacggagtgttttcctaatattaagaactgacttgtagctgtgacagaaatggtgctgcttctacactgaacagtagcattgtatctcacacctgatgattttagatctactaatggtaggatatcatttagcatacaaactaaaaatcgataaaaatccatgaacaatgtcattatatcttttggtgaatttaatgttgagtgctgtttatagactgttttttgtctccctacactttaaagacattggatgggcacaccatgcacatgttggtaatttggtgctgcatctagagatgacacattagctgttctctcttcttcttttctaacagcagtattgagcccaggcttctgtgggagagagtggagaagctggtgcccagacctggcagtggcagctcctcagggtccagcaactcaggatcccagcccgggtctcaccctgggtctcagagtggctccggggaacgcttcagagtgagatgtaagctgcctttcctttcctttttccctgctaatgttttgagctgtgatccatatcttggaagtttgtcttaatctgtagtttgcgtgtagccacacgtcacaaaacaatgttttagcataggttgctagtgacaataatagtcatcctgattttaatcataaaggagctaaattttgagagctttatatatacctagcactgtgagcgctttacaatttagtgggattaactaactttcccaaggtaattggctaatgtgtgagctaggatttgaacccatttctttcggtctgggctccagagcctatactgtcatcaatattggttattttaatgtactcataatagatgagtgaatattccctctactgtattattgacataccatgacaaggtatatattgtgaacacgtgtcaaagtgagtgtgatgatggagggtttaagtaaagagtcaggaaggctgctggagccctccttgggccccctctgctctgtaattcagacctgcaggtggagagcctaccatgagtgggcagacaggagtgggcggggtgggcagggcagcttcataatacacatccatatgttgatatgtgtctgtccatcttgtcccttttgaacccaacagcatcatccaagtctgaaggctctccatctcagcgcctggaaaatgcagtgaaaaaacctgaagataaaaaggaagttttcagacccctcaagcctgctgtaaggattgtgcaggatcagttttacttatttcagacttgaatgagatctttctattaaaaatatgtggttgagaggcctgcagtcttttctgcgagggcccctcacagatttgaggaattataaggaatgacctaaaccccagacatacttgttcccttccattggtatcgtctgctttccctgtataaagtctcaagtgagtaaaaccttttttctgttgttccagccatacacttggtgtacagtcagccttacaaaattatgcagaacaaagtatagttcttatttaatgaaatttccttctaaggaaactgatgctttaaaaaaaatacaaaagaaagaaaagcctttttatctctttcttggcattaacctttacttattcttcgtgagttcagcatttacaatactggcttttagactaagtttttaaaaatcaccttcttaaactcactggttgcctaccttctgctttttggtacctggggtgatagttgtgactgcttctcacccttctcttttaatccctctgatgttacctgaccatgtaattgtgcacgctttgtggaattttaagcctgtcagagttttcatttcctgcttgaactgatttctgtacttctccctctccccttctttctcccgcgcttccttgtactgtgcattcctcatcaacgatggcttctcggactccacgaaactgcgctgtactgaagggcgaagtggtaagcgccatctctgaaaagttccacttcagagcagcactccgaccgcctgtcagctcagcttgtattcgagctgcggtcctgctccttcctcaacttgacttcttgttcttttctagaatttaaaaacctcaaactttactccagttttcttaacataacatttgctgtatttattgttattaaatgtagcttttttgagtaactgtttaaaaagcttcagctataaccac

SEQ ID NO: 95616 - DNA, 2552 bp, Homo sapiens
aaataaaaatgtgtctctcaaaaccttttttatgagtctaaagaagactttgtcatgtagggagatctccttacaacaaagtccaagagtctgtgtatatacatttgttgatctagaattttacctcatattaaaaaacaacagtaatactatcagcttaacataagcagatcttttttttattgtcatgggatttgaactgtatatgacatctttgacttttttttggtgtcttctattttttttttttaatctctctcttgactttatttggtcttttctatcaaaagccataggagctcactttctcatgaaactgggtaactataaaagtcttacaaaactgacattgtggcaatttatggttaaagaacttctcatcttctcctgtccctgctcctgcttgccttactctctcttttctgtcctttgctttaggatctgaccgcactggccaaagagcttcgagcagtggaagatgtacggccacctcacaaagtaacggactactcctcatccagtgaggagtcggggacgacggatgaggaggacgacgatgtggagcaggaaggggctgacgagtccacctcaggaccagaggacaccagagcagcgtcagtccccggtctcttttagagcggatgagagtattctctcagagcctgctttccactgggacctagttgttcctagactattccgtgaccccatgagcacttactatgtagttctcgtggattcagcagcaggtcgccttgtgtttccccttctcttcgttggtgtgtgcatatgtcagtgcttcccccagcaccccagcgtgtactttattttttccttttgatttgaggatatatgatccaggggaaatttcagtttggtataactactttaattagccataattattcattctaagtttttgctcagaaacaaatggcactggaaagaaattctttgttaaagggagaaagctaagcagttgcttttttggaggaggctttatatcggtagcctcatctcatgttttgattttgagaaggcgaaaagcctaaacaggatctccttgactccagagattaaggcctttcacgtctggattttttctccataggtcatctctgaatttgagcaatggtgaaacggaatctgtgaaaaccatgattgtccatgatgatgtagaaagtgagccggccatgaccccatccaaggagggcactctaatcgtccgccaggtacccgtgtcttctctgttgtcagaggctgagcttctcctgtggtcattaacccacttgctcattcactcactcatgctgtttctccatcatcatctgttttcatgttaacaagtcccagagggtcaagtgtcgagtgtcgggggctagggaggcaggtgtgtactgcatgcccagaaggtagcgagtagtctccaccccacatcgctgctcctctgcatgtctgcggcagccctcattcaagcaccgcgctgagtctcacagtctatgtctgagcgggagagaagccacagggagtccttaaacaggctcacagagtgaggaagcaggtctggagtctggcagagcagccaccatggctctgcagagcacgctgggctctgagtgtctgcagtgccacagtgggagcgggtgaggcaggcaggacgagcctcatcacaggcccagagactcggagagcagaagggttcgggaggtttctcttctatgttccaaaatgttagttttctcacttgttgaataattaaatgtgtgccacccagatatgctcagtttggatcactaagctttataactgtctgttcatttcttagcttagacttaattaaagtgatacgcttctcatttaaatagaacagggcacctatttagtattttggactttgccctaagtgtgtttcatgctatggcaatgcattcggatggaaagtaggaagaatgtggaaaagaccaggattcagagaatccacaggtactttctggagctttgcaaagaaagatttaaaaagaaaaaaaaaaggatactggttttggtaacagaagctagcgcaacagataaaccagattaaacactcactgctcgagccgtgcagccaccagattaggtactttgaattctgttggcacaagttaggcatttggtgaggaagtgtgagcagttcaggctaatttctttggtttttccttggtaatttagcagagtttataagtcacacagcaccttaaagcagttatcaatagggccataggcaattttagcagcgcttgagcgagacaagtgtgcctgttttttctacagagtacagttgaccaaaagcgtgccagccatcatgagagcaatggctttgccggtcgcattcacctcttgccagatctcttacagcaaagccattcctcctccacttcctccacctcctcctccccatcctccagccagccgacacccaccatgtccccacagacaccccaggacaagctcactgctaatgaggtatgtctcgcaccacagctggctgctttcctggggttagaccagcactg

SEQ ID NO: 95617 - DNA, 3028 bp, Homo sapiens
ccaacaccctcaccccttcccttcccaccctgctttctctgtcacctacccttctccccaaccccaagtaacatgtttcagatctgcatataaaccccttaaccctagatcagctcccccaaacttgccagttcactgtttactgttctgtagataagtatagttgcatggctttatctagtttattttttaaaaatctaaataaaatgattgctctgtcctcagaccggtattatgtatttggcatgaaattcttatagtcatttgtggaatctgcctttttcattctttttatccaataaataaaatataggaagattcggttcagcaggcttggccttatctggacaaacttattatcctgtacaggaatctctttcaaacagaactgattttttttttttttcttgtttggggggtgggttgttggctgattactcttacttgttttcaccaaccctgttaaggagtttgttctttgacatttacaatcactcagaggtttagaagccaaattatttttgggaaacctagaaaaaattaggatgttaagcaagaaggacaaaggtttgagcttgtttttaatttaaaattttgtgtgggaaatctgtgtgctcctttgaaggcttggttgtggtgctcggtctgggtgttagctcagtctgggtgattctttgctctttgaacagggttatactccaggtgtagtgacatagcccacttgagcacccgtattgaattaaacaagtgatttgattccacagaagatttggtttaagtgtctttatctaccagttgagggaggttagaaagaatcagaaaaatcctctcctccggaggagcagtggcaagtcaactgcttcctagacaggcttggcatcggctagactggctcctgactcatgggacagggagggaagctgccaggggacagatgttcaggtgggaagcttaggggagggcatgggctctaggacatggtgaccctcaggtgtccatggagggggtccaatggtacaggacaaaagcacttgatcagacatgttccttttttctcctgaggtatatatcccacctacactcacattcttccttatatttatattttaaactttgctccatttcgctctaatgtgcagtattttactataacccttaactcactaaaccggcaaatttatttttctgtttgttttgtttttaattgtcattacatttccacttaacaatttgtttcacttcctttgtgtttttttgtcttaagttacattattaaccaaaacactagtgctcctaaaagatcaaaaagatacgccttcttttgtcatttgcacctttcactaatgagtcctcatttggtatgggtttaatggtgatgcacctaaaacaacagtagccaaagcttctgtagctttctggcaagaggctcaatttaaaataactacaattattaacaattgccaatattccagcatagattatttggactcttgggtaggagaataaattcagaagttggtgaattgagatcaagacatttcagacctcctttaggagtttcattataagtatttacttaatttttttttaaagctaggcacatgaagtctagatttcattggtagcttgcagcactgctttgtaagtgagcaatgtctctggtagagatacggctcctgcagtggttccaggtaaagctgccctgaggggtgctatgccacgtggaagctccccgcagagcattttttgggggaatgatgcaaggcaaatagagcaaagtattgggaaatagtgcaatatagaagtgaattgaaatgtgtatttttaatgttcatttttaaaatgccagttgtattaataacattgaaatttacattgcagactcagtccgctagtagcacactccagaaacacaaatcttcctcctcctttacaccttttatagaccccagattactacagatttctccatctagcggaacaacagtgacatctgtgggtaagtacagtagcaacaagaaagcagctgacaaatgggactttatctttgagttgctcttttgggtggcttaggtgtagctggttgttcacaggcacagacctcgggtacagaaacttcccatcccagttgtatgccttatttgcaatgagatgcagagtccatttcctttttccatatacattgcttacagatttcttctctttgacaaagtgttggttataccacatgaatatttacttgaagtatactggggaagggaggcaggcatagtgtgtgtgtgtacagaaaataatttcaaatatattgtgtttcagtgggattttcctgtgatgggatgagaccagaagccataaggcaagatcctacccggaaaggctcagtggtcaatgtgaatcctaccaacactaggccacagagtgacaccccggagattcgtaaatacaagaagaggtttaactctgagattctgtgtgctgccttatggggtaggtgtctagccactactccaacactttcatttttgttctgagtggtggctggtcttctagagaagtactgcattgaatagtttgtggatagacaggatggaagacttctatgatgtccatctcctgttatatgcagagtggtatattagcagactggtgtggcacatgtatatgattgcactcattttaactgtcaaatattggcatgattaatctccattttatttttattaaacaaatttttgtagtagttttgttacgtggatatattgtatagtggtgaagtctgggtttttagtgtaaccatcagcccattatactcaatagtgtacattgtacccctgaaccctgaggttgactgttctcactataaaattcaatcatatctagcagtggaaatgttggagaagtatatttataaaaacttactgcaacatgcaacccagtgtttttcatttttcatgcttgtaatttccaagtactttacagtgactattcttttgactattagcattcagtactttataaaattatacaa

SEQ ID NO: 95618 - DNA, 1225 bp, Homo sapiens
tatcaaatcacaatattttgatagtcctaagaaatggaaggacaagagaactgactacagttgtttcttgatgatggtggaaagtgatctttaagaaaagcttaaatgtgagtgatggaagccgaatcataagctgttaaggatttgagggctgcatttatatggcccattccagagatttgccaatgaaagatgaggaagcacaaagagatcatggtatcagatgaaggtttgttcaaatgtgtgatgtggctaattagacatagaatctgtaaagataggaaataatcagcatataacattctcgaggaactgaggaagaactagaaactaatggattattaaggaaattgatgggatgagggtttcttgttctttcccttatcctttcttatgtttaaatatgtcagcatcattgctacatggtgatgtattgcaggattggttactttaactgtttaacctttgactattttaaggatttctgcttctgggtgaattaaggaagctacacttttttccaaatagatgatgttatcctttctatacaacctggggatttgccaagcacagcataaaattgaggcctttctgtgtccctgaaacaggagtgaatttgctagtgggtacagagagtggcctgatgctgctggacagaagtggccaagggaaggtctatcctcttatcaaccgaagacgatttcaacaaatggacgtacttgagggcttgaatgtcttggtgacaatatctggtgagtgtttgttttgtaaaccagaatatgtgacaccatcttaacaatattgtagctttacacactaaacttcagttagctcattcactgatgtactggctaaataaggtacaaccacattgagacttgacaataatgtgagctgaagacgtattcagaggtgacacacacgcccatttgatctctggctcctccgaaagcagtcttgagaagcgtatgaatgtgctctttctcactggcatctctcactgccctctctgcccagttgcttgttagatttcatttgccttgtccaatatgtaggtctgtgtccactcctttccaccagacttttttttttttttttttgagacggagtcttgctgtgtcgccaggctggagtgcagtggcgcgatcttggctcactgcgagctccgcctcccaggttcaagcaattctcctgcctcagcctcccgagtagctgggactacagg

SEQ ID NO: 95619 - DNA, 1057 bp, Homo sapiens
acttggacttgttcacagatacttctgttggtagaattcaggactcatgaatattttagtataagccttttttcttcctcagtctgtgtgagccccatgcaggactagggaaagttgtaaggaggacctcggtctctgtgtgtttcaggagtctcttggctgattaatcatgttgttactcatttggagtaatactaagcccttgaagacttcagggtggtatacctggcattgtccttgattttaaaatatcttggaatctattataagaagattaggatcattagcgaaagtactcattgatggtcaaaatacattaaagagctggaaaaggaaactgtgaggtgtgatctctctctctgaatttttcccctgcttgtttggatgaatgaatagaaggcatatttataaagtttgcagaagacaactaaaacagtttagagggctatgttgatactgacctgtgcttctcttgcttttttatttgctgcttttcagtaaaatatgaaagaatcaaatttctggtgattgctttgaagagttctgtggaagtctatgcgtgggcaccaaagccatatcacaaatttatggcctttaaggtaacaacatcaagtgaatttaaaagtagtattggccattcaagctgcaaccaagagtcagggaatatgtttaaaaagtctgaatgttaaaattgctaatataaaagctatgtgctaatatagcatataactttatcataaaccatttctaatgtaataagcttagttaagctgctttctaagcccacagtgagaaggagagagagataaatgttgggtagacactttaatcgatgtggcaatgtgttcacagaggaaaagagaacagtacttccacccttcagttaaaaaggtgaccttcacctgagtcatggaagcgtgtaaagatttagatgtgtttttgataacaaaactgtgtctatcgggcagttttaagatatatctgttcataaaatactaattaaaaattaaattacagaaattctgatgacaacattatatactaagtgaaaaaagtt

SEQ ID NO: 95620 - DNA, 2007 bp, Homo sapiens
caatagctccatgctcttagacaagtggaaatccgccttcctggctctgtggagcccttgtgaaaacctcttagctcttgctttgactaacatgggatggatttggggcagttgctgccaggccagaatatccctgggttgggagtggttctcaattggagcccagcatccaatgtttcatgggcctcaggagatatgagtcagtagagtatattactgggaaaaagcagagttggggatatatattgcatgactattctaaaatgttaatctaattgctgtatttatcttcagagatatggtaccagtgcattcactaagagtcttactgagcacttgcacagggctggaaataaccacagacgttcttccctgtactttgttcctgttctctagatccagtgtagcatcaaaccccatgcaatcatcatcctccccaatacagatggaatggagcttctggtgtgctatgaagatgagggggtttatgtaaacacatatggaaggatcaccaaggatgtagttctacagtggggagagatgcctacatcagtaggtatggagaacttggggaaaggcagcatttgtgaaaatggagccgtgtctgagactccatttatttatcatgctgattttgtatgtccttcagaccttttgactaccattgaacagagtagttggcagtagatggtggaaagttagattgtaggccgtggaaatagtcataggtctattttagaacaaaatccaagtaattattttctactttaaaaactctattatcataatctctcatttaatccttaaaacatccagaggaatatcggacatgtttttgttgaccactttgtaaagggagacagagaattggtaaagagacagagaattggtaacgaattggtaaagggagacagaaagggaagttatttgcacagaatgctagagccataactacaaacagccttgtgcatacttttctagtttgcattcagtaataaagaccgatatttgacattttcatgggtttctattccaaaactattttggttttattgtaattaggtcactgtctctgatcactcatgatttctcttccctgccgtctctcatgactggattgataaaaatctgtgcactaaactctaaactcagtgggtaatttttctagataggcgtgaaaggcctaaggaaaatgaaatagatcaaccactgatgcaagtaactacttcacaggataggcaaggtggttacaaaggcagagttccttgaaaacaaatccttaaatgctaggcatttaaattttaaattttaaaaagatttagaagtataaaaatatatttttattaagtaagcaacatcttttcagggctgtttcctcatctttaacggtttgcaatttttccctccccaaaagcatatattcgatccaatcagacaatgggctggggagagaaggccatagagatccgatctgtggaaactggtcacttggatggtgtgttcatgcacaaaagggctcaaagactaaaattcttgtgtgaacgcaatgacaaggtaatagttcccttatggattctttttagttgctctatcttttaataatggcttgttttccatggagtttgatgattaatttccttggagttttgataaaaataatcaaggaactttttaaacgttgctttttagtcatgtttgtgaggattggggaatgttttgctttttgctatgaggggatagagatatttttctctgtagaaattaacatatttgggttttgctttgtatatgtatttttaactctattagatgaccagtctaggctataattagagatagggaagataaaagctgccagttcagttggctggaattcttttgtgagtggaaggaaccgccgtgccatttgggtacatcaaaaggttcctctgacctaatgtgtgtcaagaagatgccccttgttagtctgtgagtggtgaaattgcttcctaggtttgcatgacagaa

SEQ ID NO: 95621 - DNA, 1985 bp, Homo sapiens
atccagggattactggcctccagagtcttcaagatcctgagaacttggaattccttgtaactggagctcggagctgcaccgagggcaaccaggacagctgtgtgtgcagacctcatgtgttgggttctctcccctccttcctgttcctcttatataccagtttatccccattctttttttttttcttactccaaaataaatcaaggctgcaatgcagctggtgctgttcagattctaccatcaggtgctataagtgtttgggattgagcatcatactggaaagcaaacacctttcctccagctccagaattccttgtctctgaatgactctgtcttgtgggtgtctgacagtggcgacgatgaacatgccgttggttttattggcagtgggcacaaggaggtgagaagtggtggtaaaaggagcggagtgctgaagcagagagcagatttaatatagtaacattaacagtgtatttaattgacatttcttttttgtaatgtgacgatatgtggacaaagaagaagatgcaggtttaagaagttaatatttataaaatgtgaaagacacagttactaggataacttttttgtgggtggggcttgggagatggggtggggtgggttaaggggtcccattttgtttctttggatttggggtgggggtcctggccaagaactcagtcatttttctgtgtaccaggttgcctaaatcatgtgcagatggttctaaaaaaaaaaaaaaaaaaaaaaaaaaaaggaaaaaaaaaaagaaaaagaaaacgtgtgcattttgtataatggccagaactttgtcgtgtgacagtattagcactgcctcagttaaaggtttaatttttgtttaaacctagacgtgcaacaaaagttttaccacagtctgcacttgcagaagaaagaaaaaaattcaaaccacatgtttattttttttttgcctacctcattgttcttaatgcattgagaggtgatttagtttatatgtttttggaagaaaccattaatgtttaatttaatcttaataccaaaacgaccagattgaagtttgacttttattgtcacaaatcagcaggcacaagaactgtccatgaagatgggaaatagccttaaggctgatgcagtttacttacaagtttagaaaccagaatgctttgtttttaccagattcaccattagaggttgatggggcaactgcagcccatgacacaagatctcattgttctcgatgtagaggggttggtagcagacaggtggttacattagaatagtcacacaaactgttcagtgttgcaggaaccttttcttgggggtgggggagtttcccttttctaaaaatgcaatgcactaaaactattttaagaatgtagttaattctgcttattcataaagtgggcatcttctgtgttttaggtgtaatatcgaagtcctggcttttctcgttttctcacttgctctcttgttctctgtttttttaaaccaattttactttatgaatatattcatgacatttgtaataaatgtcttgagaaagaatttgtttcatggcttcatggtcatcactcaagctcccgtaaggatattaccgtctcaggaaaggatcaggactccatgtcacagtcctgccatcttactttcctcttgtcgagttctgagtggaaataactgcattatggctgctttaacctcagtcatcaaaagaaacttgctgttttttaggcttgatctttttcctttgtggttaattttcctgtatattgtgaaaatgggggattttccctctgctcccacccacctaaacacagcagccatttgtacctgtttgcttcccatcccacttggcacccactctgacctcttgtcagtttcctgttcctggttccatctttttgaaaaaggccctcctttgagctacaaacatctggtaagacaagtacatccactcatgaatgcagacacagcagctggtggttttg

SEQ ID NO: 95622 - DNA, 1066 bp, Homo sapiens
tctaagaaatttggattagatattccagcacaaagtgacttttaaaaaatactcatttctattttggccaaaagtgtaaaattcaggcaagttactcaccagagttctgtggagggatgcggacagagctgaccaaggccattctgctcttaccctgatgtaacagcccttagaaactaacattaagtaactgttccacaataaatggtattgagtacctcttgattctttgacagctttattgagatacaattcacatactgcataagtcacccatttaagtagacaattgggtggcctgtagtctattcagagttgtgtgtccatcactaacaattttcccacgtttttattaccccaagatgatactccatacccctttgctgttatcctccaatctctgcctccctccactctgccccctcaagctttaggcagtccctaatctactttctgtccctatggattggctgttgtggacatttatagaaatggaaccagtcaccatgtggccttttgtgactggctcctgtcatgtagcatagtgtgttatagctcatccatgttgtagcacgtgtcagcacttcatttctttatattgccatccttggttcttaatctatgttcctggtgttatacttgcaactaactcactgacagctaggtccccagcctcaaaagttgcagagttaacctttcacccctcaggggaaacagccccaaaagcagctccagaaatgggttcctcctaggtgtgttttcagtttaagctcttagaaacccagggatctctttccacagatgatcttgatgccaaacgtaggcttatcataggtcagatgcagcgagtcaagttttggaatgggggaccgttctggaagcacagttgccaacataggccctgcctgctgtggagagcaaacctccaacccggaaaagttgggatctatgggcgttctttgtgtccaaatcctaaatcagggttctgaggttgtcccctctaacttatgtgggctcacccctaggaagggacataagagctggctttgctgagctgggatccttt

SEQ ID NO: 95623 - DNA, 1027 bp, Homo sapiens
ggggccaagatcaagtaggaaccagcaattcagagtaagtagtatgaattttattctaagaacaatgacaagcagccagacagatcaaaagcaggagagtagcatgagttgattttcatttctgaaacagcagactggccgctgtgcacagaatgatccattccagggtggatcagaagtgcaggtacagaagcgcaggtaaggcatgaaggcacaggtaacatgatgtcattgaagatggagagatatggatgggttcaaggcaccttaagaggtaaaacccacagatttagtgttggactgaatatggggagaaatatggcaaggtcaaaaaagttaaccaggctttttgacatgcactattgactggatggtgatgctattcagtgaaggaaaatggctctggaggaaaaccagatttaggagtgagatcatgagtttggtcattgctacgttgagtatgaggtgcctttggatggtggaggtccagagtaggtcatggcctgtatgggcatggagcttagaggaaggactggagacatgaccttcaaagtcattggccttgaaatgatatttgaagtagtgggtgtgaatgagattgcttaggaaaataatggaaaatagaaggcttagaagtgaagaaaaagacagactgagaaatgaggaggcaaaagtagttgaatttggtgattgacaagttgaagaaggtgaaagaaaagctgttgcctagaatggcttctggattttacatgtgtgtgatctagtgggtgatgatacattaacaagctggggataacttttgtttgggacatgctgcatttaaatagtttgtggaatgcacatttattattgccatcataaaagatatgtatttttgcatttttcttagctcctctcttacaacttttccatatcccactccaaatatataggaggaatactggaactaagtaggtgatcgctaaattttggcagacaaatgggagaggaaagaagtagagaaagactgaggggcagggagtccagg

SEQ ID NO: 95624 - DNA, 1093 bp, Homo sapiens
cagggattagttttgtgaaatttcctgctcccatttctcattttagtcacagcaaaaggagcggtggacctgggtttacatcaaggctatgcactcaccagctgggagactttggagagatcgcacagtcttgctggtctcagcttccttactcataatttggggatagaaccatgtcccacacggttgatcatgagaagcaaagccgggaaatgttgaggtgccgttgcctggcaaggctcttcaaaaccagtggactacaacttgatctcttgctattaatgtattggtcagtaaattatgaattagtcatttgaaagtgatgaaaagtcactacgttttgagaacatcagcaagttctatttctactcaaaagcttagtcagacagaaagaaaaaaaagatgaccaaaaaattgggcacatttgtacattttgaatttttcaaaggtgtgagactttcttcctactcaaatgtcttctgatcctgaagttggagagcaacaagtacctatatcctcagacaccttgtttagaaacagggaacagggaacattcgcaaaagagagaatacacttagcacacaaggtttgtttgtttgttttaaaaatcagaaacagtaggaaaaaagagaaacagattgagagaagagagataactagtggcagggtctgggacaagtggcaataagcctgcatgtctgctgtagtttagaatagaccaggaaacactgtatttaccagagaggttattctctgtggtgaaccgagcatcaactcacccagcccttcatcagaaaccaaaggattaatatgatcacatttttaagtgggaaaattgaattccttctccaaaagttcagaaacataagaaacttatgaaatgtttcttttcccattttctatctatggaaaaaaaatcctctggctttggaaagtcaaatgtgtgctatgaaatttcacacagaaaagtatccacttatttgagcggtggccctgatcagtgacctttatgattccacaaggagtttcagctatgttgggtttttgccaattcaagacacaaattagttatcccttttgtacctgccctgtg

SEQ ID NO: 95625 - DNA, 1123 bp, Homo sapiens
ccactcccttggtgtgtctctgaatgcaatgttgtcttggaaaacagctttccaagcatttcactcctgagcacttgccagtttcctcacttgttcttcacatatccaggcaaagacatcctgtttgctatatgaagcattgtatcccgtataaaaggaaggaaagagagaaatatatttttacactcatcactcctcaggggctgtacaatcatgtagaaattgtttaatgtgcctgtcaaatagccaaagagtgttaaaccctgagttcccacccatgtgtgtggtatggttaggattcatccagatacacagagagaggcacaacaggaggagaaaggataggggtgtggggacagcgggcccccaatatggtgtaatcgtggcaggtctctgcctgaagtgctatgtggggtttttcttgttttaattttgactttaacccctgatttgtaagtttttcataaaataaacagaatcataactcatgtagatggctataagtgccgtagtgttctgtgggtctctggtgtctgccagtgataagtgtggcaccccaggaaggctgtggaccccatcaaggtgctatgtgagggccatgcttggggtggtggtgggcccagtagaccctgcagccatccatccagcctgcccactcacactgcccttgtgtactcctgctttgctacgttatcattgatcaatgtccctggttacctatgtgtttgaattatcttcgtgttacaggtgtttaatgattttgctccttctagcttatttgtatttcacctgtttttctttaaatcaacatggttacactctgtttcagcaactgtataaattaaacacaaattattactactgctattgagttgtcatgatgaattcttttttatttctgaaattatagcatttcttgaatttaagagaacaaaaacttgaaaggcctatgtctccattttattaactattactaaatacatatttgatgctcataataataatacacatttattcattatttcctatgtacaaggactcatctgcttattttacatttaactttctcatttattttctcaatacttcaaagtaaaagacaaagaaagttgaataacttgcg

SEQ ID NO: 95626 - DNA, 1079 bp, Homo sapiens
gaggtagtgtatggattcagtgcattcagatgctttaaccggtctcatgccattttaacaggtctcgtttggttctttccatggagggaagcaaaaccgggcagtacagagaagggcctgccattgcgaaagacccatgtgctgttgggaaggagccatgacacagtgcaggaggcagccaccagccgcagagccagggccagcaagaagactgcccagccctgggtcgaagtagtgttggccttgcggaacatgaagaacctgctgttttccgaaatgtgggacatatttctggtgcgcttgctgatggccatggcagtcatgctgtactacagtaactttgtcctggccctggaggagcgctttggggtgcggcccaaggtgacaggctacctcatcagttacagcagcatgctgggggccgtggccggccttgccctggggccaatcctacggctgtacaagcacaactcgcaggcactgctgctgcattccagcatactcacctgcacactgctgctgctctactccttggcccccaccatgggtgcagttgtcctctcctccactctcctgtccttctccactgccattggcaggacgtgcatcacggacctccagctgactgtgggcggggcccaggccagcggcacccttattggcgtggggcagtctgtgactgcagtgggccgcatcatcgcccctctcctctcgggggttgcccaggaggtcagcccttgcggcccccccagcctgggcgctgtgttagccttagtggccattttcataatgtctctaaacaagcgacactctagtggtgatgggaatagtaaattaaaaagtgagtagatggatttggacaacataaagcaacaaaatttgagatggttgaatgagggccggaggccatgatgaaaagggcactttggaaagggttggggtggaagggaaatatttccgggtgggtgtgagctgttgggcttccaggtcagctcttggccatgcagccatgcctgcaggatgatcagaagtcacggcacctcatgggaaggttaagactggagcaaagcttttccaag

SEQ ID NO: 95627 - DNA, 1005 bp, Homo sapiens
tagctgcaaaacactggcctttccctagtgcaccagcttcttccttcttgctttactgagcctttcttctcaggtattattttataagcttataaactacaggtcctaggacattagccactttcgccaactccagaaggaaacatatttttaagcaagtgctggttcaccaataaatacaaattatgactgcattttttcttatgacttatccacagaaaatatggggttttttgtctgttttgtttgaggaacttctgtagcatatcctccttgagtgtaaagttaaaacggatcccaggtcagactaatccaggcatttgcaagtggcagcggatttgtatggcatgctatggaatccaattatgatttcttacgtgtttaaaattttagatattggttttattttttaaattagtttaaatttttaggtttactagtttgaaaaatactaatttgagtccatcagcatttattttgttttaggatttgtttggtgtcagcatggttgtgcctttattgagccttcatgtcaagtcccttggagcaagtccaacagttgctggaatagtaggtgagtggtcgatattgctcatttttagagcactgaattttaaatcctctgaaccaagtacctgaaaacaattcaattttgtatccaaatattatccaaaggtaagtgggaaatgagataaaacaaatttccagaatattttaaaatattaccctatagcaaatgcaattcctttttttctagacgacgtatgttcaaagagattttgagatttgagcactataaccaagtcccatgccactagtggcaacaggtacttatggagcctctgcaaggagctggctgtgtgtataaaagggtaggtacatgtggactcctgcctacaggaacccttaacctaatgtgagagaccagggaaacataatctacagaaatcacatctcgtgggaaagggtttcggtgaacattagccaattagttgcaagcttctc

SEQ ID NO: 95628 - DNA, 1005 bp, Homo sapiens
cttgtttatctgctcagttggatgagtgtattcttaacatcatgaaagaccacattcttaagcatggaacagtagcatctcgcccaccagtacagatagaagaactgatagagaaacctggaggcatcatagtacaatggtgtaaggtggatgatgactttacggcacaagatgacaggctccagtttcgtaaatgtacttcaaatcgttttgaggatgtatatgtaggttccgaaactgaattcagagtattgcacatagactccaacgttgaagatcatttcagaatctgcacccgaagagatggctgacaggagcagagtccttggagtgtcccccaattagttcattccatatcggagcctcatgagtggacagctggttttgagaggagcagtgtgagcaatggaagaaatacgtcatgccggaacgattctaaatcttcaggtgttctcaactccagagctccaacttatctttctgggcagacattaatatttagagttgaaactgtggaactaccagacagaagagactgtataggagtgtgccataaaaacggaatgtcggccgggcacggtggctcacgcctgtaatctcagcactttgggaggccgaggcgggtggatcacgaggtcaggagatccagaccatcctcgcaaagacggtgaaaccccatctctactaaaaatacaaaaaattagccaggcgtggtggcgggcgcctgcagtcccagctactcgggaggctgaggcaggagaatggcgcgaacccgggaggcggagcttgcagtgagcggagatcgcgccactgcagtccggcctgggagacagagcgagactccatctcaacagcaataacaacaaagccgggataaagctgtatgcattggtacaaatggtgcatttttgtaaatggaaaagaaatgcctcatcagttacatgcaattacttctgagtccactgtcacatttgacattgaagctgtgactctaggaaccaccaa

SEQ ID NO: 95629 - DNA, 1048 bp, Homo sapiens
attaagacaggcgcaaaacgatccttcctcttctgtgcgccttagggaacgcccgaaggcatgcaaggctggggctcaggggagggtccccgagcgggcagtcagggctgccctcaggccctgggcaaggaggtttccggaggcccctcagttctcgagtgtgtgtgtatgtttttggtggtggtaattgggaagcagggggtcaagacccaggagtgcagagagtgggagagaggatctcctccgcccatcctgggctcctgtcgggcctaacctccacccagcgtcaactttttgctgctcccgttagatggcgcccaagactttctaaccacttgtgaaagtgctcctggcccggaacaaaaagaaccgtggggtgtgagtatgagtgtgtgtgagtgcgagtgcgcgcgcggggctggccacagggcacaggagttgcctggcactacgcgtggccccgtcgcgggtcgggtcgggccggcccagggctggggcgcgctcacgggaggagctgcgcgcggccggcggagaactttcttcttttcccttcgctctccctcttgagcgagcgcctaggccctggccactctcccggagagaagccgggcgacccggccgcgggctcaagcagccagcgccggctgcaagtgaccgcggtgcgcgggcggaaaggggtcccggacgtgcgggtcggagagctgggacgcacacgacagcccctttctctgcccttacttaccggcccagcgctcacagccgctgccctgtttttaagagaatggcgcaggtgcaagtttggttgttgcggttttagccgctccaaggaaattgttcagtgtaaggttacctaagcgtactgcgtgggcgtgtttccagaaacaaagggcaaactttctcgctcccaaagccagtgaagttaaacagactcccttatgaaaaggcccttggggaccctagggcgtcagatgcgacagctaattttaaaataactgtttaacaggtgattagggagcgcgctttctctccaccaccaagttcacctctt

SEQ ID NO: 95630 - DNA, 1063 bp, Homo sapiens
tgtgtagaaatgtctttgaaaaagatcctaaggactttttatgaaaaatagcaaattagggccatttttttaaagccctttctaaatggacaacaatgaaaatgtttataaatatgtttaaacctcaattatgttaaaagtaggaaagccaccaccttatgtcacaaactctggagactataggcagacacaattttaaatcaagtgaaaaaccaagtcttcaataatcgagactcttttgcttgagaagatgctaaaatgttgtaggagcaaaaggaacagtgtggaagagacagctgaagaaaatacaaagggatatttacctaacaaaatggaagaattattttaccacagctacttaacactgtcaaggacatttaaaaatcagttgagtgaggaggagctctatgagatgggataagacaagaagatatgattaaaggaaactgttgaggtaagaattttgaggatagaccaatgatataaaaagctaaaaattcatagtggctgcagtaagcagaattgacactgtagaaagagggaaaaaaacatggagtaaagatttcaaaatcatacagaatgcagaaaagggataagaaataagactaagagaagctgatctaaactatggagaacagaagaacagataattgctgtggctgaaaaagagctgaataagtcagtaagaattcattggatatttatttttgaagttgatagtacatttaaacattttattcagagacacatgtattgtcactggtaaaatgagagcaagctgtatatggtccaaattgccagctcaaaagccaaaaaaaaaagaaaacccaattcttttttttttttcatatagcaaaagaaagaaaataggaaggaagcattaaaaaatgtaaagattaaataagatgaatgacaagaccgaatagctgttaaaccccatgtaacttgggtattctcatctactaaaatctcagattgggttaaaaaaacaaaacctaaaaaaaatagtctaaaacttaaatgaaaaagatgggcagtgatattccagggaaatgtaaatagg

SEQ ID NO: 95631 - DNA, 1985 bp, Homo sapiens
ctttttattactgaatagttttcgattgtatggatataccacattttaagaattcagtcatcagttgatgggcatttggatttccatttttagttctgatgaataatactgctaagaatgtgcatgctataaagttcttgtgtagacatatgtttttatttctcttatgtgtataccttagaaaccattgctaatccaaggtcatgaaaattcacccttatattttcttcttctagttttgtagttttagctcttacatttaggtctttgatccattttaacgtaatttttgtgtgtgatgtgaggcagggatgtagctttgttcttttacatatggacattcagttgttccggcatcatttgttggaaagactattttttcccattgaattattttatcacttatattgaatatcagtgtaactatgagggcttatttctggaccttattttattccattgatctatacatttatccttatgccagtaccactttgtcttgattactgtagctttatagtaagttttgaaattgggaagtgtaagtagtcttctttccttcttgcttttaaagactattttggttgttctttgctcctcgaattttcatatgaaattttaggatcagcttgtcagttcctgcaaggagccacctaagattttgatagggattgtgctgaatctctagatagattttgagagtattcccatcttaatgttagttaagtcttctgatctctgaacatggggtgtccctctatagatacagatcctttttaatttctctcagtgatgttttgtagttttcagagtctaaatttggcacttttttgttaaatttatttctaagtattaatgtcttaacttctattgtaaatagaattgttttattttataatatttttgggtttcttattgcaagtgaatacagttgatttttgtatatttttgattttgaatctacatccttgctgaacttactaattctcatagttcttagtggattccttgggattttctaaatacaggatatagcaagatagcccatatatagaagggtatagcaggatatcccatatatttacgaatcccaaagaatccactaaaaactacaagaattagtaggatatttcacctgaaaatggaaatagttttacttcatttttcctatttggatacctctatttctttttcttacctaattgccttggctagaatgtctaacaatgttgagtagaaatggcaagagtggatgtcccaattttgttcctgatcttgggggaaagcattcagtcattcaccattaaatatgatgttagctgtgcgtttttcatgggtgctctatcagattcagtaagtttttttccatacctagtttgttgaacttttttgttgttgtggttagtgtttttgtcacgaaatggtattggatattgtcagatgcttttccattttgatgatgatttggtttttgtcttttgttctgttggtatgctgtatcacacaaattgatttttgtatgttaaaccaaccttgtgttcatgaaataaatcccacttctttggtgtgtatactctttttttatatgtttctggatttggtttgctagcattttcttgaggatttttatgtctaattgatattggtctgtagttttcttacaatgtttgtctggttttgatattggtaatactggcctcatcgaatgagttaggaagtgttctctcctcttctgtttttggaagagtttgtcaagaatttgtattaattcctctttaagaatttggttgaattcaccagtgaagccatctgggcctgggcttttctttgtgagttgttgttgttgggtttttttaaatgcttactttttaaaatggtcctacctccttgtggtctgtgtgtcccagagtaactgttcttagcaggaggatttcattacccaattgagtttactactaagatgtttttgagcaactcttaactac

SEQ ID NO: 95632 - DNA, 1020 bp, Homo sapiens
tatatatcaactgaaagaaacactatggctgatgagtcagcatttccatgctgcaacaatgggttattcctgaaaacaaaaataatttatccaaaatcaagaaaatattttaagcttcctttgcaattgctgttacatatttagaagttataatggttttaaaatgtttggcttttaatatattaattaagactaggtgcagtagcttttctctaattatttagtttgatcaggaagttagatattccacaaaagtgaattttccagataagggaaacctatttttaagtgttatttgtaatgaaaactactaccacatactaaaaaccttctatgttatgtgtgaagtgccatcttggagccggatgtacattgccacattttatctttgtaaaaaccttatgggataggtatcttttttttttttttttttaacaatactaaggctgtacactgttctttctactctttcagattaattttttaggtaacattttctaaaataaatttcagtctccccaaccttatttagtaggatatagtgagtataatttaaccttacagtgctttagtattttcctttttagtatgtttgttagcccctgactgtggcttgtagagcacaactgtccctgtggtgaatggctcagctatgctgtattactgattcttgtcatctcccttgctgtcaggatgtcttatgtctacgtgtctgcctctagccaccctcacctgtcttccaaccttctggcataactaaactcgttaagtgtgtgaattaaaactaaaagccattggactctgaatgaggccctacgtgcccctcctagtaagtaaaattcatgaatttatgtcagctattgcagttctttataggtctttttcattgatttccagttttacaactttacttcagagggttaagtttgaatagaaatctggccttgctgaatacagcatatataatttatgtgtgaaaattacacctagctaatgtaatatactagtgcttccttaata

SEQ ID NO: 95633 - DNA, 1555 bp, Homo sapiens
atttttttttccagaattagctcaaattggtgctcgacctttttattaagtttacaagaaaaatattatcttattggtgaaaaagtaaagtattataactaaaaaggaattagtaattggcaggtatagaatctcttcatttcaaagtagtttgatttttgcccagtttcttaaattatattgaaacaaaataaactacctattgttcttacccactgaaccatgatggtgctactgataacctttagaagatctaacaggaggaaaaacgggtagcctctaacaaaattagtagtgtatatggtgttatgctgaaagtactttaaatgcaggctaaatatttagcaaatagaccttaatgctgttatcctcaactcctgtttcatcagtctttcacaggttactgccaaatgttgatcagtgtgtaaaaatttttttttggctgttaacagtatacataactgttaggaggaatctgtcagttggaaccttgagctgagtgagtcttgttgtttagtgtaaagaaaatttggtgtgtatggaaactgaagaactaagcccatgagtgtgtaacagaggcagcagaaacagttttccttattgaccccaagactaaagaacagctaggtgaggagtgcagcaagtgccaatggaactttatagaccttgtaacatctccttgtgctagagcagacgtggggtaacaatgattgctaacctgtttagtgaagtttcttaatcctgtcatgtgtaccatcaaaaattcttttactcaaaatcatactgtaaacaccaaaaagttgaggaccactgatatttgcattttccttttccattgaagcatgtagttgttataaagtttagttgggagacctttctgttatattgaatattatgaatacagacttgcacttgcgtttactaatgtctttatttgggaattaaaagttaagttctacattactatagaatttcaggaaaaaagccagcaaattgatatatagcactcctgaagtctaccaattactttttaattggtattatagacctcattctgaaaccagaatgttttattctcctaagtgtgaatatgctgtatgaagtttctctaattgatttgctgtgcccattccatttgatgtatcatttttcacaatatttcataatttgtgctcacttctaatgaacagagtcgttaggacaggcatgtctaagtacaactgacagctaacattaggtgccagatgcagtttatagagctatgtagaactgtagagaacagtttaaataaattagcacctgtacattagtctcacttgctggtaatttataagcgaatcagtagagatgacatttaggtaagtcattgatcaagttaacagctgcaaacccactgcccagctgggatgcctaattaatagagattgcattcctgacccagtgcttctgggttgagtctgcaattctttcatactttgatttaagtctaagaacatactcaaatactttgccttcattttagggaactgttgaatatcagtattctagttaaaac

SEQ ID NO: 95634 - DNA, 1050 bp, Homo sapiens
cggcaaccttaaagagtaaggtgatgatttttgtatgtagttgagctgtatggacgtggatggtgaggatgtttgaatactaatgtgtttactagaggcaccaccaaaatctggttcttagactgggaaaaaggtatcttgaaacactaatgctaaaccaaatacaaacccaaatacctggctagcaggattgttttgaagcttatggaaaaaccattaactgagtcccaattgatacatatgttttcattttttgttttttttgttttttttttgtggaagggttgggtatttcttagtttaaataataatttttcatgaaggttggtttaggagtgaaaaggtgtttatttcagataattatgaaatttctgttaattctgtcatggttggtaaacttgtcccagtgggccaaaccacaatttggatgtgaaatgccaattttcctttaattgtaagatgcttgggggcccaaaccacttgctggcactttttttctagtgcctagtaagtgccacacacgttctggggccaatgaacactgacagtgaacagataggttaacattaacagagagtcttttcctcaccaccttcccccagtgattttctggttgacctaattttacctttcataatatttaaattttgcattatttttcatgctaatatagatgtttctgaatcacataacaggaaaactgctaaaaaaaaaaaaaaaaaaaaaagaccctgaagtattctaacattttatttgccttcatggttctcattttcttttcttatatttctgagccttccccaaccacatctttgccctaatctaaaattttttgtgaagtagccctattaccccaaccatttttgttacttattctttgtaattatcttatttgaaataccctccttagtgttaattttatattaagcttaatgctttatgttggattgggaaattacaattgtgtgtttttgtttttatttttttgagacagagtcttgctctgttgcccaggctggagtgtagtggtgcaatctcagctcactgcag

SEQ ID NO: 95635 - DNA, 1093 bp, Homo sapiens
tatatgtaaaacattttttattgatccactgaaaactgcacattataaacttaacccccaaatacatcagtatgtacttaacccctaaatgcttgcattcttcatactgttatctcccacaatatcattatcacatctgatacaattataataattctatatgccatatatataatcttcgtgaaaatttcctcagttttccccagaatgtctttgtagctgactaattgttttgtagaatccaggccacttgtcttgtacagttgtgtcacattctggctttctgcttgctttctcgtgatcagacttagaatgtataaaggatactgcttaggtgatattgtatacttctcgttacatccacgaagtctgagaggtacatagtcagtttgtcctgctgttgatgatgatgtgactgatcccttggttacagtgatgaccactagacctctttattgtaaaagtagccttttccctttgtaaccagtctatagggtaatattctgagttcatgcgaattttccattctttagtaacctttcagccagtggctttagcatttgttggtgatccttgcctgaaattgatggttaatttggaagttgtaaaatggtgattttctacttctgtcactccttttacttttataacatattgttctgtaaagtagctttctttttcttcttgccccttctcctgagtgtgtgtgtgtgtgtatgtgtacatgtgtgcgtgtgcatgcacatgaatgtgcatgtcacatattgagtgtgttgtgaagcattatcattattcttttattttcagagacagggtcttgctccatcaaccaggctatagtgtagtgatgctgtcatagctcactgcagacttgaactcttgggctcaagcaatcctctcactttagcttcctgagtagctgggactacagtcatgtgccaccacacttcttaaaaattttttttgtagagatgggatctcagtatctctaaaaagagatagtgagaatgtctcagactcattttgtgctttgtctgccttacacctagaatcagccatttctccaaggtacttggttccttatactgggatg

SEQ ID NO: 95636 - DNA, 1044 bp, Homo sapiens
aacctagaaataaaaagaaactttcttagtttgagaaagcatatcaagacaaacagaaacacatcaaatttaaaaatatatcaatagatcccattaagttcaggaataagacagttatgtgcatactcgcctgtgttatttggcattgttttggaagttttacctagcatggttaaaaaaaaaagtgtggctaaaaaagtatgaattagaaaactgaaagaaattaggaaaatcgattattattcacagatgttatgactgcctacttagaaaatagaaaacattcactaaaaactatattagaatttcagcagactaccattatttgggtacctgaattcaaaacatttaaactatgaattgttctgaaaattttaaaaatgataccctcttataaaagcatgccacagtatagttactgggcgaaatgctgatcctgcagagatcatatgagcatcctgtcagttgatgactctgtggcagccacatctacacacaaagaaatcagtgtggaatggcatgtaatgatgaactaaataacatgatggtcttactggtagcaaatgaattgcaatctttcacttcctttatgtattttggcagacaagaactgttttaaaaacgctgaattccaactatacaaatacatacctacatattcatacagacacatacatacgtatatacatacatgtacctcctttttctcaattcatttaatggaatgctgaaaaatagactatgcagaagataacagagtttggtcaagactttaaaaattattgtgtgtttttggagttaagaaattcaaactctagaacagaaataaggtggctagttgaagaatatacatacagctttcaatacttttaaagtaatagatattatgtccttaaaatcacaaaaactaaaggacaaagatgacaaattacttatgttgaagttaaaaatttctctttgacaaagacactaggaaatttgaaacatgccagaggcctgatacctagaataaattactcacaaattaacaaaagcagcttacta

SEQ ID NO: 95637 - DNA, 2023 bp, Homo sapiens
tcttgtctgcagccatgatgtttgtcattttttatcactttctgacggactaaccatacagtgaaaatcaattgcataagaaaagaaaaatattagaaaatatgccggatttgattcatgaagtctatgacaatgattttggaaaagtgctgaaatcaaccataagccattagcaaataagaatttggtttttcaagctaaatacccaagcaagactttctttttagcatttattatgaaaatgtggtctttgtttcagaagaaagacatcctacatataatacaggtggtatttcaatagaaaagcatgtactattcaaaaaactgtagagagataatgactctttactgaacaaaatagttcttggatttctgcctcacaaacataaattccagatagattaaatatttgaacatgaaaataaaataaaaattccagaagaaatacaagaaaatagttttagagagcccaaagccttaaagcatgtttcctcagtgggggcaaagactggttcacgggggtggggaaacctaactgttacaatggtttgtggccctccagtgggccacagtatacttcagcagatgtgtagtgtatctgtggtattaacatttcatgcgggggcggaaattagggagaaaatgcctataaaggattccttcatgggatgaatcatgaaaaaacaagtcatgctgccgtagaggaaaagcgacagatttgactatttacatattttaaacttctcgattatgaaaggtaacataagtaaaagtaaaaggcaagtgacagcctgggggaaaatagtttacaacttctgtaatggaccaggaagtataatctgcttcagagaaacaacagagatagtatgcgcaaaggacacagagttagcatacaacagagatagtatgcgcaaaggacacagagttagcattcgtcttgtttcttagactaacaccacttctcagtttgcttggtggtggttagttagatatgaatgcccatctgtatttcagaaggaattacacccaacacctttttgaggcttttctgttgttgatgttttaaactctcggaggttgatgaccactgggttgaaacaaatgatgtagcatagaaaaatacattctttagttttcatttgtttacctgttttagattctctgaatgcactgcatttttttactttatcagttttcccttttaaaaatatgggagggagttatgtttatggccaaacctaaatttttttattctaacaagatgatttgggctattttataagcttttatttgaaacaatacagaaattctcatagtgaaatatttagtaatttttaaattaaatgtaaacattgttttatgttaatggtatgaaatatttaatatcctaaatatttgcatataaatatgctaaactaaatattaaaattctaaatgttggtgatttttttgtattttttattactcaattataaatgtgtctcataactgtggttaaatgcagctatttggtctgtctctgtgtatatttttatttgctttcatctggcttttttaaatcagcaatccagtggggagaagatggccgtccatttcactatctcttctatactggcaaacagtcatactattcattaatgcatgtaagtatattgcatttatgataaataatatgagctgtaagctacaaaactaattatactggatactgttcgcagcttcagaatttacctagtattttataattgacaaaaataagacttctagaggtaggacagtgtgttgatgaaatgatttatagtaattcatttttgctaaaggtgaactttatagagtttatatcagaatggtttgtctttaaaatgcttttacttagaaattgaaatcatgttccaagatagatgttcaactcaattatagtgtgtacatgtgcttccagggtaaagaaggaggaggccaagtgtatgatgctgtcgggggctgtgaggcatttgccttgaaaaagaatcaaatggttatttct

SEQ ID NO: 95638 - DNA, 1098 bp, Homo sapiens
ggcttcccccatctacagtcagattgcagtggcttgaatcagtgcacacatttactctgctttttagaattatctgctgtttatttgtgctccacaaacccaaaggacaaaattcccacttgtcaggtacatttatttcttgggggaaaaaaaaaaacaaccttcttttcgctttttgttgaccttgggcaaatgagcttcttgccctggcagaaatgaaatgaatgataaatgtagagtgtgtctttgctgagtaatggagctgcggctccggctcggtagaggttctctcccgcacagcctgaggctgcccggggacccctgctgttcatttaaataggtatgtcaaatctgcctccaaacgccgccggtttgatctgtggtaatatttgtgaaggttccatatggacttgagccccctgcagtgctaagaaataatgtacaacgcttcatggtgcagacgcaaattttctctgaaaagggatgcaatgctgcgttttagctgtcggaggggatgatggagctgacgcgctaggcctgtcaacttgttacacggatgggttgcacgcagcgaagctgtggaaaatctgtgccttttaacttttctacttaatcacggttgtagcattgcctttagactgtatgctacattaattctcttcctgccttctgcctttcatcccaagtttcacggaaaaaagtaaagcatgcaggtcttgtagaggagccttatcaaacagctgtcatctgacatgccatttgcatttgttttggctgaaaccgagcaacccaagggcaagatattttgttacattccatcataatgaggaaattacacatcctataagagacctaacttttctaagtttgtttttatgttttaaaaggtattgttcaagaaactgatcagtttctaagtggatgaaatgttaccatactctctgactaaaatgtcaaatgatatctgattaataaacattctttgtttttgagtaatttaagttttgttacgtatctatagaagagtcctttgggcttttatattttagttcaatgcagtaatttctaagtgtatgccttatgcatacatttcagcat

SEQ ID NO: 95639 - DNA, 1038 bp, Homo sapiens
atttggagaatctccagttcattttaaaggacttcagtaacctactcggttcttaaagcctggaacagcagccccagaagtgtgctgcttcattatgtgaagattccagactcttagcagaagtcctggggacggagtatcacagaattcttacttagttcagatgtgtctagatcctctttgtgaccttgcagagaatatttaaaactcttgcatgtagtgctgtcttttaaaaattaagatagtgacccttctcgcagtgaggtgtcgtgaaataactacaactatgtaaagtgcttattttaaaaaagctacaaactgatgctaaaatatatttgcatgctgttttaagactttccttgacagcaggagttaattcagtaattaattcagcagtcgaaattgctgttatagaggtgtctttaatgtatattttcctcccatatgaataattaccattgtatatctggtatgctccaagtgtaccaattaagaaaattaattttttagaaaaggattcaacatattattgtctctatgttggctttaattagattacctctttgtaatggtataattactataatatatgatgggcctttaatttgaatagtaaaaatatatgctgtctgagttataagaactttcaggtcatcactcctgggtgtggacttccccagagtcctttttcatatgttccatcttgagatgattttctttgtatgttgaatggcatttacatgatgtacaatctatatagtatattgtattgtattcacaaagtaatagcaagagtctataacagaagtatgtcacttggaacttgagatacatagcgtaaacctcttagttaatgataagtggattacatttttatttgtttgatttgattttgtatatgccagtggccaaaaaattgaggagagaatttaagaaattgattttctgtgatttctttaacaaacacagattttaagtcagttactttactattaccatactagtatctaagataattactattagttactatttatg

SEQ ID NO: 95640 - DNA, 1088 bp, Homo sapiens
tgatagaatatttaattactatacctggatatgatgtcctcagaatttttatgtatatagctgcacatttatttagcatttgcatgctttaattttttacattttatttttatattttggtatttcaaggtttctgcttccatttggcagacagcgataagatcagatccatcaaactgatcagccagtgttaaattttggcctatctattcaagatttcttccataaaggaagaacaccttgtttaagttaagttaaatgcactcctgtccctttagttgaccttgctaccacattagtctattgacaggttaacgttgtatctataacatcttctttgaagtaagttatacaggcacaattttaatctttaagaaatctggtgggcttttaataccaagtgagttccatagtggcatatttaactcttaaaacatttgctagagtagataccttttctagagtagattgaggaaatggaatgtatgtcaaaaatagcttagttgggtaaaattactgctatataatataaaaactgattttcaaatcataaaattgctactatatgtgggatcttttgtgatataactctaattgcatggctaattaaaaagagaatatatgtgatattttaacagagacgtgattggcagcagatggctgattaaggaggaactagaagaaatgttagtggaaaaactgtcagatctagatgtgagtaattaatctttttaatttaaggggacctatgcaataagaatacagacaattgctgtatttaggatcctaatagtaatgttcctcagaggcaggtgttcctacgatgacttttctttctttctttaaaaacaaaacaaaacaaaacaaaaaaacaaaacacattcatcattgatttctgccttgggaggaccttatttgtggtcagggaggtgacttgtcgagtctccaagtcctcctcttgtaagtgccctcatatcctgtgccagttgttttagggaagcacggcagatgttgtttcatctccttacgtaaggccagtagctaattttacaagctgatgataagtgtaaggagtcattataggttaa

SEQ ID NO: 95641 - DNA, 1066 bp, Homo sapiens
tatcttgggatctgcaaaccacctctgtcggaatcccttgaaatgctggttacaaactacagtgtcctaagcctcaccctagatctagctcagaatctctagggagttaccgaggaatctttttaaccaactttccaggcgaatcttataccctataaagtttgtgaccccctgctttaggtcttaattgcattcttattttgttaaatgttctaatatatcaacattttcacaggacagttgatgtcttaaacattttgatgttccaaatttattactttctggaagattggggtgtagataaatttcacaaatttttccaagatggagattttctttgatggcggtggctaacattgttagtactttgccaccatatatagattttaagtcatgtacttgaattgttctttttctcatttaatgtattatagaaattaatgatttggaaaagttgcagtttgcttaaacaaagtgtcagacaattggttagtggtagatccagagttaatttctaatatcctaactgccaagtactgctctacttgaatctaactgaaaaatctctttgcttcttcactgaacaagtaatttcattatttcctctgtttctggctgctttgatttttttttaataattcaggtattttttctgctttgtaatatcccacggactttaatacaggtgtacagctatgaaaacaaaagaaacaagttatatatgatactttgtactttggggtactggatatcagaagaaatcctaatgtttatggctggtatcaagatgagggatgtggaggtggtcagtgacttcttgacctagttcagaagcaaggctgagttccacccatagtgcccctttgtaggtgcagaagtcattgagagtctgtgagatgcaatcaagagagtagctgagcacagaacgcccaggccagtgactggagaggagcatggagctctgcccacccaatatcctaggtagctgagtatttcacccttactagaagagtgccttctctttcattacatcataggaagctgtagtcaaagtagttcttttaat

SEQ ID NO: 95642 - DNA, 1030 bp, Homo sapiens
ggctcatgcctgtaatcccagcactttgggaggccgaggcgggcagatcacctgaggtcgggagtttgagaccagtctgaccaacatggagaaacgccgtctctactaaaaatacaaaactagccaggcatggtggtgcatgcctgtaatcccagctactcaggaggctgaggcaggagaattgcttgaacccaggaggcggaggttgtggtgagccaagattgcaccactgtactccagcctgggcaacaagagcgaaactccatctcaaaaaaaaaaaaaaaagaaaaaaaaaatgtacagactgaaaatctaattccactattgcatttacctcgaccatctggctccatgactcagttatatatccagtaattacattatgaaatctatttttctagattttaattgaagtctctttttatttatataagcatttgttaaagaatcataaaattttaaaaattaagccaggaaagtgtttaagctcccaaacaaatggctgtccagaagcctcccttgtaacttcacttacgtggctaacccacttcactgtgtgttaggtgatgacagaattccgatcaagatccctgattctgggttggttagtcttcctattagtcaatggtcacctcactgctgatttgtaagttcctgaagtgactgccctaaatccttacaactactttaaaatagttgtaggtgcccattcccaccaagactaggcttaggcttcccaaccatgtaggaagtttcttgacaataggaatcatatcttaaatatctctgatatcttcacaatgcccagaacaagactggagacatagatgtccttagtaaaaagctgctgaattcaaaccaaagaataagatctaaagatgtaatttcattatgagatcaagccagaattgagacttgctgttaaatcatcaggagttatgtctgaatacaaatcaacagacaggttattggttaaagaacagtcctcctatagttcccaatgttgaagttatcaaaccctggggtatgg

SEQ ID NO: 95643 - DNA, 1050 bp, Homo sapiens
aatgacatgtgataattgtttggaaaggcctattgattttatatctgatcattcaatccagagacattaaattcagttgattaatggagttccccaactgtaagacttctttacgagattattttcaagctttgaaaagatcttctgagataaaggggatcagcaaacagtaagagtgtgttgctatacccaagcaaaagaaataaatcttaatctctcagcaaatcattcaaaatgtcagaaatgttagtgtttctatatcttggtaaaatggattgattgagaagtatgaaaagtataacagtggcatgcagaatattgtttttatgaatattcagaatttcagttgtttacataattatgtatctttatagtaaacgtaaccacatttacttgtgctgtgctttagagaacagctgatgttccctttccactttgttgaccggctgggaaagcacgacgtgacctgcacagtctcagggggcgggaggtcagcgcaggctggagcaatacgactggcaatggcaaaagccttgtgcagctttgtcaccgaggacgaggtcgagtggatgagacaaggtatgagtctaggtgggacgggcatggtggcccaatactggctatacatgttcatctgcttcttgtcctagtgcctgaagttcgtaagaaaatatatagttacatatgtaatatttcacttcgctgtcttctttcttgctacagaaccataacagtatttctcagatttgatttctacaaggtgagcttgaattagaaaaaggggagaactccccacactgattatttgagccctgctaaaatgttcagttccaaggtcagggaaaagttaattttggccttaatgcataaccttttatccagcttaacaaagtgcttagcttagttatatttaagagacaaattgcttgtttttgttttatcatagaaatgtgtgggttttttgtttttgttttttaaacagtctctctctgtcagccaggctggagtgcagtggtattatcatagctagctgcagccttaaacttctgg

SEQ ID NO: 95644 - DNA, 1070 bp, Homo sapiens
taatttttgtatattttgtagagactgcattttgctatgttgcccaggctgttctcgaactcctggcctcaaacaatcctgccttggcctcccaaagcactgacattacgtagcatgagctaccacacctggcctgtcatagaaatttgtaataattatttggttagtgataaagttctttgggtattttgtttttgtaagttattggaggtttccattttttcccattgtggtgtttgaattttcttttaccctactctgtgtaaccctgttacctgggcatgaatacaagagtccctgtgtaatgtgaaaaaggatgggcagttgattcttaccttagactactgctttagaagttggaataaattggggaagtttgagctgaagaccatcttcgcactgttgatgagaagaggaaagcaccatgtgtgctattggcggctgcatggtcgtgggcaagtcacttagcacctaagtctataagctcctcctctgggcaagtaggttggtctctgtgcaccagaccttctagtacaagccgctgaggttcaataaaaacactacctatggcttaggctacttaattgcttaaggctcttaaaaatccatttgcttataagcaatttgtcatcatatgggattcatatctagtcattgaagtaatttgctagaatcttaacaatttgatgagtttgagctactgtgcatatctgaaagtaataaagcattcttacttacagttgaagctagaacttaggtcttttctgtattttgtcaaatactgctgttttattccatgcatgtcctttaagtacaagcaagtgtaaatgttatgggtatatcataaacaaggttttcctttgctctatgtacattaaatggtccttaataaaatacccaagccttgtatacagtaggaggagtgctaacgttggaagagtgaaaaagacaaggaaaaagtatggtccatttacatatttataaaagcaatgtaagagctttcccatcagtggtattcttggaatctatggtctttactaacttactatagctccagccactgctggggc

SEQ ID NO: 95645 - DNA, 1028 bp, Homo sapiens
aagatgattccacttccttttctgtgctcacagcaaatgttgctaataaattgtgattttcttttcctcgttgaactggacccgtcctctgactcctcagtgccgtgccggaggccacagttaccagctagttatggttgaaacttaagagaaaattgatcatacataacctggggatgtgggctctgtgtctcttcctttagaccacctgcaccctgtcgttgtatcagctaggttcagctcttctttcattcagcaaacgtggcctgagcatctgagcaatggatggaagggtaacccagtgcctgcttctctggcatgcccattctagcttggaaactggatgtgtgcctttcctgcagcacaggtgctgctctgctgtgggagcgttgcatgggctcacatcagccagtggaggaatcttccctggattcgtcctggatcttaaacaatgagcagaaatttctcaaatcaagaattgtactttaggtcagggattctcagctgtggcactgtagacgttttgagccagataattctttgggcagggggttactgtcttgtgcattacagggtgtttaatggcagcagccctggcctctacctactagatgccatagcacacccccgccccagtcatgataaaattgtctccaggcattgccacatgttccccagggaacaaaattgcttttcaccaagaaccactgctttaggccaggaaacaaccacagcaaaggctgagagtcatgaaatgtacaaactggcaacataagtgggtctagtagaagtgttggggtgtgggagggatgcttgaggctgaaggtgtagggtagcttgagatcagtttgggaagggccttgaatgccatactaagagatttgaaatttatcctgtgggttatacaaatcactggaggtcaggagaggctgagtgaagtggaaggaagggcagccagaggtggaagccagtagaggaggacagctgatcagagcttggatgaaggaggatgctctgaacatcgcagg

SEQ ID NO: 95646 - DNA, 1103 bp, Homo sapiens
agggtgaggttttgccatgttgcccaggctagtcttgaactcctgagctcaagcaccatctgcccgcctctgtctcccaacatgttgggattacaggtgtgagccaccacgtccggcctattttattttttattttgctaagtttgtggtaatattattacaacttcatttttaattggaagtaaatatcagatatacattctgggtaaggtagttctcttcacagaaataaattcctgtagggctcttcacacatacagcatattatattgtttttccttccttgaaatataagactgtacaggaaaattgctggtgggcaggggtcggtctgcatccagacatagctacaggaaaatgacaccatgcttatttggaagcctacctaactctttcttcttacttctaggcatgtttgccacagtcgcagggatatcccagcgcgcccccgtgcactggtcggagaatgtgattggggcggctgtgtcctttccatacgtcatagcgctcgatgacgaattcatcacagtccacagcatgttggatcagcaacagaagcagacgctgccctttaaggagggccatatcctacaggactttgaaggtactcattcacatagaagtcttagtgaaatttacttaactcttttatgatatttcttcggtaaatatcatttaggaactgggccttgcgctaagcataaaagatacacagatgactccaatacagtctctgtgcttcaggggctgcacagttagtggggagacagacatttaaacaaatagctatggcagtataaaagcttgatcacgatggaataaggcccattgtgagagcagaggagaaagtatttcctagagatatcagggagggcttcctgaaggaggtgctgttttagccaaacctttaaggatgcataggagtcagccaagcagatgttgtgtgtaagaaccttctggtagagagaaaggtgtatgcgaatctgttcaagagggtactatgggcttcaggccactcaagcagctcactgtgactgtagtgcatggtgtgtttgaaggggcagcgtgagctgaggctgcagcagaccagggtagtcagggtg

SEQ ID NO: 95647 - DNA, 1036 bp, Homo sapiens
ggtgtgccccaccaggtctggctaagtttttatattttttttgtagagacagggttaaggataagtcatttttaagtgctagcatgttacttcttcagctttcatttacctccatgtaattctgcattattaccatttaattaccaaagcaagtccttaatttaaaggcctataataggaagcttatctttagcaaggcttgaataacagtttactagataatgaaacaatattgcatttgtttttaaatattatagagttatgactttttagtaaaccatatgtttttttgttttttgttttttttttttttttacagctctctctccctctccccttctctatctaccccaggatttagactaaatatgaggcgtttgattctttctataatattctttactgcaaatgtgtttagtttatcccttatgctaactgaagacaggggctggaattatgaatattatacttttaagaagctaaataaaaggagtttgattgtaggtgcccagagtttgtttctctattccttccgcaaagggagacacaatttatattttaaatggcagaactgcttactcctgccatttaaaaaagacaaccctgattgattaatcaatgaaggaagaagtattttgtattacttcactttcactaacttagatgtctggaagctgacatttcaatatctgggttttactcattagctcttaaatggagaaaaaaatgttgtctaggtgggttttggtggttatgtttggttgggacaaatacatgatgttgtttaagagctgtttgtgccagagactatttgtagaagcctgcaagagttctgcactcggcctcacctgggattctggggatgttcccacagccccgaggtagatggacatgattccttctctgtggtgcctttagaacctccctctacacttcccccagctcttttccatagtttctgtgaagatgagctcccgtaggtgagtgtgaagatgtcttaggggtggggcaggtgtgtgagtgtgtgttctggctt

SEQ ID NO: 95648 - DNA, 1035 bp, Homo sapiens
ttgtccaccagacgttgctacttttcatatggactagcgacagatgagaaggaggcagtgtgttttcctttagggattattacgttgttaaattcgatcccaccactgtagttaatggtaactattttctgactcatagtgttaatcctttggaaaggtatctagagagtagtgtttactgaaatcccttttgacaactgcttggtttgtggagtgccttggacacttacaggctctttggaactcagcagcaattccgaactgattgtagcttatacaataagagactgatattatggaacaataagaataggttaatagctataatttttcttactaaataaaggaggaaaggttggctgaggttaaaattttaagggctgtgcttcttaagctgagtctggagtttatcttttgggcagggaactaccttctggtatgttataaggaggataatgacctagtgtttcaggtgtgtggcccacattcctgcctcctttctgcattgccttcagatctgacctggctttggtccaaatgttagaatgaccacttgatctctattcatttttgatggactatcataaagaaaaaaaaaaaacttcttgctgtaaaatgagaaaataacaaatcttacttgaggtagtgtgtcctttttaaaatgcagatacagaattaatttttagcttattcataggacagtgccttctattatagggctgagtttttgcggttcctcccccagggtgatgaagttctggtgcacatatagctgcataggtttctgaagagtctgtttcatttataagctgtgaagtaattagaaaatgtgagggttttttgcagacacgtaggacaccaggccaagcttaaagttggctctcaggtggacattatttggtagagcagataacaaagtgtcattctttgattcaagaataattactggtaaagagcccattttaataaatgccagtttgtcatagcattctttttggcagaatatatttatctctgtaccagattaggagtttc

SEQ ID NO: 95649 - DNA, 1084 bp, Homo sapiens
agtgtgtatgttgtgtgtgaggagtgcgtgtgtgtttagggcaagggaagacctgagagacctcgtccttgatttgggttttccggggagaagggccaggaaggacttgcacctccatccctggtatggaatggttttggcgctgtgattgaggtttctgggagctctttggatttgagagctcaaattcgggtcacactcaggcctgaattgtcctgatctggagagtaggcaggggtgtgttggggagtagggaaaagtgctgtgctgggcttcctggcccctgtttttagcaccaggtcaagggctggaagctgtcatccctgtggaattgttttctttccattgccttctggaggtgcaggtgcaagttagtccgcctgcctccctgtgttaagtgttgatatccttaaacacggaagctgtccggttgtctgcacctgccgtggcttctacccaaggactgttgagtgaccctcaggaagcctcctacctggctgctaaaaatgggggctcacagatcacacagcaggccttactgcacgtggactgcacgcgcagctgtggtcaaaacatgtctgagcagagtttaatcactgatgaagtgctcatgggcaagcaccttgtctatcaggaaggaaggcagctgcgggtgtgattgtggtggcaagttaaggcactgagaaggtgtgcagggaagatcctactgcgttgtgtgtgttggcttggttggagtcaggatgaacgaatgtagagggactgtgtggtggctgctactctctcatggtggacatgcttctctctgttggtcagccggaagctggcagacaactgagagctcgcagttccatggtcagtcagaaggaacatttggtcagctgcttccttttctttttccttccatttctgccagccgagcagcctcaacagtcattgcagctgcttctgtgatgtgtagcaaaacgctgcctggagtactagaaagtctactggctggaatctgctggaacctgtccataactagcctgccccaggtcatctatgaaatgggagtgatgctctgtggtggtaatgaatgtggagt

SEQ ID NO: 95650 - DNA, 1060 bp, Homo sapiens
actgtaatccaggcaatagatggcagcagctttgactacaatagtaaatttggtgggttggagcatgcatgtattttgaagatagagccaataggatttcctgaattttgaggaaaaagtcaagtcaggtaaaactctaaggtctttgaataatacacaaatgaagggcctgttaactagcttaagttatgctatttaaaattatttaatttcaaaaacagttttataaaaccacaagcaagtgattttttcttttttaaagaaaattacatttgattaatcagtgttgttgattggttaataagtacaaagtgtcctaagatccttaagtgaactcttctgtgtctattatatctcaagtggatactattgatcaattaatttttttttagggccttctatttgtaaggcaccgtcataggcaatccactagaagcagtgagagaagacagagtaggagggtaggggtaaaggggagtatgttcctctgagttttaatctctgttttacaaagaaaaatttaatgattgagattattctccaattatgaagaatagtcgaagaatacatgtctgctcattgtcttttggaaaatacacacacagtctgacctttgatcaagaatgcattttagattgaccattttagcttgatggttactttacttactagtacagactatgtagtggtgttaactttcataaatatgggttacactgcatatggcttttaatttacttttgctgttattcagccagtattttcctcttgatcagcacattcaggcatattgttctagtaagcaaaactttatgtgccagtcatactttcctttgaagcaatctttgtacaactgtcttgattagtcccccaaaatcattttggaaaggatctttgactctattttttaaatacacaattgaatcagagcattaaaactggaaggatccaagagatcatcttgtattgttgaactacttattattttatctgtggaggaactgagatcctgagaagtgctgtaacatgcccaaggtcacacagagctaggaccaggtcc

SEQ ID NO: 95651 - DNA, 1050 bp, Homo sapiens
gaatttcttgtacataaatattttaaactttgaaataaaacactaggaaattctttcatttagaatgaacatagaaaatttcatttttaatagtctcagattagtcttatcagaaaatctttttgtttactgcttattttaacttgaatcccagtgaactggtttgccgttccagatggtatttttcaagagtgcatctctttgatttcaggagtagcactgtagatgggttaaggaaaagacccctcatcgtatttgatggaagttcaacaagtacaagcataaaagtgaaaaagacagagaatggagataatgatcgactgaagcctcccccgcaggcaagctttaccagtaatgcctttagaaaattatcaaattcctcttcgagtgtttcacccctaattttgtcttccaatttgcctgtgaacaataaaacggaacacaataataatgacgctaaacagaaccatgacttaacgcataggaaaagtccttcaggccctgtgaagtcgccaccattgtcccctgttggaactactccagtgaagttaaagagagctgctcctaaagaagaggcagaggccatggtaagtatgggggtggtttccatgctggtaagtggtctgaatgaaacttgagcagtctgcctcatgacgggaggtgggtcgactgtgctacattctgttcttgaacccttttgatggtctgtctgatttgtataatacaacttattactccagtacttgaatcctggaatttaaaaatccatggtgattaatgtttttaaaagttcactcaagttatttctgcttaaaatacgtagagagaggatctgttaggcagttttcctagatttttctcatttagttcctttaactgtcttggaactaaaacagataaatattcctttattagcaaggtttagaacattaagtaatttgtccagggtcacacatttattaagtagcatttggggcctgaccttaagtctgtctgtttgtgcataccttaaaaccacaccagacaccagaatctttttaagatttacca

SEQ ID NO: 95652 - DNA, 1197 bp, Homo sapiens
tatattcatgagttctagtttctactgttctgctatgtgtttctaagcaagagcaaaggatacttcatacttttttcgttatatgattgatcttcaaattgggatttacctttttcaatatgttttaaagtagtcttattcctcttttgatttgttaaacaagcattttagttcagctattgaatagccttccaaaaaattaattcagccttgcaggtaagtaccatactaagactttaacccaatagtttttaatcattctgcctttattccaaactgtaaatctgtacacataagataaaacatactaagtattgcataaattgttaacgttacagtaaattgttatctgcagggctgacagacataatgttggtgggcaactgtgatcctatacatacatatatgcaaaaggggattttaaaagtgcagattatagagtagattgacaaattttattttatattcagttgtcctctctgcttccatctgtgttgctctcttagttgagagagagttagccatttgacgattttaagtcagtgggaacttatttttagttactcaataaaattaatattttatttgtattttaacttacagagtaggttggtaataacagctgaactgtgtaacattgttgcttcaaattgaagtttatattatgaacattcagaatcaatgctcatgtagcagcatattattgagctattttgagtttgaaatgtggagaaacgctaaaccatgtactatgtgttaacataatcccaccttcttagagctttgttccttctgaaggtgtatagatacagcttgtcttgaaatgtctttctccacataatgaagcatgctgaatgctgggaatctggagcagcagccctgggagccctgagttttgaagtgttttggtttgcttcaaaggttagaagaacttgatatgtatggcaaacaactttagaatactagttactcactaacatgaggcgggtaatgttgctctagattctatattccagtaaagccagcttttcttattattggagtaggcaaatgaatggcattagaattagtgggtggcttgtaagttgtagttataggcactttaccacttcctgccattagcaggcatccttgttttttcttttccctctttgttccttcttttccctttctccttatacattttctttctctact

SEQ ID NO: 95653 - DNA, 1035 bp, Homo sapiens
ttgagagattttatgttagagtgatctgaaaaaaagttaatttctaaactgctatcttaatattattatatttggagactgatgctgtaaattaaataacttggaaaagactcaggtaactttctactttgtcttttgttttgttttagagatgaggtcttgctctgtcgcccagagtgtagtgcagtggcatgatcatagctcactgcagccttgaactccttggctcaagtggtcctcctgcttcagcctcctgtagctgggactacaggcatgcaccagcacacccagcttctactttgtacttaacacatagattcttcattttttttgtctggacagaagagacaaaaatcttatttccacttagattgtttttactaaagtgcattttactaactaaagtgcattgctttttcagttgtttagtagcttgatcatcttattgtggaataaaaaatagagattagaattgcctgtgtatttgttgagtacctactatgctagctctttcttgggaatgaacaaggcagattaagtacttgctttcatagagaaaacagacagtgaaccatgaaataatgggtaattgtaatggtagaaagtaaaacagggtcaagaaatggtgaaggatgaagaaagtaggatgagaagctattttaaatacagtggttaggaaaggcctctgaagatactatattttgaagagagcatgcctaaggcatagctatggagagctttcaggagaagcattctacatgtgtccagttttagatggctgcatactcctcccatcaaggctggagtcagcttcccaccacttgtatgtggacctggccttgtaacttgctttgatcaagtgaatgcttctactcttacacttggacttctgcttgcagccatgtgaaaaagcccaggcatacccactggaaatacatggctcacccaacagccagcactaactgccagatgtgaccactagtcacctatcccccccggtctagctgccggctgactaaagttgtatgatgagct

SEQ ID NO: 95654 - DNA, 1005 bp, Homo sapiens
ccagagcctctctgccatgccggtgaccacagtgatctgagttgggcagggctccctcagccaaggatgtcctgcagtctgtttctctgtcaccggatgtggtgtgagacgaattgataggtgttcatgttttctgtttctctttcttgcaggcaatacataagggaaatccctttgttttttagaagcatctctcacacacagacatgtgcatacatgcacatctgtctaacctgttgctctaaaatgcagcaagagaaaagcagcctagtcttaattgatttcagcagttaggtggtcctggggcatgaatgtgggtgcgccagggtgcctcggcccaacttctttccttgtttgccctgcagattcgcaaggggcccctatgctgtgggtccaagccctcctgtcctgcctctgactgtcttgtgtggtctggccccacaggacttgtcttacaaggaccggcactggcatgaagcctgtttccactgctcgcagtgcagaaactcactggtggacaagccctttgctgccaaggaggaccagctgctctgtacagactgctattccaacgagtactcatccaagtgccaggaatgcaagaagaccatcatgccaggtcaggaggcactcctttctcatgcgtgagccagtctagcttcaagccttgtgcacgttcctctgaccccctgttcacattgacttggttccagacactcgtgttgactttccagtttgaccttgaactgcagaggagtatttagagtacttacgaagcagggacatacaggttctatcatgggcagtaacgggatctttttgctgtgcacgtggggcagtgttatgcagtcaaattgttagagtaagaaaatggtgggtatcccccttaaaaatacatctcctgcatcagcccccactctcccaccaccatagatagtttctcttttcttcccttctacctgctgaatttgtactcattcagttatttcaccaagtgtgcatggt

SEQ ID NO: 95655 - DNA, 1987 bp, Homo sapiens
cgggggccggcccaggggcggggacgccagccaagggcgcgggcgaggatcagggcagggggcccggctgcggggcccggggactggagacccccgggtgcgcaggctgcgcctggcctgcaggcgggcggccggcacggagctcggggctagcgtgggaccgtgcggtggccagggtcgccagggcgcgtgtgccggggaagaatagccgcggatcgcagggccccggcgcagggacgggggaggccgcgatcggccgggagaacttaaccgtgtttattacaactatttatgttcgcgcacaaagctgctgtcacattgcataaaggaggtcctcgcttcggcgaagggagcttttgtgcccggcttcaggctctgcgccctgccccagatttacaggactctaacagccacctgaatgaaccaaagtttctcacaatcgctcggctctctcggtttttttcagggcgatttaatcaccgagtgcttttggaaaaatttgatatgtgagttttaaggcatggagggtaactgccttatgagcacagttagcttggcattgtgtggaggggtttaatttgcaaaacgctttaatttgtagacaatggggatctctgtgaaggtctgcggtggatgctaggggtcattggctggtggaccccaggcacctgacttaaactagtattgtaacagcttcagggacaaagccgagcgtgcgtggagtcggccttggccacttcacacaattcaggttggcagattcctctttatttggctttgtttattttgccaacaggtttaaggctgcttctgccaagtttgcatctgcataatgggatgagcaggccccagtgtgggcaggagggggcctaaaatatcgcaagggccagctccgtccctcgacccagaaagaaacaaccctgagaggccggtgggcgtggcttgctgggacctacaggtaggggagtcccttcctggcccaggcgcagtccccgcttctcggaagggattttgtgtaggaatgaaagtgattcagggtgtttttcatgcctctgttttagatgtagttatcaagtctcaaaagtgactgaaaatgaaattaacctgggccgctttaacttaccaaaacggaactgtgcgtgtgaacactccctcaattcactttgcaagcttcatagataagcaggtgaattagtaacaggattcaagccttgcgagttttacgtaaagagaatggcagtcatcggacacgtggagaagaaattgacttcacctggagattgggctagacatggaggttttttgacgtttggaacaggggtttcctgagaagcaagtgttaacctgcttgtgaagaagtgaacacgagggaaaatcctacctcagtatattctgccctggaggttggttagatgtagttttgattggagaaggtggcggaatcttagtggtcttctggcggctacttgaggctgaaatggagaactttaggcataggaagctgtggaggtgcctggcccacttcctgtcccggaggcctcgcctggattctgagcttctttcctgcttcataaacattcaggggggttggtcatgaaacactggatgaaattgggtcacaaattgccatcaggaagagttggctgctgcataaccccctctgtccacttgtggagaaactgaccctgttaaccgtcgggcttgctgaaggtgccttgcaggtggctgtgctcagttttcatgctttgtgttttgcttaggacacgctgcatacttaaatcttcttcatccttgctctgtttgaccctgccatattcccaggctttgtcatttacattttcggttatttagcttttccaacaaacagcagatcttatgtacacagtactatatttgagaaatgcactaccatccatattaaatacaccggaaatcttccttgcatgtgcacagactggataaccttttaaaataccctaagactccc

SEQ ID NO: 95656 - DNA, 1392 bp, Homo sapiens
ttttaaccttatttatgaccttttttaaccttaattgcctcctgaagcgtcctgtctccaaatatagtcacttaggggttagggctttaccatatgaatttagggtggacaattcagccactcccagtgtgtctgtctaggttccacaacagggctgatgcttttaggaagacctggtgctcccatcatccagatctgggatctctgtttatttggggacacctaccagggatggttagagtagtcacaagtaaggagggaacgtcagctctttatatattggttgtagcaccccataacagggaacaagccttggtgctggccttccaaaggctggaaaggttttaagtagagtgattgaagagagagaaaaatcttgacttgatttcatttatggaaacttctcttcaacttaggtaggtagacacttatttgggggttggtttgtctttaattgagaccatgataaaatatcagtgatatgcaaaggaaagttttttctgaaccctggatgaagagagcaaagcaagaggtggggccaatggcagccagggtggagaggccgtctcctctgagcctgccatctctgtgatcgtgcagtctttgccacatgagcaaacatcccttagcagaatgtgcatgacggtggtgaggtgcaccctgagcgtggctggaatgtttctgacctaggccattttgccttgttcagacataaggcaggggcaatgcctgcatgactgacctccctctagctccagatctgtatgttcattgatgctttgtttgctcattcattcacattcatatgaattatccaagttcttagtggtcatttccaccatcccaaaccatttgcagcttctcctgcaacctgcccgccttctcagttatattccccatcaccgactcactcggttatccttgaattctccctcagctcccaactagttatcaacccctattgattctacctccaaaagatctaacatctcagccctgctgtcctttttctgtttcccctggacatcaaaaccactttttaaccattcctgccaatccatcccagggtgactgcaccctgacagtcaggtctggccatgacctgcacacggtggctctccatcgtacttgggtcagtgactcaagtccccagcatggcagtcatgggcttgcacgactgggctgcctctctgtttctcccagcatctaaatatccccttccccatatacacacatgctgagctacaagtcatctgtggccacccactgatggtttgctaattgtgataacaaaactaagtttataatcagtttgtttttaaagactctctccactgggactggttcagggttctcctgtgcagtaatggcagggctaccccactacagctt

SEQ ID NO: 95657 - DNA, 1040 bp, Homo sapiens
atagtttatttgccctgacatcctttttctgtcccaggatcccatccagggcacgtttcctttagtctccgtagcgcctctgatctgggacagtttcttagactcgccttgtttttaatggcttgacagctttgaggagcaaaactgcttttcaggtgttttgtagactgtccctcagttgagagttgtcagatgttttttcatgattagtgtagagttaccggtttggggaggaaggccaccgaggtaatgtgccattttgtatcaagggtccatgtgatcagcgtggcttatgatggttgatgttgatcttgatcacctggcccaggtagtgtttgtcaggggactccactgtcaagtgactccactgtcaagtgactcttttcccttctttccatactgctgcagtctttggaaggaggtcatttaaggaagagggagttcagctgtacctcctgtaggggttgtatttacattagttatttagaattctatctgacagatttatctattctcccaaaagggaccaagattttcagtggggatagaaggcactgtggcacagacagccccttggcactgttgcggaggaggtgataggataggatggtgccccagcatggggtttccagaatgtggtcctgggctgtggagaaatgcaaattccggggaactgcctgacttcccgcgtgggataggttggtctggaattcttcctgttgcacgagttccccaggtgattctgatgcatattcaaagttgagagcctctgctgtggattagcacttgaaccccaggtgtgccggccaggagtcaggccctcacctccatccttgccgttcacacctcttccctgctggtggcacctagctctaaggctccccgtgtaaccacttctcccacagttttgaccacctcttggatctctccatctgaggctccctttgtatcaaccaagggtctttgctttctggataacttcatccttcttttggtgggcccagagttccagtgaagggagaaaccagttacagctgaga

SEQ ID NO: 95658 - DNA, 1027 bp, Homo sapiens
tctgtgtttatctcatagataccattccatattcccaggtatatgcttgtaatgttattcatgtcacacatacatgtcatgtcattgaaccaaatgcaatttgctgttaatgtaatactgctcgtgacgtggcctacttggatgtctgatatgagcttagaagcctaacaggaagttcacctgcaaaattggaccctccctattcccttgtttccacaataacctagttagtattttgtgaaaggtgttctttataagtgttacattctggtgcactgatgatacagtaattgatttaggaatatctgttactctttgtggttacagtagaggttggcaaagtggcccatggaccaaatccagttcacctgtttgggtgtgaatacagttttattagaacccagctgggctcattcatttccacagcatctgtggctgccccatgttgcaacagcagaattgaggaattgtgactatgtggcccacaaagcctgaaatatcaggccttttccagaagaagaaccgcagcccctagtgtgcagcaaggaacagaaatcaggagagctgcattggagtccctgctttgtccctttattggcgcgaggtttgaggtttccgtgcccgcacctgggaaaggaggaggaggatacccattgtctcaggggattgctagcatgaaattgtgggacatactgggtggttcccagcacttaatatgcacttaataaatactaattccttccctctctattactcacatccccggctctcatccttaagtagttgctgtctttctacatgtgaaaaatttgagacaaaaaaatggacatcagtacttgtgttttcagaaatgaagacatctcaagcagcactgtccagcagaaatagaacataagctgccagtgtgtgctagatgtgtaacttcacctctcccagtaaccacatgaaaaaggctacaaattttaagtcttctgtagtccaacataaccaaaatatttcaacatatactcaaataattgctaatgcc

SEQ ID NO: 95659 - DNA, 1453 bp, Homo sapiens
gcctgtccactctgtggtgcggtagggagaggaggtgtcaagttgtctggggcctggatgacgaaatctgtgttccacaagtacactcaatttttaactcacgtttattttgtaacttttgtgaagcattcattggacactgagtactgggtatcatctataaagccacttttctttttgagttatgtgttgaaagaaatgtggcttaatgagccgtgtagatgtacagctgaaaaaacgctttctaaaatcattaccagtccaggcaccggtggcttatgcctgtaatcccagtgcaggaggatcagttgaggccaggagcctgaggccagcctgggctgtatagcaaggccctgtctctacaatgataataataatataataataataataattaccagatggattcatgtagaaattgagtcacaccatggtgtctgaataccttgtcatctgatgttagctaaactttagtttttaaaaaatagtaataagtggtatttgttgaggggtggtttttacgtgttagtcatgttgtaagtaatttgcactgtgtgtggcatgtgggtgcctaatcaatgagaatttgcctgtttctttgtggatttttaatttttcatgatgggaaatttcaaaatttaagaatcctgaatcctggtgtgcctgtcactggacatcagtagttaactcacctcattcccttccctgatctctgggctccctattagattattcagattccaggtagatagataattatttttaaccgaaatttagtttttaaaatttaacttcagattgatcttgtttgaacttaatcatttttcctctgacttgcttatttttttcagttgtcattgtagcacattgatgtgttctttcttatctccttttgggttttaaacattatttatgaatttatgccttaacttaaattgtctacagcttctgctgtagacaaaggagctgtttgtttcatgcaacctttcaagtgaagaataatcagctaattacaactgtttgaaaattagcttcctttttgtttgtttgtttttccttcctaccctgggagcctggctggcatcactgggagcaccacacctcccggtgtggtgagcttgggagctaccttgattcacttggattcttttaatgtgtatttgtgtttttgtgcactaatcaggctcattattttctcatctgtaaatgagaaacttggaatagctggtcatcaaaaagttcctttttgattttgtggttaccaaaaccaaaacaaagcaccaccaccaacaaaaaaaacagtgcgagggataattgttgaccgtcagttgcttagggagttaatgacttccacctgggaaataatttgaaaaaatgtcccccttgtattttggtttggcccaatttggtgtggcctggagcatgtcccttactgcaggccacctctgggggt

SEQ ID NO: 95660 - DNA, 1047 bp, Homo sapiens
gctgtttgtagcctcgctagagcttgggtgggcccccatcgccctcctcctttggggagcctctaagagtcactagaggagacttccctgagcttccttcctcggagtgaggcattaaattgtgcccgtgttctggggtagcaccgtgaaggcccgcgtggaacatggtttttatttagagtaaaaacagctcgatgcagcgttgcctgtctgagccagacttagctcttcatcttcacctgcttgtgggaagcttcgtacaccaccaaggcacaggttaatgtgcagtatttgccaccgtgggtgcagttactaggaaggcagccgttcgcggagaataatggtgtgttttttccaccttgttcctctgagcatcatgaaataccttagcacgaagaaaccctgtaaatattctgggtaatagccctacataaatgtattcagattatgtttttttttcgctaataggtgaaaaatgatgacctccactctttccaagaggggtggcctgttcctgagcgacttcagtgtgcttccccacagagagggttttgcagctggaaacaagggcatttcttcccagaaagtgggagttgtttcgcttctccctttatagtactgccttgtagcaatctgaaatgtggatatatttggaatttgcacgagaaaatgaaacaccctttctctgcagaagacagagtgccattgcctttgcaggtcactgagtaagcagcaggacctgcttcagctggacggcaggtcccttctgtggcacctggttggcctcaacaccatgcgtggcattggcagtgatgaaattcattttcattcaggaaagcgtcactgggagcttttcttttttgagagaggctctccctctgtcacccaggctggcgtgcagtggcgtcatctctgttcactgcagcctctacctcttgggctcaagtaatccgcccgcctcagcctcccaaaatgctgggactacaggcatgagacaccacgcccggctgttatttctaataggaagttgccatcccttttctcacc

SEQ ID NO: 95661 - DNA, 1177 bp, Homo sapiens
ccagccttggaggtggccctggccgctgctgggatcttgtgtctgctcctctctaagcatgagatgctgagtcggttcctttagctcagactcatccacacctttaggaaaaggaggtaatgccggcctcgcgcggttatgagagtgaaattaaactccacatagctggctcagggtgaggcctgataagcactgtgtccctgtggtggctgtggcctggcctgactctcctgggtccccgggcagggcttcctgtctccatcgctgtctcttatttctctgcctccttcaggtccagcttctactctctcctcccttctgcctcccccacgcattgcttcctcctgggtttgttcccctctgcctctcttgggccagtgccttctaccagccctgctcccaccctagccttaggctgactcccttacctctgctgctcaggcaccctcctttctaaagcatggtgataacagcaccgtccagactcgaagcaggggacctgcgaaacttcagctggcgtggtgccgcacaggtgctccctggccttggtggctctcaatggggtgagcatgtgccctgctttcctctcttctgccctttgctgcgactcctctgctgtcttgctctgcccgctgcaggcgtggtggcactgggcagctgctgttactcccactgccctcacctttgaccctcagccctgagcactcagctggatttctcttttctgggttggttgtcctcacactgaaggaagctcagctcagcgccgtggaaggggcaggacccagtctcagctctgacatggtcatatctgtaggcttgggctgagtcttccacctgcaagtgcaatggactgaaattttatgtcccccagaaattcaggtggtgaagttctaacccccagtgtgactatatttggagatgagccctctgaggaaatagggttgagagtagggcccccataatgggattcctgcccttctgaaaagagacagcagagagctctctctgccacctgaggacatagcgagaaggcagccatcggcaagccagaaagtggcccccatcagactctgctggcacttggatcctggacttgcagcctccagagctgcgagaaatgaatacctgctgttgaagcccccagcctgtggtcttttgttagggctgcctgagc

SEQ ID NO: 95662 - DNA, 1016 bp, Homo sapiens
aatcctttgattttatatttcctttatgctgaaaatctttgtccctaggatcgtttacgtaatgacttatttgcttgcttgtgtgttttatttatatacaatatatataaatgtttaaaataaccccaccaatataattgcaaaccatataagtactgaaaacaacagaaaatgtttttgtccttagggtttatctcacaggggaaatacagtccaattattgtatttcaaagtctttcaggataattcctctctgtacttaagccaccaactcaatttatagtttagtttgtttcattctgcttttaatttttggactttaaaaaagttaatagtttattattttatttatttatttatttatttatttatttttgagacggagtcttgctctgtcacccaggctggagtgcagtggtgcagtcttggctcactgcaacctccatctcctgggttcaagcgattctcctgcctcagcctcccgaatagtttattatctaaactgttcgcatggttccgcagccaaagatggttatgtccagagaatgattattttgtatgactactctctctatcttcttttttccctactcttttccatcaccattttttaaagatgtttttttctttcccctttttatttcttgctttttaaaaaaagttttattttttagagcagttttagtttcacagcaaaactgagcagaaggtacagagttttctcatatatccagttcccccacatgaactagcaacatccccgacagggtgctgcatttgtttctgtgggtgaaactgcactgacaaaaaccaatcacccaaagtccagggtttatatttgggttcactctttgcgttgtgcattccatgggtttggacaaatgtataataataattattgctttttaatgtgagcaaacacatatgtgtatacagtgatatatttttaattttttttttcctcaaataagcaatagcatactctatacacttttcccaagcaagaggtcaaaggt

SEQ ID NO: 95663 - DNA, 1033 bp, Homo sapiens
caagcagcaggctgccaggctgtgcgggctagcagaagggaggttcttaaattctctgcacccatgtgagggaggctgctctcttgacagcgtcttagggtcaggatggctggaatggagcgtggagcctggtctggttggagtccctgtgtggccttttggagatgagtatggtaacagtgaggcaggaagtggctggatttgcagcgactgtgtggagcctccctgtttaggcttagtgagctgatgcaaagtctttcgtaaccatgatcagttaaaacaaaacacctgatgttgtggcctcctgtcagcttttgtcctcctgtagaaacaagatgcttctagaaaaccagtttgtaaatttggcacagaaaaaaaaccctttcagcaatttggtgtggactctgcttgttaatttatggcttcgcaactttttttaagctaccggcactaacagcagatctttaagtgtttaatcgtcccaagtcaggtttgactgtgggctgactagctatagtgatctaatttggttcatttcctaggagaagaaaattataaccacatttttattaatttatggttttgatccatctattttagactcaatattaaatcatcccctacttccagaagatgtgtttttgaacataagtatctttaggatttaatattctatgaaaggagtaggagctaatgttcgcttgttgtaatgtttgttttcttctgatatgatgattttgttgaaaaaatgtatttgaaagagtaacgtgtaggtaagaaataagttagccaaaaccatacttcaagggaagcctccctcctatcctgggagcccggatagcctcactgtggcctcttgtttgtacatccagaatattcttgaaactgggttagctgagtcatttttttttcttctttcagtgttctccttttttctttttataaaatgaagagatctgtccacaagtctagcttttaacaatgagaaaaagcactgaattgtacactttaaacagtgaaccagtttggggtc

SEQ ID NO: 95664 - DNA, 1061 bp, Homo sapiens
cttcttacaggaactaaatagagtgagaacccactcatcaccacgaggaaggcaccatgcatgagggatccgccctcgcgatgcagacacctcccttaaagccccacctccaacactggggatcagatttcaacatgagaaggagtcagatattcaaacggtagcaacatccttgtttgcccccatgtgtcacatacatgggccatggatgatgactgatcatctggaattccccttttttgtcgcttgccacccagttgtctgtttcatctgctgctttctcgggggtgaggtggtgtcagtgatgtctgttgtgtgtatagcaccaagcacagtgctagcaggggttcagtaaatacttgttggatgaattaacttgaagtctttctagaagagagcaatattgggatggtgaggtttagcaaaccttgttgtcatttttcaaattgatggttttccttagagaagagattatagttcccctagctttgaaggtcagtcttgggaaagcaaggttaggcttattttctactgtatcacaaattagtttttatctaagatagttgttaatataaacatttattctgcttgtctccatcaaatttttaaattctaaggcagatattttagatagcacacatgtgttttagaagttacctagaaaagtttagctgctgttttttataggcacgttttcttgcagcagatatcataaataggcactgctatgtagtctcctatttgactttgaactctaattaggctgagctccttaagaagggccacttctgtgctgtgccttatgtatgtacagcatttgcacacagcagttgtgcaatacattttcattgaatacgtgtgactgatttcattctaccaacaaggtgactgctattgtctccaaggaaacctagtttctgaggttaattagcagccttcaatttctacagctaggaaagtgcggaactggcattagcatccagtttcaaagcaagtcctcatgcccctgcatcatgtgcagagacattgccagcttcacacccaggttagtcgtctttcac

SEQ ID NO: 95665 - DNA, 1888 bp, Homo sapiens
ttgaaatatcaagcacagatgctagaaacctttatttcctcattctgttttcttaaatgatagggatggtttctttaacagaattctacatttggaataaatattagcatttattgttccaaactcatttatagaggtgtctatagtaattaaacccaaagtaacccatgtcccctctcctacacagggtccctgctggcaggtaggtacaggttcttgtccctagagcggggtgcagaggggctttctataatccactctcccacttcaataggaaaatctaaagcatagataccatgcttaggaatgtgggcataaaccatataaatctgcagaactaaaatgattttagtagcctaataatattttaacattatgagacctgggtagtgtggaatctgtttttaaaaatcactgtgcttcttgtttcaaccttgcatgtttcaaaatcaggcagggaatcgtgagtaacaaggtggcaaggaaaaaggtcagatattgattaatgtagctgaattcatttgtaagaactgaggaaactcatgacatttatattttgaattttttttttttttttgagatgaatcttactctgtcacccaggttggagtgcagtgactgatctttactcactgcatcctccgcctcttgagctcaagtgattctcctgcctcagcctcctgagtagctgaaattacaggcatgtaccagcatgcccggctaattttttgtatttttagtagaggtgaggtttcaaatgttggccaggctggtctcgaactcctgacctcagatgatccacccacctcagcctcccaaagtgccaggattacagatgtgagccaccacgcccagccgaggtttttttgaagtagatgtttaagttacaaaatttacaagtaccttacagctgtgaaaaaaaaataggaaggcctgataaaccgctaaaaatggtgactgttatccgtctactttgggagcagggagtatgcactacctgaaaagacctcacttgtgtttcctaagaagccaagttccaccaaagacatctatgtccattttcatacgtgggtattttcccattgttggtatttcctcttcaccccttcaccatgctgtcttctggcttggcagaaggcagtgttgattccagtgcagttatatggaatttcatttgtttacagttaacatcatgtaagaaaattggcttattaaatttatgttgattttccaaaatgctggcaccagggaatcacttgacagtcacagccttcctcccagtgtgattagtgtctaagacaccaacgagaaagccaaggaaggttacaaaattgtgtacttttgtagctggagtggtaaattatgtgtaaaatagcatttcccagattctagttgaagcgacagtgccaccacttcttttttttctgtaaaatttcccagacactaatgagctatgttgacttagagtctagtctgcagaacgctagtgtgtcttggcatttcagagagtaaatgagttgctcaatgatgaactcctgaaaactggatgataaactcacattttaaggcatttttcttctataattttgaggggtaacctgatcctggcagtaaagataaattaatggtagatactcactgaaaaaaaaaaaataataggagggtgtagcagaaaactgtagatgatctttatgatcagtataaaatttttctttttattgagaattgctatgtgctaataaattctattgaggatgcagtacaaatactgttcagttaagaaattgatgtatacgttacacccaataggatgactgctgtcaaaaagtagacaataacaggcgttgacaaggatgtagagaacttggtacccttgtgtactgttggt

SEQ ID NO: 95666 - DNA, 1019 bp, Homo sapiens
atatgtttataagacacagcatatcctgagaaaatgagtgtcaacctaacagttatcaggaggcagtgttacttaatgaaatggactcatttaattataatgttatttagaatttttttcaagtttgtttttgttagagggtcagatttccccatgtacagcaaacagtaacataagatttgttttataaggttgctgtttctaaaccaaatactaaagcttgttgaaagaaggtcattttaaagttgagcatttcaagacccaggagaaaactggttgcagagttgtaataaaagctgtcagtgcctaatttttcaagttggtgcaaaggatgaagtgtccgggtagttctctaatgagcatctccaaatgttttgctggcagaaggactccatgaaagatgacagaagaagttattgtgatagccaagtgggactacaccgcccagcaggaccaggagctggacatcaagaagaacgagcggctgtggttgctggacgactccaagacgtggtggcgggtgaggaacgcggccaacaggacgggctatgtaccgtccaactacgtggagcggaagaacagcctgaagaagggctccctcgtgaagaacctgaaggacacactaggtgagtgtttcaccctcgagagaggaagccttgtgcatttcaagggacactgttcgtctttctagttagtttgctgtttcaaaaaaaaaaaagtctgttttaaaagttaatatcttcctagttgtcttttttaataatctaagaattaagagatgaagatggagaaagaggatgtttttcatttcctggagattctggagtttggggtcctgtgtatggagacactttgtgtgcttgggacccctgcacaggtatctccttgtatcaaaacgttagaggagcctgacttggaattctcacctctaagtctacccagctctgccagtgtcgtgacatgaagttctttctctcttatacaatcctgtccatttggcctacgtgcctagagcaggg

SEQ ID NO: 95667 - DNA, 1081 bp, Homo sapiens
gtatttttagtagagatggggtttcactgtgttagccaggatgatctcgatctcttgaccttgtgatccgcccaccttggcctcccaaagtgctgggattacaggcgtgagccaccgtgcccggctccccatgtgcctcttgttttcccaggtgttgtcaggttatgggcagtgccctcctggagttacacaaagttaacagtatccagtcttgcctttacatgcacacggaactgacttacagtatttactgcctcagattacctgagaaaataattgcgaggacttttttgaagaatgactcatctgagctgacatttaaaacgttgttaccttcttatgagtataatgttgtctgtatccaagactgcaggttatcacttaagggtttgctagtgaaatgagttaatattatcacctgtgtcacatttacttggggttttaaaaaaatttctaacaagaggatttgttttcttttggggaatggagaatgaggaatacgtaggaaaactgaaagtaaaattatacaccaaatgtggtgggtgttgcaaaatgttcatcttttcttttctgccatgttgaaaagtctaaactccctctgcaaaatcatcgaaagccttcatgtattaggtagtatttttgtgtatggattaggttcttaccatgatttggagagataagtgagacatggaacttcgtatgaatcataccagctcactggccatcgtagattctcagcctgatggagaaatttcatttttgattagcaatatgctccttctccactgagctgcctccctttcatcttttcttcccccacataagcatgccacttgaaagaaacactgttttatgcttataactcttaattaactgtggttaccaaaaaaagagggtagcatgaatagagaaaaacttgaaggttgtcctgagctttatttttccaatttctacctttcaccaaagtaccatctttttagtgatgccaaacattgttacgttgttgacttgttgtgtgtcttctttttttttttttttttttgtatttacaagattctagtaaagcatgaagtgcttagag

SEQ ID NO: 95668 - DNA, 1043 bp, Homo sapiens
tgtcccagagtcagaattataccaagttctttgttttagaaatgagaaacctcgggagtaactagcaagccttgaaggggttcaagggtgaggtgatagtcatgtattgatataaatttactgattttgatgaatgcccttatttgtggaaatacacataaagtattcgggtaatggaacatcgtcttggcagcttagtctcaaatggcttggggaaaataatgttttttgcgccgtttttgtaattttcctgtgcactaaaagaagcagacatatcagcagtggtttagagactaccctaggccgtaaaggtagctgggagtctggagacttgggctcccctgctgtgcctgggcagtgccctaagtttggcataagcctttaagaggccagaaagaatcatcgagtatctgctgcagttggacttagaacatgagaataataccagatgtcaacgtgcccagctgatgcttcacagaatggttctaacagtacatgattcagaactttctctaattattcatcatatctatatccccagcatgcaagtgaaaaccatctctgcttcttgctgggtcaccccaggctgttttgagctcctgggctcacagcctctgtgattgctgggaaatcggaaattctcatttcggcattataggattgtgggtctgtcatcgtgattataaatattctcacaggtctcaacaagggcagagctgttcatctctgaaatgaaatgtgggtaacaaatgcagcagcctggttctcgtggaagccgagtctaagcttcagttgtccctttctctatcccttggaaatcccgtctgagccactgcattctctgctgtgagtgacctttgagaacagtaaccaaaggctttgaaacagggatgcagacacgatgcagcaaccccaacagtgtaatagggtgtgttccgatcagaagggggagcctggtcagatgttatttcatctggtcgggatgtgaaggaaggataaggcttagtccctgactttctgaagcttgtatttgtaatataatc

SEQ ID NO: 95669 - DNA, 1270 bp, Homo sapiens
acccagctaatttttttgtatttttagtagagacggggtttcaccattttggccaggctggtcttgaactcctgacctcaagtgatctgcccaccttggcctcccaaagtgctgggattacaggcatcagccactgtgcccggcctggtttttgttttctaaagctaaactactagaggtaaaaagtttcctgggtcaacttcctaaggtcaattaggaccttagagagcggggaggaaactacatgacacctgacaacaacaggaacctgaagggacagttttggagatgggctgagatttcgtgcaagggaaattggtgcccaaaagggacatggaagactggggaagctgtcaagaatacatttactgctttttctccatggtggtcaggaatttagaatttcttcttccttaaacgtacgcagttcttaatggtgagattattttctgccagcaggacacttagaagagaaaggtcagttgacgaatatttttgctttgctcgacacgtttctgccagcctcagctggagagctctatgctcctgccctgcccagatccctctctgcagctacgggatcagctgaaggtgcctgctgctgcttgcacgctgtcacccgctaccttccccccgccaccaggcctgccctgtgcccttgctgttcacagtgtggccctaacacctccttcacatcactgaatggctctgagtccttctgctcacagccgtggtgtagcctgtcttccttgccacgggtacttcctgtcctcacctgagcgcctccgtgtcctgcgggaccgaaagagacatgctcagggaggtcctccctgacctcctcctctttattgcgattgtcaccgttggtcatctgcaacttgggtttgtgtaagtgattctctatttcactagtctgtgaggtttaggaggctgggtaggttcttcacactttccctcaggctgagcattaaacaacaaatgagcaaagaacccttcttgagaactctgaagaaatgaagaaagaggtacagccagaggtggcatttgtaggtattctagtgtaaattcatggcagagccaagggacagcatttcaggaaggaatggagagcatcgtgatctgttagttgactgaaagtttttgcaccttaaatgccatttgttgctagggaggagtcagaaatgattcggagaaatctctgaaaaagtaactgagtcccctttctccttcatccggggacacctctgttgagcagtgagtacattctgat

SEQ ID NO: 95670 - DNA, 1547 bp, Homo sapiens
aaaatatgatcttggcttaaaattttttgagtttgaggagacttctcagaaggaagtcctgcagtgtggagacattggtcccagtcattattctttctgcctaagatttggggaaaagaggaaagactttagagggtagatgaaaaaggtgttctccggggttgctggccttagggaggacctatggcttttctgtggaacatgcacaggtggtcattgctgtctgaattcagggaccaagtccctttggataaggagggatgcatgcattgtctgggtttcatctcagaactctgcaccccactgtctcagttgtcttatattgttagagaatgagctaactttttctaaagaactaaagcacgaattgtttgtatttccttttaacagttttttaatgggggcctttcagggttttttgcattctctcctaacttagaaagtcaaggaacaacatatatgattctaggaatatagggcggaaagagctttactgggacttgcatcggctctgcacacatagcagcaccgtctttgtctgaggttccacgtggcctgatgctgtgcagggcagcttgtcctgatggatcttgccgtgacacgggccattttcagctgttagtgtgcatgccttgttccatggggattctgcaagagccctgaggtgtgtgtgtggcttcttttctcctgacagcagaaccatgccaggtttgctgtatttcctgttcataaccaaggcgttctcagctgtcatctgtgactaccagggacctgtcctggtggacaagtggacaagtcctttgcttgtttttttcccaccatccactgcctccccccgtccccatgtgttttcctgctcattttggcatttctcaggttagagctggctttcgcagccaccactaggccaccaagagcccttaggttcatgatctgacataattccttcgcagcatgccaggatggaaaggtttctgaggggttcagcctccctgcaggactcagtcaggcatctttatttaatttcctttttttcttgcagtctttgggcctgggcctttaattgaggttatcacatgaggcctggcttctggataagcacagctgttttttttggaatggatcttcaataaaatatcctgagtgattgcagtgtaaatgagctagacccttgcttgacgatattgaggggtgcgtatttcagggaagacaaacattgccacatgctacactatccactatcagtaagtgctgggtatttcagaagtatctgttggatatgttagatgaatcagtgaaccaacaaacgaacgaacctcttggaccctctttcctgtcctgaacttcagtacctactgcttgtccttccatttcttcctcctccctcgctctcctctctcatctacaattgtcatttatccttagcagctaaaggtgatgcattgttgttgcttattctccatatttcgttatcataccttcacctgtgagccatacctgcttaaatccagaaaactcagaaatcctactcaccctgtgtgtgtcca

SEQ ID NO: 95671 - DNA, 1421 bp, Homo sapiens
ataatgatgatagaggccccgagagaggttggttttccgccaacctattaattgtccttagattccacttggaaaatgacttctgaaaagaagggtcaaatgaatgggttgtactaattgttcattctccagaaccattgattcaaaaactatgagaatggaaaaatcattccttataaggagtactcatagaaggacataacaggaagaagtggtctgatgtttgaaaatttgaagaatttgcccagtagtcagcacagagaaattactatataccaagtaagtacagtgtttggagatggaaagtgtaggaaatgcggacagtgggaggtagcacaaaggtggcaattaaagaggagaaatcaaaggggagatgtttcaaaacccggggactgagtctagttaggttttagtccaatcatagaaaattgtaatgagtgtcctgtccatctatgatggcttaaaaagatgtccataaattctttggtactctttgcttcagaaggtggagcctgaccctcttcccttcagcatgggctgcactgagcaactcacttctaatgaccaagatgtggcagaagcgatggagggcagcttccgagatgggcattgtggctgcctctttgctctctcttgggtcacttgatctagggtgagccagctgtcatgttgagagtacattcaggcagccctacagagccccctaggggttcatgtgagcagactgccttggaagtagagcctgcatccccagtctagccttcagatgactgcagcctcagccagcatcctgactgcatgtttcaaaaatgtgttaagattctttgacaagcttaaatgtagagtactctaccatactatcagtactctagtacttgttgaggagcaagtgtggcatggtcctttttcatccaatttcttgaaatctgttctagaaagccaaccgtggaaggactgcaacagatgagaataggactgatggagttgctttcatgggaatcattccctggctccctctggaggcagagttgttttgggtcgggagtaactccatctccatcagatgcagggactggtggctcactttgaaaggaggagaccatacagcagtgtcccagctgtcccttcaggggaaattccctatgagagatgtctggagcagagccagagtcctcaggacagaattggaaaagtatccacagactggagctccctccatcatgggctgctttgcccataaatggcattcccatctttttctggtgaccaaacatttgttggtggctccagcactgccgatgtttgttccagattttctttcttccagttctcaaactgcatcagagtcccctgaagggcttattaaaacacacggtgctggaggttaaaacacagatggctgggctccaccccagaatttc

SEQ ID NO: 95672 - DNA, 1016 bp, Homo sapiens
atgtttaaaatgcgaccggaattttccactgctgttcatatttttaaatgcttagaattagaaaaattagccaggcatggtggcacatcgggaggctgaggcaggagaatctgcttgaacctgggaggcgcaggttgcagtgagccaagatcacaccattgcactctagcctgggcaacaaaagcaaaactgcgtctcaaaaaaaaaaagaattagaaaaattttgatgtcttaatttctaatagggttagacatcagaagtagtaaaatttctagctactgcctgcatgcaaaccactcttaataaattcccagtttatcaaaaaatagtttgggaaatgaaaaacagcaaatttcttgagcagtcagggcaacactgtatattccatagtgaagtgctgtatattccataatgagtttgcacttttcaaataactaaaacgcatttagcactgaaactgggctaagcagaatttattttttctttggttcagaatttcagaatcgtggactacctccaggtctttctgaacatcagatgccgttctagatataaaacagagacccggctgggcgtggtggctcatgcctgtaatccgagcaatttggaaggctgaggctgggaggggggtggggatcacctgaggtcagaagttcaagaccagcctggccaacatggcgaaaccctgtctctactaaaaatacaaatattagccgggcatggtggcaggttcctgtaatcccaggtactcgggaggccgagacaggagaatcgcttgaacccgtgaggcggaggttgcagtgagccgagattgggccactacactacagcctgggcaaaagagtgaaactccatctcaaaaaaaaaaaaaaaagcagagacccagtgtttgagcaatgggtggtttggatttagacgcacaagagatgtggatggatttagacacagctccccgctgtggcccggctgtaactgtgttctgtttcctccccagcccagcgacttctccgtgtcc

SEQ ID NO: 95673 - DNA, 1256 bp, Homo sapiens
cgagcacggggagaagctctacctcgtcagggccctgcagtgacggcgccccggccccacactcgcctcccgggccccacggtggagctgcccgcccggccttgtggcagaggctcctcccgcggggacggccccgacggcttctctgcgagtctctctttatgttcaggtcgcttggtcggttcgtctcccatttgccatccaggcctcacacccacactcgagcccacccggccggccagctttagaggaggggaggagcagggcgagttcacattattccttttccatcggaagtggcgctcgtgcattcaactcgttcccgctcatggaacccctctttaaaaagacgcagggcacctgtgagcgcaggagcgagcctaaggccacccagcggcagcgcccgtgtcctgggcactcagcgtgctgggcagagcaggtgcgatggccccagtcctagcagccctcgcccatgtcctgtgcccttacatggctcccggactgtgcagggagccgatacgtttgctgatagcaatactggaaccaccgggtgcgatggcagtgaggagactgcccagtgcctttggggctgtgcttgcaataaagaatttcctggaaaggcagtctgcaaaagagggaaccggtgactcagaaagacagatgttttggtaatttaccccaaatgtgccatccacatagtgctttttcctcttgcccttcggcttgtttgaatctcacaattatgtatttaattctcaaagaaatatgtatctgtagccgtttgttgacactaatacagatgattaaggaaaacagctgatctttggggaagggagctaccaacactttatacacacacacacgtgcacacacacacacacacacactatatatatatatattatttacagggaaatttttcagggtttacaaaagagtatgtgattggtagtaagagacacacagaatgtttatgaagaaattgcattttctttttcctttacatttgaacttctttatagtttaaatataacgtcttgagatggcacattcctacgattgaagaaggggtcttgagatcccctaaacttgcatacccagttttttggatattgtaataaaaaaaagtattatgacaaggctctgtgtgtatttatctttgggaaaactcagactcaatcatgggagagtaattactgaagcattcactcattgcggagtggaaatcatttttagagaagagcttaacatttatt

SEQ ID NO: 95674 - DNA, 1423 bp, Homo sapiens
tacacttgatgggatgtatttttggcttttttttgttgtcgtttaaagaaagactttaacaggtgtcatgaagaacaaactggaatttcattctgaagcttgctttaatgaaatggatgtgcctaaaagctcccctcaaaaaactgcagattttgccttgcactttttgaatctctctttttatgtaaaatagcgtagatgcatctctgcgtattttcaagtttttttatcttgctgtgagagcatatgttgtgactgtcgttgacagttttatttactggtttctttgtgaagctgaaaaggaacattaagcgggacaaaaaatgccgattttatttatgaaagtgggtacttaataaatgagtcgttatactatgcataaagaaaaatcctagcagtattgtcaggtggtggtgcgccggcattgattttagggcagataaaagaattctgtgtgagagctttatgtttctcttttaattcagagtttttccaaggtctacttttgagttgcaaacttgactttgaaatattcctgttggtcatgatcaaggatatttgaaatcactactgtgttttgctgcgtatctggggcgggggcaggttggggggcacaaagttaacatattcttggttaaccatggttaaatatgctattttaataaattattgaaactcaccagtcatggacttccagttttaaaggttgtctttctgcttcggcatggcacttgttggagtgctaaggaaaatattggagaatttattttaaaagaaaattctgaaaacattcaggtttgtgcactatataatttgatatgtagctattgaaagcatttatatgctacttgggctgagtgtatgcatataattttcactgccatgtaaagttttcagatcttagccagggttagaatcagttttgtgcccttccttggcaacacagaccagatggagaaaaaaaaggtgcaaattgtcccctctggagagatctgtgaactaggcttattgagtgaaaactctgagagcttttgttttcaataagaaccctttcaaggtttagtgttagcattttgtttttcctcttaataaatggaagaacaatgcggtaagttaaagctccacattttccaagtagattggctccgcgtgacaacacaaacctgagcaggcgctgaagattggctccgcgtgacaacaacacaaacctgagcaggcgctgagaggataaagatttctatgtatcagaagcatttaaaaatgagagatcctaagatacctaaccagtgtaagctagacttgcctgtgcttgtacaaccaccttgggattcttcttaattggacatatttttggaatcccagtcttgggcagggcagaggacgatgtggttttgtttctttgtcatgctaaattctccagaac

SEQ ID NO: 95675 - DNA, 1039 bp, Homo sapiens
tctccagaggggacaatttgcaccttttttttctccatctggtctgtgttgccaaggaagggcacaaaactgattctaaccctggctaagatctgaaaactttacatggcagtgaaaattatatgcatacactcagcccaagtagcatataaatgctttcaatagctacatatcaaattatatagtgcacaaacctgaatgttttcagaattttcttttaaaataaattctccaatattttccttagcactccaacaagtgccatgccgaagcagaaagacaacctttaaaactggaagtccatgactggtgagtttcaataatttattaaaatagcatatttaaccatggttaaccaagaatatgttaactttgtgccccccaacctgcccccgccccagatacgcagcaaaacacagtagtgatttcaaatatccttgatcatgaccaacaggaatatttcaaagtcaagtttgcaactcaaaagtagaccttggaaaaactctgaattaaaagagaaacataaagctctcacacagaattcttttatctgccctaaaatcaatgccggcgcaccaccacctgacaatactgctaggatttttctttatgcatagtataacgactcatttattaagtacccactttcataaataaaatcggcattttttgtcccgcttaatgttccttttcagcttcacaaagaaaccagtaaataaaactgtcaacgacagtcacaacatatgctctcacagcaagataaaaaaacttgaaaatacgcagagatgcatctacgctattttacataaaaagagagattcaaaaagtgcaaggcaaaatctgcagttttttgaggggagcttttaggcacatccatttcattaaagcaagcttcagaatgaaattccagtttgttcttcatgacacctgttaaagtctttctttaaacgacaacaaaaaaaagccaaaaatacatcccatcaagtgtacaatggtagtcttgtgtcctaaaagtgaggagttcagctgtggcgagtcc

SEQ ID NO: 95676 - DNA, 1073 bp, Homo sapiens
gcgcagggaggtcagactcggccagtagacgtctctgcagacacgcctgtggtctgggtggtggattgctgctgttgtcatgacgcttataactggaaaccgtttctttcttaggggaacccagaagaacacacaatcctagaatttgctcagttaattaaaaaccttgttggtaagtaggataagtcatttcctgagtaaaatcgactgtgcctgccctatctgttaataacaccttgactagaaagtgggtaattaatacaagctaattgaattggatcaaagcagaactttttatcaggaatacttaagtgttttctaatttttaaggaatagaaagataaaggagggcaggattggtttctcctcagttttcgttgcaggtttgcatgaagtgggagggaggaggagatttgctcccagtgtttgaggcacgattgtattagatcatcctacatgggtgacaactattggatttccgaactggtcatgtcaagcatagaatttcagacagcaagagacagcaaccaccagctgcgtgcttcaggcaggtttgaaattctgtttgcaattctggttatcctggctgccacccactgggggcagtgtagcattgggagcaccccatcaaggtggactcttaggccatgagaaggtcaggtcttccagaccagccctggattgcagacatagagtggatgagcccttggcctcatcttcagacttcctggagctctgaggagtcagactcttggagggtgtctgttgtctggggttgatcctgaaatttgagtgaagtcacaaccagactagactggcaggtaggccaaggaggagtatgccacagtgtgtcctgaggtgaccattcagaccccgcttggctgggttaattcctccagtgtgcccttcctggcatcaggctgccattcatcggcattggtctaatcgacccggatggctggaatcctcccgttgctcgtggcagtagaagcagcggtcttcctcagacatagcctgcatcatctgtggctcccacagctgctccgatgcacttcccagcttttccatcctga

SEQ ID NO: 95677 - DNA, 2088 bp, Homo sapiens
cgtaagactccagcagaagcgaattccttcaggcactgtcttttgagggaaaactttacacagctataccaggtgcacactttaggtattgctgccaccatctcactgtcaaggcatggtctcgaagtagagtgcgggatgtggtgctagatgctttgagtcagcatcactgccccctgggatcagtttcaaggtcggactgtgtcccctggagtttcaaggacacctacgcaggacgggtgtggttttatcaggaggcctaactgttggtttccttccaggtatacggatccgggtctcagacaagggcgttccagtacgtcaggtaagactgtcctgccctgccccagccttagcagtgctttggagcaggggtcatgccaacttgacagacagttcagtgtcttgtatatgttaaccatttccacaacgctaacactatatattgattaaaaatttttaattttatgatgggaaaacttgctgttctctgtttaaaagttaaaatttgcattcatctccatgactatcgtgactcatgtgctaatcttttactgccacctagcggtgtgtgggtgaagttgcccagctctgagggtgacttgggtgatttcagcgcaggtggagttaagagatggccttttgcatccagcagacctgtgaatgccagaatctgacccattgcaaacatggctcgcggggtggaggagatagtccttgtggagggcacaaggtagatagtgttcttatgttgaatttcacgctgaaactaaatgcagataaaaatatattttttgaatagattcacgtggtgatttttattgctttcttggcagcccttataaacccactgttctgttgttccattccgttggtgattaattttagaaggcagtgtggattctcagagtagttaggatagaagcagttgtgtatgccaaagtgcatccaccagtatgtggctattgtaaattctgtgaaagtttctggtatcctgaattgttgtaaaacccagttctatattttgaacccacatattttcactcttcattgcaaataccccagtatgcctgtcaatcaggaagtgttattcctgctgtcttagggccatcccaggggcactagggtgagatggtggctgttgtgcaggtcggggcagcccccaagtcccacctcagccaaagcaaccacataaaattgtacctacccaggacccttaggtaggggtcctgggtaggagtcccgtggagaaatggaactggtagtaaaataaaattttaaaaagaaatcaaaataaccactgtagatttttgctgaaagtatttgtgaatttccatttactccaaaagaaagctgtgagtaaacatttacacagccagtagttttttcctccccacccattaatatcttgcctcaaggggcaaaagcccagaagtgtactataaccaactttgtggcccaaataggcatgcatattctaaaaagcgatttaacagggaaatggcagctgcccccgctttgggactgtgttcatttcaaagcacttaacgtaggcactatgtccctggaggaaactatcatggcacacttctgtatggggaccaaattgtgggcctcccttggattgagtaccgtctttccatagtgacgcgttcttatcccatcctcctccactcacccagctgtgcccttttctgagggagtcttgctgtcctcggttatgtgtgcctgcctcgggctgcctcaccagtggcgcccaggcttctccagcccccacaccacatggaatatcaatgagatgttgtgcggtaaaaggaaaccagtcaggacccattcttctttctgctctcattatctcaagggcattgtgtgcaaaattcatttaaaatagcctcagagacttttctttttgctaggactaaaatattttgagcattcagtgatgcctgtgctatgtgctgtcccagctcaggacaaaatgcaccctggcccgctctgatggcctggtcactgtcctgtgcctgctttgatggtcgtggctcatgctcctagctgccatcacatgcatcgtcctctcccacaccactt
